United States Patent Application Publication US 2007/0083945 A1 - sequence listing, part 36

SEQ ID NO: 243818 - DNA, 261 bp, Glycine max
tttttttacaaactctgagctagaatgtgatgtctctgaagtaggagttggagttgtattgttacaaggtgggcaccctattgcttattttagtgaaaaacttcatagtgccatcctcaactaccccacctatgataaagagctttatgccttaataagagccctccaaacttgggaacattaccttgtttccaaagaatttgtcattcatagtgatcatcgatgatttgggatacatatagattacaaactaagagaata

SEQ ID NO: 243819 - DNA, 259 bp, Glycine max
tttaccctctaggaaagattgacgaccgctccagtgctagttttgcctaacccgagagaaccctttgaggtgtattgtgatgcatcaaagatgggtttaggcagagtgttgatgcaaaatggccaagtggtggcctatgcttctagacaacttaagactcatgagaggaattatcccacccatgatctagagttggctgctggagtttttgcccttaaaatttggtgacattagctgtttgactctaagttcgaggtgt

SEQ ID NO: 243820 - DNA, 262 bp, Glycine max
ttttttctggaaaggagaaacagaagattcccacactggattcttacaatgatttgaattgctcaataagatgagatgcatggaggcgggaggtagggattgcggtgcaacccagttttttcaaatatgaaatctgcaaaaacaattgatatggaattaggtaatgaagaaaacaatttgatgctttaaaaaacattaaaatttcaacaagaaaatgaatgagccaaagtaggaaaaagtttcattttaattgtctttttaa

SEQ ID NO: 243821 - DNA, 291 bp, Glycine max
  unsure (1)..(291): unsure at all n locations
ccccccacntcgtatgctttcccgagaattttttttttaggcttctttgagaagttaatgctttaactaccaatatccttctaataactaaactcacctccttgaaaataaaacacggataaaataacacaacaaatataatcaaacatcaaatataattactaatagtattttagggtgttacagagacaggggcagctgagggatgatgaatttccgaatttccttggaggaggcggagccatatgaccggaatcgccaaacttgtgatttatccttcattattaattt

SEQ ID NO: 243822 - DNA, 220 bp, Glycine max
ccttttcctatggcaaaaaggggctggggacccaaagaaagcaacacataactacaaaaaggaggtaaaaaatactaacatggagcacccgacaacatcttcaaaaaacaaagaattgggaccctcaaaagcaactgatagcctttgcccgggggttgaagcagtaatatgccaactatcaaccaatctctctccaaccggggattaacttaaccatcca

SEQ ID NO: 243823 - DNA, 259 bp, Glycine max
ttgggtgcgaagaggaaaattcgactatcctgctttgacgaatgacaaagtcggggcaaatgaagagaatgagacacagggaggaacccatgttgtgactgtcattcctgcatggccaaatctcccaccagctccataatattaatactccgccaatatcatcccttctcattacccaccacccaatcaaccacaaaggccctccctaaatcaaccacaaaatttgcctgccgcacatccaataccaaacacaaaccaa

SEQ ID NO: 243824 - DNA, 208 bp, Glycine max
  unsure (1)..(208): unsure at all n locations
accactgcactgacataccgcgacgcttctnggcatgtccgtctgatggggcgtatagcctaaaccacacttaccaccaataccttgggcattaatcaggctaaatatgccggacgagtccatgactaaacccataacggggtcataaacagtccccaacataactcggcccaaaattactgctgcatccgacaaacaaggttgccca

SEQ ID NO: 243825 - DNA, 269 bp, Glycine max
tttatactaactcactcaacctgagctacacccagttctccttcacaaaatagcaaagggttccactaatcaatgattgactacaacaagtattctaacctgctactcttggcttcacaagtattctctaagccactactggtgtaacccttaaactccccctgaatctaagaacacccaaggattgttttgtcaccaaaccatccttatctttcacaaacaatcaatttgaagaatcacaaattcaaacactcaagtagtgcatttac

SEQ ID NO: 243826 - DNA, 309 bp, Glycine max
ttaagagacatcttttcccatcatggagggccaataagtgcccgaatttcatattgggcgattctttgaaaaacccgcccccttattgccatgttctgtagtgcatcttatctggacactattagaattgtactgcactgcctacgatgaaaccattaagtcctccaaaaatggactcaagaaggatcccaagttataataccaagtgacagttgtcccaaaaacacttactttggaaaaaacgtacatcatgttctcatcttttgcgtatgcccccacatctccacaacacatctatagaacggtact

SEQ ID NO: 243827 - DNA, 415 bp, Glycine max
  unsure (1)..(415): unsure at all n locations
ttcttgttgagccacaaatatattttcaaaagtttgtctattgtggatttattttcctggcttggtacaatcaatgagttctcacagaagcaatgtgtggaccacatctggcttccctnttcctattaacataacacatgaaagattttcgtgtataggcctaccaaaaacatcaaataatttacagatcatttgtaatatttgaacaataaaataaaagatatagtagcgatatttaagttacctttatttacatattaatattaataagataatgtaatttagaatgaacaacaaaggcatgttttgagaactttgatgatgtgctatattaagtagccatattgttacacctatctttgtttgcatattaataagacattcgtttattaatttctaactatcttaactgtgt

SEQ ID NO: 243828 - DNA, 285 bp, Glycine max
gcggagcctttttttttttcccgagctatgtgggggaacggtctccaacccggaatgggtctacgccaagacaacggcggcattgctagacaagtggccccatatatcttaagaagggggggttgaattaaaatattccaaactgtttcccctaattaaaaatctatttcactttttactcaagtcatgaattcccttaatgacaatcttcctaaatattaattcaaatgaagccacttgaatatgaatataaagcactaataaacaaaggagactaagggacga

SEQ ID NO: 243829 - DNA, 293 bp, Glycine max
accgagcatcttgatatattatatgcctgaatccggcattcgtgtgaaaagttatgaccatttgaatttctcaagaggttccgttgttcaatttcgagcctctcgacatattatacgcccgaatcgaacatccgcgtgaaaaagtatgaccatctgaatttgcatgagtttccgacgattaatttctagcgtatcgatatattataagcctgatacggacattccgatagatagtcttgaccatttgaattttttaagagcttaccgtgttcaatatcgagcctatccacata

SEQ ID NO: 243830 - DNA, 297 bp, Glycine max
cgcctctcaaccgattttttttttacaaacgtcaagtggtcgcgatatgtgaagatgatgttccaagtactttggatttggtccgaccatgccctcctgatttccggctgggaaattggcgggtggaggaacgccccggcatttacgcaacaagcataatgtaaatctttacggttttaaaagctctatagttgggcctacgctttagagttttcattttgttaaggctttgtgtcttttgtttttgaatttataatacaaggatctttcttcatctgttcctggtctctacccatt

SEQ ID NO: 243831 - DNA, 431 bp, Glycine max
  unsure (1)..(431): unsure at all n locations
aatatgagcttaactatgaactaagaggcattatctaggcccaaggcttatctgactntgtaaatgagttccaccccctacaaccacaattccagcatgaatggtggaccttgcatgtggacaactcctctaatcagcatggaagtggagctaggataattttgaagggacccaaccacataactttaggataatcactacactnttgatttcacagccagatgtaatcaggtcaaatacaaagctcacctagaaagcttaagattggctaaagaagttggaggtcgtagggttaactaccaaagtgactccaagatcgctttcaaatagataaacaaagtcaacgagttggcaacgaccctcaactactaaagtatcatttgagaagcttatagaaaaggtcaatgaaatccaagtaatgcatatcaatc

SEQ ID NO: 243832 - DNA, 303 bp, Glycine max
cctgcgagctcgcttctacaattatgtttttttgtacaacatattataatgacttttaacatttaattgaaatacctgaatatcctcccagatcaaatccttttcagttgcagggacttgtttccaattatcatatgtgacatccaccttatcgcaagcaataatcctcaaatatgttcttaatttctttatgtggggaccatcggtttttccaattacaggatcaacatgaaccactggtctctctaccccagctggtctagtagccaacgatatgagtcgtgttgcttttcttgtcttctt

SEQ ID NO: 243833 - DNA, 380 bp, Glycine max
ttactggtgtagccccatcctctatttatatcctatgcatacatgtggatgggctaataccaagaatgtacgccagggtccagcctatagccttcttatgcttcttgagaactgataacagcttctcctcttgctcatcagcaagggagacagatataatcactggaaaacttttgctatcatccaagtaagcatattttaaatttgatggcagagacttcaattctggtgggggcggttggatagtggtataaagagatggtttctcagcctatacctcataaagaaagtcagaggtatatgtacttcctgacacatggttagttctatctgactctagaaaatcatctcacgaggtaaacatcaccagacgtgtaatc

SEQ ID NO: 243834 - DNA, 291 bp, Glycine max
agaccgagattattttgttttagcttaaaattagggagagggaagggtaagctatacttgaacaaccccaaccaagccagtaaatatgaactaacaaaacaacaaatcataataagagcaaatggatgaaaagaattcacataatgatgaagaagaattacctatgcggagtcttaaaaattgatggcaagtcaaatggtggggaaggcttgggtcgttggaaagggataggatacaaagttgctgcatgtttggatggtaaatgctgacgagtgaagagggttctgagtc

SEQ ID NO: 243835 - DNA, 285 bp, Glycine max
accacctacacacaatatataggtgaaactcagaggaactagcatgcctaaaaatcggaggtcctagatatgcgactctgacaacacggtacaataatgaagacatatgtgcgataaccctacacgcgattaaaaaaatcatgggccacaaccttacaccaaacttgaatgtgtcaaccagccgctaacattatatccaagataatactgacgcaacgaatgaaactcgcgaagggagataattgagagattcagtataaagcaagctcaaggaccgccagatga

SEQ ID NO: 243836 - DNA, 276 bp, Glycine max
ttttttcacaccacaaacagtaggcaggagggcactctcacccatctccattacaagcctttcttattcctgaacacacatgggcattaattcattgatagaccatttatctttatgggtgatgaaggaaatcgtaaatggcccatatttatgcggaagggtgttcaaaatgaaatgccctaggaaggactcagacatatcgacctctaattatttaagtggagccgaaatatctggcattttcatgatgtactcaagcacacctttcacactggt

SEQ ID NO: 243837 - DNA, 269 bp, Glycine max
ttttttttttggggggtttgattttttcacacgcggcctgattctacgcgaggctttatccgctagggcttgccaacctcttcacatccctggttatcaaactagcgcttgcttgataccctccggtatccgtccacaactcgccactacgcgccgcaacagtgcaaaggatcacggaatgctgccccaaaatgaagcggttacattttgcgttcaatggagagatgcacaacaatttctgcgaacaacatgctcatcaatacttggga

SEQ ID NO: 243838 - DNA, 276 bp, Glycine max
tttttctccatcaccgccacgggtccctagaatgagcttgttgcaactcttctaaacttggactgataacatacagtcctgttgaaccttacctcccccactcttttgtcatgccgagactcagaaaacccaacaggttttgtcttttcaatgtactatgaacaaaattcaatagcttcttctgcaatgtacctttcaacaatagatgcttcaagacaatgtagattctttgtatacccttttaagatctttatgtatcgcttaaccggggacatc

SEQ ID NO: 243839 - DNA, 390 bp, Glycine max
ttaccatgtttcttatacattaagagggccttacctataagatctatcaaaggctgcattgagtacacaacatcaaaatgacactgtttcagagtcaacatcaacaatttatacttgataactttgagaatgaaaatatcataatgatactttgatgatacatcataatcaagacaagatagattctaagatgactacctcataatgatgcattgaagtcaagatcatgcagtatctatgcattataatgatactgcatctcggtctacataaaaatgatgaagatcttgactccgaagactgaactttcaaatggagttcataatgactaccaatgtattaaagtcaacatcaattctgtcatataccgccacacatacaaagggcaca

SEQ ID NO: 243840 - DNA, 242 bp, Glycine max
gaggacactgctgcggaccgatacaatcccggcgcccccctggccgcgacgctggagcacacgcacggcaaggcagcacaaccgcgaggcccccgggccaccgaatatgccaaccacgccgcactcctcgcgcggcttatcatcgccgcaccctcccacagcatcggaaaccggggccctggagaaaacgagccggagagggagactgggggttccggggaaagggtgaacgcacaaaagga

SEQ ID NO: 243841 - DNA, 379 bp, Glycine max
  unsure (1)..(379): unsure at all n locations
ccccaagaanggataatatcaatgtgaagacgatcttttaagagcaaaaatattattccaaagataacttgaccggcatcatggccacaaccccaaatgtctccaacagcagcactctccatttgggttcggccaattgacaatggagccaaagctgcaaggtggtcaagccctgatagtgtgtgcaagcaaccggcaaagaaaccagtccaagcactacttagaagctcagtgcggattagatttccaccaactgctgcaacagcagggccactggtcttggcaagcattttaaacgttgcaaaagctgcacgagcaaaagctggttggattaatagcacaacaagaacacagagtattgcatatgttcgggctgtta

SEQ ID NO: 243842 - DNA, 291 bp, Glycine max
tccaaggcaatctcttgtggtgaagctccttcttccttggcttattccctagtggatggtgcctcccctctcctcttttcctttgccttccgctgtatctccatggtgaaaaatcaccattgaaggacctcattgaagctcaaagacccagcctccatagaagctccacaagcaagcttccatcaagtggtaatcagagcacaagagcttcaagcaggtgctccttaaacctccattaatttttttgctttaccttctcttccattgttgtttcttcatttttttctccct

SEQ ID NO: 243843 - DNA, 377 bp, Glycine max
  unsure (1)..(377): unsure at all n locations
ccttggcttattcacatagatcgaccatgttaatcgggtggtctatttgcacaagattgcctacaaacttgcaaggtgtaatgcgaggagcatggaatgcaacgctacctcgaaaatgagaatatggatttggatggttgtccacccaaatctttccatgaactttctaacggactngtcatttgcatgacataaactggctaacgctgccaaggtcatgccgtgagacctgctagtggcgtacttcacactcaatcattcgacacgggaggctatactatcaatggacttatgtggaagtctgtcatatcctgccgatgaggattggagtcattgacagaggtctcacgtctgaggccacatctaatgctaaccac

SEQ ID NO: 243844 - DNA, 260 bp, Glycine max
aaacccaggggccaaatgtatgaatcattggactatccttccgggagaaatgcccacggacatggaatacacaccaccttaactgcacccggtaacatggggagcaatgccagccttttcggttttggcacgccgttctgccagtggaatgaggtacacctcaaaaatagctgctcataaaatatgctggcgtttaagctgtgctaactctgacatattggcagctattgatcaaacctgtcgctgatggtgctgatgtg

SEQ ID NO: 243845 - DNA, 261 bp, Glycine max
tggacattattgccaattataatcacattttcaccgccatattccctgaatacacaacgaacactattaaatattcataatcgcatatataccaacaattaaacaaagatatataggacacggcgcagattccctgtataataaatgcgctgttaaccttctatatcatgagcacaagcgggcctacctatgatatattaacttccacggctttattcaacaaatgatacttcaatggttttgataacccaacaagttaat

SEQ ID NO: 243846 - DNA, 290 bp, Glycine max
cgagcagttattttttatcgaagaaaatatgtgggccaatcatcgaccagtacaaggaaaagctaagcctagcagcgactcatgagcaaaggctagaggacgagtacgccaaggtgtcaatcctacaagcggaaagggaagctagggaaagggtgatcgattcattgcacagagaagcgatgatgtggaaaaataggttcgcctttactttgaatgggagtcaagagctcccccgactgctagccaaggccaaggcaatgggggatgtgtactcggcccctgataaggtt

SEQ ID NO: 243847 - DNA, 331 bp, Glycine max
ccctgactgaatgactggtggtgtctccaagaaagcattcaacgatgtagcgtcaaattttattagcttccttctgactcatacctattttggtgatttatcttctggatcatacaggttcgagtaaaattctttaactatggccacatcgatgtgcctgtccatatgctgtgtcagcgccttatgccagttgtgctggatgagctctcgcctgaactcatcgtactcagtcacgaagaggttaacgttcctctttggaaggatgttccgggagtgaacgttatgagaataacgctcccaagcaaccttggaaacaactgtgtggtatcat

SEQ ID NO: 243848 - DNA, 266 bp, Glycine max
tttttttcgcccccacaccacccgctacactcttggccttacatatcttcagaagggggggtccgaattaagatattacaaattatttccccaattaaaattctttttcactttctattcaagttacaaattcccttaacaatgaacttcttaaatatcgattcaaatacaaaaatctgaatataaatataaaacaataataaataaaagagtttaagggaagagaaagtgcaaactcggatttatactggtttggccacaccctt

SEQ ID NO: 243849 - DNA, 372 bp, Glycine max
  unsure (1)..(372): unsure at all n locations
cagctagggaagcggaaccggtgctacagcccgtaataaacttgggccgagacagaaacacgatgggtttcaatcggaggtatagtcctcaggcctacccttatggtttgcctccagacttcactccccgtgccgctccagactatttgagccaagcccctaccttcgaggggcagctccctcctcatgccgactatcctttgtaagaagatgatgaaggagatgctcatttaggccctctacttcccctcaaggatccggccccccatgagtngccccaaccaaacatagttcgccatgtcccgtcttcatccgcacccgttaaggaactcattccctttgcataagacaagggaaagattgatttacttg

SEQ ID NO: 243850 - DNA, 188 bp, Glycine max
ataccaaaagcctaccccatatgagtacttggaactacaacggaaaaaagcgaggggggaattaccaatgctgaaactttggtgcttattacaagaatccaagaggggtactcaaacgcattggtgtttcaaatggaaaagaaagcgaaagggcactcaaataataacacttactgttggggactttt

SEQ ID NO: 243851 - DNA, 395 bp, Glycine max
cgcaaaatgatgcagtgctgtgtcattttattccgttatgtttatacgtgacaaaatgatttatttaataaaataattcatattttatttttttatgtaattgttctttaaatcaaccgtagtcgggcaattcatatataatcagtcatacatttcttaattgatcatttttatattttcttttaactatactctctatatttttttatacgcaaactcattacaacttaccatatcttacttagacaattggttcaattcgatatgtacaatgatttattggtaattaaagctctattgataattcaaataaatttgacgtaaaggctgtatcgaatgtagtgtaaataatcacgtgagactgtaattataatgaaaaatagcatatcaactat

SEQ ID NO: 243852 - DNA, 287 bp, Glycine max
cccccagctttattttgtgttgtccacgctacatttgttaagttgtccaaggtggtcgtacaactgccctagttaatgaggaccctggacaccatgaaattggcgaccacaatggagataatcatggggtcttcctcgtggatagggttgatgcccttgaagtctttatcaatggaaatggtgggagggagacttcatagtgatggtatgttaacacagttgatgtcgatgtcctacatgacatggaggtgatgcctacgagactaactggactgccctccatagga

SEQ ID NO: 243853 - DNA, 391 bp, Glycine max
  unsure (1)..(391): unsure at all n locations
ttattcatcataatccctcttgttctgcaattccagaaattggttaattaaatatcacaaagggtaattgattaatttgtttcaatatgagaatatcaattccttctttgttgacaaaataatcaagtatcatgtctggtagtcaattatagattcagacaaagaacttttcttgtttcctggagttgggtaaccgattatcaaatgaggtaattgattatcctaagttgcagagccttccttgttcttaaattggctcgggcatttgattaccaagtaaggtgatgtaatcctccgaataaggggacccatcaccataaccatggctaggagactccagtaagattangccagcaatgtacgagaagaccctacggtctcatgagcctat

SEQ ID NO: 243854 - DNA, 320 bp, Glycine max
aatcctggccttcagatcgataggtgtgtgggctaaaccattttttctttcaagcatcatgagtcaaaatgtcaagtactcgagataaggatacaaccacttgttaaacaaactttcatcattagctccgaagctataattaatagtaaagcttcaattttatttcatcaaaatttctatcccgctaagtttatgggatcactgtcattataagcaccataggccagactattaagtttatgaatcctaagaaaaatactaaacaggtaaagccaacacctatgtttttgaatgtcagccattggcaggacataagtagg

SEQ ID NO: 243855 - DNA, 382 bp, Glycine max
tatttcagacaccggagaacacatcatatgtgctactggtgagctgcatcttgaaacatgcgtactagacttgaaggacgatcttatgaatgggattgagatatcaatatccgaccctattgtttccttcaatgagacagagctggagaagtcttgccacactgtgatgagcaaatcacctaacacacacaaccgtttgtacatggaaacaatgccaatggaggaagggcttgtggaggccattgagagaggcaagaatggtccatagaataacaacacaatggtgtgtgaaaagtttggttgtgacaacgatctagccaagaaatattggggtttggtcctgaacccattgtacccacatgatggtggatgcatgtaagga

SEQ ID NO: 243856 - DNA, 232 bp, Glycine max
tttaatggtgactttccaccatggacatgctgtggaacacaaaggacaacacgcgagaggaggcgccatccactaaggaataagccatggaagaaggagctttaccaccaagatgagccttggataaaaagcttggagatgacgcttcaatggaggaaaagaaagagggagataaagagagaggggggagcacgaaattgaaggatgaaaaagggagagaagctgaactttg

SEQ ID NO: 243857 - DNA, 216 bp, Glycine max
  unsure (1)..(216): unsure at all n locations
ttaatttttgtttttttntttggggcttttttttttccccacatacaagccttttgtttatttgccttttcccgcaaatctttggttcttcttatttcttttttgaaaaacttttattctttttttttatttatttttttctattattccatacttttcatgaatttttccttttttacaactacacactcttttcaattttataattttaattcc

SEQ ID NO: 243858 - DNA, 341 bp, Glycine max
  unsure (1)..(341): unsure at all n locations
gccgccatcgacccgcacctcgncggagacccaaacagtaccccatcggcggacgttaactccgccgccgtaatctctggtatggcgtcgaccttgggcggcgccctcatctgattcagcacctcaatcggcaatgtctccggaaccctatacagaaccccttccacaccctccactccgttcacgcctttcttcaacctcttcgccagcccctccacgtgtccgtacatcgaatagaacacgatgaagaccttcaatttctcgccgcccgggagagacgacgacgacgacgctgcttcacgcgctggcgcgtagggttcgcgcgcgtgggcgttgtctgg

SEQ ID NO: 243859 - DNA, 283 bp, Glycine max
tcttttttcttccacccgcgcatatctatgaatttgtcaacatgataaactgactattaggataatctaaaccaaaggccacttcctattattttattttgtatgctttattttgttctcctactttctttacatggcaagaggaggttccctatgcttatcacctggttttaaattggacaattgaaaatttcctacatgtcttctggatgctaatttctttgcgaagatttcatatgttaatctgggatttctgggaatggtggacactggacatggttcg

SEQ ID NO: 243860 - DNA, 398 bp, Glycine max
acgcgccgcactacatacaaggctgcaaaagagtattctaatatatcaattgcaaacactaaaattttctttgctacaattttgtaactatcttatctttatttcacatatgaggagatttttggttgatagagaaaatattgataatgtgtaatgtgtgcaaccggaagctgaattagaaccaccacttaataatgtggttaatgagtttaatccaaatgagattgtgcgtgatccacgtcgtaggaaacaaaataatgagtatgctccggatattcaagaacaagtgatgagggcatatatattgaagggtccaatgcaaccagatttgttcaactttcctccgactcatattggaagggtaaagaacattattaaaacatgtataaaattaacat

SEQ ID NO: 243861 - DNA, 296 bp, Glycine max
agcacgctggatccgttttttttttttgtatgatatccactccacaaggtctgaagtagaggaaaccttcaaccctataacgcaacgcgggggacaaaagtgggcagttaactcgaatggccatcattgccaatgcggaaggtatttctgcgcttcactatccatgttcacacattattgcagcttggggttacgtgagcatgaactactaccaatatatagatgctggttacacaaacgaccacattttaaaagcttactccgcacaaatggtggcctcttgggaatgaaatgac

SEQ ID NO: 243862 - DNA, 265 bp, Glycine max
atcaccaaaactctttgaatcaatcttgattcatcatgaagcttgcttctacacatatattagttgctagtttgaattggatatggagaaacccgtaagaaaagatactttttgtatgttatgcatgcttggaggcgttgtttcgttgttgcgtttggagtatgttttgtgacatatggcttgttagaagttcatttgaagttttgtctatacatcggggcttgttcttgctataaatcgagttatggttactttttcaatcttg

SEQ ID NO: 243863 - DNA, 465 bp, Glycine max
caccataaaccttgaccattttgttattgtcaatccttaccctcggaagcaaaaaagaaaagaatgaatatttccaatcaaagagaaagcataaagaaaagaaaggaagttcccaatcaaagagtgggagaaagcaaaaagaaaagataggaaattcccaatcaaagaatgggagaatgaaaagaatatgaataataataataacaatattaagaatgaaagaaagctcctgatcaaggatcgaaagacaaaaagaagaaatgtgcagaaaggtctttggaccggacaatatctgaacaatacagaattgtcaccaaatgaacaaaaggaaggataggaaaccatgacctaaagtggtcttctccctttgattaccaaccaaaatcctgtgcgttggcgactttttcaccccgcactaaacaacaacagaaaacgaaaaagccaacaaataatctaaagccaaaa

SEQ ID NO: 243864 - DNA, 285 bp, Glycine max
gctcccttggcgccgatcgatgtttttttcctttggcaatcgcttctgtgaacaaaaatgcacaccattaaattgcaaaaaaatgactaacttcacacaattctcaccccatccaatcaaataaattaaaggaagacccagacagacatggaatgatggagcattgacaatattcacataattgtcaaaacagaacattaatataacttttggatgagatatatcccataagttcatcagacatacttcaatttttttggggtgtggtggtgttgggaggggggg

SEQ ID NO: 243865 - DNA, 447 bp, Glycine max
  unsure (1)..(447): unsure at all n locations
gcacagtgtcatncatttttcgttatacttatcacctctatcatatctaataatattcacatttatgtctaattgccattttacttcattgtagtaaattactaaggcatccattgcctaagaaatctcgggcaataagtagacataaccgtaacgtgaataatcatcaataatggtgataaaatatcattcctttctgaaagaactaacatcaaaaggtccacatatatcagtatgcacaatttcaagaaactgagtgcttcttgtagctcctttctttgtatgttttgcttgttttcccttaatacaacccacacaaatatttatatccgtacaatctatataagaaagaatctcattatttattaatctttccatcctttctctagaaatgtgacctaaacgtttataccacaagaaaacagatcgttcattcactaaactatg

SEQ ID NO: 243866 - DNA, 311 bp, Glycine max
ttcccccaactacgcttattctccaaccaaatttaacatcttttttctatctcgtgaggacgaaaaacatactgaaaattttgcaaggataaattccgaacattttgatatttataagaacaaaaaatatattttagccctgtttttattgtcaaaaaaaaaaaagagaaatgctactaacattttctttaacacactccttcatacacactttctcttatgtgttaaaatgtatttagttgaagaacaagctccacaaaatcttgaacctaccaagtgtgatggttgggattggcatgagtgggatcatt

SEQ ID NO: 243867 - DNA, 422 bp, Glycine max
ttgacagcaacaccgttgtactaaccaccaatagtgccctcaatctgaatctcttgccttggacgtgtgtggtggatgttgtacagccacaaattgtgatttgattttttaatttttattatgtaatttatgattgtttttaatcaccacaaattactctaaaatttaactaaaaaatgctacttaagttcagatgttcaagcttatatcttgacaaaaaaataacattttgaatttttttaatatatataccagattactaatgtatatatacttgttttttttaatatgagtacgttaacaaattatacctagatattatcttaaaataaaccaataatataacttattaacacactttaaatacaccaataatatacctagatattctaattaatatataatacgagtatattatttta

SEQ ID NO: 243868 - DNA, 272 bp, Glycine max
tttccaacagcaccaaatatcgccgtgtttcaccaatacaatattacaccatatacatggcaacaatatgagtttccatgtgcaagaggatgggcatgcacttgcgccattgtactgcaggaaaagaaaatgcaagctgacctctattgctacagtcgatctaggtgaattcacaaaattctcatcttcgttgactggcttcatattctcaatttttcccttcagcttgcatgcttcaacttctatgctgagagaggagaatgtatcacata

SEQ ID NO: 243869 - DNA, 296 bp, Glycine max
ttctaacgctattttctttttgatcataggggtcgtcgctgacgctcattccatagaggaggaccacaagtggaggatcatggggaattgttcaccggaacacaaaggttaactaggatgcacaaaacggggacggaacatatacgggtacggaaaaatgataaatttagaaatatcaagattagaaaatgatttttttaatatttttattattaaaaaaaataaaaaaatatgaaaaataatgatgtttttattagcattttcattatttgtttttattttttaaaaattgtttt

SEQ ID NO: 243870 - DNA, 405 bp, Glycine max
gaataaggtgttttatgccatatcctatgctagcaagggtttgagtgaaactcaactcaatcatgccaccacaaataaagggatgcttgccattgtctttgccttggatcaattccattcatacttgattagtgccaacgtaattatctacattgatcacttagttataaaatatctcctttctaatgataactctaagcctagattaataagatgttgaccacctctcaaggttactgaatgaaggggtgacaatgaaggagaaagatattgttagtgaattctctgatgaggcattattatatattgaagataggccatggtttgctgacatggctaatattaaagcaagtggtgatattgcctatgatttgaattgcatcaaaaaataaagtttttgtgatg

SEQ ID NO: 243871 - DNA, 273 bp, Glycine max
ttttactcgaaaagcctttgtggtcggtgatcgaccaagccggcaacccacatttagagaatctagtggataattaaggtaagagggaaatattatcttttaccaaaaagatagagatatcctctaaaattgaatattatctattattagaggaaatataagataatcatatattttcctattttatattttcttaaaagggaaattgagattttatcatccaattttacctctataaaagaaaattattaaggttcaggtaaatcaactctt

SEQ ID NO: 243872 - DNA, 275 bp, Glycine max
ttgcacgaatacaaatatcttgatgcctactattgatatatagcattgaccatacatgaaactagctagacagaatagaaattgctgataatagtaagctccctaggtagtcatgctacgtaaaccactactacaagaaagcactttaaattatagtattaggtagtaatttctgcatttgtgttgatcatggtcgccctcacataactgacaggtgccctcactttaaatttccaattggccggtgccacattgaagcttgtcacagttctacc

SEQ ID NO: 243873 - DNA, 381 bp, Glycine max
  unsure (1)..(381): unsure at all n locations
aagaggcatatataatcatcctgctcggagaatgaaaaaactggggcaaataaatacggtgaggatgatggagaaacccatgctgtgactgccatccctgtacgggcaagtattccaccaacccaacaatgtcattactcagtcaataacaaaccttcttcttacctaccgcccatttatccacaaaggccatccctaaatcaaccacaaagtctgtctaccgcacttccaatgacgaataccacctttagcacaaaccacaaacaccaaccaagatatgaattttgcagcgagatagcctgtagaatataccccaattccagtgtactatgttgacttgctcccatatctactngaaaatacaatgggagccataaccct

SEQ ID NO: 243874 - DNA, 266 bp, Glycine max
ccccatccgcctcagttcttttgctgaacaccctcaaatccacggagatatcgctagtgtaaaagatctaatatcgtgaattaattaaaatttataacaaaaatatgaccttaattcaacgttaaaaacatttacaatatcacaagtgtctctctctacctattgaatcatatattaatacttttatcgcacccacatagttgtcactcgtatagctgaatcttgcatataaaaaaaaattgaacataattttctactttaaatac

SEQ ID NO: 243875 - DNA, 397 bp, Glycine max
gccctttattggaccactagacacggtgcagattgagaaactgccaccaagggcggttgataatcagccagttcccatacccttggctattctgggccacaagactcttccgactaaccacgggccaaagcagctggtcttattgcagtggcagggacttcaccctgacgaaacgtcgtgggaagactggtcacgctctatgagctttatcaccttgaggacaaggtgttgtttgaagcacgcgggaatgttacaagtagcagctatgaaccgcaagctaccaggcccaacagtgattacatgcaggagttagtatcaggaaggcccaaatgaggaagcaacactcctagctatctgaaagatacgtgctagaacttaagtgtcacgatgcatgcaa

SEQ ID NO: 243876 - DNA, 303 bp, Glycine max
agctcggatgttggccaaagttgtcttttttttgtaaaaccccatgttgatgccatcaaaatcattgaagacatgtgttatgacccctacaacaactcagggatatgaggattatgaagaaaggcgttaactagttggggacaaatgaatcccaaactgaattggaaaattcaatgtaagctctaccactaaagattgagacactcacgagaactcaagctcaagtcctcattactgcaccttcattcccaacctatgattaaatgtaggattgtgcatgggccaaaagaatgcattattggt

SEQ ID NO: 243877 - DNA, 356 bp, Glycine max
aatatcaattaagctgtgataaattacccaaacacataacttactatattctgagttacaaaattttagggtgttacatacagcctataaaggtaaacttttgagaaggccaggtaatttgcccttgtcaattttgtggtggtgtatattcccacttacacaatgcaattgatgggtgccacgacatattcgcgataacgaggatatgttgggcattaatttatttggagtggaaatctagaggggagcctccatctgtgtaagtgggatactattattcagaagaagaggtctatgtgttcgagtagctagactccataatatcgctttggttgcaaagcttatttgggatattc

SEQ ID NO: 243878 - DNA, 286 bp, Glycine max
aaatggaccttccttgacccaaatactatgaaagccccccggagccccgtctctccttcctcgccccgaagctcactacaaaccttaagcgaaaaaccatgacaccaccacatcctcaaggaattcgggagcctcggaatggccgcgggaataagggtggggggaccagcgtcatcggacaacatgccgcgcaggccacgccccgcgatacaatgtgagccatacacgatgcacacggcacacgggctaaagggcggacacgctgaaaacgacgttggctcccaaa

SEQ ID NO: 243879 - DNA, 293 bp, Glycine max
agcttggaaggatgctccattgtttttttttaatgagggacataaagagagagggggcagcacgaaattgaaggaataaaagagggagagaagtggaactttgaagtttgtttcacaagactctcattcattaaagttacaataagtgttacacatgcttctatttatagactaggtagcttccttgagaagctttcttaacaaaacttccttgagaagcttctttgaaaaaacttccttgtgaagctagagcttatctatacacacccatctaaaaactaagctcaccttct

SEQ ID NO: 243880 - DNA, 291 bp, Glycine max
ctagaaacatggagacgcacatacgtaaatcctgccaatgagttgcacataattacaatcccctagccatcatccatgtgggcatggaactacacgggccattctcgttttccaaaaggcaacgcaaggacctactaaaggtgatccatgactgtccataatgggtgcaagctaaacccttatacataatatcggatcacaatgagcacacctttattgtggaagaacacagacacttaattcgagatctccaatacagggataacaaacaattgattactatttacatac

SEQ ID NO: 243881 - DNA, 284 bp, Glycine max
ttctatttttcttttttttacttacttacccataatgggtgcgcaaacatcctatctttgggttaaaaatcccctttactttcttggaagcttaagacttcaagatctgagcccttctttgtaacacctcaattctttatgtggatgtggtagacaattttattgctttgtcgcgcgattaagtattatttttacactattgaaatggcaaaaaaaagagatgttaccataggatacatacgcatggttaaactcttaaatttttaacctaaagtccaaaaaaa

SEQ ID NO: 243882 - DNA, 414 bp, Glycine max
gaactacataatgagatataatcgtgcttatcatgaagatgatggatgcatgagtgtatttacaatagagggttacaccacttaacacattcatcataccacctatcataaggatatggtgcctcataatacctaatttggacaccaaatagaacacattgatttatgttcttatgaaccaaacccttatccaacaattcctttacttgaggaataacctctaacttcacaggtatagcattgttaagggatgtttcccttaatatgagaaagtagaacgattgtttaagaaggagtgctcatttgatatcaccttctgatgcaaatggtgtcccttcctaacaatcttcttggaggaatccttttactctttgtctattccttggcctttgaagacaatgccttactatctct

SEQ ID NO: 243883 - DNA, 293 bp, Glycine max
taacagtctattttgtttttttcgaataaaaatctgacatgaagtagttattaaggtaatcattgcttcccatccctgaaaagaatagacatttgtttaggtagctattaagtgattcattgtctcctctgaaaaaccttctcaactgctgcactgtgttgtcaaagttagccacttgctcattcaatgatgtatgagccccctgcaaacaattacataagaaaatcacaggaggtgtggctcaggaattattgtgcctcacagaaccatatgtacatttaacatgtgcttaa

SEQ ID NO: 243884 - DNA, 321 bp, Glycine max
ctctacaccaagcgcccgctcgatgccaccccgtgcaatccgttaattttttaaccgctcaatcgctaatgaatcaatgagacattctaaatgaataagatttggccttaaacataacttacctctctattgatagctattctaattttaaagccccttgtcgaaaatgaatacatggctagaatttaggaaaaaatgaagatgacaaacctccttgtgcaatttaattaaaattgggtcttaaacgagaagcctccatattgatattttcatccattaccatccatacttgttacagacaaaaatttcaatatctaaaaa

SEQ ID NO: 243885 - DNA, 276 bp, Glycine max
accataaaccttgacccagggggagaatgtcaacccttaccctcggaagcaaaaaaagaagagaaggaaaatctccacccaaaggaaaaaagagaaggaaaatttccaactccacagaaagcaaaaaaaagagagaaggaaaacttccaatcaaaggaaaaaagacaggaacggaaatccccaatcaaagagtgggagaaagaacaaagaaaagaacgaaaaaaaaaaggaaaaagaagaaggaaagaaagctcccgatcaaggatcgaaacaaaa

SEQ ID NO: 243886 - DNA, 334 bp, Glycine max
  unsure (1)..(334): unsure at all n locations
ggcaaatatggtcatcctgctttgatgaacattgtggcaagtgacaagggtgagaatgatggagaaacccatgttgtgactaccattcctatatggccaagtttcccaccaacccaacaatgtcattactcagccaataacaacccatcttcttacccaccacccaattattcacaaaggccatccctaaataaaactacgaaacccacctaccacacgaccaatgcttaacaccacttntatcacgaaccgaagcaccaaccaaaagggaattttgcagcaaagagcctgtagaattcacctcaaattctggtgtcatatgctaaatggtagc

SEQ ID NO: 243887 - DNA, 292 bp, Glycine max
cttaatttgattcttttttgaagctagagcttagctacacatacctctctaatagctaagctcacctccttaagatgagaagctagagcttagctacacaccccctataatagctaatctcacccctatgccaaaaaacatgaaaatacaaaaaaagtccttactacaaagactactcaaaatgcctcgaaatacaaggctaaaaccctatactactagaatggccaaaatacaaggcccaaacgaaggaaaaacctattctaatatttacaaagataagggggctcatact

SEQ ID NO: 243888 - DNA, 393 bp, Glycine max
gcacaaaataccataacacaccacagcgcctactatgggaagacagcaccggaggcaacaaaaggagcagccaacgcagagatacccaggattcgtaagcctataattggaaggggtcccactgcagtggcagacaaaacaccctagatggggatatccaatgaacagccgaggcaaacacacaatatccaaccgagcatgatgcctatgctcaatgctacctccaacgcaaaaagaatagaagcacatagactgaacatccatccgcgcgcatacgaaggagaccataccaatgggaaacgaaccgccgccttagaacactatggaagcaggatcgacacatacccctacaagagcgaaccgcggaaaagcattgcgccaaatatgacgaac

SEQ ID NO: 243889 - DNA, 284 bp, Glycine max
agcgctttttttttttaacgttctctcgcacaagacattctattaactaaaaaaaatgcacccatatacaatcaaggcagcttcgttacctaaattatttacacgtacttccaaggtgtatttgttacttacatcacacacatctccttggctaaatttacatacatgcatactcaaagcattttgaggtaccaaaaattgcacatgtgcacattttggtatttctaatacctatacatacacaaacttcatgatgaatcttgactatctacacaataaggcgc

SEQ ID NO: 243890 - DNA, 285 bp, Glycine max
gggtatctttttcacccttcccataactaagctcacctacttgagaagctttcctaagaagattccttaagaagctagagcttagctacacatacctctctaatagctaagttcacctccttgagatgagaagctagagcttagctacacaccccctataatagctaagctcactcccatgaataaatacatgaaaatataaaaaaaaatccctactactaagactactctaaatgccttcaaagtcaagactaaaaccttatactactataatggtctaaatac

SEQ ID NO: 243891 - DNA, 301 bp, Glycine max
atgcagctttaacattggaccctttttatttccgccctgcaaagagggagatgatgtaaatcgagggtgaactcgtgtccctgaatccaaaccgggacttgctgtgataaagtatcacaggcaagggtgtggccgttgcccaccatgacctacaatggtggtgtctgggttgacggcaggtccaaaaacttggcaactctggattggatgaagttgtgtgtacttcctccatccacgagtatgaccacctggtgacgttgtacggaacccacaagtccaaaagtttgcggcgtccgggtgc

SEQ ID NO: 243892 - DNA, 305 bp, Glycine max
ttcccagctcgctcacacaatacgttttattttttttcgaacactgcaaatcccacaaaggacatatggttgaatcaatttacattaaaacaacatggcccatcacatcttgtcaaagtgaatctggaaataacacatggacctcaccagttttcaattttttcctgcaaattggcataattatgtgttggcagccacaaagaaacgatgtaacttgatccaatcttctgccccaactttgcaagctggttactttgatgcatgacccttgacctgatgaacctttccttaaaaacatgtgcttg

SEQ ID NO: 243893 - DNA, 334 bp, Glycine max
ttttcccaaagacattatgaccttcagcacagtacaacccggtggggaatcatccaccttaatggtcattcttcaactacacaacacacacttattcccaatgctgttgccaacaacctacttcctcaccatacagcacacaacacacaacctcaaacaactacagtgagctcctcccaccttccttaaacttggaggcaagacttgcaacatgtgttttacagagacaacctccttaacttactatagagggaaatggtaccattaataaacaatccaaatctacatatcctttcactgtcaaatccaaatgtatgcattgctgagtcggaaa

SEQ ID NO: 243894 - DNA, 317 bp, Glycine max
ttcatttccacgaacggtgtctcgccacatccgacagtagcgcagcttgctttttcgccaacagaccacaagcaagaaattaggtgcatatagagctactgacgtcttggaattgatacatacagacatttttgggccatttcatacaccttcatggaatggccaacaatattttatatcattcatagatgattactccagatatgcatacttgtttattatacatggaaagtcacaatctttggatgcgttcaaaacatttaaagttgaagttgaaaatcaactcaacaaaagaataaagtgtgtcagatctgact

SEQ ID NO: 243895 - DNA, 407 bp, Glycine max
agatctctgtccttttttgcagcaatctggagtcaatgagcaacctgaagcttatgctgcaaacatttataatagaccccctcagtagcacaaccaacaacagcggaataattataatctttcaagcaacagatacaattcaggttggaggaatcttccaaatctgagatggacaagtcctccacaacaacaacagcttgtccctccttttcagaatgttgctggtccaagcaagccatatgttcctcctctaatacagtagcagcaacagcggtgactcaaccccatcattctaaatgtggtgaaaaaggacgtgaccaagctcttacgagctggaatcatctaccccatttctgacagccagtgggtgagtccagtccaagtggttcctaagatacaggcctcac

SEQ ID NO: 243896 - DNA, 282 bp, Glycine max
attttcttttttgtggggagaactgaagcgaaaaggggttcacccccttaggcacttctctctctttcgaatttgcttggaaaaattgtttccgtgaagaaaatccaagccgaggcgcttccaaaacgtttccgtaacgtttccgtgaggaatttcgcgaaggtttcgaccgttcttcgacgctcttcattcgttctctcaccgttcttcgatcttcaacgggtaagtacctcgaaccaagcttttcgattcattctatgtacccgtggtggtccacattgt

SEQ ID NO: 243897 - DNA, 390 bp, Glycine max
aggccaaatcgatcatcatgctatgataaatgccaaaaaaactgaggcgaatgaaaacggtgagaatgagcgagatgcccatgctgcgactgccattcctatacagccaagtttcccaccaacccaacaatgtcattactcagccaataacaaaccttctccttacccaccgcccagttatccacaaaggtcacccctaaatcaaccacaaagtctgacgaacaccacctttagcacaaaccaaaaacaccaaccaagaaatgaatcttgcagcgagaaagcctgcagaaatcaccccaattctagtgtcctatgctgactcgcctccatatctacttgaatatacaatggtagccataaccctaaccaaggttcatcaacctccatttc

SEQ ID NO: 243898 - DNA, 270 bp, Glycine max
catgtggcactaggcgggggccgggagatggtgcaaaacgattctccacatccacaaatcacgtataacccaccatcccctgttgcccacctccaactgagctcacgcactcccacggagtccttatcctcgttcctctcaacgtcgggtccccatcaatcctcccaagcttccacaacatccaggtaattccacatccaatcatcatggactaacaaaaccaagcaaaacagggcaaaggcagaaaactctgcccaaaacacaattcaa

SEQ ID NO: 243899 - DNA, 220 bp, Glycine max
taggaacgaaacaccccccatgccttcccatgacaatacttcgttctaagcaagccagaattataaaaaagaattgcacacactgccttatatatcaaacaacggaaaaaagatcttatttagacagagactaattgtttacatcacaaccaatgcgaaaacacgaagaagaaagagagacaaatggagaactgaagcggataaagctactatgaaattg

SEQ ID NO: 243900 - DNA, 387 bp, Glycine max
atgttataaacgccgaagcacgctactctagaatgatacatgatatgaagagttgatcaacatgacaaaaatgagttatctacaaatccaggccaatactttggtagaccacttatcatgtggttcatattggagcatggtttcaaaccctgagattaatattgctatcataggttctctcacagaatatttcttcctatagttcctctaaccaccattttccattatcataaatgattttcgtcaatgagatttgggtaattatttattccttattttatcgccactaccgtccttttctccattctcttctatcacataacccaccatggggcagtgatgatataatgggaagaagataagaagaatctctcctgttataaacat

SEQ ID NO: 243901 - DNA, 276 bp, Glycine max
  unsure (1)..(276): unsure at all n locations
gatttttttttttttgaanggaaaaaaaagaaaggggggtggaanaatnnaannaacctcaaaaangatgaaggggatgaaggaaaggggttctgatgattttaaggataaaaggtttataattgagaataaataagagaaatataagcttgggaatggaatggatttgtatattgtttttaactgtgtttaatatattattggggagtggttgatttttgattgggatattgaatgtatttaaggatttgaacttgattcatggaaccttaaggg

SEQ ID NO: 243902 - DNA, 354 bp, Glycine max
tggacccctcgcatccaaaggtgctactcaacctatattaaataaaaaatataacttaatgtacataaatattgctaatgttacattgatgtattattatttgctccttatttaataaaacctatctttatgaataataattctttacttataccagcattatgatgaaaacgattttaagaatattctttaaacttaatattatcaactgaattctgcaatttattgattaataactagatatatgtatatccaagtaaaccccctgaggacttattttctgtattatcaggcagatggacacgtgacgtagtggttccacaaggatcatgcgacaccatttgtatacatgca

SEQ ID NO: 243903 - DNA, 270 bp, Glycine max
tgaccacaccaccagcggcatgctcattcaccaatttattaaattagcttcacttcttcccgaaattagcctttacataactttccccatgaaccattcattcaaataattcgttctccttttcctttttctgattgggaactaacaaattcagcctaataattctaataatatgattcttttcactattacagaaaatttaaaacagtattaaattcaatcatctgggccaaagacctctcccataagcttaatattaaccgtacaaag

SEQ ID NO: 243904 - DNA, 304 bp, Glycine max
aaacacatgaaacaagactatcattcatttacacagtccaatttttttatcaaactggcattgctaacccttgagaggccatacttatgtactatacattctgagccattttgttttaattgagatgatcacgaatacgttttataacaaatgatacttctaatcgacatacaattgatagtactattaagcagtatctattccataatcaaagaccacgtgttattgtgataaacttcttcttttatctctgcacataacttgttcttgatgatgattattatgcagtaaacttgctattttg

SEQ ID NO: 243905 - DNA, 244 bp, Glycine max
  unsure (1)..(244): unsure at all n locations
ggttggttaaatgtaaggaaattgtaaaattaattgtggttaattaagtatagatttgaatgtaatgtaaaanaaaagtgtttatgaagtcagttaaaattggttggatcactgatgtggtaataagtaaaccaaactagctaggtagtgcctacaatttaatgaggattgccttattaatgtacatagatatttctagtttcgtatgaccatgtgcatgttcaaaactagtttatgaaaaatc

SEQ ID NO: 243906 - DNA, 394 bp, Glycine max
  unsure (1)..(394): unsure at all n locations
tatagatgaaattgtgaattactgactaacaacgcaatatgtaaactatattatacgaagaattatgtattgcgtgcatgtttcttattaaactttctactttctattatctttttacaaatctttntattctttacaaataaaatattaaatgaaaaaataaatacactctatgttttaaaatgtaaaatgggttttcaatattttctatatttaactagtacaaagtttatgacaaatgtgttatacgaatatctaaaattaatcttgcacgaatattgactctagtaaggagtaaagggatatgtaatgttttcgttctctctgaggtcaaactatacattgcataaaatacttctagtaaaattaagtttcgggaacaggatatgatggg

SEQ ID NO: 243907 - DNA, 301 bp, Glycine max
gctttgatgcaacattcggttatgtttttgaaacaacaagatgatgcgctccatgagaggttggatcaaatggagaatagagatcataatgaagaagaaaggaggagaagagggaatgatggtgttcctaaacaaaaccgaattgatggtattaaactcaacattcctccatttaaaggaaagaatgatccggaggcctacgttgagtgggagatgaaaatagagcatgttttctcatgcaacaactatgaggaggaccagaaggtgaagcttgccgccacggagttttccgactatgctc

SEQ ID NO: 243908 - DNA, 359 bp, Glycine max
  unsure (1)..(359): unsure at all n locations
tttttagcgtgtccttaatnaagcgaccgaggagtagggactcaatctgtcatccgagtaaaaagtcattggtgtttgaatttgttcagagtcttaacattcaatttcgagctttgcgatatattacgagactcaatcagacatccgagtaaaaagttattctcgtttgaatatgctcagggctttggtattcaatatcgagcgtttcgatatattacgggactcaatccgacatccgagtaaaaatctattgttcgttgaatttgctcagagcttcaacattcaatttcaagcgttccgatatattacgggactcattcatacatccgagtaaaacattattgatgtttgaattgctc

SEQ ID NO: 243909 - DNA, 307 bp, Glycine max
cgcacgcactcgagggatgaagacgcttttttcttttgtggaactaggcggcgatcgggccatggcgcaaatcaactctaccactttcacaaattaataatgatcccaccatccctagttgcccaccttcaactgagctcacgctaatccaacgtagcccttattctcattcattctaaaaaccgggcccccatcaaccactccaaacttccacaatatccaagcaattcaatacccaaacatcatgaactaccctaaaccaataataaacggtagaggcagaaaactctgcccaaaacacattcca

SEQ ID NO: 243910 - DNA, 299 bp, Glycine max
aactcgtctctactgccagtctacttttcaatctggatgagatagatatgataaatcttagtcaatagaatgtaacgcgtttgccatctaaaaagatgaaggatggcttctgcacaaaagacttgggcatgccaattcaaaacatatttcaaaactatccaagaagaattttgatgcaaccctaccccccaagggcattggatagaagactccaagaggattgggctaaagctactaaaaaaggccctagggtcctcatgaacctagggtagattctccaccccatgggtcaaggttgg

SEQ ID NO: 243911 - DNA, 404 bp, Glycine max
  unsure (1)..(404): unsure at all n locations
gtacccacaccatctcatagaagacactggtattttgtccactatcattgttatcatctccctccccatcattgngggtgctacttgagccgcaaatccctccatctctgggcgtattctctgaaagatttgtgctcccttttacacatgttctacagatgcgttctatctatggctatatcagaattgtaatgatactgcctaatgaaggcaaccattatgtccttccacgaatgaacccgagaaggttccaaattagtataccaggtgacggtttcccctataagactttcctgtaataaatgcatcaacaatatttcatcttttgcgtatgccctcaatttcctgcagtacatctttaggagattcttggcgcagagagtccccttgtgatgcaattctac

SEQ ID NO: 243912 - DNA, 254 bp, Glycine max
gaataatgaggccctttctccaacggtcaaacattgtgttatgaggatattattattcataggcaaaggctattaaccccacctccgcaacataccaactacacgtaacaccatcatttcttcatggggatctcaaagaacccctataaatggagcaccttaaaggatttgttaaggacaacaaaaagtatgatgagttcatgatgatgatgggactcttgaaaagtagctatctacaatggtgcatacatact

SEQ ID NO: 243913 - DNA, 344 bp, Glycine max
aacttgatgatggggttctctacaataatggtgctgctggttcttataacttcaaacatgtaaataagggcctgagatattggtacggctcaatcagaacgcagtgctttatgatttcataactctcttattagaatgagccgtgccaatatcacaagcaaactttgatcatggcttgtaacaattggcagcttgctaacacattaaaggatgtttcactacctatttctagcagtgctttcttattaaaattgaatcttcattcgaaaaggtcagaagataactattgatatcaaaggtcaatatgacgcatctagtatcaactcgaggtatcacgatcacac

SEQ ID NO: 243914 - DNA, 244 bp, Glycine max
cttcgccacccacaaagtgcaaaatggcgcgaatgaatgacgttcacggctattgctatgtttgacaactcgcttttctctaaagcattacgttaaaataaataaatattgacgtgtcctttaaaaaacagttaaaacacaagtatgctaacaactctgcacatgttgattcacactcttaggagtaatattttgcttaaattaaaatagaatcttttctaataaaaatatattgaaccaataa

SEQ ID NO: 243915 - DNA, 291 bp, Glycine max
tgctagcttttttctttttgtgaaaaaggtgccttaactaacttttgagtaagatagaagggggggatccgctatttgaatttgtacatttaaaagctgtccatagacagaagtttacacaacattataggatataggatatacctgccttattttatgttatatttgttataggattcacaatagaattataaattatcttttcaatcagatagattgcatcaaattgatcacagaacagtgcatatggtgtgcaagtttgtatgctttcttataatttttttctcatat

SEQ ID NO: 243916 - DNA, 398 bp, Glycine max
  unsure (1)..(398): unsure at all n locations
tcacacccacgaatntggtcccctgaaagattattaactaataattatgattattaaagatattaaattaattataaattaaataaaaactattaatcattaaaaaacttaaataaaagactattaatcctaatgtggtgttactgctggcggtggagtacgtaaaagaggtgtttgcagagaagaggaagaaccgtgttgcagaaaattaggattaataatttcttattcaatttttttaataattaatggtttttgattaatttataattaacttaataactcaattaatcataattattggttaataatctatcaggactaaaatcaccaattcataagactacgaagaccaaatgttacaattaagattgaggggaccaaaatcatggatttgc

SEQ ID NO: 243917 - DNA, 281 bp, Glycine max
gctacggctgcatttttttttttggcgccgcatggaagggcaaaggtttgtatggcggtcaccagaggagcacaaaccacaaacccttgcgacaggtacagatttctgattcaaggccagttgggtcaccaagttaaccaatgcatccagtttgccttcaagcttcttactttcatacgacgcacatgggtttgtagctacctcatgcactcctctaatgactatggcatcatttctggcgctaaactgctgggagttggaaaccatttccccaattaaat

SEQ ID NO: 243918 - DNA, 348 bp, Glycine max
ctcctttatcttccgctacaacttcatggctgaaaatcaccattgaaggaccatatcgcatctcaaagatccatcctccatataatcttctgtagaagcaagcttcatgatgatgataaatcaagattgattcaaggagtcttgatgataacacagatgatgacaaaaatcccaagagaataagttcaatattgagtctagaacacttcaagaatcatgagaaagattcaagaatccagtttcaagtttcaatgttcaagaatcaagaataatcaagttgaagattcacgaatcaagataagtactaataaagtttttataacattgagtagcacatgaatttttcac

SEQ ID NO: 243919 - DNA, 191 bp, Glycine max
aattcaacagttactaaaaattacatatgttgaacataaacagttacaagatattcaaaaacgcaatgaattgagtcttttggtcccacccacttaactatgatgtataaatttacatttgaaaaatgccctaatattttcttggcttaaaaatagtccacaatgctatttttatatttaaacatatagtt

SEQ ID NO: 243920 - DNA, 264 bp, Glycine max
cccccacaaaaccaaccaacgaaacaagccccacgaacactgaccacttaaaaggaagagacgggccccggacaggcccacctaacctacccaaccaaaccaagcacagaaaaccaaacccaaactcggagcccaaccattgaagcgcaaaggtcctgaccccaaagcccaaatcgacccccaaaacggcagaagcggccaaaacataccggcgacaaaacggaaaagcctgttcttagacccaaagggactactcacactcca

SEQ ID NO: 243921 - DNA, 145 bp, Glycine max
gcagacgaggcccaaacaaacaagaaaggaaccgtcacaacaaagagaacaacggaacaccacgggccacacaagcagacaccacaaaaaaacacaaagagcccacacacaagcccacaaaaatcgggaaagaaggacgcacgac

SEQ ID NO: 243922 - DNA, 309 bp, Glycine max
gcatgcccgcttgtacgaatataagaattttcttcttcgaccttggtgatctttgactccatgtcatcgaattgcatgtccacttgtaactcaagagcatcaacctttcaccaacaaaggtttgaagaccatcaaacctatccaaaaccttttgaagaagagaggaatcttctccaccatgtaaatgtccttcttcatcaatgggttgagcaccctttttcacccaagagccatcatgctctttacgataaccaaaggatgcaatcatagtggcaccgattaagaaggatctcttgattggaacataac

SEQ ID NO: 243923 - DNA, 435 bp, Glycine max
gaagtaagatgcatgtctaagtgtgatcaacgccaagtatatgacctggccaccatgaaccattccttcttcgaacccaaacaatcgatccaacatcacaatccactagacctaacccaaacactccatctccctcactctacctttcattttctctctttttcgctttcccaatttatatctcgatatcttttgctctttccatattaatagatggatgtgatgccttatctgctgacgaagaaggacgatgaataaaacgacgataactgcgatgtgggttagggcacatgactccattcagatttgggaaatctcattcttaaggttctcaaatttgactatgcttaataaaagcttgaatcttctagaagcaccatgagctaacctcaaatccatcaccataatgaagtcacacctaccattctaaaaact

SEQ ID NO: 243924 - DNA, 362 bp, Glycine max
gctaaggcccaagcggtgaatgacagaggcctaagtggtgaatgacaaatcccccacgtggagaaggatgaaggctcaagtggagatggatgaatgtccacaagaagacacactttccacacacatttatagttgatgaaggaccacactataagaatgtctaagcaaaatatgtttttatgtaacacttttatttattgacgttctgtgcccaacctatttataatgaccatgtcttttttcttatttgtgctccgaccacttaagaattgcgttttattttccataaaataactttgtgcctttgaacaacatgtttgagttttatccgggtccttgtgattcaatataaactataaggt

SEQ ID NO: 243925 - DNA, 298 bp, Glycine max
accccgttactgctggtgttttatttttgctatcattttgcgacaatatcttatcttctatactaagactgttctacgaaattcttattacccaaatagtgcataatatacccaacatcaagttgttcactccaggcaaaagtgaagcaccctctatgaattcatatcatatcttaaatcgcatgactaagtgtgaatttttatatacaagctagtgcaagccacagtgacactaccttttattcaaagtcatacattttcttttctttcattcaagcttcattacaaacattttctt

SEQ ID NO: 243926 - DNA, 307 bp, Glycine max
attttttgtttgtatgacatccactccacaaggtttgatgtagaggagagcttcaaccctataacgcaacgtggtggacaaaagtgggcagtaaacttgaatggtcgccatcgtcaatgcggaaggtattctgcacttcactatccatgttcacacattattgcatcttgtggttacgtgagcatgaactactaccaatatatagatgtttgttatacaaatgagcacattttaaaagcttacttctcacaatggtggtctcttgggaatgaaacggctattcctccttctgatgacacatggacac

SEQ ID NO: 243927 - DNA, 271 bp, Glycine max
tccgagtcaaacctcaaataggccgagccaaatgcccttgacagttgctcgactcatttccatccctaatctctaccattggttcccagttgttgcatctcctaagatttctcccgattgggagaccaaggaattctaaagggagaacgactaagttacaatgcaaaaagtcctttgctaccctgaggaagggaatgtcaatgcttaccctacatatgttactcttgtggaaattaaccggtagacttgccatcatctcaaaacttataaa

SEQ ID NO: 243928 - DNA, 399 bp, Glycine max
atctgatatttctgcagggagtcttgctcgaactgcccaagacaaaacccttcataacccgaagccgaatcacgttctcaataccctatggcattctgtccaataaatagcattgagacaaatccaaatgtatgagatatctcaatggtgaaatatcactaggtagtgtttctagattgtgacaggccttgagatctatagcttctaggttctcaacttgaaaaatgaagggtggtagctcaaatattcttcatatcccaccaaggcttagatgcctcaaattctttagatccctatactccttcacgaattcttcacactcctcttcaatatgatggtttggtgaatcatgcagccaacgaccacgataaagatcctcttatgcttcattttgtcatc

SEQ ID NO: 243929 - DNA, 276 bp, Glycine max
tttgaggacaagaaaggcgagattgagagaggggggagcaccaaattgaaggaagaaaaagggagagcagttgaactttgagttatgtctcacaagactctcattcatcaaagttacaacaagtgttacacatgcttttatttatagactaggtagctttcttgagaaaacttccttgaaaagcttctttgagataacttccttgagaagctttcttgagaaaacttccttgagaagcttctttgaaataacttccttgggaagctagagcttacc

SEQ ID NO: 243930 - DNA, 270 bp, Glycine max
ccaagccccttgaaaggactaatgacaatgtatacaacactgaatcgcccggtgagtataatgtgagtactacatttaatgggcctaacttaactatttttttatgcacaccgtcaaccccgattttaggaccaattctttccaatagggacagagtgatcaggacatggcaaggacagggaacttggggtggccaaacccaaccttcttatcatacagtgcaaatagtgcactttgggaaacattctctaaacaggtgtattgtggcaa

SEQ ID NO: 243931 - DNA, 267 bp, Glycine max
caagacgagatcgcacgaacacaaccaaccattgccagactagcaaccactggatttcaacaaccggccagtactcacattggactttcatcccaacctcaattagacaagcaacaccactggatttcaacttgctagccactgggggacttataactgcaaagggggcctatggtttagacggcatagatacaaatgtgcaccttccagagggcttccactcaggaagatacaatcctatactcgcatactagagccattacatat

SEQ ID NO: 243932 - DNA, 307 bp, Glycine max
ctaatacaaaacagaaactatcacgtttgcctgcacactaactaactctcacttgtcctacaaacagatatacgatctcagcacgcaatcttttctctcaagatattcaaagcgcttcgagagttgttataaaatttacaagaatttatagaaagctctctatacaaagaatttgaataagagcactttacatagatcttcatgtctccaaagcttttggtgtttataggccttctttaacaaatgcatgttggctctaaatgaagaataattctctctttagcacgcaactgaaaaatgtggccat

SEQ ID NO: 243933 - DNA, 150 bp, Glycine max
cagcaaccaccgggcaccaaccagcaccccccaagaccacggacaacgaccaaccccaggggaaacgacggcgacccaacccacggatgcggcagacaaacgaaacactcaagaggggcacaagggagacagggaccgcaccagaagcgg

SEQ ID NO: 243934 - DNA, 272 bp, Glycine max
tacatactcccgttgaaattttacaagtttgcaaaagctattataccaataagaagcctcagcctcaaattgaatagtagcctggtgatgacattccgaatttagtatcatgttatgattatcactgaggttactcaaatgctgggagatgagtgcttgggctttatgggactcatgcattgtcctccacatttgtgtcaacctacaaaacaatcaagatgttaaagcaaaacccaacccatgccatgatttcagttttaattattacactg

SEQ ID NO: 243935 - DNA, 202 bp, Glycine max
aagctcactataagcttctagccaaatggatatgtgcagggcattctgttatgctattcattattcacagcttctgatttagggattatcgttttctgcttgaggcttactgttacgtaatgcaatcttacgttttctgcttctaaatacagattcgtacttgcttcttcttctattttcatttacgattctgttcaattta

SEQ ID NO: 243936 - DNA, 238 bp, Glycine max
tgattccttggccaacccaagaactcagctcgccatgaatcagaaatctacacatgctgcaagagtatgcggtctatgtccttctgcagatcaccatacagacctttgcacttctttggagcaacctaaaggcaatgagaaacctgaagcttatggcgcaaacatttataatagacccccctcagcagaaaaaccaacaacaacaaaataaccacgacctctgaagcaaccagaaaca

SEQ ID NO: 243937 - DNA, 137 bp, Glycine max
attactagcttgatgaagggaagcggaaaaacttctctttccttgctcaagctacagcctcaactaccctgagagaaaaaattacaacgtcgcttctaatggttttgtgacagaaagacagatcgctttcgacacat

SEQ ID NO: 243938 - DNA, 274 bp, Glycine max
gaaacaccaccaaaaaattttggatacatccactcgctcagcatgccctgtgcgctaagcgagaaaccactcaggctaagcacgcgcaacccctacccattggctgaaggggttctcctcagcgagacagttgcgttaagcccaaaaacctctctggaagtgcattaattagaattgggctaatcgagacatctcgctaagcacctctgtgcgctaaacacaattattcttctgtctggaccctcatgccaataggcctagttaggtcataccc

SEQ ID NO: 243939 - DNA, 214 bp, Glycine max
ctgataccttatcacacactacatcagaaaatagcaggaacgctctgataatttatcatttcatcacattcctagaaaggaaaaccaaacggttgaagcccttgctactttgtcttctatgttccacatgaaccttcacggggacttgccatgtatagaaattacatgttacactgagcctgctcattgttgtttgataacgaagaaaaggatg

SEQ ID NO: 243940 - DNA, 282 bp, Glycine max
agctgggttcgaggtacttacccgttgaagatcgatgaatgatgaagaacgaatgaagaacgtcgaataacggtcaaaaccttcgcgaaattccttatggaaacgttacggaaacgtttcggaagcgcctcggcttggattttcttcacggaaacaatttttccaagcaaattcgaaagagagagaagtgcctaaggggctcaaccctttttcacttcacttctccccctatttatagaaaattgggggagaagcttgccacccagctcgcccaggcgagca

SEQ ID NO: 243941 - DNA, 155 bp, Glycine max
  unsure (1)..(155): unsure at all n locations
tattgagctcgatggtaacaagtggtggatgtaatccataaacctatcatcgatgctcctgaagttggggttattacttcaattgcaaaagactcattcataatttccaaattggctttgtaaggagataggcaaatctagntactcgttcataa

SEQ ID NO: 243942 - DNA, 354 bp, Glycine max
  unsure (1)..(354): unsure at all n locations
atggcttattccctagtggatggngcctcccctctcctcttctcctttgccttccgctgcatctacatggtggaaaatcatcattgaagctcatagatctagcctccatagaagctccacaagcaagcttccatcaacatgacttgaaaattgggtattgtccttttctatatttcttatattactttagggtcgacaagcaagctccacaagcaagtttccatcacatgtagatgaggttcaacaatatattgatgcaagatggatnttngctctagaagttttgtggaagatatttagaattaccctttacagaatatatatgtgtgttgagagattacaaattcatttact

SEQ ID NO: 243943 - DNA, 155 bp, Glycine max
  unsure (1)..(155): unsure at all n locations
agcatccattgcaacaaaatccttcatatataccattggccaaagccctanattctgcttcagcaatgcttctagctaccacaatctgcttcttgcttctcaaggcaccaagttctccctcacgtgatataatatggatgaaacaccaagattca

SEQ ID NO: 243944 - DNA, 359 bp, Glycine max
atttcactataatctttgatactaaataatacccttacagaaaaaaaaaacgaatatcaagacaaacaattagctgaatataacaatacttatgctttcaaaacataggttttcggtgttaaattaaatagcaccgtaaataatattgcctttttatcaagcgtattcctgaatctgttcatatttgaaactataatcacgtggcttattggctttgcattaaataggaataagaatatctaaaagacaaagttcaaagttaatgcaatgactttccatataaaaaaaattgccttttaccggaatatcaacaatcaaagcacatcccaatatccaattgcaataaactctcttacaaa

SEQ ID NO: 243945 - DNA, 494 bp, Glycine max
  unsure (1)..(494): unsure at all n locations
agctcgctgtgagagaaaatncacgtgagctcncatccatgtcagatatagcatcttgggtggagcaaactgtgaaggaccgattgttcttatagcattagtcactgccctgtgagaagaacttggtttgaaatttgatccattcacaaatatctttttcattaaattctgtgagtaaagctctctcttgcgactgtaaatcggtttccagttcgtggacatcgcttatctcctttgtagtacttctttgggtttacttntcctaaatcttaccaagtgaaggacaatgacatgggattatcgcaacaacatacacacttgggtttatctgtacatgcctatgtgaattttttccctctatatagcaggacaattccgcatttaatagagtcatttaactgtcaacagtgacttaaatggtttccaacatgaatctttgggtcggcctagtgattaataatgtgcacttgtcttgcttgaccacacttggcact

SEQ ID NO: 243946 - DNA, 125 bp, Glycine max
ccgcggctgagagttatgaagacttgaacacatgcattagcacttaacatcttggaataaggtcttaagcatgtatgtgactactctaacggtcactctattctcgcataacaacggcccatact

SEQ ID NO: 243947 - DNA, 422 bp, Glycine max
  unsure (1)..(422): unsure at all n locations
acgaacgaagaacgncgaataacggtcaaaaccttcgcgaaattccttatggaaacgttacggaaacgtttcggaagcgcctcggcttggattttcttcacggaaacaatttttccaagcaaattcgaaagagagagaagtgcctaaggggctcaaccctttntcacttcacttctccccctatttatagaaaattgggggagaagcttgccacccagctcgcccaggcgagcagggttgcttcctccagaagcaacagccttctggaggaatcttctggagggcccaagtgggcctggttgctatttgcacccacattattactaagtacaccctcctgcccttttttgggattctttnttcgtaaagtacggaaacttacgaatgtcgtaacgatacttggtttctttccttaatgttac

SEQ ID NO: 243948 - DNA, 179 bp, Glycine max
  unsure (1)..(179): unsure at all n locations
gctatacttttccttaaaaaataagcatnagcatattctttaatgtgagtgaaaacaaaaagagacaatatatctgtaaatgttacatggcacataagtgtaataaagattaatgaataagacaaaaggagtcgagcccaaccccataaaaaatagttggaatgaataaaagtacaagc

SEQ ID NO: 243949 - DNA, 504 bp, Glycine max
  unsure (1)..(504): unsure at all n locations
aagcgacctgcggcatgcaagtaannaactcatcaatcacactgtgaatatatttatattcttgtaataatattttttcatttgtaaaattttaatgaaggagattgagcttcactcggcgaacgaaatgttgatattttctgaactcctttnttgttgttaattgttttggccccattttccctaacaagccaaattcctaacatgacaataaatgaaggttgtatgcttcggcacgatatatacgatcagttctgttactcttacgtcataaagaaccagtaaatactcttttgcaaaaattcaatccatatgtaaaaagggacatataaaaagttgtgtatagtaaaagcataataaaattatacaattaaatgaaagaatcataaatgttttgatgtagaaaaggaaaattaacgaaagtgatacaatggatatatatccgattccaccctctagtctttgtgtgtattgactccatggtccctaccccttaagcaacac

SEQ ID NO: 243950 - DNA, 169 bp, Glycine max
  unsure (1)..(169): unsure at all n locations
tttacaaatcataatgatcattgatgcatgntcatactatgaaaagattgtatgattctttttcattattaagatntaagcttgtataaattatgtgtctccttttgttcttatgtttggacatgcagttaaaaaaattgtcttatgaaaataatatcatttttatgag

SEQ ID NO: 243951 - DNA, 289 bp, Glycine max
  unsure (1)..(289): unsure at all n locations
agcttggatttccttgtagtagggaatctattcttctaagatggagccaaacccagtcaccctcattaagaactagctcttttcttcctctattgcctttagttgaatacaccttttgttggctctctatttgggtcttaaccctctcatgcatcttctttacaaattctgacctaagattcccttctttatgtataaaaaaagtgtccagtgggaggggaatgaggtctaacggtgtgaggtgatngaacccatagaccaacctcaaaggggacttgttggtggtttc

SEQ ID NO: 243952 - DNA, 385 bp, Glycine max
  unsure (1)..(385): unsure at all n locations
tacatgcactaagcgcacttccaatgatgtaaacacagaacagtgatggcgcttagcgcctccatccncgctaagcccagctagagagctcaacttacagagtgaatctggggcttagcatangagagcgcgcttagcacaactataatataatttcacaaagaggaagtggcgcttagcaaatcatccacactaagcccactacttaaggtgaaacttacagtgaagatattgggcttagcgcagcgatgtgtgcttagttgaaccattcagcttaatcaatcaagggcccttgcgcctatgaaagggtctatctattntaggactcaaagggtgtaatcacctggattggccctagtcatgcaccatatgcagcanatcatgt

SEQ ID NO: 243953 - DNA, 434 bp, Glycine max
  unsure (1)..(434): unsure at all n locations
agcttcaggctgctcaattgcttcagattgttgatataaggtcaaaggtctgtgtggtggtcggcagaggagcataaaccacagagtctggctacaagtgcagatnttttattcatggccagttgggttaccaggttaaccaaggcctctagtttaccttcaagcttcttagtctcgattgatgaagatgaatgcgtggctacttcatgcactcctctaatgacaatagcatcacttttggcactaaattgctgggagttttaagccatcttctcaattaaatntctggcttcagcaggggtcatgtctccaagggctccaccactggcagcatctatcatacttctctctatgttactgagtccttcataaaaatatttgaggagaagctactcagaaatctggtggtgagggcaactggcacatagtttctt

SEQ ID NO: 243954 - DNA, 193 bp, Glycine max
  unsure (1)..(193): unsure at all n locations
tggatgtagnggtggaggagacctccttacttcactctacttctttctcaccatgactcanggagttctctttcttctgtctccttctttacttttattgcacttgtccaaatttaattgattgctttgattggtcttgatcttatgattgtgctacattgacgacaatgtgttgtttaagtgtgagggggtg

SEQ ID NO: 243955 - DNA, 446 bp, Glycine max
  unsure (1)..(446): unsure at all n locations
agctnttcacataaaaaacaacttcatcattattatcatcatcggtaacactaaatacaatgcacaagaagcatatctctataggaacacatgcataaacacaagacataaatgttaatgtagcataataatgacaataacaacaataacaaatatattataaacaacataacaacatccaaataagggttctcattaaggtatattcctagtactcaaaacttaacacttacaacacttaagtctgacaaatccccacaactgtgttggtgctcatgactatcaatttcttttctagtacccttctcacacatctgtgggctaggttacactattggtggtgaactcttgaggaaaattctcttctagcctctttccaacacatatgtgagcatagccaactagtgcgagcgtgtcaaaaattttgatagcaaaattttaagttt

SEQ ID NO: 243956 - DNA, 413 bp, Glycine max
  unsure (1)..(413): unsure at all n locations
atactaagcttctaaacntatacaagaatgaagctccgataccacttgtttgtcttctntaaagatcttcattcaggttttccaataatgataaccctcaccattgaacatatgagcctattgatagaatnttcctcagaaaatggaaatttggatgaggccatatctattcttgaagtttctaaactttatacaagaatcctgctctgataccacttgttggaccttgtggcctcaataatcttacgagggataggcttagaatacagaagaagcaacaacaatcaatttaacaatgttctttaaacatgcaagacacaattgattgcaacaaaataaataagataagggaagagaaaatgcacacacaactttatactggttcgggcactttccgtgcctacatccagtac

SEQ ID NO: 243957 - DNA, 393 bp, Glycine max
  unsure (1)..(393): unsure at all n locations
agctntcccacagtcctanaggacattttaaactattattaactcactntaacctccaattacaactaaatccagatttagctcttcacatccttaaagcatcggatgtttccactcatatcactacattctcactatttaaccctaggctaactctactcttcatctctatcagctttccatcagccatntgagcatacaagcatcacaagcatcatcatagaaaccctataacagaatgggtaagcttgactcataccaaacatgacaaggttaacatggctttcatcagattcttcacaaataactatcatgaggcataaacctagtaaaactacccatcataactcccgaaacccaatacccacgatagatcatgtgagaggaagtcta

SEQ ID NO: 243958 - DNA, 406 bp, Glycine max
  unsure (1)..(406): unsure at all n locations
tccatcacgatgcctctcatngccncaacgtaaggctttgagtgttccaatangcatctntcatcatgaccttgtacctgtgaacctattgagtgagaacttctaatctgcccctaggtttacttgaggctcatgcacggtgcctctcattggcctagtgtaaggctccgaggtactaatcgttgtctttcgtcatgaccttgtagtacggaacctattgtgtgagaacttctaatttgccctaggttcactcgaggttcatgcacgatgcccctcattgctccagtatacggctctgaggtaccaatcgttgtctatcgtcatgaccttgtagcatggaacctattgtgtgagaacttctaatcctgccctatgttcactcgaggttcatgcacgatacccctca

SEQ ID NO: 243959 - DNA, 365 bp, Glycine max
  unsure (1)..(365): unsure at all n locations
agcttctnntttagacctcgatcttttttctntcttgtccgacgccgactgtcatttgtttcgatcaatatcggtgaataatactctttttgccgaggtgggctaatgttntcctggccgaataaatgggaacatgccagtttcgggcgaaacgaaacatcggttgagctcgcacgaaaaaacctagcccacctacattgtaagttttttatgcaacaccgaaacaagataaccttccctgccgtaagaaaaacattatcgggcagcgagcttttttcttaanaaaaattgcgcaatgtcagctgaaaatatcacgccgngccatttcacgaccgatgtcgtgtattctgttgtttattcaatcc

SEQ ID NO: 243960 - DNA, 539 bp, Glycine max
  unsure (1)..(539): unsure at all n locations
ggcagtatacattcgannacggagagagtgaggaggaagccttgttcgaggtacttacccgttgaaaatcgatttacgtttaagtactattgaagaatgtccaagaacgggtgaaacctttgcgaaattcctcacggaatacgttacggaaacgtntctgaagcgcctccgcttagattctcttcaccgaaacaactcttccaagacaattcgaaagagagagaagcgcctaaggcgctgaacccctatcgtcatcactctcttccctatttatagcacaataggggaggtggttgtcgcccagctcggccaagcgagctcagcttcgccatccgagctcagttgcttactccacaagcaacatccttctcgaggaatattctggacgccccatgcggccctggtcactctccatctccatcttctctatccccatctatacatcttctcctcccccattcctctccacctcatctcttcctctcctccgcccctcccgcctccatatctgtcgcccactctgtctgctcctctctccc

SEQ ID NO: 243961 - DNA, 157 bp, Glycine max
ttaatatatggatccttaatcgaacattttcttcttttcttcttcatcatttaagaattcctttccttgctctgatagagctcaaccagagccaagctttgataccactgagtcctgaacacactaaaggggggggggtgcgctttccgtcttatcc

SEQ ID NO: 243962 - DNA, 440 bp, Glycine max
  unsure (1)..(440): unsure at all n locations
gttcgatcgaccttatatgaagaagaaatggactttcttctgcttacatatttattcaagattattacgaaagttaaaaataagtcatctatataaaatgcaaaactgatcatgttttgttttacttttgttttggctacaacctccccgacaaaaaatgcacaggcacttatttctgcatggaaaaccggtgagacgatgccattcatatttgacacggtaacttattatttatcatgcagatttaccatatggagccacttaatgctccaactgatttgtttgaattgtaattatgagttatgatagtttaaacttacgaatagtttggttcagaaatggtgtattattccttgatctggcaggtctgggacttgattaaattggcagattatctaacacacagagaggatgtagacncttctaggataggaatcact

SEQ ID NO: 243963 - DNA, 68 bp, Glycine max
gcaagggcatgtaggcattaaattacaattgactatcaaatgcttacgtgtccctttctcttattttc

SEQ ID NO: 243964 - DNA, 332 bp, Glycine max
  unsure (1)..(332): unsure at all n locations
agctntacgggtatacagaacaacatataaagccctcatatgacttatctctttnccagnnggcctatggaaaatcttgtcacctacctattgagttggaacataaagctctttgggctttaaaatttacgaacttcaactcagatacaactggtgaacataggaagctccaactctatgaattggaggaactgatggttcaagcttctgagaattccaagctttataagcaaaaattaaaaatctatcatgacaaaaagctatcaaaaagaaattttcagcctagtcaacaactattgttatttaattctcgattaagattgtttccaggt

SEQ ID NO: 243965 - DNA, 261 bp, Glycine max
gagcacaggacagtctcatggcattgtatagtgaccaacctgatgccctatgatcaaaacacaatgcagtgaccatgcattgaaagctttccaagaaacacattaagtccgggctcaagtaacgaactggaaacttctcgcttatgtctggttgaaacgagaaaacaagcttatgatcatatagtgattctattagttcttctatcaagagaacaagtggtcatataacttataacgatgcctacttgaattatgaaccat

SEQ ID NO: 243966 - DNA, 321 bp, Glycine max
tgcacgcatgcatgcttacaccacggtggtcttttagtagaagtgttcgttatcttgcaacgaaggatatgtaaaggcggatctgtgttatggatataacaacactggagggtgccaaagatggcaagatttaccaaagtgtaggaatcctggcgatttgtttgtgaaaaagactcttttccccgattatgaaaatgtaacttttgaaatgaatccggcttttggctacagtgatcgtgaggccagttgctggagcaattgtagttgcgatggattcagcgcatcatgggttaatgaaactggatgtacattctatcattg

SEQ ID NO: 243967 - DNA, 225 bp, Glycine max
  unsure (1)..(225): unsure at all n locations
aacaataaatgaattgaaattctcgaatttgaacacttaccggttaaagaccgaagaacgaacgaagaaccgtgaagaacggtagaaaatcttcacggattggctcacgaaaatgtctcggaagcgttacaaaagcacctcagcttggattttcttcacgaaaatacgtttntttttacttaaaacagctgaaatgcatagcatangggtcaaggatcctttgga

SEQ ID NO: 243968 - DNA, 318 bp, Glycine max
cttggcctttatgctgttcaccatgttgctctttctatctctattcattttccatagacaataaatgactagcagatcatggttactcgcttcttggagtgtgccatctcaaagcaacacagagagcatgcaaatccagtgcacaattctcccaacagatgtcaagaatttggatttaaactcatcatcattcttcttcaataacattttcataatcttgctctttttgaggcatgtgatgtcaaacaaatcaccatagagccttttgctgtcaacatgtacccccaaaagattcgacaaatgcttttctatgattag

SEQ ID NO: 243969 - DNA, 255 bp, Glycine max
  unsure (1)..(255): unsure at all n locations
gatcttagagcgacctgcggcatgcaagctngtggtttctttctcattctctcaaccaatgngtatatatagaagagagtgagagaagagaaggtgctcctcatctcaccgctctttagttcttcttccttcaaaactcgaatgacccatttctatgtttttcgtactcttgcaattcctgaggtaaagatacaagctttgctcttctgctcactggatcgggttccaggaattcaagggtaggttcaaaagggg

SEQ ID NO: 243970 - DNA, 181 bp, Glycine max
aattatcgagttacattgattaaagagactacatttaaccctttttttctcattgttctctataaatcatatactatctagaatcttatacttcttctttctctttctttctgaggccctaaacatgattctttatttgatcgtttaaatgcatacataaattttttctatgacctagata

SEQ ID NO: 243971 - DNA, 220 bp, Glycine max
  unsure (1)..(220): unsure at all n locations
agcttgtctctcaaagctaataatcagctggcttagntgntgttatgaacataggcaactacgattntattatgaagcacgtatctcttacataggggacatcccactactacaaaaagcagatttaacatcggcagtttaacatcggtttttaacaaaaccgatgctaacgtaaatgcggaggcataactgtaaatactacgtatcgattaacattggt

SEQ ID NO: 243972 - DNA, 408 bp, Glycine max
  unsure (1)..(408): unsure at all n locations
caagcttgaatgctctattcaatggagttgactagataatcttcagactgatcaacacatgcacagtggccaaggatgcatgggagatcctganaaccactcatgaaggaacctccaaagtgaagatgtccagattgcaactattggccacaaaattcgaaaatctgaagatgaaggaggaagaatgtattcatgacttccacatgaacattcttgaaattgccaatgcttgcactgccttgngagagaggatgacagatgaaaagctggtgagaaagatcctcagatccttgcctaagagatttgacatgaaagtcactgcaatagaggaggcccaagacatttgcaacttgagagtggatgaactcattggttcccttcanacctttgagctaggactctcggata

SEQ ID NO: 243973 - DNA, 292 bp, Glycine max
  unsure (1)..(292): unsure at all n locations
ttcttgcttctttttcttccttctttgtgggaaacacagattgagtgtctctctctgaaagacgcgataactcatgagacctcatcctatctttttgcaaatctcttcggcggctccctcagagtgtatgttttgtctgatttagtcacttgacaactttggagtgactgcaagagagccatttgacatctaatcaatcaatcgaaatattgatcctanggttttcccctttcctcttaaaactttgattattctgcacaacaagaaatacataagactttgggatcaatcg

SEQ ID NO: 243974 - DNA, 135 bp, Glycine max
  unsure (1)..(135): unsure at all n locations
agcttggagtttccaagtgccaatnncgcctcttcntattccagtcttcttctggcttcaattcatcagtgggctttccttctgtgtccagcatcttgggatgatcccagcctttgatgacaggtttccatgttc

SEQ ID NO: 243975 - DNA, 64 bp, Glycine max
aaaggggggggaagaaccggggacgcagggggggcatgcccaacaactgacaatccaccaaccg

SEQ ID NO: 243976 - DNA, 436 bp, Glycine max
  unsure (1)..(436): unsure at all n locations
agcttgaacaccacatttcgatgtcgggtcttgctttgtgttnattntnngnnaaaccncataagatttacattataacggaacagtttaatcaacaaaaattacatcatgtttgaagtgatgaaatggtgtaaaaatgtgaaacattagactagtatgaaccactccattcgacttggtgtttgtgcttcatggattcaagttgcggtgttgccgcgtgtttgtcgttcatagattcaatttcacgctagcaggcgaattcagagtttaaaataagagaaacacaacccaaattcacattgtaatgatggtggtgagtgaggagccaagatctaatgttggagacctataaacaaggggattgtgcccatctgactgcaattgcaatatatatccacttggttgcaagtggaatagaataaacccttcaacaaaa

SEQ ID NO: 243977 - DNA, 285 bp, Glycine max
  unsure (1)..(285): unsure at all n locations
cgaatgattcgctattctcttgtatatattataccgactggtactctggaatntggactctactacttgcgtgcggcaaagttcaattctatgaccgtgtgttgcagttatcagaaactctggaatctggaatctgggtttaatttcactacaatattcntttataatactcaatggctcatactcattactcactcctgttctgtctctcagtgctccaacgattccctgccaacaatatagattgtgtggtctatgatactactgtcactgtactccaactca

SEQ ID NO: 243978 - DNA, 409 bp, Glycine max
  unsure (1)..(409): unsure at all n locations
agcttgagggtaaagtctcacgattgtcacgtttcatgcaataattgttagccgtggctatacgagacatcttgccaaacaaagtcaggttaacgataactcgcctgtgctttttcttccattctatatgtagcacagtcattaatccagtcatgtttgatgagttgggaaatgaggccgcaattatactgtgctagttggagatgtattttccccctgctttctttgacatcatgattcacttggttgtgcatctggtcagagaaatcaaatgttgtggtcctgtttatctacggtggatgtacccggttgagcgatacatgaagatcttaanagggtatacaaagaatctatatcgtccagaagcatctattgttgagaggtacattgcagaagaaccattgaattt

SEQ ID NO: 243979 - DNA, 420 bp, Glycine max
  unsure (1)..(420): unsure at all n locations
ccatccagatgtaatcgattacatattgtcaaatctgaattcaaatctctaatagctgttataaacagtttcaactgctggtcatcgattacatgctttgtgtaatcaatcacatatcgtcaaacatatctaaaatcattttaaaacatttcacgaagcattttggtcactggtaatcgactacatcctctggttatcgatgatcagagagtcaatctcttcttaaaaaccatttaacttgaattctttggccaaacctcttgcacgttcaacttggaattcccttcctaagactctagagatcttcttgatcattatcttgaatctcttgcattctcggattctcgtcttgactacaactngagaagcgtgtgatcctttggcatcatcaaaacatcagaatgtcattgcttctacaca

SEQ ID NO: 243980 - DNA, 176 bp, Glycine max
gtgaatttagaaaggaggcctctaggtgatacagctgtacatttgatgatgttatgcagtagtgatgaaaaatgtattcccgctctaataaacagagtgaaaagaaactctccgattcatccatgtggtcagatgcctgtttgtctggtatcaggatttgtccatgaccttgatgt

SEQ ID NO: 243981 - DNA, 395 bp, Glycine max
  unsure (1)..(395): unsure at all n locations
acctgcaggcaggcaagctgcttgtctcaccccaaactcccttcacaatttattatttcattcttaaataggcggcctggtctgtgctcgtgcgcttagcgcaattntgaaccgcttagcgcacattagtgaatttcggcttagcgcgtgctgcatgtctcgattcttacatgcttgtgacttgatcatccatttgtatgtatagttaggattgttagcattggaaagtgctttaaagccttagaacttgatagagaaagctagaaaactgtatgtctaggaatggagtgcagcaatctagtccatattatgttgtagactaaatgcaactcttttatgctgagtttgttgagggatcaaggatgaggtttaaagagagttaagcccattcactc

SEQ ID NO: 243982 - DNA, 547 bp, Glycine max
  unsure (1)..(547): unsure at all n locations
agccccgcgccggcgccgatgtcttcgtgaacgacggagagagtcggaagctcanagggtaatccttctcatattnatgtctggtaaatgatgtcttttctattctgcaacggcattggatagaagactccaagaagattggaccacagatgcatgacaagggcctatgagtctcatgagccttagggtaaacttcagtcccatgggctaagtgtgagcccacttatatctgtacatactacattcaagtctcattaatcttgggccttatatctagggctccataacatacgttatgcgcctctagaatgtatgatcttccatccctttgttattacggcacctagactagtgtttgtatcacgggcaattctatatgtcacatgcattacgtgatatctgatgcgtgggttggaatacaccaatgcattggagaaccaatcattactttcaacgcggagggcatttgttgtcctcccctgcacacataatccaacttgtgctttctctgctcacagctcaatacctaccacctacggaatctccg

SEQ ID NO: 243983 - DNA, 518 bp, Glycine max
  unsure (1)..(518): unsure at all n locations
ttttctgaatcgcgatcctcagagtcgacctgcggcatgcaagctnggaatagtcatacctcacacacacacacacatcactcatttacacacacacacacacacacacacacacatatatatatatatatatatatgtttaggtagaaagataccttggatatgcatgtatgtagcacaaaatacttcacaaaatatatatatgtatgtttaggtagaaagataccttgaatatgcatgtatgtagcaaaaatacttcacaaaatatatatatgtatgtttaggtagcaagacaccttggatatgcatgtatatagcaaaaatatctcacaaaacatatatatgtatgtttaggtagcaagataccttggacatgcatgtatatagcacaatacctcacataatatacgtatgtttaggtagcataatacctcatggaagcaaagagagcataaagagagcgagcatgataagaatatgacgggagaccacaaattgatatataatattaaacatcg

SEQ ID NO: 243984 - DNA, 248 bp, Glycine max
agcttctacataagagatggcaagagaatcatggatggctactcatcaaaggcaagaaaggaggaagccacaaagagctgaattgacacacctaggatattttcttaatagctcaattagcgacaccagctcgctaagtgcaattccgtctagaggaaataattcgcttagcgactctagctcactaagcgcaattccaaccagaggataaattgctcttagcgcgaatgtctcgcttagcggctacc

SEQ ID NO: 243985 - DNA, 538 bp, Glycine max
  unsure (1)..(538): unsure at all n locations
nggtaaattcgacgacgtacactatagagtactcaagctcntctttgagcaaagcaanggcttgctcttatttttattccattgtaattgccacattcttcttcaccaatctaatgagaggtgatgccattgtagagaaattaagaatgaaccttctattgaaacttgcttacccatggaaactcctaatatcttccacactttttggggtgggccattcttggatggccctgattntctcaaggtccactttgaccccatttctacccactacaaacctaagaagacttattatctacttaaagggtcacttctctatatttgcatagagtgtgtcnttctaaggactgaaagaacttgctgagatgcctaagtgatctctaagctctactgtcactaaatatataaaataacaactacaattactatgaatccctaaacatgatcataacctcataaggtgcttgtgcataatgacccaaaagatcatagccttcatcaaacaaacttgtttgaagcgtttcagtctaacccttcg

SEQ ID NO: 243986 - DNA, 229 bp, Glycine max
  unsure (1)..(229): unsure at all n locations
acaagtttcatagatgtggcatttatattggatgttttagtctagacatgatgnttgatatagtttaaagtttcttatatccatgtttagtgtgaatgaattantaaattatttcctgtttctgatcttggttagggttaccaagaaatttgggggttaatagtgtttcaattcctattctttctctcgtagggttcaaaagaatagtagaatctatggaattacatgt

SEQ ID NO: 243987 - DNA, 193 bp, Glycine max
  unsure (1)..(193): unsure at all n locations
tgagccttatcacaagtacgaatgcaaaacatacttttcttggcctattttatgatatgagtctttttctacgttgncttatgtaattaatgactattttttggatataattaatggtcatcatgagtgaaccttagattcccatttgagattgaatacaatgatgtcgatgatctnctatatatgataacat

SEQ ID NO: 243988 - DNA, 247 bp, Glycine max
  unsure (1)..(247): unsure at all n locations
agctngtttcttgttagtttcatcttgactttgcttcttttctgactttggaaccgccattgcatttcttatgcttcctttgaaaaatcttagagaaagagactctgtgaacgttatcctttcatgaaatgcatgttattttcgtaacctacactgaaccccggtcacattggcgtggtcggaatttccaaatgatgttcctttgtaaaacccaaaatgctctcagctctttcatgtagtgacgtgg

SEQ ID NO: 243989 - DNA, 264 bp, Glycine max
  unsure (1)..(264): unsure at all n locations
tattctctgacattgtgcacatctaactattcatttattaattcagattaaatcaataaagntaggaccctatatttcactacaaaagggttacatattgtcattcatggaaggaaatgtttaatctacaatataaccgccatgattcatgtgtaattaattcttagtgacaatatcaggtttaagttaacaagtgatggccatatttgtttgtcaacataaagattatatcactagtatttgtgggagaatggtagcatatga

SEQ ID NO: 243990 - DNA, 430 bp, Glycine max
  unsure (1)..(430): unsure at all n locations
agcttgccgccacggangtttccgactatgctcttgtgtggttgatcaagctacaaaaggagagagcaagagatgaagagccaatggttgatacatggacagagatgaaaaagatcatgaggaagcggtatgtgccggctagttactcaagggacttgaaatttaagctccaaaaactaacccaaggcaacaagggggttgaggagtatttcaaggaaatggatgtgctcatgattcaagcaaatattgaagaagatgaggaggtaactatggctcgatttcttaatggtttgactaatgatatccgtgatattgttgagctgcaggagtttgttgaaatggatgatttgcttcacaaagcaatccaagtggagcaacaattaanaaggaagggagtggctaagaggagttttaccaactttgattcttt

SEQ ID NO: 243991 - DNA, 207 bp, Glycine max
ctaagctgaccatcccacccaacccggcatagtcagtcagttagatattgtgatgtacctaaacaggcgagctcctggcagttaacagattacaggaacacagaccacagagctaggatgcttgtggtggctggccagctgtgaattttgtgtgatatatgggttgcggcctctggtaatcgattaccaaaggtgggttatcgatta

SEQ ID NO: 243992 - DNA, 455 bp, Glycine max
  unsure (1)..(455): unsure at all n locations
agctagtggatgctgatataataatttcctctgatctaatattacatagaaggaaaaaaatagagatggatattcaatatatagatagaagaaaagaaaacacaatcattctctactttctagttcttctaccaagctagtaaaatggaattgtttcaatccacatctttcatagaaacaaactaaatttgtcactcagtcaatagtaaagaggatacaaagtataatttaattgatgacattgtcatactgttagtccttcaaatgtattattattgttgatcacgcaaacttgttcatcaagtggttccccaacacctcgactatcatcatggagaatacgccttgagtagtaaacattgtgttaatactntgtttgcaataaaataatatggaattagcattaataaaagaaagctngaatacctatgaagcatcaattccacctcaccatc

SEQ ID NO: 243993 - DNA, 553 bp, Glycine max
  unsure (1)..(553): unsure at all n locations
cgccgtctgtgactacggcagtatgaaactcagcctgggtgctgccatggtnctctcgaagcctccgtatgttatgtgcctctggggagaaatgcgggtgcaaatggcttcatcccttcctctctttaaatattccccatcagttacgctcgcgcaggcgagctggccactcgcctctgtgagctaacttttttgaaagcctcagccaaattgtgttgctcatcgctatatatatatatatatatatatatatatatatatatatatatatatatatatatcttacaaaaatctattgtcgcatattacttacgtgaatactacatattatccaagaccacaaacaactgtaaagcacgagtctaaagagcctaattcgagatacttggctgcctcctacgagcgcttcttaacgtcttgagccaaactgcggatgaagatcgaacgatcatgtgcctatcacctattcgtcctacctctaagctgcgaaaagagagttgctcctgaacacatgtgaacactgtactaatgctcgtttactctctctcctccg

SEQ ID NO: 243994 - DNA, 329 bp, Glycine max
agctttgttgatttagttctcactggtgaaatgataatattgtgtctgagaagaggcaaatttgattatcccgctttgatgaataggaagcctgcggcaaatggagagaataagaaggagggagaaactcatgttgtggctactgttcctataaggccaaattccccaccagctcaacaatattaatactcacccaatatcagcccttcttattacctacaaccctatcagccaagaacactcaatcatccaccaaggccacccctatatcagccacaaagcctgcttgcccacatctgataccaaacaccacccttaacacaaaccaa

SEQ ID NO: 243995 - DNA, 609 bp, Glycine max
  unsure (1)..(609): unsure at all n locations
aggcactaccnnnnggnnnnncnctgnccagtcaacgatcacngacagagtngaagagtcaagcttntatgagaaaactngnctttanaatgcttagagcttaccttcctcattctctttctcataactaagctcaccttcttgagaagcttccttaagaagaatcctaaaggagctagagcttaactacacataccctctctaataggctagctcaacttcttgagaagagaagctagagcttagcttcacacgcnctataatagctaagctcacccccatgacaaaaacatgaaaataaaaaaaaagtccttattccaaagacaactcacaatgccccgaaatacatggctaaaccctatactactagactgggcaaaataccagggctagacgaaggaaaacctattctaatatttacaaaggatagcgggctcatactttagccatgggctcgaaaactaccctaacgttcatgagaaccctacggcctttcctcggatcctctagccaatctacctggagtcttctagccaantgcccttcgcgcgtacgattgcatcatttcgttcatccttggaaaggatttgacntcatactctcgagggn

SEQ ID NO: 243996 - DNA, 394 bp, Glycine max
  unsure (1)..(394): unsure at all n locations
gtggcggtcgggcgatggtgcacaacaagttttttcacattcacaatgcgcgcataaacccaccatcctctgttgcccacctccaactgagctcacgtactcccacgtagcccatatcctcgtttctctcaacaccgggtccccatcaatcctcccaagcttccacaacatccaagcaaaacaacattcacacagcacaagctttcacagccaagcaaaacagagcaaaggcagaaaactctgccaaaacaccaaccaaaaatcacagcttntaccactcaaagaccccagtaacaattccttcgttccaaattcgttaaccgctggatcgactccaacattttactggaagtctctaatacataagcctacattttgaccgntgggatctact

SEQ ID NO: 243997 - DNA, 317 bp, Glycine max
  unsure (1)..(317): unsure at all n locations
gctggaatcatntatctatctccgacagccattgtgtgagtcccgtctaggcagtctcagagaagaccgtgctcacagcgataaaaaatgagaaggaggagctgattactactcgggtggagaacagttggagagtctgcattgactataggaggctgaaccaggttaccaaaaaggaccatntccccttgccattcattgaccagatgcttgaacgcctgggcaggcaaatctcactactgtttccttgatggtncttctggttatatgccaaatactattgctcttgaggatcaggaaaagaccacattcacctg

SEQ ID NO: 243998 - DNA, 156 bp, Glycine max
catgcaagctggggagaataccattctactagagtctagcccaaggcgaaaaaaaaggagatttaatagatgctgatactcacagcagaacaatgagaatgagatccttgtaaccctttatcttccaaacacttagttcccgctctactatccacg

SEQ ID NO: 243999 - DNA, 308 bp, Glycine max
  unsure (1)..(308): unsure at all n locations
agcttgactntgcgggnnganattagctcttagtttcattttagntattagncaattcaattaaaaaagagaaatcccaaagacacacgtccgattgattcttttgcttattttactaaaaggtatttttttgatattatattattatcttacctcttttttggattccaacgtgtgtaccgcacgaccgaacggtcggattttcatttaacagaaattaacggatattacaaatcaaatgatcgatgaaaatctattctatttttctataggcgagaaatgacttacataaatgactgaagcacgtc

SEQ ID NO: 244000 - DNA, 379 bp, Glycine max
  unsure (1)..(379): unsure at all n locations
tcctgactcaccatanaccttgacccanggtgttatatgccaattcttaccctcggaagcaaaanaaaaagaggagaagagaaggaaaatttccaatcaaagaggaagcataaaatggagagaaggaaaatctccaatcaaagaggaagcataaaaaggagagaaggaaaatttccaatcaaagagaaagaaaagaagaggaaaggaaattcccaatcaaagagtgtgagaaagaaaaaagaatagaaagaaaactcccaatcaaagaatgggagaaggaaaaaaagaagtcaacaagatgaaagctcttggtcaaagaaactagaagaaatgtgcagaaaggtcttttgaccggacgatatctgaacactacacaatt

SEQ ID NO: 244001 - DNA, 393 bp, Glycine max
  unsure (1)..(393): unsure at all n locations
atctctgagtcacctgcggctgcagcttctatataagctgaaccattntatcaatatttattagttgagttntattcagaaaattagagtttatctcttttatcttagtgagagtgattctcctaaattcttgagtgattcaagaacaccctggctgtatcaaaggactttcacaacctttgtgtgttgccctcgctggaaagagtgattctttccttcctttcatcatcacccttgttctttcaaaccacaattccagaaaatccacctctgcccagaattatctcgtggccataactcccatnttacgcactcagattaagtgattcttgagcctaaattgaatttcaaaacgagaacctttcacctcgtttggaatcacctcatttggag

SEQ ID NO: 244002 - DNA, 255 bp, Glycine max
aagtggtgaacaaacaatttatgcttaactagctcacaaagccttcaaaaatggttacgaacttagagaccctatcactaacaatgcttcttggctaaccatggagtatacaatctccttgtaaacacattaccacatgagaagcatcacaactctttacatggaataaatgagtcatttagaaacctatcacatccacgaaaagaatctctaccattgtcgttttggcgcccaaacaaatcatggtaataatct

SEQ ID NO: 244003 - DNA, 181 bp, Glycine max
ctgcaggctgcagcttaacatggctttgccttaaggggttatttcactttaaggatcccttttagaaatttattaccaaatagggtcccttttgcaattatttaccttgaggttttttttttttattacaaagaggtaccccgacaggtgctctccgcgacacagcgacacatggcgccgg

SEQ ID NO: 244004 - DNA, 656 bp, Glycine max
  unsure (1)..(656): unsure at all n locations
ctttcatcacaatantnntaaannnnnnnnnanatntctttttaccnntttttttnnaacggggnnnnnccggcggcgccgtccgtttcttcgtntacgtacatataganacgtaagctngacccatnanaaaactcgcttattcatctacagctgatctctctatctttacagttcactgcggtcaacatccgatatatgtggcacaacgagaaatggtctcttaatgaactccttttctattgtgcaacaagaggaaaggctgaagccagaaataactcaaagcgctcacgctgtgagtacctttcaagacaacggcaaaacgaaaagaaccgatgagccccacaatgaacctgctaatgcgtccacacacaagacacaaaatcacggcgacaactggttcttttgcacgtcagcctacacatgtcaagaagatatgtacccaatattatgcttggcgtgcanagaacggcatgcatcctacttcggtccgctctgaggtcaacttaccttcacatcactagaaacantcggtggttagaccttcgcgcctctactacgatacctgcttcaaccacgtgtcgccaaccctcccggagccactcatcctgaatatcgactcccgcggccacgtaccacgcgctctcccttcaccg

SEQ ID NO: 244005 - DNA, 535 bp, Glycine max
  unsure (1)..(535): unsure at all n locations
tcttctcctttttgagnacacagagagagcgagagctntaagtgagtntccncagcctgtctaattgtcctattgtattatttatnttntgtaatnacacaactcggaagcaccggtgtctttttgttgtcgtcatcgttcctaaaggaagggagataactacactggtctagtcatcaaggttcgcctggaaccgatgaattcaattgcttttcaagcatatccaacacacgaataactactgggtccacacagccctcatgccttgaacttgactttcttgtactacgtacaatctcatctctcctcctgcagatccgtcaagagccagtgagcgaactaccaaatataaatactcgtcaatcacaaatcaaatccatctactaaaccagacaagtaccatgtgttaaaatacacaggctttcatatttaaaacataaaagacttagttgatgcttttggttttacaagaattccttttctccagaagagatgtagttcacatcaactgactcaaccattatcctccataacc

SEQ ID NO: 244006 - DNA, 522 bp, Glycine max
  unsure (1)..(522): unsure at all n locations
gcgtttataccttgaaaccccttataagagtcacctgaggcatgcaagctttgcagatttggccttcgccagtgaaaggattattgttggttctaatagaggcaaaattgatcatcctactaggacgactgagaaaactggggccaataaagagggtgatgatgaatgagaaacccatgttgggattgtcatttctgtacgggcaagtttcccaccaaacccaacaattgtattactcaatcaataacaaaccttctccttactcaccacccagttatccacaaaggcgcatccttaatcaaccacaaagcctgtctatcgcacttncaatgacgaacaccacctttagcacaaaccaaaaacaccaaccaagaagtgaattttgcacgagaaaccttgagattcaccccattccagtatctatgctgattgctccatactacttgataattaatggagccataacctagccaaggttataancttcactttctgagatacaactcaacgcacggtgctatn

SEQ ID NO: 244007 - DNA, 501 bp, Glycine max
agcccccacgcgcgtataccatctattacggtcgctatgctactaagctggcttaataccctattaagaactagtatgtcaggcaggaagcgtctgcttcctattgatagctgccgcctctcatcaataagaccagatatcacttggctcaatctattcgctaataacttaactatcaccctgtacatacatccaatcaaggagattggtctgtagtcataaatgactggggggttggcttgggacataaactataaagaacattattgctctaggaactgcctgccatggattacttccaatctctgagtagtttcacattcccaaatctctatgattgaagtgaaccataggccagacattgtcccatacactcacctgttcttgtctccatcaaaaggacacccaactccttgtctgttatgaaaaatgcctcatcaagggctcaaactgtccataatcatgagaaatccagctctctacactgggctgacctccccg

SEQ ID NO: 244008 - DNA, 379 bp, Glycine max
caactatgtttacacatacagagagcgcgcataatcccaccatgcgctgttgcccacctccaagtgagctcacgtactctcacgcagcccatagtgtgggtcctctcaagaccggagcgccatcaatcctcccaagctttcacaccatgcaagcttaacaacattcaaacagcacaagctatctcagccaagctaaacagagcgaaggcagaaaactctgctcaacacatcaaccaagatcacagcgtttctcacttaaagaccacagtaacaattccttcgttccaattcgtaaccgttggatcgatccaaattttactggaagctctagtacataacctacatttgaccgtgggattactacaaacatccaaactat

SEQ ID NO: 244009 - DNA, 474 bp, Glycine max
  unsure (1)..(474): unsure at all n locations
agctntgtacgcatcatatagagcccatgattcttatgaacacatactagtttggntcgctggtcatttgtggactttntttggtcttggtgccaacaaagagttctttcattcatttgttccgtgaaatgtccaggattgattttcattatgtctatcaattcatagattccaatttgaccaaaaaaggagcaacacgttcatggacttttatttagtgaataaatttgaattctaccttgttttgaagaaggttttaatggactcttatttatgcaaaaatcccttataattttaaatctttattatttcaaatatatatgtattctttttttaaattttacctaagcttgaaatacctgtgcaatgcgtaggatacctactagatatagatataaaaatataagtcccataccttgccatattggtcacttggtgaaaggctctaatgccttttttatgtcacaacacaac

SEQ ID NO: 244010 - DNA, 388 bp, Glycine max
  unsure (1)..(388): unsure at all n locations
gtctcacaatngtcacgtgcttatgcttcaattgntagccgtggctatacgagacatcttgccaaacaaagtcaggttagcgataactcgcctatngcttttcttccatgctatatgtagcaaagtcattgatccagccaagtttgatgacgtggaaaatgagggcgtaattatattgtgcctgttggagatgtatttcccctcctgctttctttgacatcatgattcactcgattgtgcatctggtcagagaaatcaaatgttgtggtcttgttatctacggcggatgtacccagtagagcgatacataaagatcttcaaggggtctacaaagaatatatatcgtctagaagcatctattatagagaggtacattgcagaagaagcc

SEQ ID NO: 244011 - DNA, 469 bp, Glycine max
  unsure (1)..(469): unsure at all n locations
ttcttgacctggatccttaagcaccgcaggctgcagctgctggcttttatgggagatattggttancttcaagccctcacatagcatnncgcggctggctcgggggcggcctggaccacgacaanncntccggtaagaatagggacctcaattttggaggtggggggaaaaacctaaggttctaaactcaattcattatggccagcccatccaccccaaatttagaaggttgcgcttcaaaaattattacccttcagttaaacttcaccagagcttggccttgaccaaagggggtattaggtcacgtaacctctgatttctctctttctccgaaaaacctaggagtgtctgaagggcgtcgattccaatgagttggtcgggaactgcccattgataagacttagatatctgagtggccatacaaggagacatcatgggcgtccggtgatgggtaatgccttaatcttac

SEQ ID NO: 244012 - DNA, 382 bp, Glycine max
  unsure (1)..(382): unsure at all n locations
agcttcttgtcaattcctcagcaataattaaatagggtatccacttctaatagcatcctccagtatgttgataagatcccttgcattggttatctttgttgcaactaacagcaactgcataacataccatgtanagttataattaaatatgaaggatgttaaaaaataataacaagttacagggaaaacagacaaatgtcacaccttacagttctcatatccaacgcgcatcttctcactgtcagtaacaaagtatggagaaatataaccacggtcaaattgcatcccctcgacaacatatagactgttatcagcactcttaccntcctcaagggtcacaacaccctttctaccaactctgctcaatgcttcagctatcata

SEQ ID NO: 244013 - DNA, 104 bp, Glycine max
  unsure (1)..(104): unsure at all n locations
acttgaactaagctataattatttggtaacaactccccatgttctttatncaggactattctcattgggttcatgaaaacctcatggatcaatgcatataccac

SEQ ID NO: 244014 - DNA, 421 bp, Glycine max
  unsure (1)..(421): unsure at all n locations
agcttcttgacggcctatccgccactatttgttagttgtcctacttggacctctagattctttatggcagactttgtgcttttctggttagacatagaaacctgcataaattgagctagagtctcttccagctttgtggtgtgattatagagactaggcccttgtggtagcggccttatggatgatcccccctggtctctattgaattgattcccaggatgtttcctccattgtccctgttgttagttgtattgttggccatgctgaaatccggaaaatccacctacattaaaattggttatgggctggttccccatataattgacttcatgtgtgacttgttcttcattagggatacaacatccagattcatgagctccaccacanattatacattctgcaacctgcaaaacagaagaat

SEQ ID NO: 244015 - DNA, 562 bp, Glycine max
  unsure (1)..(562): unsure at all n locations
agaanctcncnnncnccacgggactcgatgctcnacgtgaccttagatactcagcttgaggtgagtanccaccatctttcatagtagaaactagttatgtgtctactatcatgggcatcacttntttctccgtcattgaggtgccactcgagctgccaggtctcttcaccttttgagcggtattctttgaaagatccgtgcccnccttttgcacatgttctgtagttgcatcctatccgaagacattatactgacactgcctaacgaaggcaaccactacgtcctttcacgaatggactcggaaggttccaagtagtgtccatgtaacagctacccagtagactttcttggaagaatgtatagccatcctatcttttgcgttgccccatcttcgatatacatcttagatggttntgcggcagtagtctccttgacttgtcaagtcagcaccttgacttgtgagggtgatgatatgggtctacgacaaatctcttggtagcaaggcataatttcactcctcaatggcctgacctgtcctttatgatcaacttcgcattctcgg

SEQ ID NO: 244016 - DNA, 393 bp, Glycine max
  unsure (1)..(393): unsure at all n locations
catttgcaagaaccagtcccggtcctgaatatgacatccattcggntacgaaggctacaacaccagcatctctttcatgccattaaaggatggtcaattattcaggagcgacacgtccatatcatggtcgactagtataccgcactccaagaagagacaggtcgccggacgtgggcatagctggatacccccatggctacctcgacccgaaatagttcttgggactatgccaatgcttggctacatggagggtgaagataattcgacctggtgaggggtagtgtatcattcaagcgctcgaaacccggcatggaatgattctcgaggaaaaggtagatatagtccgccttgcgaacggccctgggaaggttaagcctttatgtacaccacatc

SEQ ID NO: 244017 - DNA, 488 bp, Glycine max
  unsure (1)..(488): unsure at all n locations
atatatagactttgagactcgggaacctgtaagncacctctggcatgcaagcttggaggattgagggattcgttgtgttttatacgaggatatgggctacgtgggagtacgcgagcctcagtggaggtacgcaacacgcggatggttgtgttaatgcgcgcattggggatgtggacaacttgttgtgcaccattgcacgaccgtcacctagtaccacatgtgatgggtctcctattatcctacaagcttgacatgaggaagtggacactgactcaattctcctcattttttcgcgctccgtttcgatcccccatccctcgttccaattcatatgtttctctgcctttctcacttcctccctctcacatcgtctctcttctcactactttcatctcatccttccccttccttttatattctcctttccctctacaatcccctgtgcacctctcgaatcctttcccacatcactacaactcatcccttcg

SEQ ID NO: 244018 - DNA, 481 bp, Glycine max
  unsure (1)..(481): unsure at all n locations
actatgatactaagctaaagtatgcccgagtcattcatccctgtgagatgttgttgaagtatttgtgatcagaatagccattccttggattatagggttgaaccaagctcatgcttntacaaaaaaggttcatcaagtcaagttgaaatatggaagtaaccgtcttgcaaaattggggcaaaagatgaatcgagtcacatcactgcttcgtctactgccaaacatatttaggattattgatgtccttgttacttccagtctcaccttgacaaagatgtcatggaccatgttgaaaatctatattgattcaaccncatatcctgcgtaaaaattcgcaatacttcgactgtacatcattcgcatgcatccatgcttttcattggttgcatcgctcatcgcatattttccttgacaaataaaatacaatccaatgaacttatcaacaagacaaggacacgctatacggcgcccttaccgaact

SEQ ID NO: 244019 - DNA, 243 bp, Glycine max
ctaaacgagagcgaaagagcctactcagatacaacttgcttccctctctaggctgagacatatagaagatgatagtaaccacaaaaataagactatagaaattattttcttttcataaataaatcaaatattattatataatttttattctatctcttttcaggtatataagctagtaattacaattatttttctataaatggatgtacagaaataaatgggtgtacaatagttatgctttcc

SEQ ID NO: 244020 - DNA, 86 bp, Glycine max
ctttcaccttctgggcgtgttccttgaaagatcccgcctccttctcgcatatgttctgcatctgcatcctatccgcaaccatacta

SEQ ID NO: 244021 - DNA, 137 bp, Glycine max
gcaccttcagcattggagttgctgttcaacatttatcactcttgcactcgagggttaaacttttatcagtacaactatactaacagattattctgaacacactccctagatattaatatggcatcacttcgtaccac

SEQ ID NO: 244022 - DNA, 238 bp, Glycine max
atagagcgcgtacacaaatcacttaacatacttttatccgctgaaatattcacacataactccagtttaagtaatcttttccatcagtattaatagaaaatagaaaaaatggtaaactaattaaatttctccttgaatttaactcactaagtacataaaattacattatacactacaatctttttaatagcacctcaatgtttgcacaaatttggtgagcttgcacctcgtacatccc

SEQ ID NO: 244023 - DNA, 466 bp, Glycine max
  unsure (1)..(466): unsure at all n locations
anngcttgcggattggtctttgccagtgaaaggatctattgggtctgaaaaaaggcaaatttagtcatcctgcttggacgaatgagaaaactggggcaaatgaagagggtgaggatgaaggagaagcccgtgctgtgactgccattccaatacagccaagtttcccaccaacccaacaatgtcattactcagccaataacaaaccttcttcttacccaccgcccagttatccacaaaggtcatccctaaaatcaaccacaaagcctacctaccgcacttccaatgacgaacaccgcctttagcgtaaaccaaaacaccaaccaagaaatgaattttgcagcgagaaagccttagaattcaccctaattccagtgtcctatgctgacttgctcccatatctacttgataattcaatggtagccataaccttaaccaaggttcatcaacctncatttctccgagaata

SEQ ID NO: 244024 - DNA, 388 bp, Glycine max
  unsure (1)..(388): unsure at all n locations
acaacacttctcatggcacgagtgtcaacatgcactntataaaataatcatattggggtcgtgcctatttatgacacatacgtatttgcacacataaaaattttgtgtgaagcattttacgacacctatccatgtacatattttttgacanaccttttcatgctacatcctatatatatacacacacatctttttggaaggcttcttttgttacctactcacaaatacacatnatttgaaaaacacttttacgctacccatccaacactttgtangcacttcatgcatatatattcacatatgcaaggcatntattcaactntctgcaaggcatttatttcaccatttgcacggcatttcatgctatatatatttacatatatacata

SEQ ID NO: 244025 - DNA, 195 bp, Glycine max
  unsure (1)..(195): unsure at all n locations
gctttgagtgaaaggatgtgactcttcatantttatttaattcaacgccaaggaactggaatcgataccaaacattgaatcgattcagcatttcgaaatattagaacgttgtaatcagtttgaaaacatttcaactcaatttgttctggaatcgataccacagagaaaaactcttggtaaggtttgctaaaccca

SEQ ID NO: 244026 - DNA, 390 bp, Glycine max
  unsure (1)..(390): unsure at all n locations
agctttacagtatattattgataatgatgattcgaggtagctgccntggtgtggaaacattacattcacatctatactactctagctngccttccttcttgtgcgcatgatctacaaagcccaaacaaaacaaaattatcgcaatctttttttacaatgctgacaataacgtataatgagcattgttgcttaaaattagcaaatactacgattctgtatattaccatatatactcatatagacacaacctagcacataactgctagacacatctaattagaaatttataaatcatctaaatattaaaaatacctaatatgatcattaaaaataaattctaaaacacactcttatccaagagtgagtaccaacatataaagaggtggatgt

SEQ ID NO: 244027 - DNA, 459 bp, Glycine max
  unsure (1)..(459): unsure at all n locations
agcttggtttcttttggttntgtacatatatataaagcttgtttctttntgggtgaaagtgcctatacggattcctcctggtaccattttgttgttgagatttctataataataataataacaaataaaataagattatagaaattattttcttttcataaataaatcaaatattattatataatttttattttatttcttttcagttatataagctagtaattacaattatttttctataaatggatgtacagaaataaatggttgtacaatagttatgctttccggttaaatatgttggaaatattccttcatcattgggtgtgcagtagttacagtttctgctttaatactattcaaatattaatttatgcaattatatgtgttaataattgcnatattacttcataaaggctgtgcaacaattacgggttccgctnntacaaattacatatatat

SEQ ID NO: 244028 - DNA, 442 bp, Glycine max
  unsure (1)..(442): unsure at all n locations
gcgtagcccaccatctnttcatagtagagtatcgattatgtgtctaccatcacgatcatcgtctccctttccatcattgggggtaccacctgngccgccagatccctttcacctttgggcgtgttctttgaaagatccgtccccctttttgcaaatgttctgtagttgcatcctatccggaaccatatcaaaattgtactgatactgcctaacaaaggcaaccattaggtccttccaagaatggactcgggaagattccaagttaatgtaccaggtaacagctaccccagtaagactttcttggaaggaatgtattagcaattcctcatcttttgcgtattcccccatcttctgacaatacatctttagatggttcttgggacaagtagtccccttgtacttgtcaaggtccagcaccttgaacttgggaggggtgatgata

SEQ ID NO: 244029 - DNA, 163 bp, Glycine max
  unsure (1)..(163): unsure at all n locations
ttagagcacctgcagctgcagctaggaacccatctnttagcttaatgcataatacatactcagggctaggaacccaaattntggttttagaattagaaaagcatgaaaattacgacttgcttgtgagagtttntgctcgaattgggctgccccatgtttgatc

SEQ ID NO: 244030 - DNA, 559 bp, Glycine max
  unsure (1)..(559): unsure at all n locations
nacgttcagtagacnacggaagataganactaagctntggagtnaaacatgngaccaacccattnaatccatataatgatatntcgatctagncaaggtctgagagaccatacaagctttctaacgatttctaattatgtgggccctatagtctatcatatgctggcagtagccgagaagctcatgactctcttcggggccgactacgagtctgtatcgacctggccttggcaacaatcagggaagtacttgactaccgttcaaggctagagcaaaccgattcatccacacggctgcctcttggggtagagaggtctgcacccttcctacaagcatctatttccgatacactcgagtatactcacgcctgacactatgctgaggggacgcgctgcttcttcatctttccttataccacgcgtctactctaccttctggtcgtgcctcaaccacacanttgcgaagcgttcgcatcgctctactatacctatctatcacccgcgaaggcggtgctccctctcgatactgctccgctacctcatggcacgccacctacacg

SEQ ID NO: 244031 - DNA, 516 bp, Glycine max
  unsure (1)..(516): unsure at all n locations
cttgctagacctcagcgacctatgagacacctgaggcatgcaagctncagctggantgctaagngacaacgnatcctttgtgtaatttattacanancancgccaagcgcaaggccggacggacaagagngagggccacgaagccaagcgccagagatggcagctaaccgagactcagtggggccagngcgagcactacgcgagcacctaccaacgccaagcncatgcttccttagtacttaagatgcatcattctatctaagcccaccagagtctggcttagcgagagctgcaactattcggatctacatacctcgctaagtggtctgatcctccactgagccaagcctgtgttaaacaaaaagactttgaatttgaatctaccgctatacgcgcttatccactaagcgagccttgttgagataccaaacgtctctctggctcgctaacacagctttgcggtaagtgaaagagtcaaacacgctaagtgagtgttccacaantacctccgactcg

SEQ ID NO: 244032 - DNA, 398 bp, Glycine max
  unsure (1)..(398): unsure at all n locations
agctntaagagaagttgcaagagaaaagacttattctctcaatgtggttgaaactggactcattgtatatgacaaagtcccttgcaaatcggctatgcttgaagcaacaactgcaccttcaagatagcagagtcaagaacagccactgaacaattggctgatttcaacaagattcttaatganttggaaaatattgaagtaaagcttgaagaagaggataaagctctcttgcttctgaattccttaccaaaatcctttgaacatttcaaggatgcaattctttatggcaaagatcaagacattaccctagaagaagtccagacctcaataaggaccaaggagatgcaaaaacggcaagactccaaatctgaggataatggtgaaagcctgaatatttc

SEQ ID NO: 244033 - DNA, 321 bp, Glycine max
tctagctactttatactttatggcgaaataatttttacttttggaagcagagactatgtaacatactagggctaatcaaggagtagattgaaagtgcaaaatactgtgcataccagaaaaacttgtgataagttatataaccttaagtggtaaagacaactacttatgatgacactaataggtttcgttttaaggttatgaattttagtccatccatttacaggtatgaaacttgaattgttattataagacaatgttataatattgccagttggtcgtcgattgaatacttatataaataattctttaatatcaactgat

SEQ ID NO: 244034 - DNA, 62 bp, Glycine max
  unsure (1)..(62): unsure at all n locations
agctntagtaaaaataagtgagaggttcttgtaattatagaagaacagcaagcggctatgca

SEQ ID NO: 244035 - DNA, 146 bp, Glycine max
ggagaatcctgccgtgccattggcagatgtcactcaccacaccaaattcaatgagtcatttctccaatcaaagagacgacacctgttcaatattgcgacgaaccaaatatgatgttgtggctgacaacaaatgcataccttcttta

SEQ ID NO: 244036 - DNA, 387 bp, Glycine max
  unsure (1)..(387): unsure at all n locations
caataacttctgaatcggatgtccgattgtttccttttgatatcgagacgctcgtaattgaaaacggaagctctaaganaagtcaaacgacaataacttctaacttggatgtccgattgcgccctgtaatatatcgagacgcttgaaattgaaaactgaagctctaagaaaagtcaaacgacaataacttttaactcggatgtcctattgagccccgtcagatatcgagacgctcgaaattgaaaacggaagctctaagaaaagttcaactacaataactcttaactcggatgttcgattgagtcctcgtatatatcgagacgctcgtaattgaaaactgaagctctgagcaaatcaaacgacaataacttctgactccgatgtccg

SEQ ID NO: 244037 - DNA, 244 bp, Glycine max
tacttgccacaaacctcatgacgaatcctgactatatacacaatagtgtaccactatacttatgctcttatctaggtcttgcaccaaatagttctacgcacgctcaacgatatgtctcgcttccgaataaaattctctttcacactagtactgtatcctactctaggtgcagcacatcctatacatataaaacatcacactatatcttcttctctatgtgacaacgtcttcccatcatctaccg

SEQ ID NO: 244038 - DNA, 473 bp, Glycine max
  unsure (1)..(473): unsure at all n locations
agcttaagagatgaaatatgtccgtttagacacatctattactngttttgttaaggncnatatacactagaagctgtgaagatatgtatcttttttgtcgatcagctccaattgcatcatacgaattacaaaaaaaaaggttttttttgtatacttatagttattattttgaattctttcatttttaagatttataaaatttctaacattagatggtaacaagtctcaaatgtatgtaactagaataaaattccaacattagatgtagcgctcattcctccaaaataaaactagttacactcctaattcttcaatcattggatgtagtattcattcctccaagtaggtcgcaagggcatttcccatcatatcacttgcactatcacttgtataaaccacaaaccacaattttaaaataaagaagaaattgatcatttacaaatttacatgcttatatggcatataccttcttc

SEQ ID NO: 244039 - DNA, 386 bp, Glycine max
tttaagagaatctatttattataggtggtgacaatcttcactataaatagaaaacaaaattagtgaagaaacaacacatgaagcaagagtgtgtgagaagagagattgtgaaacaaagttactttgttgagagaaaagtctgtttgtgtgagagtgctatcatttcttacaaccattgagttgggtacttgatttgtagagtgatacactatctatggtgaattataatcctgtaatcatttttttctgatagtgaaatactctttaaatgattccaataagtattgaaccatgttaaattcttggcgttattattaaattggattcaaattgatttaaatggttgatttttaaatcaaatttgaaaatcagtttagaattcatct

SEQ ID NO: 244040 - DNA, 335 bp, Glycine max
  unsure (1)..(335): unsure at all n locations
attcctcacaaaaacactattcccaagaaaaagtcctattgatccatgatcacgtgtgtaatctttgattcgataggaaatgacttgcagaatccagtcatgacatatccatggttcggaattaggatgaaacacttacctgtgtgagagtgatacactttgagtgattctctcttattttgttggacccaatgtttcctctacatggtcggttagaaacgaaacgctaacatccaaaatctcatttatggttatgtgaaaatntcatcagcatactctcctttccaataacacattgttttcatcaacaatatatgttgtttgatcagtagagg

SEQ ID NO: 244041 - DNA, 364 bp, Glycine max
aaaagccattaacaaaataaactcaatgtagcatagatgagaatgttatgttggataagtggacatattagacaagataggattaaaatgaatgcattataaagaaagttgagaacttgagatagcatctgctggagaaaaaaatggtagaatctcacctgaggtggtttgggcatgtatgcagaagactagtagaagccccacttaagaggggtagcctgtagtcctatgtggggaagataggctcgaaaaaaatatagtctaaaccattaagaaggatctagaggtcaatggcttctccatggacatgatttgtaataaaacactatggcaccatctaatacatgtaactgacctcatgtaa

SEQ ID NO: 244042 - DNA, 260 bp, Glycine max
agcttccatcatgtgttaatcagagcacaattgcttatttatgtgctccttaaacctccattaattgttttgctataccttctcttccatcgttgattcttcattatttctccatgtatctcctcacatgtcttgtgctaaatgttgttaacatgattctttatagtttccaccaattaaacttgctatagaagcaagatttgattttctatggctcaaatttcttgttcttgttcttgaaccatgaatcgcgttgagtt

SEQ ID NO: 244043 - DNA, 394 bp, Glycine max
gttgtggaaattaaacagtatgcatatatgatttctatacatcggatcatcattcttctgcacttgctttagcccctagctatctgcctcgcttaaacttccctccttatgacggtcaattctcgtactcatggcttgcgttgcctctgccagctagctgtcatctcttataattacgaagctctaacatgctagtgacatcaaatgttgggcccataacaggttgacttatagaagacgttctccctctgcaaactactgaccatgtacaatcacaatgatcttcaacatataacacctgtcgcgcttgcactgccatgatgaatgggtcgtctttgtaacctaccttttgaaggtctactaacgtaaatcccactctgtcttgacgcacaca

SEQ ID NO: 244044 - DNA, 445 bp, Glycine max
  unsure (1)..(445): unsure at all n locations
agcttatgcgcatatttccttacaaacgttctcttgcacaagacattctattaaccaaaaaaatgcacccatatacaatcaaggcagcttcgttacctagattatttacacgtacttccaaggtgtatttgttacttacatcacacacctccttggctaaattcacatacatgcatactcaaagcattttggggtaccaaaaattgcacatgtgcacatcttggtatttccaatacctatacatacacaaacttcatgatgaatcttgactatctacacaataaggtgctacattntatgctcttttcaagtttttgctacctaaagccgcatgcaaattcaagtatattttcctttgctgactaaaattgtattcaaattaaaaggtatacattntttggtaatgtatcttctttacataacatgcaacatanttatgtatatt

SEQ ID NO: 244045 - DNA, 419 bp, Glycine max
  unsure (1)..(419): unsure at all n locations
tctaagttagtgtaccaaactaccgcggctccggccaagctatcttgaaagaagtgtattaatagcttctcatccttagagtgtgcgcncatcttgcgacagtacattntgagatggttnttgggacaagtcgtccctttatacttgtcgaagtctggcactttgaacttcgggggaataacaacatcgggtactaagcaaagatccgtcatgtctgcgaacgggatagtcccaaatccttccacggctctcaatctttcctcgaggagatcaaagcttctcttttctttggttgccggnggcggtccttccgtggacaaaactatnggttgtgtcgcgatgttgggttgaggcaacgtgctgggtgccggcccttcggcgatcggnggatagaactcgacatcccttcgacatagtct

SEQ ID NO: 244046 - DNA, 467 bp, Glycine max
  unsure (1)..(467): unsure at all n locations
agcttggaaggatgcttcaatggaggaaaatanatagggagagaaagagagagggggagcacgaaattgaaggaataaaagagggagagaagtggaactttgaagtatgtctcacaagactctcattcatcaaagttacaacaagtgttacacatgcttctatttatagactaggtagcttccttgagaagctttcttgagaaaacttccttgaaaagcttctttgagaaaacttccttgagaagctagagcttagctacacacacccagctaataactaagctcacctccttgagaagcttccttgagaagattcctaaagaagctagagcttagctacacacaccccctataatagctaagctcacccccatgcaaaaatacatgaaaatataaaaaaaagtccctattacaaagactactcaaaatgccctgaaatacanggctanaaccctatactactagaa

SEQ ID NO: 244047 - DNA, 285 bp, Glycine max
tccgatgacatccacaaataaacgttggtggcgacttcgcgcatctttcctactttggaaagcgcacccgttagctttgccttcgctcgcccttagaatggcacgttgcgacacctatcaacaacaacaaatatggaatgcttaccattacttgttctaggcagccctaaaacataagccattgatatatcaatccatggagaatccgaattcgttaaggggtaacaaaccataaagcattacctttgacttggcctttctgcatacaatacaacgctcacaaaa

SEQ ID NO: 244048 - DNA, 157 bp, Glycine max
  unsure (1)..(157): unsure at all n locations
agcttgccgcccaactcgcccaggcgagctcagcttcgtcctttctagcaaggnngcttcctccagaagcaacaaccttctggaggaatcttctggaggggccaagggtgccatggtgctatttgcacccctttttactaaacgcaccccacttcta

SEQ ID NO: 244049 - DNA, 382 bp, Glycine max
  unsure (1)..(382): unsure at all n locations
agcttacccattctgttgtagggttnttattattatgcttgttatgtttatgngctgaaattgcttatggaaaactgctagagatgaagggtagagttaacctatggttataaagtgaaaatgtagtgttatgagtggaaaaagagtgaggctttgagtgttggaaggccaaatctggatttagtggtatttggaggttaaagggagttaatcctagtttgaaatgtcatttatgacttatgaganagtgtagactgtgcaaatgaggaatatgagtgaccaaagtgaaaacaagagccatttctagggtaaaattgggtgttgaggagtcacattttgatttggtagagttttcgtcataaaaccagtttgagcgagttta

SEQ ID NO: 244050 - DNA, 592 bp, Glycine max
  unsure (1)..(592): unsure at all n locations
aggggcccnccgcgcgactcgcatcgatctacttagtgcactatagntactcaagctttataggtganatcaggtgcagccatntcccttagagtcctctcacgatgtggaaggtgtccatgttctcagaatgtgccaaatcagaatgctcagaatcagaatgctcaaaattattatgctcaagaacaggatgttcaaaatcaccaattacagaatgcacagattcacaagttatggaatgctcagaatgatcacaacggatttaaatgatgcctaactaatctatgaaatgtcctatctatcttacgatcaaagggttataagtcagatggattgcctctagtcatacactacattcagcatgcacacaactagttgccttgtcatgtanataaaggtgtnggtttgactacagctacccctcaatgatatccaaattgacttgaattttgtgaacaaccttataaaatgatgagaagatagcacananaatntcagacacaaattcacagtctactatgacagctacaatggtnggtnagaaaactagtgaataaacttgaaaataaacactttgacagatcgctttttg

SEQ ID NO: 244051 - DNA, 222 bp, Glycine max
cacctacttcatgatgaacgttgactatccacacaataaggcgctacattatatcatcttttcacgccttcgctacctaaagccgcatgcaaattcaagtctatttctctttgctgataaccttgatttcaactaaaaggtctacatcttcggaatcgtatcttcttcataacacgctacattctatgcattttctttcggagacccctcactccccacacc

SEQ ID NO: 244052 - DNA, 298 bp, Glycine max
  unsure (1)..(298): unsure at all n locations
agctngaaggtttgtacatgacctaatctttagttaatcgncnnnacctaaagcagtctttgtattcgtttataatgcatgaagatagatcagtcggagaacaattggatttgtttaataaactgattctagatcttgaaaatatcgatgtcactattgatgatgaggatcaaactctgttattgttgtgctctttgcctaagagttactctcatttcaaagagactttattgtttggaagaaactctgtttctcttgatgaagagcacgctgctctgaattcaaaggaattgaatga

SEQ ID NO: 244053 - DNA, 565 bp, Glycine max
  unsure (1)..(565): unsure at all n locations
cggggnctcgccgccggcgcattggtttcgtcgactgcannnacgngcacnagagagtgctgcaagctatgaatgatatgaatctaactcattctctatatttcttttcttatataactatcanccatacttcatttagtcatttactctatccagagacatgtaatgtgaatttaattaatcaaaacacatccactgtatgaatcattaaaatatatacattaagtatatctttggcttaaacttaataaccatattatgaaggaaagatcccttgagaaaaacatcatttatataactgacacacttctttcacagtataggtctgcaacacatcgtatggcgaggctccaatattggtcttatcacgcgtatgagaacggacgtatagtacccctttgagatctatccattgttatcatactgatgatccctgttgggcgcgacactaccttactcttatatcagaataggttgcatctattggtaatatatttaacatggcaatgggcttagataccttaatggttaaacaaatcccatagcgatcgtctgtggattttcg

SEQ ID NO: 244054 - DNA, 296 bp, Glycine max
gcttattattcactataaataaaatacatcaactctttcaactctgttttccatctgtttggaatcagaggcctgagcgtattattgacaataccacctccattaaataattagaagtcaacaaacacatcattagaattcaaaaaaagctttgttgcaagacattctctgttgagtaatgatatgaatacaatgtttcaatgaaacacaatgctcatgatcagtctgaacatgctatcacacctaagctgaaaatgcacatagtagcatgcatattgatatatatataaccaacg

SEQ ID NO: 244055 - DNA, 450 bp, Glycine max
  unsure (1)..(450): unsure at all n locations
agctntaggggaagttaggccaaagagtttctgtgtattataagtgtttagnngannntaattnagggaagatacttaatttattttactttcgtattttctgctcctgccaaataggaccttagtctattggcttcttgaagcttacattttaaaaactatactcagggcgcttgggagttattgatcatgacgtggttgagctgaataatatgcaccgacaggtattgtattttctgttttaccttcccaccctcttttggcatagcaggtgcagcgtgtactttgtgtattggtcatgtgtttgtgtctggcatcagcctttgggtgtttcaacctttgcacgtacaatttgttgatgtgtgccttgcttctgtgtttgtgttgatctactgatttattatcattattattattaaccactattgttattaatttggacaagtttgt

SEQ ID NO: 244056 - DNA, 116 bp, Glycine max
  unsure (1)..(116): unsure at all n locations
cttcaaaatacttataatctgtacttgctccctaagcttgctggagtgtgctgcaacatcaaaatatacaaaggttattattnagttacataatcttattgactttgcatgacata

SEQ ID NO: 244057 - DNA, 433 bp, Glycine max
  unsure (1)..(433): unsure at all n locations
agctngacgacctaatgatactagagctatcagatgattattataatggnngatagctttgcggagaggtgctcgtagaagacgtcgtaactagccagcatgcggagaagccactggaggttctcgacatcgtcgtcgttgccgggaaggatgcaggggaggatctcgacagcggagagagggttgttggcgccgccttgccagaggacgtcggcgatgtttagcaccatgggaacacttaccatgttgacatgtagagttcttaactagtattcatttagaataatattttntttaatttgacaattgacatgtagagttcttaactagtattcatttagaataacctaatagcatatcaataaatttagtgtctgtntagacaaagcattaacaaagtttattttaaaaaaatattatatttgtaaaaata

SEQ ID NO: 244058 - DNA, 366 bp, Glycine max
  unsure (1)..(366): unsure at all n locations
tagtcgaatgctcaaaatcataatattcataatcactcagcacaaaatactcaatatgctcaaaatgctcacattgcacagaatgatcaggatgcacactatgcctaactaatatatgaaagggtctatctatttcacgatcaaacggttgtanatcacctagaataaccctagtcatgcactatatgcagcaaataatgtgtttctcaacaagcacctaacaaggggggtaaactacagctatactcaaacgatatccaaatgaagttgaaatttgtgaggaacacnctacaatcatgaaaagatagcacanacactttcagacacactttcaaattcttactatgacaactacctaagaaaagt

SEQ ID NO: 244059 - DNA, 310 bp, Glycine max
agcttgctacacctaaatttgtgcgaaatacttttgctatttcctgcataaattattgtcctgcgccgtatttatacacatctatgaagacttgaccaatttgtcttgttttggagggagatgtataattttgatcatcaagtggtggactttgaaagtaaaagctagttaatcatcatggcttggctgcaaaacatatttaattaaaagaataattctaattattaaaaaagagaataattctaaatctttttgcaacaccttcctaataattctcataatttatgttctcaagatattaaatatatct

SEQ ID NO: 244060 - DNA, 461 bp, Glycine max
  unsure (1)..(461): unsure at all n locations
agcttgaaattgaacaaaggaagctctcgagaaattcaaatggtcataacttatcacacggaagtccgattcaagagcatactatgtgaagatgctcgaaattgaacaacgaaagctctcgagaaattcaaatggtcataacttgccacacggaagtccgattcagacgcataatataccgagacgctcgaaattgaacaatgaaagctctcaacaaattcaaatggtcaaaacttgtgacacagaagtccgattcaggcgcataatatatcgagaagcttgaaattgaacaacggaggctctcgagaaattcanatggtcataaagtgtcacacggaagtccgattccgggggatagtatatcgagaaggtcaaaattgaacaacggaagctctcgagaaattcanatggtcataacttttaaacggtagtccgattaaggtgcataataaatcgagaag

SEQ ID NO: 244061 - DNA, 433 bp, Glycine max
  unsure (1)..(433): unsure at all n locations
actccatcattaggattagttcctgtcatctcanacaaacaaatcaaacgtaataagacaattatagttgttgtttgaatacctcacccactcaagtgtatcacacaattatgggctttctctaatgaaacactcttgcctgttaccactctaattccccttgagttcttaggcaattcaagagattatggccacaacaaagaacaattcaccaatatgtgtaaggtaaggctagagagacaaggaacagggtaaccaagaaacaggctaacaatggttttaggcacaaatgaaggaaataaaattcagaatttacgaattcaagtaacaatccttcatgcaaccaatatattaccttaaagagattctttctaaagttcttcaagcatgaaccattcagcccacatttttttttttttaatatttgatatac

SEQ ID NO: 244062 - DNA, 441 bp, Glycine max
  unsure (1)..(441): unsure at all n locations
agcttctaaaaggatatttgagttgaatttttcttatagattcaaactcaacaaaaatctcttacaattgactaaattgtacctacaacacactacaaaaatattattccatgatctttacctctaattaggtatttatgattaatgtttcataacgaaaatcaaacggaagaattcaattgaaaaaaaagaaaagaaaagtacagaaacccagtaaaaaaaagaagaagttcatatgcctaattgaaaatctagggaaagatcgaaatcagtagaataattaaaccttagaataacttaaacatctgaatttgtttcagtagcttttacatttaaattnttcgtaaacatcaataagcttatgaacactctctagtataagatgggaatcacatacttatattaattgacaaggcctcataaatttaaaggtaatttgaa

SEQ ID NO: 244063 - DNA, 366 bp, Glycine max
  unsure (1)..(366): unsure at all n locations
ctataataagacangacacactataataagaaagactcatacagtgnatatacctcacgtctagtaaatgcaagtagttcaaaggtttctaaatcctcgaacgtcattgttctatttatagaacatgcaaaacagtttgtgaatctcaatacgtgtctcttcattggttcatatattagaaataaatcagctctaacttaatactaaagttagatcacaaggggaggagtggacaagccttaacatgatttactttagccacacaaacatctctatacaatatgggacatcttaacatcacacttatacaaacaataagtttgttgaaattctggaggtctggaggtagagaagacacatctatgg

SEQ ID NO: 244064 - DNA, 278 bp, Glycine max
  unsure (1)..(278): unsure at all n locations
agctnntgggtgaagacctatataacagcactcaggttttntagtttagagagagctctggagaggagaataattttaggtattgcaattccagcctttactgttcatgcacactgntcacgtagcaataaaattcattttctgcaatttcattttctgcttccaattgtaatttcatttctgctgattaatggaagactaagtctccaacgttgttttctcttgaggatcaagcacaactctctttgaggtcttggtattactaataaattctgatc

SEQ ID NO: 244065 - DNA, 463 bp, Glycine max
  unsure (1)..(463): unsure at all n locations
agctngcttgtggngcttctatggaggctggatctttgaacttcaatggggtcctttaatggtgatttttcaccaaggagatgcagcggaagacaaagtaaaagaggtgagaggaggcgccatccattaaggaataagccatggaagaaggagctttaccaccaagatgagccttggataagaagcttggagaggatgcttcaatggaggaaaagaaagagggagagaaagagggaggggggagcacgaaattgaaggaagaanaagggagagaagttgaactttgagttgtgtctcacaagactctcattcatcaaagttacaacaagtgttacacatgcttctatttatagactaggtagcttccttgagaagctttcttgagaaaacttccttgagaagcttctttgagaaaacttccttgagaagctagagcttagctacacacacccctctcataact

SEQ ID NO: 244066 - DNA, 635 bp, Glycine max
  unsure (1)..(635): unsure at all n locations
agagagagaaagaaganctgntnnnntatattnacatcntannnnnnnaagcccccgcgcgcccgtgtattactccatacgannacgngcacnatgagagaccaagccttnacaactaaannnngtgaccttacacagatcatgaataatctttcttaatctcagatggataaaaataaaagaataatttaaaggccacaatcaaaattacctcattttacacaaactcaaaccacatttaattatattatctaatattgaaatactagtgaacacttcacttgcactaatctcactgagcatgggtggatttctcgtatcatgaattatgccttctcttcttcacataccattagtacgtctaaacacatacataaatcaatcattttctggttaggggaagagacatatattagccctcaatacataactccatatanaaagaaagcttaatctgacatacatccgcaagccttatcactttttctttttgaaccccaagactggccagcaacccgcacgcaattgcacagatttcttattccttgacccggcgcactngctattcaacacaccaactgtgctttccaccaacacaactgattggatcgctttcccacttacgcgacacaggg

SEQ ID NO: 244067 - DNA, 372 bp, Glycine max
  unsure (1)..(372): unsure at all n locations
agcttgtcacaagtatatctaacctgttctctaatgattctnggcaaacataccagccagctgactgctggagttaacaaagttgggtgttatttcgctggatagcaccctttctctaacaaagagacagatgatcttgctatgcctttgatccttcatgtgcatgcctccaattttagctgatggagtacttgcctaagttgcataagctcacatgtggctattgccatacaacaaaatccaacttttgcactggatctagtaataatgttgtccttattgctcttccatgatattaagtttcctccagcatgaacacagatccttaagcggatctcgtgtctaagggtgaccttgtccagacaacatcac

SEQ ID NO: 244068 - DNA, 450 bp, Glycine max
actaagcttcaagaaaagatggcctcagcaaattcctcgtttccttaatgttaatttataaatagacctccaatctctaatggagagggttaccactactggacaacccgaatgcaaatatttattgaggcaatagatctaaatatctgggaagccatctgaatatggccttatatacccaccacagtagaaagagttgcaatagatgagagcttatcaagtgaaagcataaccatagcaaaacctatagatagatggtctgaagaggatagaaaacatgtacaatacaaccgtaaagccagaaacatagtaacatctgccctaggaatggacgaatatttcagagtctcaaattgcacgagtgctcaagaaatgtgggacactcttcagatatcacatgaaggaactacagatggtccaagacctacgataaatgcactaactcatgag

SEQ ID NO: 244069 - DNA, 289 bp, Glycine max
tctatcatatctaataattggcacatttatgtctaattgcccttttacttcattgtagtaaatttctaaggcatccattgcctaagaaatctcgggcagtaagtagacataactgtaacgtgaataatcatcaataatggtgataaagtatcattgctttctgagagaactaacatcaaaaggtccacaaatatcagtatacacaatttcaagaagctgagtgcttctctgagctccttcctttgcatgtcttgtctgctttcctctaatacaacgcacacaaatattt

SEQ ID NO: 244070 - DNA, 431 bp, Glycine max
  unsure (1)..(431): unsure at all n locations
attgaagctgacaggatcaacaatggttggttgaattatctccttagctgggaagacaccccatgtcacagcattaacatcagtttgacccacattagatntccagctcccgtctttattcacagccatataagttaaagatgttcgatccttgcatttatcaacaagtgcatccagcttttccttagagcagaagaactctacatatgccttctggtaaacatacccgcctggtccaccccagcctaggccaaatttcaaacaaaaatgaattagtgtatctcatatccaccaaccaatatggacaagatatgaataccctcagtcacaaattgcacccttttgagtacctttcaatcttcattatttgttntacaagaaaatatnagtaatataaagtggtacagccacacatctcactcaatactagt

SEQ ID NO: 244071 - DNA, 385 bp, Glycine max
acgcatcttaagcacctgcagctgcagcttcacttcccctatatggatggttgatcgttatatagatttgtacgcgtccagtctagtctctctaagccctgaaaccgtaactatggctatgttctgagattcgtcttttctgttgttcaaagatctctccgattccttttctttcgaagtggcattgcccaaagtcgaatcaaaggcttgacagggtcttcttagcccatgctaactagaatagttagtagcttataggatcccaaagcaataaccacagatggaggagcattcgtctttttaaccagttttcaaaaaccaagatatcctgcctatcccgaaaaacggactccctcaaaacaaaaagtagcttcatagcaagagt

SEQ ID NO: 244072 - DNA, 495 bp, Glycine max
  unsure (1)..(495): unsure at all n locations
aggggnnnnnnnnnnnnnccctggttgcacctangaacngcactatagagtagctcaagctggtaataggtgaccagtggtagtggatttcccagagatcactttggttattgacaccataccggagtggacccttttctctaaccatactttcctaaaatctgcgcaaaatcagaanaaaaaaaaggtggtcaaaccattacaattaaccaccctataaggaaaataaagtttaccacttagactttggcttacaaactttcattagctaaaagataagatctaatcccccatcaacagccaaaatggatgctcatgtacgataaactagttgattcacgataaaaatgactacaaattatgactccatcatagacgaataaaagggctgttagcacggacgttaattattatagtacaaaactggctgaccgtaagacaatatgatatatagacaaaactactgatgatagacgtatacatatagacaaattt

SEQ ID NO: 244073 - DNA, 79 bp, Glycine max
atatgggaccgttacaaatagggaactggtaccaagactgaacgtgaaattaaataaagtgcgacagtgcgtgttgcaa

SEQ ID NO: 244074 - DNA, 133 bp, Glycine max
agcttgtaagtatttgttggtataatctgcccgtccattaggctcttaatgtctttagaggttacttcctcattgacatcttttgtcttgaatggaattgccatgacaggtttattgttactgtctttgatgt

SEQ ID NO: 244075 - DNA, 201 bp, Glycine max
ctggaagatgacatgcctttccatagactacccaataaggagacattcctatgggtgctttgtatgcagtccgatgtgcccagagagcatcatcaagcctggtactccaatctttcctgcttggctgcacaatcttctctaaaattctcttgatttcccggttagaaatttctgcctgcccattggtctgggggtggtatg

SEQ ID NO: 244076 - DNA, 314 bp, Glycine max
  unsure (1)..(314): unsure at all n locations
agcttggcatcttcctccaactntctcttgtgttcttcctcatatagngctttaacaaaggcaagcactcttcttctagctcaaaagcttcattcttctcaagcatctcatctaagttagcttttttcatgctttggccaaggattgcttcttagccttagcaaaagctacaacttcttttctactgatgagggataaagaaagnttgatttaaggaataggatgaaatggtgactaaggtggaagggctaatgaaggtgagggttgaggtgttggagttttaagaatcgcattattagattcttggtcttttg

SEQ ID NO: 244077 - DNA, 335 bp, Glycine max
  unsure (1)..(335): unsure at all n locations
cctcctgaaccgtctactcttaaaactaatactaatgatggctattntacggacccatggatgtcaagctctggcggtgtcattcgtaatcattatggtcaatggatgcaaagattctcaagctattgcggttttatgtctaatatcattgtagagcttattgcaattcaccacactgcaatctttttattgctaagtctagtggctctcagtccgaggtatgcaaaatagactcaaccctcgcacttcatcttatcaagacaagagttcctcgcactcatcctctcaccccccttggtcgacaattcaaaacgctaattacttctcaatgattc

SEQ ID NO: 244078 - DNA, 221 bp, Glycine max
  unsure (1)..(221): unsure at all n locations
cntcgttgtcgtccgcaatcgtgagaccattcacgcttctcagcatcatatcaatttcncaacttaatcctcttccaatcactgatctcctttccatccatctctttaatggatctgatatccccgcatccaataccctatctctgcacttttattcttctgcttgtttatagtcacattcgtaatctattctctcccactacctattcttctacttttcc

SEQ ID NO: 244079 - DNA, 403 bp, Glycine max
  unsure (1)..(403): unsure at all n locations
agcttggaaggatgcttcaatggaggaaaagttagtggtagtattttagagaggngggagcacgaaattgaaggaataaaagagggagagaagcggaactctgaagtatgtctcacaagactctcattcatcaaagttacaacaaatgttacacatgcttctatgtatagactaggtagcttccttgagaagctttcttgagaaaacttccttgagaagcttctttgagaaaacttccttgagaagctagagcttagctacacacacccctctcataactaagctcacctccttgagaaacttccataagaagattcctaaagaagctagagcttagctacacatacctctttaatagctaagctcacctccttgagatgagaagcttgaacttagttaccta

SEQ ID NO: 244080 - DNA, 442 bp, Glycine max
  unsure (1)..(442): unsure at all n locations
agctntgactaaactatacatttgattaacagtttgagagagagagagagtagaaagacaattagacaagaaacaaataaaataacttatctcaaacaagtgattaagtggtacagtttatcgcttatagttctagcccgtagcttaagttggataattccttttcaaaagaattgacccaaggaaaaagtttctatgatttctggggagggaacccaaaaaaactaggcggcttcaggatcagtggacaatcatgaaaaaaagagagagaagacaatatatagtctaaaccaagaatagaagaactgatggatcttacaaattaaacagcaaccaacaagaacaattgaaaagaaatataaaacagtgaattaacacacacagaagaacaattaacatatgagatggctattattgatggagtttgagctacatgctggta

SEQ ID NO: 244081 - DNA, 184 bp, Glycine max
  unsure (1)..(184): unsure at all n locations
agctntagctctcagcccanactctctttcacaaattctgatttcaggcttaaataggcggccttgttcgtgcttgtgcacttagtggaattctgaaccgcttagtgcacattagtgaatttcgacttagcgcatgcctttctcgctcagcggatggactgaagcggtgcacttattgtgatga

SEQ ID NO: 244082 - DNA, 517 bp, Glycine max
  unsure (1)..(517): unsure at all n locations
cgcccggtgttgaagcatctgattcgcgatcctctgagtcacctgcngcatgctagcttgtangaaatatgggtacccatcacatgtggtactacgtggtggtcgggcgatggtgcacaacaagtttttccacattcatcaatcacggctatacccaccattccctgttgcccaccttcaactgagctcacgtacacccacgtagcccatattcttttgtatttcaacaccgggttctcaataatccttccaagcttccccaacattcaggtaatactacattctaatagcgcaaactatctcattctaaaaatcattgtaatgcgtaaaactttgtctaaacaaccacccaaaattacaatattttttatctaaacaccccacaacaatttcttctatccatttctgacggttgggggaatcgaaaaattctgggggctttagtaataatatacttttaactgtgggattatttcataataaaaactaattttaattctcttctctcaccacaaan

SEQ ID NO: 244083 - DNA, 337 bp, Glycine max
ctcgctaagccaatttgctggcttagcgagcatccgtcaagcacaacactcctatgcttagcgcaaggaagactctggaagaagatgagtgtcgcaacgtgccctttcgcgggcgagcgaaagcgaggctcaccggtgccctgtcgcaacgtttatttgtggaaaacgtcggaaaaaccgaatgaaaaccggctcaaatgaaaattctaagttcgggaagtgtatttacttttgacgaacgtattaacacctctcacgtttgtctcaaacgacaacagcctattttttacaattgtgaaattgcgttatggaaccttttatttcttttttatttttg

SEQ ID NO: 244084 - DNA, 340 bp, Glycine max
  unsure (1)..(340): unsure at all n locations
gagctctgggccaggccaccttcttaatgaatagctctacactcatgattggcctttgctgggccaattcttgcaagctacgcataatgagaatttgtcctttaaacaagctctgcaacctagcatctaaagtctgggagctctgggcagatgggtcgactgatcctggaggtggagctggagtaaaaaatgaagggatgcaaactattggtgcagaggaagagggaacatcagctgctctaagcttgggtcttcttgccactagaaaataatngattggtcattcacatgccaacagttccttgtaatataggccaagttaatgatcgcgctcaaactc

SEQ ID NO: 244085 - DNA, 426 bp, Glycine max
gctgtagggttaagtctcacgattgtcatgtgctcatgcaacaattgttagccgttgctatacgagacatcttgccaaacaaagtcaggttagccataactcgtatgtgctttttcttccatgctatatgtagcaaagtcattgatcctgtcatgtttgatgagctggaaaatgaggccgcaattatactgtgtcagttggagatgtattttccccctgctttctttgacatcatgattcacttgattgtgcatctggtcaaaaaaatcaaatgttgtggtcctgtttatctacggtggatgtacccggttgagcgatacatgaagatcttaaaagggtatacaaagaatctatatcgttcacaagaatctattgttgagaggtacattgcagaagaagccattgaaatatgttcataatacattg

SEQ ID NO: 244086 - DNA, 422 bp, Glycine max
tttctgagtgtgctcatggacgtatgaacatacattggctgctgatccacttcgaaactttgtgcctgctctatatgctcctaatgacattcgttacttcctagtcctctacactaacaattaggtttctgaacatttggtgtctccacggtatctccttaatttagaggaattactgggcaccttctcgtttacacgaagacaagggaacattggtcctcaaacatgcggataatgagatctatatatccactgtcaaaattcatcttttatagatgcaatatatgatatctattgtgaagagcggtatattccctatcagtgtaagccagacgcatgaagcacaaaatgattttctatatcacagctatgggtgatcaattacttaccggaacgttcttctcgtctatctataaacatct

SEQ ID NO: 244087 - DNA, 482 bp, Glycine max
atagcactcatagacttatgacggcttctgcgcccatagagaatcgtggtctacaatgccagagacacacgagagatctcattatcttccacgctcacaagatctgtcatattgacatcttactcccagctgctggcatgtatagtcctacggctatgcgcataatctttatggtgactgagaaccaattgcctgataacacgctgacacttgagtggtctattgcgccctccttcacggccacactacaagaccgttgacacacgcatattcatcatctcttactcacttgggcgtggtgtcatactgactttagcatcccgtccacgagtggatatacccgggaggttatcgctattgctaatccctcttagtgtgcatatgaagaggatatttgttgcacattgcagctatacattgaacgaagaggagcgtggccgtcttttctgactctattaagccgtatgagatttcgccgaccc

SEQ ID NO: 244088 - DNA, 481 bp, Glycine max
  unsure (1)..(481): unsure at all n locations
agctctctttggaccttgaacaagcaatcaactcctctttcagaaccatgctatgtgctcgcgactggtccctttcttcccttcgcaacttgagttcattattgcttccccatagagctccgcgaaatgtgttccggccatactcttccttgcgagccctcttggtctcttgttcaagggctcttgcggtaattgcattctcttcccgtaacccggcacactcctttcgaacgtgtgtagtagccaactgggacttctccttggcgagtgttgcctttcctaactcgctttngagagctnggacttcctcgtcctcttacggtgcttcaaaattctcttcgctgacgacttttaacttggcgagccaatctaaacctcgtatgcgaactttcagccattcgtggtacccaccaatgatgccattacgaacgcctctaagctcttgatctntccttaacggcggttcccatgccttatggat

SEQ ID NO: 244089 - DNA, 382 bp, Glycine max
  unsure (1)..(382): unsure at all n locations
cgcataaccgactaaggcattctatgaatttaaaacaatgaaggattggtgcttagcgcatcctgttgctaggcccaattcatgaaagttcaattccagggaggaaattgagcttagcgcgcttagcgctgctacaataattnttcaacaaagaaggaattgcgcttagcgcatcatctccgctaagcccaaatcagtgaagttcaattctagagaagaacatgggcttaacgcagtgatgtgcgcttagctgaaccatctagccaattggtgaaaggtcaaagcgcttagcgcaagcaacaaccgcttatctcgtgaagacatggcgcttattgcaagggttgtgcttagcggatggacaactgaaaaanaaaaattaagt

SEQ ID NO: 244090 - DNA, 480 bp, Glycine max
  unsure (1)..(480): unsure at all n locations
gcatcaaccgcactaagtgcgattctatgaatctcaaaacaatgaaggattggtgcttagcgcatcctgttgctaggcccaattcatgaaagttcgattccagggaggaaattgagcttaacgcgcttagcgctgctacaataatttttcaacaaagaaggaattgcgcttagcgcatcatctccgctaagcccaaatcagtgaagttcaattctagagaagaacatgggcttaacgcagtgatgtgcgcttagctgaaccatctatccaattggtgaaaggtcaaagcgcttagcgcaagcaacaacggcttagcgcgtgaagacatggcgcttattgcaagggttgtgcttagcggatggacaactganaaataaaaattaagtcttttcctgtccatctcttcacaagaacttgaaacccttgttaccaatactaaccaagcttaagtcacatacaatcacangcagttgaactaac

SEQ ID NO: 244091 - DNA, 537 bp, Glycine max
cgcccggccatgaaacattcgattgcgagctactctgaaaccgggatactgctgactcacctgctgcatctaacttgcagagttgaagatcagcacgacacttcttcgggatctagaatcatgtacttcacgagtggcataccatgggactaatatctgataatttcattgtttagaataccatttaccctatggcgacctcttttctaaccctgcattagaagtactttccatatgtgtatgaatagagacatatgagggctgctctgttttatgatttaagtgatcttatatgcattagcaaggtcatatagatattcttatactcgacacttgcatgaaataccaggataaattatatagcacgtcgtagctatgattatgcactgagtacactaccgtcgcataaacacattttgtacaacctgcttcagagatataagataacacacaccccacatgggaaagaaaatgcaagatatttttgctgtacccccatcagatcagctactacactatccaccttagagttctgtg

SEQ ID NO: 244092 - DNA, 267 bp, Glycine max
gtcatcataatatactgatcttatccatgttaagtatgtatatcacctaaccatgtcgtgctgccgtacatatctcagttctcaccattagttttctgtaaactagatcctggtacatcatcaatatgaccataaatcatgttcagttagccattttgatgtgcattgggagttgaaacttacaataatagttgtcactatcagtatcttaatcaaatactatctaaacaaggtccctctctcccccccaccaacctccccttctcc

SEQ ID NO: 244093 - DNA, 416 bp, Glycine max
  unsure (1)..(416): unsure at all n locations
agcttattaaaattgatgcttaaatgttctatagttattatttgcaagttgctacttttataatggatttattatgcacttatgcatgcattanttgtatgttatttgtttagatctaataagctttatgttcttagattgttatatcttgcccaactgattaaggcttctaatttgataaattcagtcttgaggatggagcaagatgttgagagtttgtctttcatgggcacacacacagactgcatgcgcaataatttggaagaaccaaaacaagataactctttcatggtaatggctggacgtataatttgattttttgttttgcgttattgcttaatgccctgtgtttcattttgtagtttgtaacatcacaggttaaaaatttagtctaacattnggtatcaaagcattaa

SEQ ID NO: 244094 - DNA, 364 bp, Glycine max
attatttgtatgggttgaatgttgaattctggttgttcctggtgcggagatgatggtacagccggtgaaccagaagctgcagtttcttttggtgaggtagccatggaaaaacagagcgtttggaacgatttcgtaaatctcggaaaactattgggaaatgctggtaaaaacacgaatgccaagcagatataaatttgaatgaagaatgtagagaggcgtgtgaagcaacggtcgaatttgctttgtggtgaacgtgctattaatgttaagtgattcgtttgggcacgttcagattgcagtagctgctataattcctctagcagacaaatgcccagcttgcccctcagtttttcaaactgatttg

SEQ ID NO: 244095 - DNA, 415 bp, Glycine max
  unsure (1)..(415): unsure at all n locations
agcttanggtttatggatacttcactaatattagggtttacgagtttacgatttatgggttattgagtatttaaggtttagggtttatggtatttgacaaattatgattttttgttacatcccaaattaccaaataagggtatttgactagtaagggtttacggatacttgacaaattacggttacttgactaagtaaggtttacgggtatttgaaaaaattaggggtttatggttaattgacaaatcggggcttatgtgtatttaactaattacggttacttgaccaattaaggcgttagggttactttacaaatactgngttaggggtatttgactaataacggttaatgggtagttgagtaattatggtttattgttacttgaccaattaacgcttaggattatttgactaa

SEQ ID NO: 244096 - DNA, 255 bp, Glycine max
  unsure (1)..(255): unsure at all n locations
ngcanacttctancaaaattaagtgatcacaagtttttcattggagaagaaggggataggtgacctgatggtagaaggttctttaacatcgtcatcatatcaagagctatggagaagcattangaatacgaatgggaaggggataggtgacctgcttcaatgaagttccaaacatctactaaaaatcacgttagttgctatttcaatgtgattctggatgatccaacactgaatcaaatgcgcacacaaactgac

SEQ ID NO: 244097 - DNA, 459 bp, Glycine max
  unsure (1)..(459): unsure at all n locations
agcttacctgggtaatgtatacgtcaaggtgttcatttggatcattagtaccatcatacttcttaatggtcaaaattttcagtttgaaggaagagtcgcttccatgatgtcgggcataaaagggttcttgaattgtagcaactgtctccccaaagtattaagtgatggggaaatagtttcttgacatacacttaagttagtggtcttggacacactgaaagtccttgacttaatgtctcttcctgaactttggggtgtgtgacctattacattcttgtagatgtgcattttcacgtcgaagggcgatgacttcttcggcgtgatgacgatgcatgtccaagacctaagcttgtagtcttcgcacgactgaggacaaggtagtctaatattctacatgaatctccttgttttgtngatctggtggttgttccattgttgctgtattcattccacttctag

SEQ ID NO: 244098 - DNA, 310 bp, Glycine max
tatccgggcctccattagcaaagccttcatagagaaatattgcatgcccagcagcaggaggaaggccagcagcagccagctgcaggcgcaccgctgccatctttataggagacaccatccttggagtccatatccgctcacctgaggaggatggagctctagatgcacgcttacatgcagcatgtgactagccagcaggcggctaatcacaagggtcaggtgtagctaaacgagagcttctacaggtacacccaacaccagcaaagccaggacctcagtcctttcccgtgacctacccccgagcaattta

SEQ ID NO: 244099 - DNA, 66 bp, Glycine max
tgtgggtcttgaaaaaaacgcaaatttgatcattctactacgacgactgagaaaactggggcaaat

SEQ ID NO: 244100 - DNA, 391 bp, Glycine max
  unsure (1)..(391): unsure at all n locations
cctatagaaggttcgttcctaatttctctacaattgcatcacctctcaatgagctggtgaagaagaatgtggcatttacctgtggtgaaaaacaagagcaagcctttgctttgctcaaagaaaagcttactaaggcacctattctagctcttcctgacttttctaaaacttttgagctagaatgtgatgcctctagagtgggagttggagttgtattgttacaaggtgggcaccctattgcttattttagtgaaaaacttcatagtgccacccttaacaggggggttcatagaactaccaagaagtccccttttgaggttgtctatgggttcaatcccttaacaccgttagacctcanttccctccactagacacttctttatacataaag

SEQ ID NO: 244101 - DNA, 449 bp, Glycine max
  unsure (1)..(449): unsure at all n locations
agctngtgggtgcgggatggtaggggatcangaaggaggtgttgacgaagaatgtttccaagaaggcgaagaagataaagtgctatttacaaaatgaataccaaagcctcaaataatgtattgggtcatgactcttttggattcacatttttttttattattgttgtatatagttgtttcattgtccctaaggttttgcttcaattntgtttaaattcaagctgccatgtcaaggaaaaggaaaaacacacgcagaggctcaattgtattaaatttggttttggttctcttgctttaagaattgacttctctaagtctgacaacatcaaaatatacaatggaattcatggatgcttatatcaagtagctatttgatttttaaaatttctaagtttctgattataaagcacttgatctccttngtaatctttcattatataattttcatc

SEQ ID NO: 244102 - DNA, 410 bp, Glycine max
  unsure (1)..(410): unsure at all n locations
ntagctctcatgagtgtctcaatcttcagtgatagagctcgcatctgctttcctaatttagttatggattcatctttctgcacctagttgacacctctcttcgtaatcgtcctatcccttaagttattgtaggggttagaacacatgtcttcaatgattttgatgatatatgtaagggctctaacatgagattgccataacaagcaacatctaaacttgtcctattatgtgaggacattccaccatagaaaatatcaaccaacctttgttgagaaaagccatggtgaggacaacttttgatcatctcttgcaatttttcctaagctttaggtagactcttttgctccatctgcaaaaagtttccaatgtcccctaatgtattgatttgccttcatggaaagagaaatacc

SEQ ID NO: 244103 - DNA, 442 bp, Glycine max
agcttccctattagaaatgacaaatcgcgccgatctacatatgttataagagacaaatcatctatgttgttaatgcgagtaaaactaataagctcgtcaaatattctaatagagataggcattagcaaaatacttcacattaataatatgattaaaaaaaacaaaccaaccataagctaaaagcctaaaactcatacatgtgaaaattcaagattttcattattttaacatagatgcttgaatataacatgttgcatcatgtggcatacgagattgagtcattgacaaactctcaagcaccactataatggtgatagagtatcttaaaaagagaaatgctgtatatttcctcttataatatttcttaattaattcttctaatatcttataaaacaaatactaaatgaagaattatgaagcttaacatttcgaccgattaaat

SEQ ID NO: 244104 - DNA, 284 bp, Glycine max
  unsure (1)..(284): unsure at all n locations
tgcataagtgatgaacggttatcttcctctgttataaatagtttgttccacccaaactctagtagcataaacttcatccaatttttcttataaagtttttcatttcaaatttaataattataggcattaaaagggagctatagaaatcacaagacaaaagggccaagttgagtgtactgggcatggctntgtgtatgaccattacagcatatagcttagttgacacactttcgttcttttggaaatgctctaacatttaagaaaatttgatcctttgaatctca

SEQ ID NO: 244105 - DNA, 366 bp, Glycine max
  unsure (1)..(366): unsure at all n locations
gcttgagcaaattcaaacgacaataaccttttactcggatgtcntgatgagtcccgtaatatatcgagacgctcgaaattgaatgttgaagctcttagtcaattcatacgacacataacttttactcggatgtctgattgagtcccgtcatatattgagacgcttgaaattgaatgttgaagctctgagccaattcaaacgacaataactttttacttggatgtctgattgagtgccgtacatatcgagacgctcgacattgaatgttgaagctctgagccaattcatacgacaataaccttttacttggatgtctgatcgagttccgtaacattttgagctcttcgaattgaatggtgaagcttt

SEQ ID NO: 244106 - DNA, 297 bp, Glycine max
tttcgagcatctcgatatatgacaggactcaatcagacatccgagttaaaagttattggcgtctgaattggctcagagcttcaacattcaatttcgagcgtctcgatatatgacgggactcaatcagacatccgagtaaaaagctattgtcgcttgaatttgctcagagcttcaacattcaatttcgagcgtctccatatgtgaccggactcaatcagacatccgagtaaaaagatattgtcgtttgaatttgctcaaagcatcaacattcaatttcgagcgtctcgatatattacg

SEQ ID NO: 244107 - DNA, 482 bp, Glycine max
  unsure (1)..(482): unsure at all n locations
agcttcaagaattatggcctcatcaaactacttgtttcccgagggaaattctataaatagacctcccatctttaatggagtgggttaccactactggaaaacccgcatgcaaatctttatagaggcaatagatttaaatatttgggaagccatagaacaaggaccttatgttccctctataatagctggaagtgcaacaatagaaaaacctagagcagattggactgaggaagaaagaagattagtacaatataatttaaaggccaaaaatattattacatctgccttaggaatagatgaatactttagggtttcaaattgtaaaagtgctaaggatatgtgggatacactacaagtaacacatgaaggcacaacagatgttaaaagatctaggataaacactntaactcgtgaatatgaactttntaggatgaatgtaaatgaaagtatacaagacatgcanaagaggttcacacacatag

SEQ ID NO: 244108 - DNA, 362 bp, Glycine max
  unsure (1)..(362): unsure at all n locations
cgcttctacatctttggcaaggcatgtcatcttcctgtatagagcacanagcctactgngctgtaaagacttgcaacttctctatggaccaagctagagaagaaaggaagttgcaactaagtgagctagatgagatccgtttagaagcctatgagaattccaaattctacaaggagaagacaaggaagttccatgacagattcatagctaagaaggactctgtggttggacaaaaagttntattgtataactctatgctcggactcatgagtggtaagttaaggtcaaagtggattggtccttttgtggtgactaatgtttttccttatggtacagctgagatcaaaagtgaatccacagat

SEQ ID NO: 244109 - DNA, 467 bp, Glycine max
  unsure (1)..(467): unsure at all n locations
cttgtctcatcaatcgactcaaccctttgccaccatcaagaacaagaatggtgctatgagatcctcttgcctaagtcccctttgaatattaaattctttactcgaactaccattcacaaggatggatattgatgcgaattcaactcctcatataatccacccaatctatttctcacaaaaacccaacctcttcatcatataatataaaaactctcaattagtcgattcatatgctttttcacaatcaactttaaataacaaacaatcttttttcctcctccttacatcattcaccacttcatttgcaacgagaaccccatcaagcaaanttcttcttcccataaaagcacattgcctttcatcaataacctgtcctaacactatttttagccttgtagctaacaatnttgagattaccttatacaagcaacctatcaaggaaatatccaaaagccttgaggattcac

SEQ ID NO: 244110 - DNA, 387 bp, Glycine max
  unsure (1)..(387): unsure at all n locations
tcaatcacaactatngcgggctcctctaccatctctntatcccaattccagtccttggattcatcaactaccacatgtgtactcacgagcacttctttggttactggattaaacaatttgtaaccaccagtggcatgataacccagcagtatcattatctgacttatgctatctaacttctttctcaactgatcaggcacatgtttataacaaatanagccaaaatttttaaaatgactaaccactggtttgtgtncaaaccatgcttcttcaagtgtgatgttattgagcctttattgtgggctctcatttatcacatacactgcactggagatagcctctgcccatagaaaatttggcagcttctttccattaagcatgcatctg

SEQ ID NO: 244111 - DNA, 201 bp, Glycine max
gtatgtgcttaatgcaaatgctcgggcaattcttgatagagctgacaatggatgaaactggctttcaattgtctcgacccgttattaatttcactattataatcaatgccagctaagttgtactgccatttgctaacacaaaatgaaatatttcgcttcttaagatcgcatattctacaggaaagtctaattgatcattgt

SEQ ID NO: 244112 - DNA, 75 bp, Glycine max
gatgtactctaccgagtccatcttggataccagctaggtggtatggctcggcatgtactgtctcggacgatggga

SEQ ID NO: 244113 - DNA, 359 bp, Glycine max
gaagatctctagtgatctacgaacggaattccaaatcgaaatataatatagtttggccaagagatttaagctaaaatgtctttttcaagagatttactctctggtgaatcgattaccacaggatggaatcgattaccagtggccaaaatgatttataacagccattacaagtttgaatttcaattctacactgtgttattgagtacacatgaatggtcatcgattaccagcagttgctaaaacgttttgattcaaatattaaagcctgtaatcgattacacaagtcttgtaatcgattaccacaggagattcttagaaaattatttccaaaggtcacaatctgttcaagcgggtttttt

SEQ ID NO: 244114 - DNA, 445 bp, Glycine max
  unsure (1)..(445): unsure at all n locations
agcttcatgatgatgaaccaagcaattgtgatgatgccaaaagcccaagtgattgattcaagacttcaagatcaagaatcaagaatccagtccaagattcaagattcaagagaagaaatcaagaagcaacaaatcaagacttcataaaggataagtattaaaagaattnttcaaaaaccaaatagcacagttttgttttacaaaagaattttctcaaattttctaagttaccagagtggatactctctggtaatcgattaccagttatcaataatcaattaccagtgatcagtttggttttcaaaatggtttcaaatggtttgcaacgttccaaaatgattttcaaacagtgaaatcgattaaactatattagtaatcaattacaagtgaatctgaacgttggaattcanatccaatggtgaagagtcacaacttttcataaaat

SEQ ID NO: 244115 - DNA, 351 bp, Glycine max
  unsure (1)..(351): unsure at all n locations
tgtcttgtgcataattagggtacactntatagaatacccagggcacaaaattacagaattgnggatttctaatgaatagcttatgtaaatacataatatataattgattgtgttttctatgatcaatgcttcatttaatgcttgatgtttgtatgcttttggtctgatcacccatttgtgtgtacagttaggtgactttagcattgggaaatgtactgttgccttataacttgattgaagcaagatcgaaacttagtcttacatgagggattcgcggatngagttttggttttaattatgctgttacaataatactgtttagttacgcctagtctacatggggatctggga

SEQ ID NO: 244116 - DNA, 332 bp, Glycine max
  unsure (1)..(332): unsure at all n locations
agcttcaacattcaatttcgagcatctcgatatgttacgggactgaatcacacatccgagtaaaaagatattgtcgtttgaatttgctcagagcatcaacattcaatttcgagcatctcgatacgtgacgggactgaatcagacattcgagtaaaaagttattgtcgtttgaatttgctcagagcatgaacattcaatntcgagcgtctcgatatattacgggactcaatcaaacatccgagtaaaagatattgtcgtntgaatttgctcacagcatcaacattcaatttcgagcgtctagatatgtgacgggactgaatcagacatccgag

SEQ ID NO: 244117 - DNA, 314 bp, Glycine max
  unsure (1)..(314): unsure at all n locations
ntgagccaattaagacgacaatatctttntactcggatgactgattgagtcccgtcatatatcgagacgctcgaaattgaatgttgatgctctgagccaattcaaacgacaataatattttactcggatgtttgattgagtcccgtaatatatcgagacgctcgaaattgaatgttgatgctctgagcacattcaaacgacaataactctttactccgatgtctgattgagtcccgtcacatatcgagacgctcgaaattgaatgttgaagctctcagccaattcaaacgacaacaactttctactcggatgtc

SEQ ID NO: 244118 - DNA, 460 bp, Glycine max
  unsure (1)..(460): unsure at all n locations
agcntttgagtgaaaggatgtgactcttcatatttaaatttgaatttcaacgctctagggaactggtgatcgattaccacaacattgtaatcgattacacgcatattgaaaatatttagaacgctgtaaattcagtttgaaaacattttcaaactcattttgctactggtaatcgattaccagagagtaaaaactctttggtaaaggttttgtcaaaaactcatgtgctattcaaagtgttgaaacaaaccttttaatacttatctcgatcgagtcttttcttcattcttgaatcttgagtcttgactcttgatcttaattcttgagatcttgaatcttgaatcttgattcttgtttgaaggctttcttcttgaatcttgaattattcttgattcttgaactcttgacttgttctcgattctctggaaatgttctatgattcacttgagcttgttttcat

SEQ ID NO: 244119 - DNA, 381 bp, Glycine max
  unsure (1)..(381): unsure at all n locations
tgggtaagaaaatgatggcatgactnttatccaatcttattatgttgaaaagctattgaagaagtctaattattgtgatgcgaaacatgctcttactccttatgactcatccatcaagttaaagaaaaatttgagtaaatgaatttctttacataaatattctcaaagtatcggttctttgttgcatttgacaaacttctctatgcctgtctgatattgcacatgcagttggtagattggaaagtaattgagggatttagtgatataaaatcgaagttctgattttgatgaaataaaaatgagaagtgcgtatgtctttgctctagctagttgcgcagcatcatgaaaatctactagacaagttattatctcacatgaaag

SEQ ID NO: 244120 - DNA, 206 bp, Glycine max
  unsure (1)..(206): unsure at all n locations
agcttacactatnacgaaatatacagttaacatatgtttgtgacaaaccaatgcttagactaagtgtggtggcctaatatgaatacgtcgatgatgccacattagtttccgatactacattatgctgtgtatgacgatagctgcgacgacacgacaatgaaatgatatcgatgtatatgttgctcccatgaccgaagacttagaga

SEQ ID NO: 244121 - DNA, 206 bp, Glycine max
tctgtacgtgtcgagtaaagatcacatgtctgtcattatctgcaatagggagcagtgttgaataagtgctcatggagttgatgctctaaacgagctaaatgcgcttaactcacatcgtttgcttatccccacactatcgtgcttaaccagagacgtgaatctggataacatatgctatgccgcgtgctcttacagcgtgattagct

SEQ ID NO: 244122 - DNA, 450 bp, Glycine max
  unsure (1)..(450): unsure at all n locations
agtcttaaaatattaattattttataacattcattacatggaacaaaaaacattacttaatcgagtaaataatataataattaaataaagttctaataatttaaaatatttataattttattctttaaatttagttttagtttagattgcatctttcaattttttgaatctgtacttgagttttttaatttttaattgcaataatatatttattaaaaaaattatattattcattaaataattttaaatatatatctcaaccacttgcaatctctcagtatctcacacagttgtactatataaaanagttaaaatatgcttttcaccatcatataattagagatgtttgacatctatctttgntcttttacagaatctaatatattctctggttcttataaaattacaatattctttttgtctcgaggaagatttgaatattgaatctat

SEQ ID NO: 244123 - DNA, 298 bp, Glycine max
ttgattctatatgtgtgctctaattcaagggcataatgttgtcatcctatgtctaacattgatttccttatgatatattttctttttgtttttttagaagttatcctctctcgagcgcctaacccctaaaactgatttatgcatattttctttagatttttattaagagttaccctctgttgagcatctaacccgtattgtaaagatgagtattgcatgaaatataaataagaaaagacaatacgatagaaaacaccttctacatttataaatatggagtacatcatacatctctttg

SEQ ID NO: 244124 - DNA, 434 bp, Glycine max
  unsure (1)..(434): unsure at all n locations
agctntaacatcacaagtaagttccttgctctnttctttgttatttcattgaactttaggatagagaaccttagattaagttttagattnttagggttttaccgttttagaagtagttaacattttaggacttttcacatgttttgcattatatacattgaactgagggttgttcatgtttgatatgcctgttagaggcccggaaaaaagaggaaaacgagctgctttttctgcatttttttctggaaaatgcgatgaactcgctaagcgaagtcatcaatattcattgaatatatgcattntctggaagaactcgctgagcgcgcctaccgcgctaagcgaagttatcttttgaggatgaatattcattctcttaataaagtacctatggctaagcgaggctgattcgctagcccatgtacttagtcaaaatt

SEQ ID NO: 244125 - DNA, 275 bp, Glycine max
  unsure (1)..(275): unsure at all n locations
tgcttaactatgtatggcaaaatttcattactggtgttcaagacatacaagtgaacttgtaacaaatcttctacacttggagtgatcacatgtagtcctcttgaacccttaccacccactctgtcatcatgccgagactcangaaggccaacaggtttagccttctctaagtattctgaacaaaattcaatggcttcttctgcaatgtacctctcaacaatagaagcttctggatgatatagaatctttgtatacccttttaaaatctttatgta

SEQ ID NO: 244126 - DNA, 368 bp, Glycine max
  unsure (1)..(368): unsure at all n locations
agttttaccagtgggacgttactcttaaagcaaaaatggcatataaccttctcccataaatacaaacatcaatgtaaatttagagcaagcttatgcgcatatttccttacaaacgttctccgaaanaaatgcacccatatacaatcaaggcagcttcgttacctagattatttacacctacttccaggtgtatttgttacttacatcacacacatctncttggctaaattcacatacatgcataccctaagcatttttgggtaccacaaatgcacatgtgcacatcttggtatctctaatacctatacatacacacaactcatgatgaatcttgactatctacacaataggggctacatttcatgctc

SEQ ID NO: 244127 - DNA, 476 bp, Glycine max
  unsure (1)..(476): unsure at all n locations
agccttgacacgggtattcatgtttcatctaggccctttgagtgtgtgcattcaaatntatggggactatctagagtgaaaactcatggtggaagctcatactttctcaccatcatagatgatttctcaagaaaagtatggttgtatggtttgaaaaataagtcagaagcttttcaaaaattcagagaatgacatactcttgttggaaatcaacttggtacaaaattaaaagctttaaagactgacaatggcctgtagtntgtttcacagcagttcaatgagttttgcacgaaaataggcatcaaaaggcacaaaacagttcctcacacaccacaacagaatggtttagtagaaagcatgaataggaccattttggaaagagttagatgcatgctactaagtgcacgactgccaaagaacctttggggagaagctgcanatacaacagcatatttgattaatagatgtccttcatc

SEQ ID NO: 244128 - DNA, 395 bp, Glycine max
  unsure (1)..(395): unsure at all n locations
tcttatccaaggctcatcttggtggtgaagcttcttcttccatggcttatttccctagtggatggtgcctcttctcacctcttctcctttgtcttccgctgcatctccatggtggaaaatcaccaataaaggacctcattgaagctcaaagatccagcctccatagaagccccacaagcaagcttccatcaagtggtaatcagagcacaagagcttcaagtaggtgctccttaaacctccattaattttttttgctttaccttctcttccattgttgtttcttcatttttttcttcacgtatctnctcatatgtcttgtgctaaattttgttaacatgattctttagagtttccaccgattaaactcgctatagaangtacatttgatcttctat

SEQ ID NO: 244129 - DNA, 463 bp, Glycine max
  unsure (1)..(463): unsure at all n locations
agcttatgcgcatatttccctacgaacgttcacttgcacaagacatcctattaactaagaaaaatgcacccatatacaatcaaggtagcttcattacctagattatttacatgtacttccaaagtgtatttgttatttacatcatacacgccatcttgtcaaaatttacacacatgcatactcaaagcatttcggggtaccaaaaattgcacatgcgctcatcttggtatttctaatatctatacatatacaaacttcatgatgaatcttgactacctacgcaataaggtgctacatttcatgctctttttttttttttttttttcaagtttttgctacctaaagccatatgcaaattcaagcatatcttcctttgctgactaaaattgtattcaaattagaaggtatnatattttttgtaatatgtttccttcacataacatgcaacacatctatatatata

SEQ ID NO: 244130 - DNA, 389 bp, Glycine max
  unsure (1)..(389): unsure at all n locations
ccttctcttaattgtctntgggcttggcgaccacgatcaacaaagtactttcggcacctactatatgttgacttgaccaacgctgttattggaatgctgcgacaatctttcaacaccttattgacacattctgataggttggttgtcatgtgaccatatcgtcgtccagatgtatcgtaagccatgctccattnttcctttgaaatgcgatcaatccatcttgctatggctggactcagttgacgaacattttctaagttttgatcaaacacatgcttgcaaggagtgtacgctgcatcaaatttgttatcatcaaaagttgtacgtagacatcaaactccaattanattaatgtataaaatcaaccctacccaatttcttgaacatct

SEQ ID NO: 244131 - DNA, 443 bp, Glycine max
agcttgataagtgaaattaggtgcagccatctccctaagagttctctcacgaggtggaggttgagccatgttctcagtatgaaaattagtagtggaatgctcaaaatcagaatattcagaatcaccctcaacagaatgctcagaatgaccaggatgcacactatgcctaactaatctatgaaaggttctatctatttcacgatcaaagggttgtaaatcacctggattgcccctagtcttgcactatatgcagcaaatcatgtatttctcaaacaagcaccaggggtaaaaacggggtaaaactaggggtaaaactacaactatactcaaacgatatccaaatgagctaaaaatttgtgagcaacaccctaaaacatgttgcttcctcttgattcacaagcaagtctcttatcctacgttacgaagaattatcctaaaacatg

SEQ ID NO: 244132 - DNA, 201 bp, Glycine max
ttcttggtggtgatgaacaaaagcgcaaaacggaatcaaaaaatgcgaaaaaggatgaccctatggctgcaaactcgtcaatcccgtgggtatggcttttgaaaggggggaaaagaagtttttgaatgtaaaaacgccccccctttcgtcattcttataattaggtgcacgggtggctcgcccacgcgagctaacctgcac

SEQ ID NO: 244133 - DNA, 297 bp, Glycine max
  unsure (1)..(297): unsure at all n locations
ctatacgagacatcttgcctaacaaagtcaggttcacgataactcgcctgtgctttctcttccatgctatatgtagcaaagtgattgatccactaatgtttgatgagttggaaaatgaggccgcaattatactgtgccagttggagatgtattttcccccttacttttttgacatcatgattcacttgattgtgcatttggtcacagaaatcaaatggtgtggtcctgnttatctacagaggatgtacccggctgagcgatacatgaagatcttaatagggatacaaaaatctatat

SEQ ID NO: 244134 - DNA, 397 bp, Glycine max
ctctgacctaatattacatagaacgaataaaatagagatggatattcaatatatagatagaagaaaagaaaacacaatcattttctactttctagtttgtctaccatgctagaaaaatggaattgtttcaatacacatctctcatagaaacaaactaaacttgtcactcattcaatagtaaagacgatacaaagtataatttaattgatgacattgtcatactgttagtacttcaatgtatattattgttgatacgcaaacttgtcatcatgtggttcccaacacctctactatcatcatggagaatacgcctcgagtactaaacattgtgttaatactctgcttgcaatagaataatattgaaatagcattaataatagaaagcttgaatacctat

SEQ ID NO: 244135 - DNA, 392 bp, Glycine max
  unsure (1)..(392): unsure at all n locations
agctngagctnttctctcccttttcatttcagaaattcttttatggtatcatagagctttgtttgatccttgtgttgataacaatggcttccgcacaaaanattcaatctcctcctccatcgtcaatttcattaactctggtagaagattcttcaattcctgtgactagaacattaactccagtgatggagttttcaacagcagttcctcaaccgtttctgatgatggttcctcagcctcagccgtgttcgacgatgactctataggttgtgacaccacttcaggcattctgtattccaaccagcaattccggcaactgtgacttctttgtcttctcagccttcctctatctcgcatgcgatctctgcgaaattacaacatcaactacttgt

SEQ ID NO: 244136 - DNA, 536 bp, Glycine max
  unsure (1)..(536): unsure at all n locations
cgcacgcgggattgagnccatcgattttgccgagccattctatntacgcgacactatagaatactgcagctctctttacacaaagaacagagaacaatgatttgatgaacaaatacaagtagtgcggatgtctacttcacctctataacctcacaatcgctcacagactgctctcatgctctcaggatgaccttctcttcacgctctgttctgtgtgaggctacacacaacctaagctgtcataactctttggaacttggagctttctttatctcgtaaattctgaacatgcaaaacgcctgagaattgcctagctctagaacttcgagaataccatgaccatacatgccctccattccgtagttccctcgactcgctatccgcgcaccggccttataatctctaccgcgaattaatcatggcaaagaacctcttcccgggtggcttgacaccacctgttctctcttgagnnacancgcgatgcaatcctgcgtcttgtcgacccgacacatgatacgtggggagttgccctnacg

SEQ ID NO: 244137 - DNA, 210 bp, Glycine max
  unsure (1)..(210): unsure at all n locations
tttttgaggagatctgactacttaccctatatngtgctacacttcatgctcatctctcttttgttttctttacgcttattgtaactaaacaagtgtcaaattctgcctatttcgctcgcgactgaattgattctaatagaccgtatttttctttggatatgctttctcaaaaatacgcgcaccctttaatatatttcgaaacatttccct

SEQ ID NO: 244138 - DNA, 429 bp, Glycine max
acttacgtcaacatttgtgctgagaggagttggcctactgacatttgaggtacattgacgggcggagataccctagtggatattcgtataaacattctttgttgctgcctgtcaaacgaagagactgatatcttgctgagactaaccttgaatggtgcgctcttcgtcaagagcggccggctagccctttgatccaccgacatttatgttgtttttcttgcacacaatattttgatatactaacatatcactcatgcgtaaagccgggaataacctggtggatatccccataaactattcttttttctgtctgttagacgaaatgtctgatacacgcctaactaacgtgttctctggccctcatgaacggttcgacaagccactgaaacggtgattacctcgtttttcgctcacacattgtctactacg

SEQ ID NO: 244139 - DNA, 202 bp, Glycine max
ctcaaatatatggggcaactttgatttgttatcttgcttgattaagttgaattgggggtttgtattagatggacctacgcctattatgcattctgaaacaataggacatgccacatttgtcccgctctcttgctattgatgcctaaacgcgcgcccaccaaatgttctgtgaaatgcctcaatggcattagcgtgtgacttt

SEQ ID NO: 244140 - DNA, 430 bp, Glycine max
  unsure (1)..(430): unsure at all n locations
tactattcgaactctactacttgcctgaccttatacaaagaagaagaatttacggttcttggtcaaacccacactagtttctccgtgtgtgtgtgtgtatacggattggttgattaacgatatgaattgtatttacaagattacatgacaaaaaatcaactacttaacagttaaacaccacggagacattaattatctgacaggcaccatatgaacaatcgaaatgacaagtatcatatacattttttttaaaaattcatgaactcctgtttaaacgacagcaatataaactgtactggggtgaatatgccatanaaacagtacactcttaaagatgcttttattgnaaaataactttacaatgttgtttatacgtaaagggttttggcttcaaaatggttttaactcctataaatgagcgataattgat

SEQ ID NO: 244141 - DNA, 299 bp, Glycine max
  unsure (1)..(299): unsure at all n locations
ctgatattgtagtgagtagtaaagttcactcacttagcttaagttntatcgcctttaacacacacacatatatatatatacacaatacaaggcttgatgagaagacagcttgatgggacattacaatgctgtcttctgaaacaagctaaacacgaaatagaagcatgcatgtctacacataatttaacaagactcactgcaaaacataaatttattactgagcaagccacaaaatcagatatttattagtataaacaacatatttaagcccataattcttatctattttttgctcctct

SEQ ID NO: 244142 - DNA, 398 bp, Glycine max
  unsure (1)..(398): unsure at all n locations
atattctttttattttatgaatttaattagaatacagtaacttcataaatgttttggaaatggttgatttatataataattactttaaacactatatttataataatctttaattcattaataatgtaaaaatattaaactcactatatatcaaaatttacataaatcttatataataataaaaatattaaaaaagaatatattatatacatgtaacattctgttggattctaacacattcctcatataaagaaggtcaaaaaagaaagtcttctctctctctctctctcttttttcttaccagaggaattgttctcttttttgctatgtatgaaggtacgaaactaccgtacaaggaaaccgngtaccgtatacgcagatgatcacgtgataaatat

SEQ ID NO: 244143 - DNA, 362 bp, Glycine max
  unsure (1)..(362): unsure at all n locations
tactaagcttatgctnttaactttagattgtgagttctaaataatagaanaatataatcatctacacgaaaaaaagaagatattttacaatatgttatgcattctgtaaaaaaaaaacatggtatgcaaattaattaacttaaaatagccagttttattacttatcattaggattgtaattggatctagttaagtgggagttatcgaagcttaagatagcttagttaatttgtgaaataattctcttttaaacgttgagttaatttatttagacctaaatactctttgatctcttaaatttgagctaacgttggtgttgacccctctaaaatattttcttaagccaataatttgaattacct

SEQ ID NO: 244144 - DNA, 305 bp, Glycine max
  unsure (1)..(305): unsure at all n locations
tgtatttgatctcctttnggtgctctaaattgtgggaatgtgctcaaatatatggcggcaatttggtttgttttcttgcttgattaagttgaattacgggtttgtatgggatggccctacgcctataatgcattntgaaacaatgggacatgccacattgtccccgttctcttgctattgttacctaaacgcgtgcccaccaagtgttcggtgaaatgcctcaatgacattagcgcgtgacttttgtaaggaaacaacccatgggggcattttgtttgtacatattttctttnttttgggacatg

SEQ ID NO: 244145 - DNA, 377 bp, Glycine max
tctaaagagaaacgttgttgctatatatgaaaaaaaaatgttaacaataacaatgatataataatatgatactgcaggtgagaatgagagaaaaggggtgcaatgcaatgttgaaaggcacaatgctgaatgcctgcaactctgcaaggaaactcaacacgtctgaatttgaaaattaaactccttgtccttacgtgtgacgctttgtttggtcggtgcagatattaatggattattactcttttctaacccgcatctctccaaattatccaattttaaccattttttttatttaatcaaatccgaagtccaaatccaagaaattttcaccccaagatataaaaaaattactcaaatactacccgctaaaaattatt

SEQ ID NO: 244146 - DNA, 428 bp, Glycine max
  unsure (1)..(428): unsure at all n locations
agcttagcatcattagttctaatgggcatgacttccacccattntgaaacataatcaactgctaggagaatgttaacataaccaaaagagacaggaaaatggcccatgaaatctatgccccagacatcaaacacctcatagaatagcataggttgctgaggcatttgttgtcgccatgtaagtgcacttcctgctctctgacactgctcacaagtgctacaaatcttccacacatctttaaagatggtgggccaataaaagccacagtcaagcactttgcgagctgtcctttgaacttccagtgcggaagaatggcanaactgcaggactgagtcagtctcatgatctgggatgcatcgtctaatgacctgatcactgcacaatttccacaagtaggcgtcatcccaaataaaatgcttagcatcact

SEQ ID NO: 244147 - DNA, 327 bp, Glycine max
agagggatgcttcatggagaaaagaaagagagagagaaagatagacgggagagcatgtaatcgaaggagtaaaagagggaaagaagttgaactctgagttgtgtctcacaagactcttattcatcaaagttacaacaagtgttacacatgcttctatttatagcctaggtagcttccttgagaagcttctttgagaagcttccttgagaagcttctttgagaagcttccttgagaagctaaagcttagctacacacacccttcaaataactaagctcacctccttgagacacttctttgagaaacttccttgagaagaatcctagag

SEQ ID NO: 244148 - DNA, 461 bp, Glycine max
agcttcttgaggaagctacatgaagctaccttggtaaaaatgttgcctagccttcgttaaccgttggatcttctcgaaattatgtctgtagcttcacaagacacttgtccacgatctaaccgttgggatcgttgagaagatgtctggagtgtgctcgaagcttccgttctcgagagcatttcttatttaagcatttcagcctttgctttcgtgtagcttaagaaaaacgccatttcttctcctttctttcttgcaaagtcatgtctaacgtcccaagcactttctccatcacccacagccaccattagccaccacaaaccatcgttgtctccattgaaaccccacaccgagaggaacccttcaaccgaagcggaatcttccaactgggctcgcggtttcggtagagaacgaaaccctagtctgacctttcatttttcttcgaggaaaccaatgttctacac

SEQ ID NO: 244149 - DNA, 455 bp, Glycine max
  unsure (1)..(455): unsure at all n locations
tcatgaagttatgtcagctaatggtcacactaaataggtatatntatctactttatctcatttaccaccctatgggaaatgatttttagtaggaagtttatttgcaataatagtatttattcctaatcatctctggtattttctcttatctgatgattggttgcaatttgcaaatttattcatactgcttttgtatcaaattaatttggcaggaaatagcacaactcagatagttctcatgaaatttctccaaaagattaaattgtaacttgttttcaccattntgattaataattatgctactggagttgatgtttgttatttcatttctttatggggaagtttctctatctaaatcttaaattaatctttcacctctttgtgttgttgagtggatgtcaaaagcttgagttttttttttntttaaatgaatcacagtcccactactactgttc

SEQ ID NO: 244150 - DNA, 337 bp, Glycine max
  unsure (1)..(337): unsure at all n locations
gtcacctgccgcatgcaagctatggaagctcctgtcttagctttacccgattttactcaaccatnttatgttgaatgtgatgctagtggagttggcatcgtggctgttttgatacaaaacaaaaggcctatagcttatttctcggagaaattgggaggagccagattgaactattgcacctatgacaatgagttctatgccattgtgagagctcttgatcattggaatcattatttgcgttctaatcactctatatggcattcagatcaatagtcatagaagataataatgggcaccaaagttattccaagcttgctaatgggtgaattcttcaatc

SEQ ID NO: 244151 - DNA, 131 bp, Glycine max
  unsure (1)..(131): unsure at all n locations
cttacaacaacaagccccaagagactcggcatagcggtgcacaaaccaaagttgcgtatgtaaaanaattggctgatcaactgacggtgcaaattgcaaacaacaatgaaagctatgccgatcgagcccac

SEQ ID NO: 244152 - DNA, 466 bp, Glycine max
  unsure (1)..(466): unsure at all n locations
agcttcttttctgganaattccttccctagttnggtgtttggtttgtgttaagggtggtgtttggtattggatatgcagcaaacaggctttgtggctgatttaggggtggcctttgtggatgattaggtgttcttggctgataaggtggtgggtaacgaacagggatgatattggctaagtatttatattgttgagctggtgggaaatttggccatgtaggaacgacagtcacaacatgggttcctcattcccttttattctctccatttgccctaggcttcctattcatcaaagcaggataatcaaatttgtctcttctcagacccacttcaatcctttcactggcaaaaactaaatctgcaaaagcttgaagccatgtaacccatcatcttctcatagtagaacattggtaacgtgtctactatcatatgtatcatctccctcttcatcatttggggtactact

SEQ ID NO: 244153 - DNA, 282 bp, Glycine max
  unsure (1)..(282): unsure at all n locations
tctggtgatgaagctncttcttccatggcttatttcctagtggatgacgcctcctctcacctcttctcctttgtcttccgctgcatctccatggtggaaaatcaccattaaaggacctcattgaagctcaaagatccagcctccatagaagccccacaaccaagcttccatcaacgtgattgtcccggaccatggtataatttttcacacaagttgaatgaataaattaagattttcttattaattaatataatatggttatatatattaaaagtttgcaaa

SEQ ID NO: 244154 - DNA, 215 bp, Glycine max
  unsure (1)..(215): unsure at all n locations
tgtgagtccctcatgcttgatccttacacaagaagggggatccctcctcctcttgttagcacctctaaatcactctacaactcactattctctctctaattgaagaatcctaggnttctctgcaaagctgctcctcttgccgtcttcagagctgctatctccaaattagcactatggcgtacttgctctggaattctgtactggttgctaaaatt

SEQ ID NO: 244155 - DNA, 454 bp, Glycine max
  unsure (1)..(454): unsure at all n locations
agcttntacacccgcattacaccctcattttctccctctgtggcaacatcaaatagccaaagtacatgggaatcaaaacagatataataatgaagtggacaaagatcaattataaattataagtcataaccaaccaacaacataaacaagacataaccaaaataaaatccaatcagttcaaaaatttaaaaacacatagtatcaaaacatcaaagtctaaaatccaaatactaaaagaaaaattaagtactgaaaactataatctaaatatcatagccaaaatacacggcttatatgaaacatagaattataaactaaagtctacgaatgtggaggtggtggtggaagatctaaactctgacgaatgtaacccacatcttcttcatgctgtgtgagacggatatccattcgggcaaagcgagtatccaacgagtctaaacgttcaccaacataa

SEQ ID NO: 244156 - DNA, 336 bp, Glycine max
atcagtgttttgagagatgctcttttatccagtccatgcaaaaatatctgaggtcattcggtatttgcgaaagtccttcatatctttcattctcaatgtttccaacaaaaatcctctagttgtgttctaatccgactataagtttcacaaaatactggttgtcgattcttttcatagcctcttatgttcaacaaatattttctgacttagtaccaacaagaggtgtaaactataagtatactaagctaatatcacagcacatgcttattactccaaatacactcgtgtaagtaaataaggtaatgacgcactgaattttaatacaaagcgatcaac

SEQ ID NO: 244157 - DNA, 421 bp, Glycine max
  unsure (1)..(421): unsure at all n locations
agcttagaaagtccttcggattcattntgtgtgtttatttctgaatggtatgagatgaaatgcaaaggttaggacttgtgttagttgtttataatggaatgagcctaaacacttgagcttgagtgaaacaatgactataaggctttggtcaatgatccttccttgatatctatcactctcactagcttatttcaattgtgactctaatgcatatgttcctatcttttgaaaagttgcatgtttgtgaaaagcaattgatcgaagcattctatgctactcatttcatatgattgaatttttctatgaaacaaacacgttttggattgaccactcgtattggtcacttgaggacaagtgaactgtgcttgaggacatgcaaaactttaaatntgggggagtttgttagtcgtcttataccact

SEQ ID NO: 244158 - DNA, 345 bp, Glycine max
  unsure (1)..(345): unsure at all n locations
tataagaacannaatgcctaaatcatttccaaatatgcatgtgaattatgaagtatcaacaagaatcaagccaaggctattgtgcaagcaatcaatggggcaaaacacaccaaaagattatgatgatggatgactcaaattctcacaaaggtaaacttatcactttcaaattgagctttcaaaactatcatgacatgtagaggaaaaacaaggatttcaaatcacaaaatgtcaagagacttttattttcagaacaattacccatttcttgaacatatcctataattcaaagaanaatatgcaaagttgtacatgcaaacataattgacctaaaatattaaacta

SEQ ID NO: 244159 - DNA, 434 bp, Glycine max
  unsure (1)..(434): unsure at all n locations
agcttgtataanatatcatcaacacgagaacccttgtaggagtttgtgagcatgtctgccaattgatctttggagccgacaaaatcaatggtgatttctcctgagagtaccttctattgaacaaagtgaccatcaatctctatgtgtttaacctgctcatgaaagactgtgtttgaagcaatgtggagagcaacttcattttcacataatagtgtggtattctaaatgtctccaaattttatctattggagaagttgtgtaagccatgtgatctcgcatgcagcagctgccatgacacaatactcgacttcggcattggatcttacaacggttttctgctccttgcttctccatgagatcaagttccctccaataacgacataatatctagaagtagaccttctatctaatggtgatccttgccaatcagcatc

SEQ ID NO: 244160 - DNA, 323 bp, Glycine max
gatgatcaccaaagatgatgaccaaggtgaggacaaaaagctccagggtccatcaagaatgagttcccgatattccagatagaatcagaacacttcacgattcacgaggaaagttgattttcagaaatcagattccagattttcagaatcaagattcaagagatcaagattcaagactccagattccagaatcaagagaagacttaatccagataagtatgaaaaggttttctcaaaaattgagtagcacatgcgatcttcttcaaaacatgtttaccacagagttttactctctggtatcgatactagattgtggaatcgat

SEQ ID NO: 244161 - DNA, 178 bp, Glycine max
cgttcatgctcgtcactcattctatgtttgccagctcatcaccaatatcgcccttatgctggtatttgcctcaaaaagtcacctactactcgctccggccctttcacccgtgtcaacataactcccccctgctcgcttacattccgtgtaattaaaaccttttgccgaatcgatcccg

SEQ ID NO: 244162 - DNA, 204 bp, Glycine max
agctatttggagtaaaaacatgggaccaactcattttatttcacaaaaaaggttgtatctagtcaaggtctgagagaccatacaagtttcctagcgatttctaaatatgtgggccattaagtctatcatatgttgacaatagccgagaagcccatgaatctcttcgggggcggagtaggtgtccgccatcgccttggccttggc

SEQ ID NO: 244163 - DNA, 345 bp, Glycine max
  unsure (1)..(345): unsure at all n locations
tgcctcacagagatctatgaaggataaagcggctgaaggaaccagttccgctcccgaatatgacagccaccgttntaggagtgctgagcaccaacagcgctacgaggccatcaagggatggtcattccttcgggagcgacaagtccagcttatggacgacgagtataccgacttccaggaggagatagttcgccggcggtgggcatcactggttacccccatggccaagttcgacccagacatagtcctccgaatttatgctaatgcttggcctacagaggagggcgtgcgagatatgcgatcttgggtgaggggtcagtggatcccgtcgatgcggatgctctc

SEQ ID NO: 244164 - DNA, 343 bp, Glycine max
  unsure (1)..(343): unsure at all n locations
agcttaaacattatactntgagcgtctcgatatattacgggactcaatcagacatccgagtaaaaagttattggcgtntgaattggctcagaggttcaaaattcaatttcgagcgtctcgatatatttcgggactcaatcagacatccgagtaaagagttattgtcgtttgagttggctcagaggttcaacattcaatttcgagcgtcccgatatattacgtcactgaatcagacatccgagtaaaaagttatngctcgttgaattggctctgagctccaacattcaatttcgagcgtctcgatatattactggactcaatcagacatccgagataaaaagta

SEQ ID NO: 244165 - DNA, 346 bp, Glycine max
ttactcggatgtctgattgagtcccgtaatatatcgagacgctcgaagttgaatgttgaatctctgagccaattcatacgacaataactttttactcggatgtctgattgagttccgtaatatatcgagacgctcgaaattgaatgttgaacctctgagccaattctaacgacaataacattttactcggatgtctgattgagtctcgtaatatatcgagacgctcgacattgaatgttgaacctctgagcctattcaaacgacaataactgtttactcggatgtccgattgagtcgcgtaatatatctagacgctcgaaattgaatgttgaacctctgagccaac

SEQ ID NO: 244166 - DNA, 240 bp, Glycine max
  unsure (1)..(240): unsure at all n locations
agcttaaacattatactntgagcgtctcgatatattacgggactcaatcagacatccgagtaaaaagttattggcgtatgaattggctcaaaggttcaaaattcaatttcgagcgtctcgatatatttcgggactcaatcagacatccgagtaaagagttattgtcgtttgagttggctcacaggttcaacattcaatttccagcgtcccgatatattacgtcactgaatcggacattcg

SEQ ID NO: 244167 - DNA, 397 bp, Glycine max
  unsure (1)..(397): unsure at all n locations
catacgacaataactnnttactcggatgtctgattgagtcccgtaatatatcgagacgctcgaagttgaatgttgaatctttgagccaattcatacgacaataactttttactcggatgtctgattgagtcccgtaatatatcgagacgctcgaaattgaatgttgaagctatgagccaattctaacgataataactttttactcggatgtccgattgagtctcgtaatatatcgagacgctcgaaattgaatgttgaagctctgagcctattcaaacgacaataactttttactcggatgtctgattgagtgccgtaatatattgagacgctcgacattgaatgttgaacctctgagccaattcatacgacaataactctttactcggatgtctga

SEQ ID NO: 244168 - DNA, 403 bp, Glycine max
  unsure (1)..(403): unsure at all n locations
agctctagaatntatcttttataacgaatntagaagtaacaattgttgattaaaggtggaagattgaaattataataagttacatctattttttaaaaaaaaaatataattccacttttttcattgactagaagtaacacttattaatagagaaaaaaaagcacccatagtataaaaaaaattcattgtcttttaatgacaaacacatcatttaataaaaagttataattccattttttcatagggcaaccttttatttcgtgatgtggtttggtgaatggaaaggacttatgcaccaaaatatagattaagaaccctaagagaagtaatagtaattatgttctcaaaaagggagtagcaagaatagtgagagtacaagagaagaattgaaaagggatatgaa

SEQ ID NO: 244169 - DNA, 441 bp, Glycine max
ctatgattctctattcttctgaacaagctcctcttttttcttctctttcgttttcacttaaaaacacttcctgagtttgagattctgtgactacgcgctgagcgcaagtaaatggttggacgctaagcgatccatgtgcgctaagcgctccttcacctgactgcaggttctttatgctgcttcttcatgctaagcaaaaaccctctcgctaagtgacaatagcccgctaagcgagcttggcgcgctgagcgcgatccatcatacttcaacttctctctctattatatatttgtaaaataaaaatcatcaaaacagtatgaattagcaatttaggacacctactacacaaaaattcaaaggatgtcaaaattctaatgaattacaccataacaagcaatagaatgaaagaatgttgttaattcttatatgctctaattacat

SEQ ID NO: 244170 - DNA, 479 bp, Glycine max
agctcggaaactaaattaataagttaattatttttatatacatgagaatcatgtaaaagaatttacatcaatgagacatgacatgaaaatgagtcaaataaacatatacattaaaagatgtgttaatctattatacttttatatattcattttttaattcatttttatttaaaatattaatatgtgagtcttacacactttttaaaactaaaatagatatttatctataaataagtggacaaaattaataatgagcgatatctttttgttaaattataatatattgctataatgtagttgtaatgtcagacatgtataaaaagatactccatatgtctttatctattaagtccaattacctaattaacaataaatgacaagaataattaatctaattaataataataaatttgtgttccaataaacaaaaggtatagacttatcctcaacctagatatatatatatctatatatatatc

SEQ ID NO: 244171 - DNA, 320 bp, Glycine max
tgtctatcgaaatctttcgttcttcgcttctaatatctattagaaataatattaaatgcggccgagcatatatatactcttcatcgatcgtccggatatttccatgcagttgaatatgatgaataaccattatcactgcaactaacggtttaattgattctatttagccttttatatattgcaattaacattaacatactaatacacatttatacactctaaagtaatgggttttcttaaactacaagtattgttagatcttgcacaataaccagcatttgaataagatgtatgaatattataaatattttgatatcata

SEQ ID NO: 244172 - DNA, 387 bp, Glycine max
  unsure (1)..(387): unsure at all n locations
taatcagacaatcctactatgctaaatatatgcctntaacacactgttaagagattcacaactgaccatgtgctagtgagggactagaaagaacttttggagcatttcttaagtttccatttgattcatgcaggttgataggcaattagccaaataagttagcttacttattactctttttggcttttgataaaggtggacaaacgactgatatgaggtacctgatgaggctttgacttcttgtatgtcatggtcctttgatggattctctttggaacatatatttgttgaagcacttttcatattaaatggggagcatgagatcatagttcaactctgcagatttgatttctcataatcttattctccctttatatatttgttaca

SEQ ID NO: 244173 - DNA, 221 bp, Glycine max
  unsure (1)..(221): unsure at all n locations
taccctgatgaggatgtcccatatgttcttaanactggactgattcatttgcttccaaagattcatggccttgcaggtgaagacccgcacaaacatttgaaagaatttcacattgtctgctccaccatgaaacccccagatgtccaagaagatcacatatttctgaacgctttttctcattcattaaagggagtggcataggactggctgtattaccttgc

SEQ ID NO: 244174 - DNA, 393 bp, Glycine max
atctatgaacatcacacaataaaccccaatttgatactctaaggatccctacacatgttcattttaacccaaattgcaataaactcatcccttatctctaagcgggctcacgggtgcagctggcagggatatcaacgtctctagtggttccctaagatttctgaaatttttcctctgtttgctttgttagggtttccaagtgttagagagaaggagaagaaattggagcctccaattcactgtatatgttcaatgagaatttctccctccatagacattactttacaaatcccaacactagacatgtgtagagattagttccaaaggtggtgtccaaatttcactatgattcaacagttaacaaagcccgggatcgtagttttcttgggattg

SEQ ID NO: 244175 - DNA, 460 bp, Glycine max
  unsure (1)..(460): unsure at all n locations
agcttctagtcaaatagacttaccttgaattaattcctttgatagcccctttgagcctattttcccctttctttgttttgaagctcattacaagccttaagtgaaaaaccatgatatcaccttacccttaagaaattttggagctttggaattgttttgggaataagctgggaataagtgtgggggggtatgtttcattggaagatatgatttttggccatgcttaatgttctattttggccatgcttgatgtntatatatattgcctagctctttctttaatcttcaattccgtactggtcaataaaaaaaatcaaaaaaaatgaaataataaaaaaaaatcaaaacaaaattcagttgctgcaaattctgcaatttcgtactattcaaaacaaanaagaagaatnaaagaagtgaagttgaataaataagttctcgatatgagaacttgatttgggag

SEQ ID NO: 244176 - DNA, 403 bp, Glycine max
  unsure (1)..(403): unsure at all n locations
tgccttggttaacctggttacctaactgactatgaatcaaaaatctgcacctgttgttagactctgtggtttatgctcctttgctgaccactacacagacctttgcccttctgtgcagcaatctgaagcaattgaacaacctgaagcttatgctgcaaacatctataatagacctcctcaacctcagcagcaaaatcagccacaacaaaacaattatgacctctccagcaacaggtacaagcccaggtggaggaatcatcccaaccttaatggtcgaatccttcacaacagcagcaacaacaacaacaaccttattttcaaaatgctgctggcccaagcagaccttacgnttcttcaccaatccagcaacaacaacaacaacaacaacaaccctagaaacaac

SEQ ID NO: 244177 - DNA, 411 bp, Glycine max
  unsure (1)..(411): unsure at all n locations
agctattggtactgttatntgaggatgacattcttctttcgaaggttctttatctcttgggtgatcttctgttttaatgcatccatctccctttgcagggcaatgatcaacacatgattgttangcatgtgatgttggaggtccaccatggttgcgggtctcccattttttagggtccctatggtaggcattccaattatgatggatgcctatcaccgcgatggtctttctgggttggctgtgggggtcttatcaccatttgtggccattgacggtggttgaaggagaagtnttccctcaccccatagtgggcgccaaatgttcttaccagaattgtcagaactttctcacagtgatggtcttccatgagctcctgcacaaacaatggtggggtgtacatgcaataacact

SEQ ID NO: 244178 - DNA, 322 bp, Glycine max
cgatgaggacttcagtcagaagagaagaagagacatcatgttgctgtggtggagacgatgtacgctcatcgggaatatgaggcgatatgtcttgattgcgcacccagtgaccgtccatgtcttttctgtaaccaaaagatgtaacagtaccagcaccaatagagaaagaacgtttaactttggcaaaaggttcatcatccaaggggacattgaaatgctggagaaataacgtaacaagatatggatatggcagaggtgcattggcccgtaatgccttatgcatttggtactgaacaagatgagcccagtcgatctgataacc

SEQ ID NO: 244179 - DNA, 433 bp, Glycine max
  unsure (1)..(433): unsure at all n locations
agctattaatttaaatgaaataatatgaatattttgacttaaaaaaaaggaagtctaatacagtatgcaatattagtatttgaatgtgaaaaaatgaaatgtggagccatgcatgtttaatggaaaatttaaaatgtactatcaaaatatatttacaactntaatttttattgtaattataatgtttgaaaatatatcttgtccctatattttacctcaattttggttttagtttagactttaaaaaacttgatttatttccttaatattagtgatagacgaagaaattaatcttacattataaatataatactcatatacataaatttgtggagacaatatttatactaattatagattttnttatattacattttagacaatgaaaacatacgtacatgcacacgaagcttgaacaaaatgagatcacttg

SEQ ID NO: 244180 - DNA, 398 bp, Glycine max
  unsure (1)..(398): unsure at all n locations
tatactactagcaaatgtgttgaaattggaggacagagtacatttaattcataattatttactagaagagatgaaagtacagttccctagggatcaaaaaatcgtaccggattggtgttccacatttaattcttagtcggggctgttttgagactctaatatgaactattgaacttgtatgtgcgtgtaatttagtcggagccctttttaaagaaattgtagtcatggcaagttttatttgacccattaattatttattaaatcattacttttactggcattaatgatatagtggagtatctatctatttgttttagcttcatattatagattgtaagatgtacgaaatttcgatntcaaagccacgaaccacacctgaatatatggaatgtctactg

SEQ ID NO: 244181 - DNA, 397 bp, Glycine max
  unsure (1)..(397): unsure at all n locations
agcttgtcaaggaagttttcttaagaaagtntctcaaggaagctacctagtctataaatagaagcatgtgtaacacttgttgtaactttgatgaatgacagtcttgtgagatatatttcaaaatttcacttctctacctcttttattccttcaatttcgtgctcccccctctctctttctctccctctttcttttcctccattgaagcatcctctccaaacttcttatccaaggctcaacatggtggtgaagctccttcttccatggcttattccctagtggatggtgcctcctctcacctcttctcctttgtcttccgctgcatctccatggtggaaaatcaccattaaaggacctcattgaagctcaaagatctagcctccatagaagcccccac

SEQ ID NO: 244182 - DNA, 392 bp, Glycine max
tttgcatgtttagagatttctagagagagaaaggtccaagttccagagagttttgagagctcttgctagacgaagattggcagagaactgagagtgaagaggaagccatcgtgagagcatgagatgagtctgtgagtgattgtgaggttctacaggtggaggagacatccccactatgtatgtcttcaatccttcatttttctcttctctttgttgtaaaggaagctcccacatatggagagtttaatcctctggtggttcttccttgtacgtacttgatgtaaatacctgcatatctatttaatgatattttatgtattctatttgctatcagtatgtcatttcagtgtgctcttgccttgatcatatagatgcatgctttgttaggatca

SEQ ID NO: 244183 - DNA, 391 bp, Glycine max
ctcgacccgggatccttaagcacctgcggctgcagcttaacattcaatttctagcgtctctatatatttcaagactcaatcagacattcgtgtaaagagttattgtcgtttgaagttgctcaaatcttcagtattcaatttcgagcatctggatatattacatgactcaatccgacatccgagttaaaagttattgtcgtttgactttgctcagaactttaacattcaatttcgagcgtctgtatatattacgggactcaatcacacatccgagtaaaaagttattgtccgtttgaatttgctgagagctctaacattcaattctgagcgtctcgatatgttacatgactcaatctgacatctcgagaaaaagttattgtcgttttaattt

SEQ ID NO: 244184 - DNA, 386 bp, Glycine max
  unsure (1)..(386): unsure at all n locations
ctgagcanattcaaacgacaatancctttgactcggatgtcggattgagtcacgtaatatctcgagacactcggaattgaataccgaagctatgagcaaattcaatcgacaataaatctttactcggatgtccgattgagtcacgtaatatatcgagacgctcgaaattgaataccgaagctctgagcaaattcaaacgacaataactttttactcggatgtccgattgagtcccgtaatatatcgagacgctcgaaatggaataccgaagctctgagcaaattgaaacgacaataaatctttactcggatgtcggattgagtcacgtaatatgtcgagacgctcgaaattgaataccggagctctgagcaaattcacacgacaat

SEQ ID NO: 244185 - DNA, 221 bp, Glycine max
  unsure (1)..(221): unsure at all n locations
ccttacgcatctgtgcggtatttcacaccgcatatggtgcactctcagtacaatctgctctgatgccgcatatgtaagccagncccgacacccgtcaacacccgctgacgcgaaccccttgcggttgttgtccttataacttggaatcacgcctgcctacgagactttcactctgtgcgcccggctccccttcggtaaccccatgaaccaaaagcccagct

SEQ ID NO: 244186 - DNA, 383 bp, Glycine max
  unsure (1)..(383): unsure at all n locations
agcttgcatgtctagtgattctagagagagaaaggtccaagttcaagagagttttgagagatnttgctgtgtgaaggtctgcagagaccatagcttgaagaggaagccgtctgagagcttgagatgagtttgtgagtgtgtgacaacctacccttcggcgggagggcgacgtggggctcacgggtgcatcttccgtgggaggaaaatgcgcggagtcgccaccaacgtttattcaggaaaacgtcggaaaaataggagaggtgtgatctacgaactntaatcgtgaaaggttcgggagttgtttttacgcacggggaaggtattagcaccccacgcgttcgtcaccaaggacgacaacctttaatcaaatgtgcaaatatgac

SEQ ID NO: 244187 - DNA, 372 bp, Glycine max
  unsure (1)..(372): unsure at all n locations
tcgattatgatcaacctgtaatcaattaatataaagagctntagctatagaaacttttttctaactttagaacttttcttttaactcctgtatgatgatgcatgatgcatatatgaaatgatatagactaagatgcaacacacaatacaacaatcaatacaaatgccactcaagagagttgggcatgtaaaagaaaaaactttttgtagctcttcttgaagcttcaaggctaagtcttcatgtcgctcccgctatctctaatagtaacctttggaaagaagccaacaactagaatgattgctgtcacgttcattgtagtaaagttctcattggcctataaagccatattggcataccatctttgaacacatt

SEQ ID NO: 244188 - DNA, 475 bp, Glycine max
  unsure (1)..(475): unsure at all n locations
agctntngtaaattagatggccatacctcttgtgccatagccaagtttcaatntctgtggtggactacatacacttctgatcactaatctgaatttcaattctaaatgttctgttggccgagagtggagattttaggacactcttcttgtctttatcaaaaactttcagcatgttgtccttcatctccattgtataacccttttcaagcaattgtccaaggctgagtaaattgcttttcatcttgggagcatacaagacatttgagatgcaggctttctttccatcttttctttgaatcatcacgctccctatcccttctgctgtaattgagctgtgatctgcgaatttcactatgcttttggaagtctcatcaagtgttgtgaaccactctcttctccctgacatatggttngagcaaccagtgtctaggtaccagaaaatagcacactgaagaatcatttttgtggaaccatc

SEQ ID NO: 244189 - DNA, 432 bp, Glycine max
  unsure (1)..(432): unsure at all n locations
ctgccgatntagttnttcccggcaaaaggatcgtagtgggtctgaaaagaagaaaacttgattatcctgctttaatgaatgggaagcctgnggaaaatggagagaataagaaggagggaggaacccatgttgtgatagtcgttctcacatagccaaatttcccaccagctcaacaatgtcaatacttagccaatatcaacccttctcattatccaccatcctatcaaccaagaacacccaatcatcaataaaggccacccctaaattagccacagaacccgcttgctgcacatctgatactagacaccacccttaacatgaaccaaaacactaaccagggaaggaagtttcaacaaagaagcctgtagaattaccccaattaggtgtcgatgctaacttactccatttactaataatgcatggttgcataat

SEQ ID NO: 244190 - DNA, 476 bp, Glycine max
  unsure (1)..(476): unsure at all n locations
agctngcactgcccaaagtggacaaccttccagaatacgttgaagccaccattgatgtcccttatgatgtcgttcagtatctcaaaaaagcctacgatgatttggaagaacccttgacctgttttctcaaatcttccaaagttgattggcatttctatgacccatatatgttacagttaccaaaaaggttcaaagagaaaaccaaatggtgtggaatagtaagccccggttgggcaccatagttgaaggtattgagccacaacgcagttggtggggttttgactcactctggttggacctctgtggtggaggttgtttataatgaaaaacctctagttttgttaatgtttcttgcagaccacggattgaactcgagggtgttggaagtgaagaagatggtgtattcaattcctaaggatgaacaagatggatcattcacgagtgatgcggtcgctaacttaataccgttggtatgg

SEQ ID NO: 244191 - DNA, 369 bp, Glycine max
  unsure (1)..(369): unsure at all n locations
tctcggctcatgcggngaacgcctctagttcaacacccgtgcagcctaaggcacccacccagagggaagctccccaagttccaactccgaacacgactcgaccggccggtaattccaacacgacaaggaacttccctccgaggccattgccggaattcaccccgctcccaatgacgtacgaagatcttctaccatccctcatcgccaatcatttggccgtggtaactcccggaagggtcctcgaaccccctttcccgaagtggtatgaccctaatgcaacttgcaagtaccatgggggtgtcccggggcattccgtcgaaaaatacttggcccttaaatacaaggtccaacatttaatggatgccggat

SEQ ID NO: 244192 - DNA, 471 bp, Glycine max
  unsure (1)..(471): unsure at all n locations
agctctacaagcncactttatatcctttattgaaatgggaaatgcgagatttcttgaggaagttgagtttgggaaggaagagaacataacacatgttgtctttgatgaagaacctgtttttggcactgctcaagtccaaatacctattactgttcaagaaataactccagttatcgaaaatgatgttctgattattgttgatgacatttttcaagaacaagataacaatgaggtgctgccttgaatatctataccacacacctcgataagtgccatttaggagatctgttatagagaggagaagctcactcctagatgattatattatctctctccaagaacattaggatgccattggtttatcacaggatgatgcaatcaacttctgttcagctatgcataactctaactctcataatcgggtctatgccatgaatgatgagatgaaattctatgttaataatgatgttt

SEQ ID NO: 244193 - DNA, 379 bp, Glycine max
cgcttgtagggcttctatggaggctggatctttgagcttcaatgaggtcctttaattgtgattttccaccatggagatgtagcggaagacaaaggagaagaggtgagaggaggcgccatccactatggaatatgccatggaagaacgagcttcaccaccaatatgagccttggataagaagcttggaaggatgcttcaatggaggaaaagacagacggagagaaagagagatgggggagcacgaaattgatcgaataaaacaggtagagaagtggaactttgaagtatgtctcacaagactctcattcatcaaagttacaataagtgttacacatgctcttatttatagactaagtagcttccttgagaagctctcttg

SEQ ID NO: 244194 - DNA, 509 bp, Glycine max
  unsure (1)..(509): unsure at all n locations
cagatatgaaaccttgagttcgagcctcttagacccgcgatcctcatagtcaactgctgcatgtcagcttcaagcattnagaatgttattcttgactcaatattccagaatcatgagaagacttaatcacgatattattaattcttttttcaaaaccgaatagcacatagatattatttcatacattgtgttcacaagagtctttactctctgggaatcgcataccaaattcgtgtgatcgatcaccagtagcaaaatgcttttgaaaacgtctcaccttgaattaccaacttttaattgatttcagatcgctgtgatctattacattgtattgggaatcgataaccagtgtgcttgaacgttgaaaatgaaattcaacgtgaagagcacattcttcacaaaaaagctatgcggatcgatacactgatcggaatccttatctataccagtgatgttctgacaaataaaatatggacccttcaatgttttgatctttacattggttacat

SEQ ID NO: 244195 - DNA, 337 bp, Glycine max
  unsure (1)..(337): unsure at all n locations
gacaagactatacgaggtatcttccttgggtatagcaatatcttcaagggctaccgtgtttacaacttgccaactaagaaacttcgcatcagtcgagatgttgaagtttatgagtatgcttcttggaattgggatgaagaataagcggagaagaatgttcttatacctgctcaactacctcaagaagaagctgaggaagaagacccangtgaatcaccttcacctccaccacaacaacaagatcaagaactatcatcaccagagtctactccaagacgagtaagatctttggtggacatatatgaaacctgtaacttggccatacttgaacttggaa

SEQ ID NO: 244196 - DNA, 394 bp, Glycine max
  unsure (1)..(394): unsure at all n locations
ggtacccgtcacatgtggtactatgtggcgatcgggtgatggtgcaaatcaactctccacatccacaaatcacacatgaacccaccatccctagttgcccaccttcaactgagctcacgtactcccacgtagcccttatacttgttcctctcagcaccgggtccccatcaatccctccaagcttccacaacatccaagcaattcaatagtcaaacatcatgaactatccaaaaccaagacaacagggcagaggcagaaaactatgcccanaacacattccaataccacaactttccttactcanatactccaataacattctcttcgttccgaatcgttcaccgttggatcgactcanaaattatactggaggtcccttgtacataagtctaca

SEQ ID NO: 244197 - DNA, 266 bp, Glycine max
gtctttttaaaagaatattagtcacacacaactttacaaatgctcttacaaataatatagattgttttagataaacaaaagccacaaaggtagagcttctatacaagccagttaggggaccttatacttttaagaagagaagcccaaaacatagtgagggctaaacattgcctaaaagaatttatttctagccgcattgcagcttcattgtaagctggttagtcttgaatccaagcactctgattgaagctatggaaattgatctc

SEQ ID NO: 244198 - DNA, 459 bp, Glycine max
  unsure (1)..(459): unsure at all n locations
agctntattcaagacanagaaattaaagatattcaagatggatgatcaagacagtctccagagtcttaggtagggtatattaaataggaagggaatttctaattgaagtagcaaaaggtttggccaagaaatttaagttaaaaagtcttttcaagagatttactctctggtaatcgattaccagaggatgtaatcgattaccagtggccaaaaatgatttacaacagctattaaaatttgaattcaaaatgtgcactgtgtaatcgattacacatatatggtaatcgattaccagcagttattgaacgttttatttcaaattntaaagcttgtaatcgattacacacatactgtaatcgattaccagaggagatttntagaaaatattctcaacagtcacatcttttcatttggttcttgaatggccatcanacgcctatatatatgtgacttgagaca

SEQ ID NO: 244199 - DNA, 343 bp, Glycine max
gctacgtgggagtacgtgagctcacttggaggtgggcaacacgggatggtgggttcgtacgtgatttgtggatgtggagaacttgttttgcaccatcgcccgaccgccacctagtaccacatgtgatgggtaccccataatcctacaagcttgaaatgaggaagtgtacaacggtgaaacttcctgcttttattcgctgaccacagagtggtacctggagatatgtcgcgggggtcaggagaccctcgggacgtcacgtggcgtgctatcgcccacaaccaaacttgaccaatcccgacccaacccgggcatagtcagtcagtgagaacctgtgatgtaccta

SEQ ID NO: 244200 - DNA, 445 bp, Glycine max
agcttccagctttccacctatatggatggtctgagcgtgaatacactttgtacgcgtccagtctagtctctctaagccctgaaaccgtaactatagctatgttctgagattcgccttttctgctgatcagagagctctccgaatccttttctttcgaagcggcattgcccaaagtctaatcacaggcttgacagggtcttcttagcccatgctaactagaatacttagtagcttatatgatcccacagcgataaccactgattgaggagcattcttcgttttaaccagttttcataaaccaagatatcctgcctatcccgaaaaacggactccctcatataaaacagtagcttcatatcaagagtggttttgactaatcatatgacaaatgctcggccgaagctagagctaagtggctgttcacggtaagtatggaaagcatatg

SEQ ID NO: 244201 - DNA, 417 bp, Glycine max
  unsure (1)..(417): unsure at all n locations
gcttctacaataagagatggtcaagagaatcaaggatggactactcatcaaaggcaagaaaggaggaagccacaaagagctgaattgacacacctaggatattttcttaatagctcaattagcgacaccagctcgctaagtgcaattccgtctagaggaaataattcgcttagcgactctagctcactaagcgcaattccaaccagaggataaattgctcttagcgcgaatgtctcgcttagcggtaaccttctgtgagtttaagctgtgtcagctcacccaggcgagaaaattttctctgtgcgagtcttgctgattacaaatacgcccaacagcgagaaaaacatcaatttctacgaggtaatcgtgaattctatgtcttctcccagttagaatgagcctatcatngtatctctt

SEQ ID NO: 244202 - DNA, 436 bp, Glycine max
  unsure (1)..(436): unsure at all n locations
tttctntgagcaaagcanaggcttgctcttatttttcatcccaggtaaatgccacattcttcttcaccatctcattgagaggtgatgcaattgtagagaaattaagaatgaaccttctatagaagcttgctaacccatggaagctcctaatatctcccacactttttggggtgggccattcttggatggccttgattttctcaaggtccacttggaccccatttctaccaactacaaaacctaagaagactatattatctactcaaaaggtacacttctctatatttgcatagagtgtgtttttcctaaggactgaaagaacttgcctgagatgtgctaagtgatcatctaggctcctactgtacactaaaatatcatcaaaataaacaactacaaatctacctatgaaactccttagacatgatgcataacctat

SEQ ID NO: 244203 - DNA, 449 bp, Glycine max
  unsure (1)..(449): unsure at all n locations
agctcgacacatattaaccatattcaaggtctgtctaatgagtttgtccaaatgtctccatactagtcattggagttaacaaacttaacactaatttctttaaacaacaaattntctcgaacaaaatggcactcaatctctacatgtttggttcttttatgaaatactggattaaaggcaatgtgaatggctacctgattatcacaatacaacttcatttgtcgatcacantaatttaagtcttgaagaaagttgttaatccatgttggccagatcacaagtaattagagccacagctctatattttacttcttcacttgactggacaacaatattatgtttcttgatcttccaagagataatatnttctccaatggatacacaatatacagtggtggatcgtctgttttagggcaacctgcctaatcgcattacaatacctacatatt

SEQ ID NO: 244204 - DNA, 356 bp, Glycine max
  unsure (1)..(356): unsure at all n locations
tacgctaaattagtctaaaatctcataagctatntaagctaagtctagtccaacaaatgggatctgaggatgaagcttagtntaagttaatctaaacataagagggctgtctaaattgagcctagtccaacaattgggatctgacgacaaagcttggattgattcagtctaactggagatcgaggtttantaatttaggctacaacatataacacaaaagtatgattaattacagaaatatgtttatatacatcacctggttggtttgaaagaaccaacacttctacctactgctgcagtgttacttcatgcatttttacagtcttagactagacttatttaactctattcaaatc

SEQ ID NO: 244205 - DNA, 436 bp, Glycine max
  unsure (1)..(436): unsure at all n locations
agcttgtangattatggngtacccatcacatgtggtactaggtggcggtcgggcgatggtgcacaacacagttttcacatccacaaagcgcgcataaacccaccatcccctgttgcccaccttcaactgagctcacgtactcccacgtagcccatatcctcgtttctctcaacaccgggtccccatcaatcctcccaagcttccacaacatccaagcaaaacaacattcaaacagcacaagctatcacagtcaagcaaaacagagcaaaggcagataactctgctcaacacatcaaccaaaatcacagctnttctcacttaaagaccacagtaacaattccttcgttccaattcgttaaccgttggatcgactcacaaattttactggaagtctctagtacataagcctacattttgaccgttgggatctactagc

SEQ ID NO: 244206 - DNA, 310 bp, Glycine max
  unsure (1)..(310): unsure at all n locations
ntcgagaaattcanatggtcataactnttcactcggaggtcctattcatgcgtataatatattgagacgctcgaaattgaacaacggaagctctcgagaaattaaaatggtcataacttttcactcatagatccgattaacgcgtataatatatcgagacactcgaagttgaataatcgaagctactgagcaattcaaacggtcataactgttcactcggaggtccgattcaggcacataatatatcaagacgcccgaaattgaacaacggaagctcttgagaaattcatatggtcatttcttttcactc

SEQ ID NO: 244207 - DNA, 448 bp, Glycine max
  unsure (1)..(448): unsure at all n locations
tacacccacatgaacttcaatttttccttctgagccgagaataattcaaaattcgcttaaattacatttcatattggtaggaacccaaagtggaaattgtagaattaccagtgggaggggaaatcccacattcagtaaaaatgaaaaaagtgagccttatataagtgaggagaaaacccaataacctaagccttaaagtttgggttaaagtgtggtgtcagttcccttatgtggtggctcgtggttcattggtgtaaatcttcctgatgtagatgataatgacttncgctcgaggggagactatcatgtgaaagagacttatacttganggagagattgtgggttacangtatgaggtgaagtctacatcagactaaccgtgaaaagtgtaccacatataagtgagaagaccacaaaccctgaccctatgtggtgggtcatggtcatg

SEQ ID NO: 244208 - DNA, 385 bp, Glycine max
  unsure (1)..(385): unsure at all n locations
actctaagtatgattagtaacttctttaaagattaaatcggggtatttggaagaatttcaaagggacttgactaagagtggtctaaattacttcgagtaaaagtattccttaaaagataattggtgtaatatatcaaccgtcctaaaatacataattaattgcattaactatctatgtcactgtgtaattccatttttgttcgaagtaagttagacaacnctaaacatgacaaactcatttgtntagttagcacttacaatgcgagttttatatccgttgcatggtccaataattataatataaaagtatagagtgatatgattcttttttatttgcaaatattgaaaatgaatagccgagaatgcttaattactacgggtcaca

SEQ ID NO: 244209 - DNA, 437 bp, Glycine max
  unsure (1)..(437): unsure at all n locations
acaagtggcctaatgcaatcctaccccgcaagggcattggatagaagactccaagtagattgggccaaagatgcaagaaaaggccctatggttctcatgagccttgaggtagatntcacgcccatgggctaagtatgagcccacttatctttgtacatattagattaaggtttcattatttttgggccttgtatttacggctccataatgtacgtaaggtaccctaaacatgtatgatttttcacccttctattttcggcacctacactaatttttgattacgggtagttttgaatttacatgcattgtggaatattcatgtgcgtgttgggaaaaaactaattgaatgcgagaagcctatccagttaaatatagagggcgggagcatttgttgctacaccctaatgcacatcataagtacactttgtgatgcttac

SEQ ID NO: 244210 - DNA, 436 bp, Glycine max
  unsure (1)..(436): unsure at all n locations
attcgatttcatttatcatgaaactaccctataccaagaaaacagagtagaggcagaaaactctgcccaaaactcattcaaattccacagttttccctactcacctaccccagtaacattctctttgttccgattcgttaaccattggatcgtcttgaaaattttactggaggttcctagtacataaatctatattttgaccattgggatctgctagaaaattcctggaacacgagatgtactaccattcccgtgactagcaatgcacaaccatttttctgcactatggtaaaaatctgctgcacaatttaacagcatttttctgcataatatggcnganctcaaaatacaacttgcccacatccaactttactcatattggatcgtancagtcctanatcatgtataaatcatgattacaacagaaacaaacttc

SEQ ID NO: 244211 - DNA, 473 bp, Glycine max
  unsure (1)..(473): unsure at all n locations
ttaagtccacctgccgcatgcaagcttctaagaagcagtggatgaaaaatagtttagaaaantttttgtggtccacacgctaagcgcatcccttgtgctaaacgccatttccttcacacgctaagcaagctgttgttcgcgctaagttccttgacccctgctcattggttggatggtcccactaatcgagtgcttagcgctaagcccaaaaacctctctggagtttaattctttcgaattgggcttagtgcaaatgctcgctaagcgcaattccttctctggaattgcaattattagaattgcactaagcacgaatgacacgctaagtgtgggccactactgcatttaatgagcattaattcgctaagcgtaagccttggtggctaagcgcatgttgcatgaccaattaaagctacagtacccgctaagcgcaaccttgcgtactaagcccaaaagcttctctggaatttaac

SEQ ID NO: 244212 - DNA, 438 bp, Glycine max
  unsure (1)..(438): unsure at all n locations
taagctcgctgttgctgccccacagagccnctcggaacttgttccggccatgctcttccctacgagccctcttggtctcttgttccaaggccttggtggtagctatatttatatctcttagtttggcattctcctttcggattttaagagctgttgatttgaacctttctttgactatttgggcttgctcgagttctgccctaagggcctgcacctcttcgtcttcttccggtgcctcaacttcctcccttttagcggttctccaactcgggagccaatccaaaccttgcacgtgggctttcaacgaccttcggtagccactgatgggcccattgttactgcccctgagttctttgtcctctttttgcaccacctcgcatgccttgcggaccttttgaagtgtctccatgttggtcttactgaaacctcgtgaaatga

SEQ ID NO: 244213 - DNA, 150 bp, Glycine max
  unsure (1)..(150): unsure at all n locations
ctgcagcttacgggaaccttgtgccgcttcaattcatcaaaaaatgtcggaaaacattgagcagtagggcatcttaccatctgcttccatggtcagtccatcattagagcctgtccccncagctccaatggctggactgcaacctgaatg

SEQ ID NO: 244214 - DNA, 298 bp, Glycine max
  unsure (1)..(298): unsure at all n locations
cgacttgttgatgttcaacaacctcacctcattgctccatnttcatcttgtgaactctacttgtcctctaggaaatcatagacgcgcatgttcagcaagctcatcgtcagacattgtgtcttattcttcttctctagcagatcatccgagagatttgtgtgggtgagtagtcgtcgtccaccattagcttgaaagatgggctttggtgtatcattgcatgcatcactctctagtacatcatgtattatttgaaaaacatatatttgtctatcgtctcatggtctattttaaagttaga

SEQ ID NO: 244215 - DNA, 614 bp, Glycine max
  unsure (1)..(614): unsure at all n locations
actctcactacgatcanagtctatatctggcttatnttgtgtatcgttcctactatataatctatnacacacacacacagacatttgagtcattgagatgcgcgctctcttgnacccancgatccgtatatcgacctgcacgcatgctaacatatgtgcagatcacgcttgtatacatgcaccattgttcatccaacactgagacactattgtgctgctaataacacaacaccacaaatatggtgagacactgaagcctgagacagccagattgcagtctgatgcgccaatatacatgacttacttcaagaaaagtcgcatatacattgaccgcgagaattaaacatcgacttttaccgtaaaactaatgacataaactcgttcgatcaataatcaatttggccgtttgaacagtcgcttgactataattcacgctgcttatcataatcaacaaataatatacgggacataaaaacgttatcttacagtgcactggtatatagaactttcgtactattgaagagcggattcctctctattatatggacctgaaatgaagaatacattcacgtgatggtcctaatacttaactccgcggtagtgcactcgcaacg

SEQ ID NO: 244216 - DNA, 275 bp, Glycine max
  unsure (1)..(275): unsure at all n locations
attcgcctgttttaaagctcttataatttactaaacctatgcttttaaacacatatatcttgttagcagcggttggtatgcatcttatgccttgtaacttgtttnctactttaaattgcacgtctttgtggaactgtctatcatgctctgtggtatggatcagaacgtccttttctctctccggaattactcggtttacgctcatgcattatgaaggatattttctaaccaatttatcataacttaagattattttgatatgcgctcttttcctt

SEQ ID NO: 244217 - DNA, 455 bp, Glycine max
agcttcttatccaaggcacgttcttggtggtgaagcttcttcttccatggcttattccctagtggatggtgcctcccctctcctcttctcctttgccttccgctgcatctccatggtggaaaatcatcattgaagctcaaagatctagcctccatagaagctccacaagcaagcttccatcaacatgacttgaaaattgtgtattttcctattttatattttttatatttttttaaggtcgacaagcaagctccacaagcaagtttccatcacatgtagatgaggttcaacaatatattgatgcaagatggatttttgctctacaagttttgtggaagatatttagatttaccctttacagaatatatatgtgtgttgagagatacaaattcattactgcatcgtcatcaagtgcaatctatagacattaaagaatactaatgtatgaacgatga

SEQ ID NO: 244218 - DNA, 269 bp, Glycine max
  unsure (1)..(269): unsure at all n locations
gatctctcaaatttgggccatttctttttggttatgccaattgaaaatatatggtctttcccaccattctggggttcagttcatgactttttcggccactgaagccaaccaatttctttntactaactaccctaataaatgacaggcgagaaaaggcaaaaggaggggatggtggtgaaagccttaacatgttcaagcaactttgtgcttgcagcttcacctaagatttagtctctttggtagtatacaatggctttgcttgatccatg

SEQ ID NO: 244219 - DNA, 101 bp, Glycine max
  unsure (1)..(101): unsure at all n locations
agcttatggtatntgttaatgttatcttaccaattatggttatttaatttatgtattaatctctattataataaactcatccttggaagttttgttccgtg

SEQ ID NO: 244220 - DNA, 457 bp, Glycine max
  unsure (1)..(457): unsure at all n locations
caagccaaagccacactctcgtgcatgcatatagcttctcaagacataatgccaaactcccgccaaaaatctgatttcaagcttaaataagtgggttggtttgttcacctacgccaatcaccacactctcatttttctaactccttatacctgactcatgtctgactactctgcgtctcgctccacctcttccccccacgctcagtcccttactcacccctccctgcgacatctcctccctccactcttcccttcatccnnntcctccccctcccccccccccttcgcctctcccacactacgtttcccccttcacttaactccnctctcattcccatctctcctttctccctccctacccactttcccaccttcttacactccactctgtatactatattcttcaccctcacccccttactctctcgctctctccagccatctctcactcttcatc

SEQ ID NO: 244221 - DNA, 452 bp, Glycine max
agcttgaaaaatctcagggaatcgctagagatgccgttatcaccgccagactacacacgtgagcccacttataggtaaggggtgagtttattgtaattggggttagaatgaacatgtgcatgaattcttaaaggattaaatggggaatttattttgggttgtttattcaattataattcttcctttgattcttatgtgattatttgaaattgtttgaggggttttactccccatgttgtgggaaacatatttgtataatttgtttgtattttggacaatatttactatactagcgtgatacattattatattggtatcaagaaattgtcattgaaattgtgtgtaatgtataaattgaatatgtgttgattagtgagagacacataaacatgtgatggtggattgtaacattgtgatatgttaaaatagtggacatgggatatggttgtaaa

SEQ ID NO: 244222 - DNA, 165 bp, Glycine max
aattttggctcatagagaagatgaaagatgacaactgaaatacctgaatatgctcctatatcaaatacttctgagaagcagggacttgcttccaagtctcgcatgtcatgttgacctatcaccagcgataatgccacaatatgtactcgatttcttcttgtgggg

SEQ ID NO: 244223 - DNA, 442 bp, Glycine max
  unsure (1)..(442): unsure at all n locations
agctataggctgttcaattgcttcagattgctgcacaaaagggcaaaggtctgtgtggtggtcggtagaggagcataaaccacagaatttggtgacaggtgcaaatttttgattcatggccagttgggttaccgggttaactaaggcatctagtttaccttcaagcttcttagtctcagctgatgaagatgaattcatggctacttcatgcattcctctaatgacaatagcatcatttctagcactaaatngctaggagtttgaagccatcttctaaattaaatttcaggcttcagtagggttcatgtctccaagggctccaccactggaaacatctatcatacttcgctccatgttactgagtccttcataaaaatattggagaagaagctgctcataaatctggtggtgagggcaactggcacatagtttcttaaatctc

SEQ ID NO: 244224 - DNA, 426 bp, Glycine max
  unsure (1)..(426): unsure at all n locations
tctccttccatggcttattctctagtggatggcgccctctctctcatcttctnctttatcttccgctgcaacttcatgggtgaaaatcaccattaaaggacctcattgaagctcaaagacccagccttcataaaaggttctcaagcaagcttccataaaaaaaaaataaagaagaaatcatgagcaagtataataacaaaaaatgcaatgttgacaatgcatttataaggaaattatacattatgttatacttggtttataaggagttgaggcactcgaaaactaatangattacatcgtttttctttagatttgcaagagccacaacctgtataggcaaggaacatgttaaaatagtagttttctctacatcatnntatatatgtccgcatctatatatacatctttttgtttaaacactatata

SEQ ID NO: 244225 - DNA, 447 bp, Glycine max
  unsure (1)..(447): unsure at all n locations
agcttctntgagaanactttcttgagaagctagagtctagctacacacacccctctcataactaagctcacctccttgagaagcttccttaagaagattcctaaagaagctagagcttagctacacacacatctctaatagctaagctcacctccttgagatgagaagctagagcttagctacacaccccctataatagctaagctcacccccatgacaaanaaagatgaaaatacaaaaaaaaaagtccttactacaaagactactcagaatgctccgaaatacaaggctaaaaccctatactactagaatggccaaaatacaaggcccaaacgaaggagaaacctattctaatatntacaaagataagtgggctcatacttagcccatgggctcaaaatatactctaaggctcatgagaacactagggccttcccttggatctct

SEQ ID NO: 244226 - DNA, 538 bp, Glycine max
  unsure (1)..(538): unsure at all n locations
cgccgcgcnattgacgcantcccctgccgaccttcgatttagccacctgtcnttacgcgcaccatagaatactcaagcttcagactatagcaactcacaatcttagtgttctaaacccctcaatttaatggattttcaacgtctgagaagtggaactgataatgacggatacttggaggcaactcttaccttacacaagtctatgacatgaatttaaacctggtcaaactggatttaccccggaaattccactgaatcataatttgactcctcaacacccaattttaccctanaaatggctctttggtcactttgatcatttgtttttctctcttgcacagcccaaactttctcattaagtctgaatgacaatttcatgctaggattaactcactttaaccgtcccataccacataaatcagatttgggccttccactcttaaaatctcaattttggttcactcctaaaccatacgtttactgtctagccttagttanctctaccctcattcttaaaacatttccacatcctcttcct

SEQ ID NO: 244227 - DNA, 432 bp, Glycine max
agcttctatagcatataacatagcggtacgttcctgtgtcctcatgcatgttttagtacttaagaaatttagtggtctttgactttacttctatgttgtgtttctccatggtttgagttcttcaccagaaaaaaaatgttaatgttatgatacaagaggtaactttgtgaaattagctgttggaaaaccaccttatttgtggtcaccccaaggtaaaggggtgtgctaaagctccacattgtggtgggtagccgtgggcacaagaggaacatgttgaagccttacattgactaaagatagtactgagatagagtatataagtagagaacaatcctcaccttacaagttagtgttgtatgattgagatatgccaaaatcactttctaacccggtatcagagcctatcctagaccaattgattgcgccctatgt

SEQ ID NO: 244228 - DNA, 352 bp, Glycine max
  unsure (1)..(352): unsure at all n locations
gaactactaactgcagtaacagttgcagcccaactatccggtagtgatgacaatagaatcaatgccttcacctcatcctcaaatntaatctgcacagatttcaattgggcaagaatagtattaaactcattaatatgatcagctacagagataccttctctcatcttgaggttgaacaaccggcgcatcaagtatactttgttggctgctgacggcttctcgtacatatctgataatgccttcattaagcctgcagtagtcatctcgttcacgatggtgaacgcgacgttcttggctaatgtcgatctgatcacgcccagagcctatcgatctagcaagttccattcttctt

SEQ ID NO: 244229 - DNA, 443 bp, Glycine max
  unsure (1)..(443): unsure at all n locations
tgcgtgctaagcctcatatctcaggctaagcgcatattgcagaantatttgtgttgcagaaagcgctaagcgccacctgctgcactaagccccagatgctcactggaatttgaaacctcaagttgggcttagcgctaggttaagctaagcacagggttactcaaaacctaaacatttcattgacgtgctaagcgcgccatacaaatttcagtttttaaaaccaaaggctgaggcgctngtgtgttacccacaaatcattngcctttacccttttctaaccctgatcttttgtgctttctactatgcgctgaaacttacttgtctgcatnggtcttgcttcatctacattgcaatcataatcgaagtaagtgagtacattctcaatttcattttcatctttcacaccacaggatacatgaatttgtgctttcttagatagtagc

SEQ ID NO: 244230 - DNA, 340 bp, Glycine max
  unsure (1)..(340): unsure at all n locations
cttttctgatgatgaccgangaacaattatggatcaacttgaaacttatgtgcttcaagtgagaagaaatgcttctttttccacttgtgaagatgttcaaagtttggctatgaagatggttcaaactgagaaacatctggtatttccattggtttataaacttattgagctagctttgatattgccggtgtcgacagcatccgttgaaagagcttttcagcaatgaagattatcaagtctaaattgcgcaataagatcaacgatgtgtggttcaatgacttgatggtatgctacaccgagcgggagatattcacgtcgcttgatgatattgatattattc

SEQ ID NO: 244231 - DNA, 61 bp, Glycine max
  unsure (1)..(61): unsure at all n locations
agcttctagcaaggaagaatgaaagaggcgtctgattctcgcaacaagaanttttcaagga

SEQ ID NO: 244232 - DNA, 413 bp, Glycine max
tcttagtctcaactgatgaaaatgaattcgtggctacttcatgcactcctctaatgacaatagcatcatttctggcactaaattgctgggagtttgaagccatcttctcaattaaatttctggcttcagcaggggtcatgtctccaagggctccaccactggtagcatctatcatacttctctccatgttactgagtccttcataaaaatattggagaagaagctgctcagaaatctggtggtgagggcaactggcacatagtttcttaaatctctcccagtattcatataagctctctccactgagttgtctaatgcctgagatatcctttctgatggtcgtggtcctggaagcagggtaaaaattttctaagaatactctctcgacgtcagcccagctcgtgatggaccat

SEQ ID NO: 244233 - DNA, 385 bp, Glycine max
agatgctgctctatgctaaatttctgaaagatatgctaacttggaagaacaagtacatccatagtgacaccatagttgtggagggaagctgcagtgccgtaattcaacgcatcctttcgccaaaacataaggacccaggcagcgtcactataccttgttctataagtgaagtatttgttggcaaggctcttattgatttgggagccaatattaatttgatgccacttttcatgtgccaaaggcttggagagttggagataatgtctactacgatgactttacagttagcagatcgctccattaccagaccctatggagtaatagaggatgttttggctcgggtcaaacaccttatctttcctgctgacttggtggtaatggacat

SEQ ID NO: 244234 - DNA, 451 bp, Glycine max
  unsure (1)..(451): unsure at all n locations
ngccgctggagctgacccattaacagccctaactcctttagactggtgatccctangctcttgaccttgacttggtaaaacctctttttaagcgaaggcgtttgacttgatcccatgttttactaaagtgaaacaaaaatcggtgcgaatcaaaactctaacatctatcatgggtggaatggatgaatgcatgaagaaaggcatatgacacagatgcaatttatgaatacgatagcccgagaaattgtcttcttcttagatacaacgtcttgnggtagcacagtgtccgacgtatgtattntaagatagtgacacgaaccctccgttgatttgctaaagagaggggatcaagacagaacccatgcatgatgcatatgcgaaaggcataacatggtgacgtacataatattcacaaacaaataagcanaagggtacatgacacttatgcatg

SEQ ID NO: 244235 - DNA, 397 bp, Glycine max
  unsure (1)..(397): unsure at all n locations
agcttgtagaaatngattacttatcgttttctttgagacaatgattgaattattcatgaatctctgctttaatcgagtaccatgtgatataattgattacttcttccttaaaaagtgtttgcaaagttatcaagaacacattaatcaattacattgaggatctagtcgattacattgttcttaaaagtattctagatattcggaagaacactttaattgattgaaatgataatataatcgattaactgatggaagcttgcatgtggggcttttatggaggctggatctttgagcttcaatgatgtcctttaatggtgatttctacaccatggagatgtagcggaagacaaaggagacgaggtgagaggaggcgccatccactatggaataagccatg

SEQ ID NO: 244236 - DNA, 358 bp, Glycine max
  unsure (1)..(358): unsure at all n locations
tcatgatgatgaatcatagtgattgaagcagttacgacaatgactaagatgatgacacaaattccaaagaatgatttcaagaatgagtcaaaagttcaagatcaagtttaatttcaagtttcataacaagaagattcatgaatcccgagaagattgatttcaagattccagagaagattcattcaagattcaagagaagaaatcaagaagacttcaccacggacgtattgaaaagattcttctaaacaacatagcacagttttgtttttcaaaagagtttttctcangaatttctaagttaccagagtttcttactctctggtaatcgattaccaattccctgtaatcgattacccat

SEQ ID NO: 244237 - DNA, 462 bp, Glycine max
  unsure (1)..(462): unsure at all n locations
gtcacctgcggcatgccagcttgcacagctgggtaatactccacacctttgatgttgaaacttttgttattttaagtacttaattctaattgccgtatttcatggaaaaccctatatttggtctagaatctacaattatgctaggctaattgtgactntagtgttacattgattagtttatttaatgcgttttggggaaaattactatgtgttatttttttttgactggatatatacgtgttaataaatattaatatgacttcacacgctaaaccaatactaagcaaacgggagatacaaaatttggtagatccaatgcttggaggggcttatgacgtgacaccagttaatagagtagcctttgctgcctccctttgcattagggcatctgcaacttgcagacctatcatgagtgaggtagctcaattatatatgttgcacaactttggtgttactttccta

SEQ ID NO: 244238 - DNA, 373 bp, Glycine max
  unsure (1)..(373): unsure at all n locations
ngagtcttagtataatcgttgtataatgcttgctaattgtttattatgaaattgatgagtgttattatgtcttgacttgagtgtgtgattcgtgtgtaatgtgattgataattgaaaaatgaattttaaatgataaaatggtgaagtggcgtggattgtattaagttgagctatgttataatacttccataatttattttgattatatctttgtttatttaaatttttttagaaatgtgataactctctccctgtgtgttatttgtgtttggatcttgtgatgatcccaaaccttgtgttcataggagcagatgaccaggtagatgattttaaagaatntcgtactagaggaccctgtgacacaatgctctga

SEQ ID NO: 244239 - DNA, 548 bp, Glycine max
  unsure (1)..(548): unsure at all n locations
agctcggaacattggcgacatnttatttgaaaccattgcgtacccgcgatcctctagagtcacctgcggcatgcaagctnggaatagtcatacctcacacacacacacacacacacacacacacacacacacacacacacacacacacacatatatatatatatatatatatgtttaggtagaaagataccttggatatgcatgtatgtagcaaaaaatacttcacaaaatatatatatgtatgtttaggtagaaagataccttgaatatgcatgtatgtagcaaaaatacttcacaaaatatatatatgtatgtttaggtagcaagataccttggatatgcatgtatatagcaaaaatatctcacaaaacatatatatgtatgtttaggtagcaagataccttggacatgcatgtatatagcanaatacctcacaaaatatacgtatgtttaggtagcaaaatacctcatggaaaaaaagagagcaaanagagagcgagcatgcatagaataagaacgaagaaaaaaaattgactataaacaataat

SEQ ID NO: 244240 - DNA, 337 bp, Glycine max
  unsure (1)..(337): unsure at all n locations
tccatgacataatcctatacctgtntattttataggtactatctatgagaaatgccaattacaggcattgaatagtttcactgaattaagatgactccaaaatatatcatgtacaatatcttcatccttcaatttatgcccatgaatatactaatgccattcaagaagctctattagttgttgcattttagtattgccataccctaattcgtccgaggactatcattcactgatgttttgattctcgctagctgaattgtggtgttcgacaccagttaccgcatgaagtagaggatcactcagtgttttgatcaagaatacaaaatgataccaatga

SEQ ID NO: 244241 - DNA, 434 bp, Glycine max
  unsure (1)..(434): unsure at all n locations
agcttaggtgtattacttatataatgcatctaatgctctacaattatctgtcacctttagcctcttttatcgatgcctacattttccttatgctcaagttaattaaaacaagattatgtataatataaaaatttgtaaatgaaaggcatgaattaaagaaacaccttcattggcttgcgatgaatatagcatttatagtaaatatgtgaaagatcttagatgatggtttgtaccttcaggtatcattgcttctaaaggagaacttcattgactngtttccatatcatgatcatccttttatgaagggttttttcttcttgagcttgcatcataccttgtactaattatacatgacaagtttagtcaaattttctagtaaaacttcaaaatgattagaattgaattgcaaattatctcttatttctggtaattca

SEQ ID NO: 244242 - DNA, 361 bp, Glycine max
  unsure (1)..(361): unsure at all n locations
ctactagtcgacttacggttntgaacaccagttacagtgcgaaatatatgtccattcgatgttntgatcaaatatacgaaaggtaccgcaagggaggggcaaaagggttgttttagggagttntctggaccctagctcgcctgtgcccccaaattgcttatgggtgaaggaaccagctcgcctgggcaagccatcttacttcaagatgaagcatcagctcgcctggctgagctaccatagtcccaaatgccctcatttcctataaatangcgtgagggaggctgacgaagtggtcggaccttcaatgttaagagaaattggagagaaatcagagagaagaacgagaaagaagagataaaca

SEQ ID NO: 244243 - DNA, 447 bp, Glycine max
  unsure (1)..(447): unsure at all n locations
agcttatatagcttcatattattgatagagacaaaataaatcatataattctatgaaatatataaatttacgtgatgttatataagttttttttaataatggattgttctgttttagtttttaaaattgaaataaattaatatgtgttgatttcatttgtattattttaaattaaaatgtgttcttagtctacttttttagcacgttgattttaatgtgctgcatacgaattgataatatttagcccatttgtgtgttttgtcactgttcgcaggaatcttactggaatcctcaaagtgggagcctcctgttccctacttcattaaacacttctcattatttatttatttattttcgtgaacaataagaattaaataattaataaaaaaaatgatcgatacaattagtttattactntgagtctatatattaacaatatggagtcat

SEQ ID NO: 244244 - DNA, 263 bp, Glycine max
  unsure (1)..(263): unsure at all n locations
tcacaactctctatctagacattggtctntatagatgtttgagacaccttcttgagactagttaaagtttgttctctcatatttagaaaaaaggagcataaaacgcagcttttattgacaacataaaggactttggtgtaatatggtgccatccccattcttcctttgatatattcttgccttcattatatcatatcgttatacagcttgcggatctgtgtgttgtgctccaccaattaaccgcctgataatgacacttaaca

SEQ ID NO: 244245 - DNA, 303 bp, Glycine max
  unsure (1)..(303): unsure at all n locations
agctttgagccaatttatacgacattaactttntactcggatgtctcgattagtcccataatatattgagacgctcacaattgaatgttgaagctctgagccaattcaaacgacattaactctttactcggatgattgactgagtaccgtaatataacgagactcttgaaattgaatgttgaagctctcagccaattcaaacgacaataactttttactcggatgtctgattgaggttcgtcatatatcgagacgctctaaatgaatgttgacctctgatcaattaaacgacataacttttta

SEQ ID NO: 244246 - DNA, 347 bp, Glycine max
  unsure (1)..(347): unsure at all n locations
cctttcttttctcatgtgcactcaaacccaatctccgggttcgaagacaaccttctttctccctttgatggcttgtttagcatagctcatacttttcctctcaatttgatctttgactctataatgaagcttcttcacatagtccgcctttgcttgaccttctttatgcttaaaaacagaaacattaggcataggcaaaagatcaagaggagttagtggattaaaaccataaacaacttcaaggcttaagaaagaagaatcatcggatgacgccgatcgaacatttcctaatatacatcatncaaatattattcatggattgaatagaacatacaatagccgacatc

SEQ ID NO: 244247 - DNA, 436 bp, Glycine max
  unsure (1)..(436): unsure at all n locations
agcttgcagctgaaccaatgacaatatggcaagtgatactgagcaagaggctccataccaagataatgagcttgtagggcttcaacaagtgttagaagttgaccttgtcgtcattaatgaatctcttgtagatattgatggaggtggagaagagatagatgtagatttacttaaacaactagacttggttgaaccagacgaggatgaatgcatattatgtaagaatgagactgagagtcgacttgatgatacaaatacttattaggtaattcatacattaaacgttgcatatcttatgtttattgcgtgtgtgtgtgtatatatatatatatacatctgtatgattgtggtttgaaatatttattacttctacgctcgtagtgaatatgacagagaatatacgtgacctatnttggtgtacaaaacatgtttatgt

SEQ ID NO: 244248 - DNA, 253 bp, Glycine max
acaaaagtagtacaaatttgctggacattctattgcaatcgatctctttattatgttaaaataagagcgcacgcttattttaatgtaataacgagatgttcggtttaggaaaattttggaagttacatggaagttactaaaacttccatcaacggttggaagttacatggaagttactaaaactttgatgaacgacacgctttaaaaagatataacttccatctatcgcccagaaccatctattctttgatca

SEQ ID NO: 244249 - DNA, 407 bp, Glycine max
ggaatccagaaatgatgtgaaatctaaagcttgtgtattatgcaagaaatggaatccatatatgaagcgatatcataagctactcacaatattgcacaatgtttcatagcctccctctgccacaatatctcaacgatgtgaaccaatcatattagactatataattggcatagcctgcaacctaaccgaaccctagtctgcgtctttgaatttgaatatcgaaattttctgacatttggcaaatggaaaagggtggaacgacaaactaccgggaaccttgtgcgtgagctgatggaagagtgacgatactatcacgtgtccggacaaaataaaaaatgaaagaacggatacgctgacaggtggacagtcggtcgttgtttatactaacaatagattatattggatct

SEQ ID NO: 244250 - DNA, 580 bp, Glycine max
  unsure (1)..(580): unsure at all n locations
cgcccgcgncntttgatangcaatgcatttttngtgagccctctgtanattgccacccctatctacatacgcgacactatataatacataatttgactagtgactcactttattgtatcgctgttctatcacatacctctatcatctagacgcacattcagtgacacatttcaatatcttcgtatgaaattcctaactcaatgtgtcacctaactgcatatgtatgtgtctactacgacacgacaaacttcgcaatactattgtgggcaccaccttcgttcgttacaacaccaatactttcatggtccacaaggtcgtcacctttacaccattgcttgaacttcttctccacaaattgatcattgacccagaacatcatatccaccatctccattgtccgcgccctatcattgagtcacgacaacgttatatgtacacatctttgattctgccagatgaagctgatgctcgatacatgcccaacatctcttgcacacccaacctctaccatatagcgagctatctgtcctactctgcctcactactaactcacctactatccgcattgatcaccctttcc

SEQ ID NO: 244251 - DNA, 278 bp, Glycine max
agcttaacgtgacaggaacaagcactgcactgttggctatacatgcttatatataagtgtatttctcttgttccagattttgtgcgaatcgtgtgcattattaataatcagcgtacccaagcttctatttatactgcttacatgttttctagttcaagatgatccctaacttgactcctaaattgcagaacgcattataactatttagtcaatacctaactactcatctatcacatgctgaatatctgcaactagtcttactgcgcatctgtttctga

SEQ ID NO: 244252 - DNA, 373 bp, Glycine max
  unsure (1)..(373): unsure at all n locations
ttatgcttgatattgataacaagtatcttattttttagctccctcgcagtcatgaaaacttaatgatcatggcagtaatctggaagcggattaatgacactggcaagaattggcggcatgtctacaaggtttgtacaactattttatgttttagatgtagttactcagttactcttggaatcttttatttctttttttttattattggcatgatgnctcttttattgcccctcaatacttcaatgcatccattgaagtacaccatttataaaatttgtcttaatactttattacaaaccatgatggattcttgccgtctaagaatatgtcttatatgntttttttttgcatatactgctgatcttattctctt

SEQ ID NO: 244253 - DNA, 279 bp, Glycine max
tgacttacttacacccctacttcctctattccaagaaaagtgccatatctagctgttcaaccgaacactaactagcctttccaccaatacctctaataagaccatgttaattttcaatactgcaatatcaatactaaagtcacttcttgtgaaactactactctctatcatcggtcataaccatcctatgtgatacagccatcacctatgacgatacttattttgaagccgaagaacaaatgccttacaacagataaacgcttatgccacaatcatact

SEQ ID NO: 244254 - DNA, 295 bp, Glycine max
cggtctccttgatacaaatatgctcttcttaatcactcaaattcaatacatgataattctcggttcctcacagactcaaagaacagatttttaatcgaacgataacaaaaaatattctacaattaaacaactacaaacaaatctaaagactatcttgcattaaattttattttataaatcttacccaacctttcataaatattatcttccattagtttctactcttgaaacacccaacattaccgaaaacacagaggtctagacaagcattacaatacaaatgatgatctgctcc

SEQ ID NO: 244255 - DNA, 483 bp, Glycine max
  unsure (1)..(483): unsure at all n locations
tcctcggggccatttcctgcgaaagcaaagcattggaaagttagttttaccaatgaatgctactcttaaaacaaaaatggcatacaacctcctccaataaatacaaacatcaatgtgaatttagagcaaactcatgcacatacttccttacgaacattcactcgcacaagacatacttctaactaagaaaaaatgcacccatgcacaatcaatgcacctttgntacctagatttatctatgtgtacttccaaggtgtatttgctacctacatcacatgcacttccttggctaaatttacatacatgcatactcaaagcatcttggctaccaaaaattgcacacgtgcacattctggcatttctaatacctatgcatatacaaaccttgtgatgaatcttggctatctacacaataaggtgctacatntcatgctctattcaagtgctgttgctaccttaaagccgcatgtaaattcaagtata

SEQ ID NO: 244256 - DNA, 464 bp, Glycine max
ctcatccacattgtaatgcagatgtaaatttttaagctcttgccacattaaatctcacatgctacaaatgacaagatttgttgtcaagtaaaatgaggtgtttgtctcaggacccagtacccaaaggaatttttttttaaagaaaaaaagaaaagatcatgctgtgcaaggaaaaaaaatgttggagatgacagaagaaaaaatataaccagcaaaaaacctcaaactaggtaaatttcgattagcacaaataactctggtaaattcgtacgaacaggttgaacagagtgattacccatgtaccatcaccagtcacaacaactcacaactatcgaaaaatcaattttgatgacacggcacaacctatattgtcctatcttgtattaaactgctaacctagccatagacacacaacaagcacacgattcattcacagatcgaagttcaatagctttattcatcta

SEQ ID NO: 244257 - DNA, 415 bp, Glycine max
gtcctcttctgaaccttctctaggagactcaggcaacctttgctttcttctgtgagatctaactcccgcaaagaccagaccacaaatgacaaccaaggctattatgacaatgaccacaacaactatggtgtgcttatggacacctccgccgcccccagaacccgtgccagcgcctccatctgtcgagaccttaatgtaagaaacataaccagaatcagaatcaggtttctgaaagctacctacactgtccaaaaggaaacagtcccctgaacttctgtggaagaacaaagcaaggcacgagcagtttccgcggcaagaagattggcaaccagccaaatcgggtttcgaataaggttgaaggaattgaagcgcaaagtaatcaagctcatcatcagctttaaccaactgaatggac

SEQ ID NO: 244258 - DNA, 445 bp, Glycine max
  unsure (1)..(445): unsure at all n locations
ccctttctacaagactgaagctttgttttacttactggattagtggcctcagatatcctaagaaggggcttgaattaagatatcacagacaaatccncaattaaaaattttacttttaatttaacccaacaacccaggattccttttaaacaagaactcctagataataatgcaaaataatcttactaaatagaaataataagcaataaacaataaaggagtttaagggaagagaaaatgtaaactcagatttatactgcttcggccacacccttgtgcctacgtctagtccccaagcaacctgctcgagagttccactatcttgcaaaatccttttacaagatctgaaccacacaaggacaacccttcctttgtgttcagatttctttacaacaagagaccctcgatctcttaatcccttttgagaaatagaaagaagagaaga

SEQ ID NO: 244259 - DNA, 421 bp, Glycine max
  unsure (1)..(421): unsure at all n locations
gtagttaaaaaaattggagcagtggcattgcagttgcaattacccgacgctgctcgaatccaccctgtttttgacatatccgaattgaaacttgcagtgggagaacatcagattgaggcagaattgccaaaggaactacaagctgaagaacaagggatacaaccggaacaagtactggtaacaagaatgtttggtccagcaggagcagaaattccacaagtattcatctagtggaaaggacgacatgctgaaggagcaacctgngaggacagatcaaatatgatgcaacaattccctgctttcaaccttgaggacaaggttcttttccagaggggtattgttaggcaagaggaatcatnntactgtagctaagtngtgctacggtacagtaggaagaataagatgagaaggagtgatagtt

SEQ ID NO: 244260 - DNA, 442 bp, Glycine max
  unsure (1)..(442): unsure at all n locations
cctacaattaaaataacttaatgccattaacctagggaattaaaaaaacttaatggctgagtgtaactgaaattgtggcaaccaaaagtcacccccaacagccaacaagtcagccaccatttggtctcccaaaaggctgatgcctaggttgccaattgggcccttattacaacttgaactaaacctaactaaagcccttttagttgattaacccacaacatatttttggtcagccaactttacaaggattgggccattatttagacaaactaaacactctaaaattgaaacaaagnggngtcatttagtcctcctccatttgggccatgatacaactcacaaccttggacttttcctcttgaaacttgggcttgtattcaaacagtatggacagcacttgttgaagagcttccttggatttccttgctctaacccttgtcat

SEQ ID NO: 244261 - DNA, 442 bp, Glycine max
  unsure (1)..(442): unsure at all n locations
attgaagggaatttcctttaatgatttgaattgccaaatgccatcattgaagatttagaagcctgtataaatatcaactgagaatgcaggacaactaaagacaaaatttataggcaaacaccttgttcttagatcttaaaatctcattaaatagctttatgagccaaatggtacctttttcttttatatatttcctaatttcaactggaatattatcaaaaccaactactttatcattatacatcctcttaggaagagctttntttatttctccaagttaaattctgtgatagtaagcaaatntgtttttgatatagatcttttatgtaagtggatttacgtaaagatggcttataataatggatcatattgctaattggtgagtgattgaggatgatttcatcataatagccttttttcttggtgtacccaattcaattgg

SEQ ID NO: 244262 - DNA, 480 bp, Glycine max
  unsure (1)..(480): unsure at all n locations
agctntaaaagttgaattaaaacgttcagaatctgctggtaatcgactaccatatatgtgtaatcgattacacagggcaaattttgaattcaaattttaatagctgttgtaaatcacttttggccactggtaatcgattacatcctctggtaatcaattaccagagagtaaatttcttctaaaagactttttaacttaattttcttggccaaaccttttgctacttcaattggaattcccttcctatttaatataccatttctaagactctatagactgtcttgatcatctatcttgaatatctttaattgctttgtcttgaataaagctttgagacgcatgtgatcttttggcatcatcaaaagatcggctcgatcctttgtctacataatggattctgaaaaattttatgaatgaactttaagcaagtaattcacatgtcatatctaacaattatgcacgaatcatacacgagatata

SEQ ID NO: 244263 - DNA, 424 bp, Glycine max
  unsure (1)..(424): unsure at all n locations
catgcaagctntacatagggttataggaatagctctttgtatagatgtaagtcgcgataccaataaaggcccttagcagcgaaggccacaacatctgcacacagcaacaggaagttgcacctattgttgaggatgtttagcatgtggagcatgcagatgataaggtccatgaacagcctgaataagcggttgttgatgatgtaattcctgatgccaagggttttctatgtgggtcccacgacacatcagtgttgatggactatgtttatcatctggcaccgactgtttggaattgagagatatttatatttttaaataaatcatattttcgtaagtatttgttattattgttgaaatgatttaaattatcgatttcaggaacgctctgagctgaaattattctcccatggaaagaaagttgaga

SEQ ID NO: 244264 - DNA, 395 bp, Glycine max
aacacgttagagagggagcaaaagttctgggccaaagagagagcatggattgaagcaagagatgctgctttgatggaggctttgcataagttaactggaagagaaataatgaaggttgaaactgatcctgagggtactataaatgtaatgactgcagctgaagttcacaacctgaataacgaagatgagagtgaaattttgaacagcagtaatgttatcagaggtgctgatagctggccagaatctgatatcacaagacttgaacagctgagagctgagatggagacaaggtttccatatagtgaaatttcagaagaggtttcatgggatgtagtagcaacaaacatggctgattttggtacgacaggagtgctttgatgtgcaaagagaaatgg

SEQ ID NO: 244265 - DNA, 433 bp, Glycine max
gcgagaaagagagaggggggagcacgaaattgaaggaataaaagaggtctagaagtggaactttgaagtatgtctcacaagactctcattcatcaaagttacaacaagtgttacacatgcttctatttatagactaggtagcttccttgagaagctttcttgagaaaacttccttgagaagcttctttgagaaaacttccttgagaagctagagcttacctacacacacccctctcataactaagctcaccttcttgagaagcttccttaagaagattcaagctagagcttagctccacaccctctataatagctaagctcacccccatgacaaaaaacatgaaaataatataaaatacagtccttattacaaagacaactcataatgcgccgaaacaaggtaacacctatctactaaatggccaatacaagc

SEQ ID NO: 244266 - DNA, 436 bp, Glycine max
  unsure (1)..(436): unsure at all n locations
gtcctggatggaagnccttctttagcaactttttatcatgataggctttgacctctctttatacagccttgaggattcatatgcagtcagtctcatttcttctaactccaagagtggtagcttttttttgctctctggatgcagcttcatcaaagttcagaaattttaaggcccagtatgccttatgctccatttccactggtaggtggtaagattttccataaaccaattggaatggggataggcctataggagtcttgaatgtagttctatatgcccacaacgcgtcatccagtttaactgaccaatcctttcgagtcgaagccactgtcttttctaagatcttcttcaattccctattagacacttcaacttggccattggtctgaggatggaaggtgatgctccttatgtgtacattgtatgcctcacactc

SEQ ID NO: 244267 - DNA, 462 bp, Glycine max
agccattactacatttatctcaatatagtctaccatcatctaccttatccccatgttttgtatttatgccaatccgacctcccgatgttgcacttacaccactctcacctccgactgaagttagaccatcttcatctcatgttgatgcacgtggaccatccttgatacctacatccacatcatccccatccccgattgatgcacgtgggccgtccccagtacctacatccacaccttccctatccccggctgtagccaacatgcctatagatgaagatgctttggccatggaagatatgacaccctctaccccgacatatatatataaataaataaaatatataaaaatctcggtaaccaaattcacatgggtaaaagcttcacattcacttcactatgatcaattaaaacttattaaaacatattcggctcacaataaagcccgcacaatctacaaaaata

SEQ ID NO: 244268 - DNA, 400 bp, Glycine max
tttaccagcgggacactattcttgagacacagatggcatacaaactcctcccataaatacaaacatcaatgggaggttagagcaagcttatgcacatattttcttacgaacgatcacttgcacaagacatcctattaactaagaaaaatgcgcccgtatacaatcaaggtagcttcgttacctagattatttacatgcgcttccaaggtgtatttgttacctacatcacacacatctccttggctggatttacatacatgcatactcaaagcattctgggggaccaaaaattgcacatgcgctcatcttggtatttctaatacctatacatatacgaacttcatgatgaatcttgactacctacacaataaagtgctacatttcatgctattttttttca

SEQ ID NO: 244269 - DNA, 211 bp, Glycine max
  unsure (1)..(211): unsure at all n locations
ccccccctccccccccccccttttcccnacccccccccccgatacctgacctgaactgaanccccccccnccccccccccgccatcctttccatttacccccccacgggaaagcgaaccggcccgaccaagaccttgactcagcagagcaaacgaaccgagagccgacgccgaaccacccctgtccagcaacacggccagcacacccgaag

SEQ ID NO: 244270 - DNA, 426 bp, Glycine max
  unsure (1)..(426): unsure at all n locations
atagaaaaaggaaaaaataaatatagaagtgcacattcacaagtcatacccataattttaaagaaagtgcaggaagtaataacttcattctatcaagccaaattatttctactcgaaaattatgcatgtattatttgtaatggaacattggattacctttatggttacataaataagcacaggaagaaattcatcagctcctggaggattctctctggaagcaaccgaagcattaagcagcaagttgctaataaccctgcaacaattcagaatacagacaagtttatccctgcgtgccttgtacatgttgatcttctgcaattctttctgtgcaagctgccatcataagaatgatacaacatataagaattattgaanacaggagtatatacagaanaccacgaagaagcaaacttgtatattagt

SEQ ID NO: 244271 - DNA, 363 bp, Glycine max
ggtactctattgcattaatgctcttctatttcctttctttcctctgaagtctctttgtagcctaacaggagatgagtactgatcatcctcctgttttgtcttcttaactttctgttttatattatacaactatgcaatgatcatcctccttaatgatgtttacttggagggaaaatggaggggacgggagggtttttatgaactttacttgttttaaaaatgtcgcgagagacaggcgaattttacaggggaaagaaacttctataccaattagactaaagtatccttaatttaatacctttgttgacaatctaagcgataatactaacattgcttatttcccctcgcttctctcctttgaac

SEQ ID NO: 244272 - DNA, 437 bp, Glycine max
ttatttcagatatataccaacattcgaaagtgcataatgcacggtaaaaaaagtctatctacatatataaagcatatatactggtacatacggccaaagcatttggttttagttaatctaattaaggcacgaaatttgattattagtatattggattggctctcttgtgtttttgctataaggaggctgttggggattatatcaatccaaactctgatttcttaattcataatggacactaaataaatacatatgaagatatatgatagaaataatgttaatgtgaaaactaaaaattcttctaaatgtcagttaaggaaataacatacgacctagttgagaaatatatctccactattataaataggataacaatgtatctttcctaattaagaggatttcgctcaacaatttcaccctgaatgaggatataatat

SEQ ID NO: 244273 - DNA, 343 bp, Glycine max
ctaaagtgagacaaaagctggtgcaaatcaaaactccgatatctcatggatggatgcatgaaggaatgcatataacacagatgcaatctaagaatgcgggggtccggggaattcgtccccttcttagacacaacgtctaggggtagcaaagtgccccaacgtacgtttttaacaaggcgacacggaccctccgttggtttgtttacacaagggatcaagacagaacccatatgcgatgcctatgcaaaagacacaatgcgggaatgtacacagtaagacaatattcactgaacataagcaaaagggtatatgatacttatgcatggcagtgtgaaaaatggca

SEQ ID NO: 244274 - DNA, 399 bp, Glycine max
  unsure (1)..(399): unsure at all n locations
ttgtgcattcttgatatagcaactnttcaccacaatttacaagtttccattcaactgtaccccattccaccatattcttgtggctatgattgtggattagatgatagtattctgagaaattaccgtacttttgaaataatacaccttaacaaaacaagaaaatgaaagaataaagcattttgtgccaaaagaaaatacaaattttgcatgggccacacaaattatttacgtgattttttacaagaatgacatatggagctgctgtttcagcatatggcctattctatctatgcttatggttttgcacttcagtcaatacaataatgaaccaaaatacacagaatgccgaatggatttttcttaactagcagaaatcctaaaaattggtgcacatagcat

SEQ ID NO: 244275 - DNA, 362 bp, Glycine max
  unsure (1)..(362): unsure at all n locations
caacggggatgntcacaggacactttaaatccctttttaatcaactgacctacacttagcangttttggtcaatgttaggtacataaagaacatctgatattaatttggtacctgaacacgttgaaattgcaacaatcccttttccttttactgtaatatagccaccattcccaattttgacctttgagacattagttggcttcaaatccttaaatagagacttgtcatatgtcatgtggttcatacaaccactatcaatcaaccaactttcacttgattcactactcaagaagcatgtggccacaaacaattgtgcctctcttcttgattagcaatctgagcttcctcatcatggtgattt

SEQ ID NO: 244276 - DNA, 399 bp, Glycine max
  unsure (1)..(399): unsure at all n locations
aactggctgcatatgatgagagggaataaaccatcatgcatgttatctgcatctattgccagccgctgggtctttagcttattcaagaggttgggcgcccctgcgaaccatctgcccagatagattaagattaagagaggagacggaaccatctctactagacagaacccaagacacatatatgtaataaagtcaccactgacacactaattatctctatggatacgcgtgagagagagactagtgagatactttcaaagggccttccatccgttagacaataatacacaagtttgaacagaatatcttgcgttcataanaaccattatctggagcataacacaatgaagcaagtcgccttgtcctctccatatgtatgtcctctgcctcttcttcttc

SEQ ID NO: 244277 - DNA, 318 bp, Glycine max
gaggggagtctatccctctagacctacaatactcaaaactcattatgctctcagaggcttctttaagctcagtctttcagcttgcacacaaagctctaaactttggacttcgaccttctctcttaaaattctacatgagaacttgagaaagacaactcatggaactgacctctcttcttaaaaatctaaaacgcaaactcaggaaaccaaactccctcattctaattagcttaaaggggctgtgggctctggcttacggattggtcgttacgccaaatgattcgctacgctgctttactacggaggagcacggcctac

SEQ ID NO: 244278 - DNA, 365 bp, Glycine max
  unsure (1)..(365): unsure at all n locations
tgaatgaatgacctaataatcattgttaaccttaacccctttntgtgtttttgtgaatgatttctgatatgaactgaatttgatatgtgttagggtttcactgtcatatgacttttcttctgagaaagagaacttgggcaggctttggcattcttggaatttcttcttctgccactagacttgaccctacccccgaatcagggttatctatttcttccattnttttcctaaggaaaaaaacacgtttcttcttctctctccattgaccgagtttctttctctttgattcgctctggctgctacantttgaaagcaatcatattntcgattttcattttcatttttattntttattattcggatgt

SEQ ID NO: 244279 - DNA, 315 bp, Glycine max
  unsure (1)..(315): unsure at all n locations
actacccatacattcccaacctgcgataaacgcgacggcgcgcacgggtaaagagaaagcactatcgatgacaagttacgtacaaccacggatgataccaactgtggcggggcagaaaataattcttacaatcaacatcccaacaattccaatcgaggacaaggcttcacgacagccaagggaagcataggcctcagaccatgcaaaatcaacggcctacacaagagacaagaagacctactctccaagagaccacgcttcaacacagggcccanaaagatcacagaacgaagccggnggagtctcaactcacca

SEQ ID NO: 244280 - DNA, 350 bp, Glycine max
  unsure (1)..(350): unsure at all n locations
ctgagaaaactggggcaaataaagagggtgaggatgagggagaaacccatgctgtgattgccattcctgtacggccaagtttcccaccaacccaacaatatctttactcagccaataacaaactttctccttacccaccacccagttatccacaaaggccatccctaaatataccacaaagtttgtctaccgcacttccaatgacgaacaccacctttagcacaaaccataaacaccaaccaagaagtgaattntgcagcgagaaagcctgtagaattcaccccaattccagtgtcctatgctgacttgctcccatatctacttgataattcaatgggagccataaccct

SEQ ID NO: 244281 - DNA, 396 bp, Glycine max
cgcacgctcactcgggcagagagacataattgcgcgggctaacttatatgagacacacgtacccctcctaacattatatggaaattctaaaaaggcacgtaaaaaattacagttgaccaaacgctgcattgttgagcggcacatagccgaagaaactattgagttttgtattgaatacatacgcaatgttgattccatacggcttccaaggcctcctcatatagaaagaacaacatgggaagagattagaagagatgaactattgactgtatcaaggaaagaatggaacaatcacacttatatgtctatacaatgatgatgacgttgagccttatgttgaaagaataataaactactttgaagttcaattagaaataggaatgagaaatggataac

SEQ ID NO: 244282 - DNA, 283 bp, Glycine max
atttgtgtcttttatgggcgaccgtgtttctacatggagttctaacaagcatggcattgcgacactttctacttgtgaagccgagtatgtagctgcaacttcttgcacatgtcatgccatttggctaagaagatcgttggaggaacttctgctgttgcaaaaggaaagcacaaagatctatgttgataatagatctgcacaagagctcgccaagaatacggtgttccatgaacgaagtaagcctatacatacacggcatcatttcattagagagttcattaca

SEQ ID NO: 244283 - DNA, 275 bp, Glycine max
tcataggttaatggcatgaattattggtccatgacaagccatggaaagtatgacagacttgtaaacaaaattctatacaatgttcaatgttttagttccattgcatgtctggttgccaggtactaatagaagctggttatattctttcaaatgggccaactgtgtcttttgctatcattttaaacttcctgtttgatttcctgagtgaaagagacgcttcaccaagcaaccatcaggtttaggtgtcataatctttataaatgcattcattctta

SEQ ID NO: 244284 - DNA, 441 bp, Glycine max
tcatactagatttgtcaatgcttccaccattgccaacaggtaattgtacagaagactgcacaaccctactttcagggccgtccatttcccgagaaaccttatatttactcaaaattttgacatttgaaagaccaccagcaacactgagtgcaccattagtttgctgacgctgcataactgacatttttaaaggatcatcccccagatttgaaggagcctttttcatgcgatgagattgagccattggtgtaacagccacagtggacatgtatgaagaataaggagttgatgcagcagcagcagcagcagcaactttggcaactgctgcagttgcagcaaccattttctgtgcaccttcacggagctgaatatagtcaccctcaatcaagaataactgaatattaaaagagtaactgtcagacagtgatgcaaatccatcat

SEQ ID NO: 244285 - DNA, 414 bp, Glycine max
aatatgcacctgtcgcaagagtttgcggtttatgctcctctgttgaccaccatacagacctttgcccttctatgcaacaacctggagtaattgagcaggctgaagcttatgctgcaaacatttacaatagacctcttcaacctcaacagcaaaataagccacaacagaacaagtatgacctctccagcaacaggtataatcccgggtggaggaatcatcccaaccttagatggtcgagtccttcacaacaacaacaacaacaatagccttattttcataatgctgctggcccaagcagaccatacgttcctccaccagtccagcagcaacaacaacaacagcagcaacagcaacagtcccaaaaacaacaaacagttgaggctgctccacaaccttcccttgaagaacttgtga

SEQ ID NO: 244286 - DNA, 241 bp, Glycine max
cacccccgcccgcgaggcccccgaaggaagatttcttttcccctccacccgcgctacaacgtccggctaaaccacgacgcacgctgaccgtcgcagcgaagcagaagcggtgacgcaacgaacactgggcaagagccttcgctgactgacgcttctgtgctcttacgcgagggacctctccgtaagcgacacgtcgtaagaagctgggggccaaccacacaatagctaacttcctctctac

SEQ ID NO: 244287 - DNA, 395 bp, Glycine max
  unsure (1)..(395): unsure at all n locations
cctcgaccatctgttctctttctttttctctcacatgancctngatgaagntagggaaggggtcaaccatgttggcatcattgatggcaagattgacaacggtgtgggcgtcaagatcggagaggggaatcccaagggagagggactagtcgtgggttttggtggaggtggggatttcgatgatgtccttgagcttgttagactcaatgtactcgacgaccttgtcagcggcgattttcttcatattgggaaaacatcaccaaatccaactccatcgaccaagccataagatccttgccaaaaaaacatgttcaaaagcttcaaatcttcccaacaaaactggaatgtgaaaatggtttatgatttgcatttgcaagcgcggaatggttggtctg

SEQ ID NO: 244288 - DNA, 444 bp, Glycine max
  unsure (1)..(444): unsure at all n locations
ccccccacctccctcccccctnnccccccccccccccccccttaccttgaactttgaannccccngcccgagctgccacttaccaactcactatatcagaagttcaattattttcaacttcaacacccaccacgacagaaggagaaacatctcctatttctctattgtcactaagagcatgggcactacaagatacttggccctcccctctatcacaggaatgaaaacgaaattactcttggggttcatcaaagatagactcatgaagcccatcaacccatggacaaaaaggaatctatcacaggcaaggaacgaaactccttttatatcaatggctcaaactatccccgcatattgcatgagtgctttcttgcttccacgcacttgacgatgagcttcacaagatgatgaattaatcttggtggggatccacataacaaccta

SEQ ID NO: 244289 - DNA, 477 bp, Glycine max
  unsure (1)..(477): unsure at all n locations
actataacaccctagagagagggatattttgtgtgcttataccaccaaacctcgaaaacataaaatataagaatatcatatctaactatatgaaaactaaaaccaaaacatacatcataaggacaaaacttatacaaaagctttggcacttatgtgccttacaaaccatgactaaggtgcataaaaacataaaccaattctcatacattgagagatacaaattatactaatcttcttccacacatagaactccatgctccaagcttcttttatgagcatgccaacctgcttaacttgataaaacatgaaccttaaaggaataagtcataatgttttagagattatttaaaggactaatggtttagcatctcctaatgcataatgggtctaaggactctangntgattctctattctagagattactttcttaactcttgtggttcctaaccacttccatctacaactatatgccatc

SEQ ID NO: 244290 - DNA, 369 bp, Glycine max
ctcacacagaccttagaagatattttatgaaaaaacagtcctttggctaagcgcaagcctcgcactaagcgcatctttggtcatgcgctaagccgagagtttaaagcgcttagcgcccaacccttgcatctgaggctgattcggtccgctaagctggccaaggctgagctaagccaatttcaattcgatctgaattcggctaagcaatggccaaaccgctaagcatagtgtattgttcggctaagtgtgactcgttgtcgccaagctcatttccttgcagtcagaactggggttcatggagctaagcgccagtcacgatggctaacctgaagtccttgcgacaatgtaagcactaagcgatcccttatt

SEQ ID NO: 244291 - DNA, 361 bp, Glycine max
  unsure (1)..(361): unsure at all n locations
cttagatgcaagggatgggtgctaagcgctcgagactcgcggcttaccgcatgaacagagatgcgcttaacgcgaggctngtgcttancgaaaggactattgttcataaataaaatttctaagatatttttcattccttgttacaagaaattgaaacccttatgttaaacattcaaagattggctgatatactcctatgtacagatcatacagcaagttccaaatgattaaatgcatgaataacaaagataacagacattagacactgggttgcctctcacgaaacgctttcttaacgtcgctagctagacgcatagcttactaccttcaacgtggcatgaaagtcacaaaagacacatct

SEQ ID NO: 244292 - DNA, 389 bp, Glycine max
  unsure (1)..(389): unsure at all n locations
tgacttggcttggctcatttccacctctcattaataaaataaatttatttttacacactcattaatttgttaattttctaaatcattatcttaaaataattctaacaataatttgtactcaaataataatntaaaattgtctcacactgttaacacataaatattaaactcatatcttacagaaaaaaagattatatattgactgcgtaaaacactaatattatgtctaactcaattgccaatcttgtaaataatcctctcacaataatttcaacaataatctataattaaataaaactatccatagtgtatatcaatactcgaatgcattatatcaaatctatcatctacattctaattcacatacactatgtcttgaccaatcaata

SEQ ID NO: 244293 - DNA, 425 bp, Glycine max
  unsure (1)..(425): unsure at all n locations
acttcgnccaaaggcatgggctgggaactaagaagtctttcagcctcatcatttgcttctgcttgtattttccatctctgcggngaaaagcaaaatgagaacactgatacaaaacaaagtgcagacccccaatgttaataggaccaaattgttacaatcacattaaacgtcttgatctggaccaaccctgatttaagtttgattagattagattgtcactacagaatatatgacatttttcatctaccatacaggtcagcacgtctgaggcgtttaatcccaaatcccgtactagggaggaatgagggaaaataatatattnttaattgctgtgtagacattcaaccaaaaaaaaaatggcaatataatggatcactgcaggcntctatattctatctaaaagatggaaatctggagattatttg

SEQ ID NO: 244294 - DNA, 326 bp, Glycine max
tgatgacaaaaagctcatagatcaagaacacttcatgatcacccagatgatgatctcaagaatcaaagaatgagttcaagattgaatcaagaacacttcaaggttcaagaggaaatttgatttaagaatcaagaatcaaggtttaagattcaagcttccaagaattaagatcaagattcattcaagaatcaagagaagacttaatcaagataagtattaaaaagttttttcaaaaactgagtagcacatgaatgtttctcagaaccttctaccaaagagtttctactctctgataatcgattaccagattattgcaatcgattacc

SEQ ID NO: 244295 - DNA, 430 bp, Glycine max
  unsure (1)..(430): unsure at all n locations
tgcatagaatagaaaaccaacgggcaaaaaaaattgaagttgtgataacatataccttagtggcttcacttcagattttagaagaatttttctcctttttcttgacttagtcgaattaatgtcaagttcatcacatctattatcaaattgttgtgttcggattcagagagtcctcctaacttctaattttgttttactcttttatcattatgtttaacttcactcatttctttgtccaacttttccatatccatntgatcctattatattagttaagtgtaggataaggtgtgggaattgtggcattcgaataactgtcgcacatttggcatttcttttattattattctcgaatgtttaagttccctcattnntttttccatttctttcatgtcccattgaacctatagtttgactcaagtgttggatg

SEQ ID NO: 244296 - DNA, 412 bp, Glycine max
  unsure (1)..(412): unsure at all n locations
gtggtttactatggcgacctcagttgttagtggtgttaaatcaaaatgattttgagtctttctatgcatattttaaagagaagactaattaaatagccctttatagttagcaaacaatatcaatgatgcaatgatgctattatttaataattatcttgacaagaaatagcgacaaagctataaagcacatgtacagtaattgaattaattgctctcaaagaaatcaagaatgcaattatggatgcccaactctctctctctctctctctctctctgagatccttttcttttcaatttttcttgtgccttttaagcttatagagggtaacaagtaggattgaatctgctgcaacttgttgaagtngcatcatcttttctcattcctttctggttcttgaaagcacaatatatc

SEQ ID NO: 244297 - DNA, 410 bp, Glycine max
  unsure (1)..(410): unsure at all n locations
tcaacccagtcaccgtcattaagaactagctnttttcttcctctattgcctttagttgaatacacctttgtttggttcttaaccctctcatgcaacttctttacaactctgacctggattccccttctttatgcataaaagaagtgtccagttggaggggaataaggtctaacggtgttaggggattgaacccatagacaacctcaaaaggggattgcttggtggttctataaaccccctattgtaggaaaattctacatgaggaagatattcatcccaagacttatggttgcctttcaaaagagcccttannagggtggataaagacctatntactacctctcgttgcccatcagtttgtggatgacanagtggtagagaaaagaagtttagttcctagcttaacccat

SEQ ID NO: 244298 - DNA, 353 bp, Glycine max
gaagagtatccttgtggaaccttcacccgacgaagacactgacaaaaacttatcttctccttcttggacaaagtatggcaggttgggggcaagtaaattttcttcccatcagaccttggatgcaactgtgatcgtatacccatatcacctagatcttgatgggtattcaagccattcttcgccttgccttgaatgttaaggagcgtctcaatcacattgtcacaaacatttttctccacatgtataacatcaatacaatgtctaacgtcaagatcacaccactacggaagatcaaagaacatggacctcttcttccatatgcaactctgaatcttatccttcttttaggtctt

SEQ ID NO: 244299 - DNA, 383 bp, Glycine max
aggaaggtgaaatttcatccaggtaaggtcttggccaaaaagtcaacgtttggctcaaaaggctagcaaatggcgagacatgatgtatgtcaggatatttgtttagcaaatggctcagaaataaggaatgcccaaattacttccatgaaacgcatattatgacaattagaaattcatgcaaaattaatcataacccacatccatgtggacactcaaatataaggctttgtggctatgcaaacactaaggcttaaggtttgtttccacattcaagccaaaccagtgtttcaacgattgctctttttatcaagtcatacaaacatccaacgtccatttggcattccggagaatctttcgctcgtttcaacctttaggcgcacatt

SEQ ID NO: 244300 - DNA, 333 bp, Glycine max
  unsure (1)..(333): unsure at all n locations
cccttaggcacttctctctctctggaaataactgacgaaaattagctccgtgaagaaaatccaagccgaggcgcttccgtaacgtttccgtgagtaattacgcgaagattctcgatcattcttcaaaattcatcgttcgctcttcgttttcttcagtcttcaacgggtaagtacctcaaaccaagctttttaatctattctatgtacccgcggaggtgcacattatgttacatgtattgccattctccgantcatttgctttttataccccctttcgacgtgcttaagccatctatttaagtcatttctcgcgtaatctataaataaaataaa

SEQ ID NO: 244301 - DNA, 402 bp, Glycine max
  unsure (1)..(402): unsure at all n locations
ttttatggcggctctccaccatggagatgcagcggaagacacagtctaagatgggagaggaggcgccatccactacggaataagccatggaagaaggagcttcaccaccaagatgagccttggataagaagcttggaacgatgcttcaatggaggaaaagaacgagggagataaagagagaggggggagtacgaaattgaatgaataaaagaggtagagaagtggaactttgaagtatgtctcacaagactctcattcatcataggtacaacaagtgttacacatgcttctatttatagactaggtagccttcttaagaagctntcttgagaaaaccttcttgagaagcttctttgagaaaactctcttgagaagctagagtttagctacacatacctctct

SEQ ID NO: 244302 - DNA, 466 bp, Glycine max
cctgaaaagccctaggtgcgcttatcgcttaatcccgcgctaagcgcatgaactcctcgctcaacccagacattgtcacgctcagcacgttatcgccctgctaagcctgctaagcccataaggggcaggcttagcacgaggtcgcgtggattttaagctaccttgggcctataaaaggagttgaaagcaaaggagaaggacacatcgaggctcagagttctctattgaatacacccaagcctaagcatctctcttaggggaaatccctctctctctagccattctcccctcttcctttatccatccttttccttcttccatccacattatcccataatgtgtaaagtctatcatggcaataagaggctaaaccgcttccggtgggagcctagcagccaacacccttgtaacgtaacttctttactatctataaatgcaattatgttctattgctatttctactctc

SEQ ID NO: 244303 - DNA, 359 bp, Glycine max
  unsure (1)..(359): unsure at all n locations
acctcatgcccatgttttgtatttatgcccacccgacctcccgatgttgcacttacaccatcttcacctccgactgatattagaccatcttcatctcatgttgatgcacgtggaccatccttgatacctacatccacattatccccatccccgattgatgcacgtgggcccgtcccagtacctacattcacaccttccctatccgcggctgtagccaacatgcctatagatgaagatgctctggccatggaagatatgacaccctctactcccacatatatatataaataaatcaaatatatcaaacatctccgncaccaaactcacatgggtaaaagcttcacattcactcccctatg

SEQ ID NO: 244304 - DNA, 378 bp, Glycine max
  unsure (1)..(378): unsure at all n locations
ggacactattcttaagacaataatggcatacaaccttctcccataaatacaaacatcaatgtgagtttagagcaagcttatgcacatattttcttacgaacgttcacttgcacaagacatcctattaactaatacaaatgcacccatatacaatcaacgtagcttcattacctataatatttacatgtgcttccaaggtgtatttgttacctacatcacacacatctccttggctggatttacatacatgcatactcaaagcattttggggtaccaaagattgcacatgcgctcatcttggtatttctaatacctatacatatacaaacttcatgatgaatcttgactacctacacaataaggtgctacnattcatgc

SEQ ID NO: 244305 - DNA, 405 bp, Glycine max
gagccatgaaggtgggctcatgggccactttgggatagacaagacgcttgtcttactcaaagaaaagttttattggccccatatgaagaaagatgtccataagcattgcactaggtgtgtggcttgtttacaagccaagtctacggtgatgcctcatgggctatacacacccttacccatcccttctgcaccttgggtagacattagtatggactttgtccttgggcttcctacaacccaaagaggtgtagactctatctttgtggtggtggataatcttagcaagatggcacactttataacatgccacaaggtggatgatgctctccacatctcaaaactctctttcagggaagttgtgagactccatggttggcctacgaccattgcgtcagatagagatgc

SEQ ID NO: 244306 - DNA, 440 bp, Glycine max
  unsure (1)..(440): unsure at all n locations
agttgcgggtatttccaaccacaacaaggtccaattntcttcagctgctttctcaatcgcaattatggcagccataatttctaccatgaatgcaaagtgaatgccagtattgatagcgaaagctttaataaacttcatatntatttagaaaaataccaccacacccgaccatacctgngcttccttttgcaaccccatcaatattgcattcgatccagggggtgtaggcagtctcaaaataataggtttgattttggttactttcctaggatgacagcaccaagaaatgcttgatgatttggaaatcagcaaatgagtggttttatggttcttgtggaagtggaacccgtgatgtgaactcctatagtgatgctattaagcactggttggaggggcaaaatgaggttctcaaatatgaatttattcctcatattccaaat

SEQ ID NO: 244307 - DNA, 338 bp, Glycine max
atgcgtttcttgatttcaggtttgtcatcatcaaaaagggggagattgtagaagcaagcttcatgatgatgaaccaagcaattttgatgatgccaaaagcccaagtgattgattcaagacttcaagatcaagcatcaagaatccaatccaagattcaagaatcaagagaagaaatcaagaagcaataagtcaagacttcatataggataagtattacaagaatttttcaaaaaccacatagcacagttttgttttacaaaagaatcttctcaaattttgtaagttaccagagtgattactctctggtaatcgattaccagttatcaataattgattac

SEQ ID NO: 244308 - DNA, 361 bp, Glycine max
  unsure (1)..(361): unsure at all n locations
cacacattatgatgatggacaatgcaaaaaagatataaaatgtactaacgtgcagcaaccaagataacaaccaatgcaaatgccactgaagggagttgggcatgtaaaagccaaaacttcttcaagtttttccctgagcttcaagatctggccttaggatgttctccatgttgctcatgtttctcccctatctctaacaccattatgttgttattgcatactcaacaagcattggccctactcctatcaattatgcacaacccaccactggcactcgtgatgaggttccagacatgattggccaagctataaagccctttgaggacaccaacgatnagagaatgaataattntgcctttct

SEQ ID NO: 244309 - DNA, 349 bp, Glycine max
gatgacaatttagagatattcatgagatgacaatttagagagtgatcaaagactttcaaatcgatttccactgaatttatcaatagacagatcaagatatcttaatgttgaaagttttccaaatgatctagaatgggcaccaccaattgagttgttgtaaaaatctagcatgtcaacattgttaaaaactccaatttaatccgtcaaattgggttattttatcatctatggaccacttttttgtgttctttttctcatgtgggtactcttcaaattatgctccaaaagtgaataagtggtattataacatttaagttacaagtcttaacatctattatgacttatatat

SEQ ID NO: 244310 - DNA, 416 bp, Glycine max
  unsure (1)..(416): unsure at all n locations
gatncctaattntcaacttacctatttggaagtgacatcatggcagttaggtcccagctttccattgtggattcagtcacaaaaccaacttcaatatgttggactatctaacacggggagtttcggctctattcccacacagatgtgggaagcactttctcaggttaggtatttaaacctctctcgtaatcatatccatggggagagtgggactacattaaagaatccaatatctatccccgttattgatctaagctcacatcacttgtgtggtaaattaccctatctttcaagtgatgtgcttcagttagatctttcaagcaattcattctctgaatccatgaatgactctttatgtaacgatcaggacgagcccaatgcattagaaattctgaatcttgcatcaaataatttgc

SEQ ID NO: 244311 - DNA, 360 bp, Glycine max
ttggtcgctgaagtgactcctcctaaaagtgtactctcagccgagcgcttctgcgcagagaaatattgcgaaaccggtagatactcattcttgggagacactcatgtctttttacctgctataagtatcatctacactaaagtttttatggccgttaactgagagctgacaaataataataacaacagtttacataatcttagttatagcagaagtctacctcacagtaatgatgctcattaatattattaacacagataatcaattaaattaaataaaactatacacacaggatagagcaggtgccaaactaactcggaaatagaatccacaacctgaatagtcacagatcgtccatta

SEQ ID NO: 244312 - DNA, 355 bp, Glycine max
  unsure (1)..(355): unsure at all n locations
ggagagcttcaaccctataacgcaacgtggcggacaaaagtgggcagcaaacttgaatgatcgtcattgacaatgcggaaagtattctgcgcttcactatccatgttcacacattattgcagcttgtggttacgtgagcatgaactactaccaatatatagatgttgtttatacaaacgagcacatcttanaagcttactccgcacaatggtggcctctcgagaatgaagcggctattcctccttctgatgacgcatggacacttatccctgacccaactacaattcgtgcgaaaggcggccaaatcaacaggataaaaatgacaggattggtcgaccatctacaccaacaaatg

SEQ ID NO: 244313 - DNA, 382 bp, Glycine max
agcgggacagggctctcaatagctatcacaagcatagacgagcgagagagccggagagggttatgtgagtctcatcccaaaactgatctcaattcaatcttgaaatttgtcttttcatgtgggtgtattttactatgcaattgtcaaagtaacatttctttagaatttatttggaaagtgagccatgaatgcgtgcttactaactccgggaggatgcggttagggttgagcccatcaaatatgtgtactcactatgatgagaatgaggaatcactattccaccttttcagggattgtgctgattccaaattagagtgacaatacttcattgtgctttcatctgccgactccgcgtcaaatctaaaaggttgtacagcgctga

SEQ ID NO: 244314 - DNA, 320 bp, Glycine max
ctccctccccaaacattattttacaagataccactgtgaagatatgcggaaatgaattacaaagctgagtgtcaaatctcacaacgatccaacggttaacaagtccgggatcgtaattttactggaacaagttttatgtatctgctacaaaggagaaggttacgatgcgaaggaaatttttatcacgctttgacatattttcataattcccaacgatgggaatgatcggaaatgagattctgacctggcgctcgaatttcacgacgatccaacgatttaccaatccgagatcgttatttactaatataagttgagtgtag

SEQ ID NO: 244315 - DNA, 430 bp, Glycine max
  unsure (1)..(430): unsure at all n locations
ctcatggcgtggaggttgtgccatgttctcacaatgttcaaaatcacaatgttcaaaattagaatgttcaaaactataatactaaaaatcaggatgttcaaaattaccaaccatagaatgcttagactcaccaataacagaatgctcacgatgctcaaaaggtacaaaatgatgcctaactaatctatgaaatgtcctatctatctcacgatcaaagggttgtaagtcagatgcattgcctctagtcatacactacattcagcatgcacaactagtttccttcttatgcaagtaatagtgtaggtttgaactacagcaaccctcaaatgatatccaaatgactcgaacnatttgtaaacaaccttataaaatcatgaaaagatagcacacaaatattcagacaaaacatcaaagtctaactatggaaact

SEQ ID NO: 244316 - DNA, 317 bp, Glycine max
ctaaatgcggcgttgaagtataagatgcagggatgccagctattggtacataggaagagtgaacatcatctgctctgagcttggtcttccttgcctctggaaaattaactgttaggtcatttgcatttcaacagatccttatgatataggctaagtcaatgatcagccttaggtttttgtaggagctaagagcatcagatccaactccccttgatctacacacgctgtgattaaagctgggaagcctaagcgagaagagttagactgagccatcatggtcatttgtgcagagatcaaaccgccaatgttcattttca

SEQ ID NO: 244317 - DNA, 483 bp, Glycine max
agcttctacaagaagagatgtccaagagaaccaaggatttactactcattaaaggcaagaaaggaggaagccacaaggagctaaattggagcaccttggagatttgttgaatggctcgcttggcgacactagctcgctaagcttaattccatccataggaaataattctcttagcgacaccagcttgctaagtgcaattccaacatgaggagaaattgtgcttagcacaaatgtcttgcttagtggcaaccttctgacagttaaagttaaatttctcttagcaacaccagctcactaagcgagtcttgcaagttataaatatgtccagtagcgagaaaaataagattttctacccttccctaaaccctcacctaaaccttaaacccaccttcttctccacgagttgccaccgctttccaccggacaaccgcatagagtggaaccctctaatcggagcggaactttcaaaacccaactcatgga

SEQ ID NO: 244318 - DNA, 414 bp, Glycine max
  unsure (1)..(414): unsure at all n locations
ctggaagcatcttttagagcaaaatctgattctctgcaagaggttcaccttccaaccctcaccaacctcattgataaattctttggaaccttttttttatcaaaatatttgaaatctcaatgtgatttttttttcattatgcatttggttcattagattatctgtgtacttttattgaaaattgctgccatgttttacactaacaaattaatagttacagcttgaagggttggtatcttgtgatagaatttaagaagccatatgtacattttctttaagagaaagtaaaagattatgaaggtacactcgatgaccacataatatggtcaatataacaattgctagccatgtattnttggttctaaagtactgttgttgtccaggatctcgatggcttggttcagctaacatatg

SEQ ID NO: 244319 - DNA, 364 bp, Glycine max
acgacctaaaacgagggctggtacacttttattctcgaaagagcaaaacatttcacaggttatgcgtgatcagaaagaaaagactccaaatacagtcgcgaactggccacttacgactttatagcgaggattttccttgtgaacttaattaccgtgaaaaagagaaagaagcgacaaagaccacgaaaaagacacttcccacggttcttgtcattcaacatattactatcaaaccacgcatcatttagggacgccacacagattctcttgcatattcttcccactcgctaagcgagccgagtgtcttgcttagctgatgttactcactaagcgcatctgcctcgctcagcgagacaccagctac

SEQ ID NO: 244320 - DNA, 285 bp, Glycine max
agaacaacgacaccaagagatcacagaggaagaggacacgctccctcaagcacatttcctcagaaaagtcaagtgctctacctagctcgccaatgtctgcatggtcagaaaggtcaacgactaatggcgaatatgcaccgtctacaccaatcttaacaaagagtgtcacaaggatgcataccctatgcctagaatcgacaggcagggagataaagcctctgagttccaagtactaagcttgctagacgcgtattcacgacacaaccaagatacggatgcgcactc

SEQ ID NO: 244321 - DNA, 299 bp, Glycine max
gaactacttccgctccggagtacgacagtcaccgctgtaggagcgctgtacaccagcagcgcttctaagccatcaagggatggtcgtttctccgggagcgacgcgtccagctcatggacgacgagtatactgattttcaggaggaaatacggcgccggcggtgggcaccactggttactcctatggccaagtttgatccagaaatagtccttgagttttatgccaatgcttggccaacagaggagggcgtgcgtgacatgacgtcctgcgttacgggtcagtggatcccgttcgatgcc

SEQ ID NO: 244322 - DNA, 425 bp, Glycine max
  unsure (1)..(425): unsure at all n locations
atcgtatggacaatcaanattgatatcatattcttctctttcatcattgataatcatattgtgcaatattatgtgtgcattcactatctacttcaatgactcaattttccaaaatcgtgtcgggccacatataattgcaaatcatgactgaagcattccagaagctctttcgacatcttttcttgctgcttcttgatgttggacatataattttcttatttctccttgtggctttaggatgattnttacaaatgtagcccattatggataaataccatggctaaatagtaccccaagttatatgtagctccatctattataaaatgtaccttaagagagtggccttgcaaatcttcattacagacatcagattggttgaaacattgacgccttgtcgaacaaccacccaaagatgctgccaattg

SEQ ID NO: 244323 - DNA, 371 bp, Glycine max
aaatgtcaacctctaacctgcttcaatgttttcaaaaattgcagctaatgtttgtctggcaggcaatctttccaaagggtgcataaagtctacattggatgatttctctattctgtataatgttggaatatagaggaagtttattaaagcgcctaacattattgaagcctgttggtatcagtctcttcccactgagttagtgcaatgtttatggagttgcgaaagcccacggcatgcggctcttggtggtatcttcagaggcgcaaatgccactacaatgtgtagctttttcatctacatcggtatcacaatgttctttgttggacaagatttggctgagattactctatatagtggtggatccatactat

SEQ ID NO: 244324 - DNA, 388 bp, Glycine max
  unsure (1)..(388): unsure at all n locations
cccaacttacaagagacgatatgggcgatcttgtgccaacaaataatactcaacaagtaattcaaactaaacgggtatttacaaacaaaatcgatgaaactggtttataacacaaaacaaagcatgttcagtacccacaggttatacccaagaagagggcattgattatgatgatacttattcccctattgcaagacttgaggccacaacacttctactactttttgcttccttaatcggatttaagcttctccaaacaaatgtcaaaagtgctttcttttaatgcatacataccagaggaagtctatcgttctcaaccccctagatctattgatcatgacctctctaactatgtacacanactaaagaaagctctttatggacttac

SEQ ID NO: 244325 - DNA, 375 bp, Glycine max
taatagctaagctcacctccctgagatgagaagctagagcctagctacacaccccctataatagctaagctcacccccatgagagaaaacatgaaaactacaaaaaagagcccttattacaaagacatctcaaaatgccccggaatacaaggctaaaaccctatactactagaatggccagaatacaaggcctcgacgaaggaaaaacctattctaatatttacaaagataagcgggctcatacttaacccatgggcttgaaatctaccctaaggctcatgagaaccctagggcctttccttggatctctagcccaatctacttggagtcatctagccaatgcccttgcggagtaagatagcatcactctctctc

SEQ ID NO: 244326 - DNA, 383 bp, Glycine max
  unsure (1)..(383): unsure at all n locations
atcaatgatcaccatgcaaactttgccattgatcaatcatctagtgtgcaaaacgttttctctttgagtttcctccaaagacttcaattgatggccaagtaaccgcctaatcatcaacaatctcttcctctagtgctttctccacttccttctcatcatcctcactctcttctcccttttcaacttcggactcactaatgtactctccatctctaagaaatcatggctctcttgttagggcattcatatgcataatgtcccaagccttggcactgaaaacacttcacatcccaactctttcttgaacactgtccttggaattctggaggagtnttccatggtataggtgttgcattagaggtggcagcctctttactcttgtc

SEQ ID NO: 244327 - DNA, 363 bp, Glycine max
aagaacgaagaacggatgaagaacggtgaataacggacgaaaaccttcacggatttgcttacggaaacatctcggaagcgttacggaagcacctcggcttggattttcttcacggaaacaatttctttcacccaaaacagctgaaatacatagccagggggctcagggatccttagaacaacccccttcagtctatttataggaaaaagggggaggaggttgccgcccagctcgcccaggcgagctgggttgcttcctccagaagcaattcagcttcaaaaaaacattctggaaggcccaatcaaaaatttccaaatcgctatttgcaccgcccccaactttgataagttcacacccttcttt

SEQ ID NO: 244328 - DNA, 371 bp, Glycine max
  unsure (1)..(371): unsure at all n locations
accttgaagtgctcttgattcaatcttgaacatcttgaactcattctttgattcttgaaatcatcatctttgttatcatgaattgttcttgatctttgagctttttgtcatcacctttgttatcatcaaaacttctttgaatcaatcttgatacatcatgaagcttgcttctacacattggagggtacatcctttatgatacaagtagagggtacatctacttgggttgttgtaactgagaacaagagagggtacatctcttgtggatcaattcaagtggagggtacatctcttgtggatcagttcaagtggagggtacatncacttggttgttaaagagaacaacggagggtacatcccttgtggatctt

SEQ ID NO: 244329 - DNA, 348 bp, Glycine max
  unsure (1)..(348): unsure at all n locations
ttctggccaagtgggcgcagccgcttacaaattacaatgaccggctcactctagaattcacccagcattccatgtttcattgcttaagaaggctataggcgattatcatgctacaaggtgatctgccacaacagctanaggtaacaaacgatgacagcttttatcctgagatggttataagatctagagtgaatatgcagggcggcgattcggttccacaaaggtcgattaagtggaagaataaaacacttgatgatgntacatgggaggacaatgcatactcacatggacagtatactgatttttgccttgatgacaatgctgttgttatggatggnggcgttgata

SEQ ID NO: 244330 - DNA, 416 bp, Glycine max
  unsure (1)..(416): unsure at all n locations
tactctgaagacaacatcttttcctgagactnttgcttgaactttaggacatttctttataggtttatcatcacaggttttgcttattttgaaacatcctaaggattccctctttctcttcttgttctcttgatccaaatttttcacatgctgctcaagatatttcacatactctataccgtcgctaaggacacaagccttgtccatcctacacattaattacaaatatgttacttcttattttatcagctcatacacgattggtgtgatataaatttctcaagttcggctttgatattacaatatctacaaaaactgtattccaccacatgagccatatatatatatatatatctatctatataccaagacactcttaaactaccttaccaatccaattcttggaaatattatta

SEQ ID NO: 244331 - DNA, 436 bp, Glycine max
atcggagagagtgtgaattttttactgtgtgtaaacgactagctatgagtaataatctttgcatgaatctctaaattttagaatgaaatgtataaacgagaacatgatgaaggccatgattgtacatacacaagccttttgaccaaaaagcttaccttgaattataattctatcatttgcaccctttgtgagctgaatgagtttgtaaataatttgaaccccgaacttaaatgattctctccagataccttgcttagattctaggagagcatatggttcaagtcaaatttaccccaaatttgggggagtggaattaattgggatgcaaagaaagagataatgcatcagcacacacaatgcataagttgtctgttaaaaaaaaaaaagaaagaagaaaaatgtgctgatgtaacaaggtcaaaagcaaatgaaagtg

SEQ ID NO: 244332 - DNA, 282 bp, Glycine max
gccatgacataatggtccaccacatgggtgtgtattttactgcagtggaagaataaatgggatgcgccctcctcttcaattctacagaaaggacataacatatttgtgatttgtacttgtctcctccgcaaattttgtcttgtcagcaatctgtctcttatcaacctccatgccaaaaccgcgatcctagctggaatccttattttccataatttctcaaaacacttctcctgcctgccagctgctgcttcttcccctaacatgtatgcattgcatgttgag

SEQ ID NO: 244333 - DNA, 439 bp, Glycine max
  unsure (1)..(439): unsure at all n locations
gcctttgttgtacttgctcggagcttaaaccttcttgtttgcatctgagattataaaaaatctcctcgataggaatgttctcctacataacacaaattccatgttaatcaaatgcctaatactagtagtgtttttcattcnctatgtcctactaaacatcataacagtaaattacaaaattctgtcctacttttcttttacttttgtattccttcatattctgagtttagactccaaaaatatataaaaaggacacataataccacaaaattaaaaattaaatctaaataaaattacatttaacattgttgcattaattctcttgccttatcctgaagctcacttagggaactcaatgtaaatggtttcctggcaacccacatttgaccagcatagtgaattttgaatgattgttgtatctatcaacccaatttcattg

SEQ ID NO: 244334 - DNA, 413 bp, Glycine max
aatgagtttatgagaaactcaggattcaacagatgtgacatggaccattgctgctatggtaagaaatatgcttataattatgttatccttgacgcgtatgttgatgacatgttgattgcaagatctattatgacagaaattaacaggttgaagcaacagttggtagaaaactttgaaatgaatgatcttggtccagctaaacaaatccttggtatgagaattcttatatacggatcagagggagatttgaagctgtctcacgagaaatatatacacaagttgcttgacagggtttaccttgaagattctaagaccaggaatacccctttgggatctcatttgaagctttcatagaagcaatctttgtagacagatgaagacacatgttacatgtcaagagtaccatatgcatc

SEQ ID NO: 244335 - DNA, 468 bp, Glycine max
  unsure (1)..(468): unsure at all n locations
acgtctggaatatgaatgtagcatatatattcaaagacctttaggtgctatgctgatggcttcttcccgttccaagcttcaattggagtcttgtcttttatagacttagttggacatctgttgagtatgtaaacagcagtgtagactgcttcagcccagaatgtgttaggtagtcccttttccttgagcatcgatctagccatctccataattgtgcggntctttctctcggacactccattttgttgaggagaatatgcgactgtaagttgtctctcaatgccttcatcctcacaaaatctttcaaactcgcgagaggtgtactctttgtcgcgatcacttcttagtacttttatccgttctccactttgattttcagcaagggcctcgaactttatgaatactccacagacttctgattnttcttttagaanatatacccatgtcattctagagaagtcatcaatg

SEQ ID NO: 244336 - DNA, 330 bp, Glycine max
acatactaaaggttacttgctgaagtgttcacaaaacggtgaagtgccatccttgctggttcaagatcatactcacacatatccgacgcttcttccaaatctcatctatcacagcctttccttctgtgtggagacacatatgttctaccccaaccttgaaatttaaaggcgattcattacatttgctagattcaccacttgaggactttagggaactagattggctcaccttctgtatgagggacacaatctcgaaccttacaagctctgtactcgcacaaccttgtgtgacaacatcttatggtctcaacaaaagcccttgttcgtgcc

SEQ ID NO: 244337 - DNA, 377 bp, Glycine max
  unsure (1)..(377): unsure at all n locations
attgctcccctcacagcttagtatggatgtgccaatcttccctatctgactggattgttgcacgagtgtgaatgctgacattgttggatgtgagagacaactacgattcacagtggaggttctcacctcttatcagcctgattattaagttctcctctactttagttaggtttcacgttggatatggattaaatagaagcatattttgctcttagaagacagacacatacatggacaagaaattgattaaacagnttgctattgttattctaattacctcgatgtgatgtaagtagctcaatatttggcaataaagacattatggtctttaattgagccaaatgatgttgtgtgatccatgcaacccaccttctcta

SEQ ID NO: 244338 - DNA, 230 bp, Glycine max
tacaactgacaaaatacaaaacacacaaatgtccagtatcaagagacacaataacatgaacccaaaaaaatggattttcaaacggccaaaacatcaacacggtgtaaagaaatgtcacaggaactcgcagaggtagccataagcacaaccacacaatagcgtgcttaatcccacaatatcataacaacaccgtgaaaagacagccaaaacaatctggaatcacctcaatt

SEQ ID NO: 244339 - DNA, 379 bp, Glycine max
  unsure (1)..(379): unsure at all n locations
tcgaaatcacccaaaagtaggggtggcaattggatggttaaacaaccaacccaaatatctaatgaatagtcagtgaagattgttagtggatactaaatgaactgatggattataaattatcgatccataatgatccaatccaaaatccatccatttgaatacattattgaatgataaactgtaagtgttcttgaatgataaaactcatcataattagaagtgttattataaagataaggattaaaatcattatcaaaacaatcaccaaagttattaatatgaaggagactaactcaacatatgaacctatcagtcaaattgaaatacattaccagngtcaaacttaaactggcacataaatcttaaggggatactgacc

SEQ ID NO: 244340 - DNA, 60 bp, Glycine max
ccccccgcccacctccttggcttcccccccacagccgctacctaacctgaactgaacccc

SEQ ID NO: 244341 - DNA, 459 bp, Glycine max
  unsure (1)..(459): unsure at all n locations
acgccactctactctaaatagttgagagatatgttttctggatttataaacatatccattaggagaacatcatagtggaaggaaactgcagcgttgtgatccaaaagatccttccacccaagcataaagattctgggagtgtaactattgcttgttcaattggagaagacaatgtgggaaaagctcttattgacctgngagctagtaccaatttgatgccactctccatgtgcagaatattatgagagatggaaataatgcccactccaatgactctacaattaattgaccactccattacttggccatatgcagtaattgaagatgtgtaggtcacagataacattttatcttaccggtgactttgtggtgatggatatctgtgaagaaatgacatccctgaatattggaaggcaatcatgtgacacaactgcatattatatggaaaaagaactggac

SEQ ID NO: 244342 - DNA, 403 bp, Glycine max
  unsure (1)..(403): unsure at all n locations
agcaaaactggattatataccacatatttcaacttacataaatgacgttagaaaggagcctctagtgattcatcccatacttctgcactaccgttagaggcatcctctacatcttcttccatagaaagcctaatatattctctatgagcaaagcgatcccactctgtcaatgtaggattctcacagtcctgttcacacaagacatataccaaggcagtcaaaacttaccaacaatagtcaatcatactgactcaacagcacaataacacttgtatcaaatattcatgcacctgacgaatcaaaaatgggcacgaatntcaaagccatgaacttattcatattgacaggaattgaaacacttnctgatagttaccaccttcatgcacgcagagtatatatctct

SEQ ID NO: 244343 - DNA, 231 bp, Glycine max
accggagacgcctcctaacttataacagagagaaatggacatgtgcgggggtctattctgggtatgcgttgcggcccgagtcattgtagaacgtaaagaatctgaatacttaataatggtagttgcatactgtatccatcttctttcatggaaaacattaaggataaatccgcatacccgttcacgccaaagaaagactttacttatcaatttaatctgagatcatatcat

SEQ ID NO: 244344 - DNA, 376 bp, Glycine max
gttacgggactgaatcacacatccgagtaaaaagctatcgtcgctcgaatttgctcagagcatcaacacttaatttcgagcgtctcgatatgtgacaggactcaatcagaccatccgagaaaaagttattgtcgttcgaattcgctcacagctctcacattcaatttcgagcatctagatatgtgacaggactcaatcacacatccgagtaaaaagttattgtcgttcgaatttgctcagagcatcaacattcaatctcgagcgtctcaatatatgacgggactcaatcagacattcgagtaaaaagatattgtcgcttgaattggctcagagcttcaacattcaatctcgaccatcttgatatgttaccggactg

SEQ ID NO: 244345 - DNA, 372 bp, Glycine max
ggatttggtacgaccatgccctcctgatttccagctgggaaattggcgagtggaggaacgccccggcatttacgcaacaagcataatgtaaacctttacgtgtttaaaaagctctatagttgggcctaggctttagagatttcattttgttaaggctttgtgtcttttgtttttgaatttataatacaaggatctttcttcatctgttccttggctctacccattctcattcatttgcatgtttacttctttttctggaacggcagatccgatgacgagtcccccgaatgtactaatacctgcgacccgtctatcgacttcgagcaagaaatgaatcaaacggaagatgaaggaaatgagggtgtgtgactt

SEQ ID NO: 244346 - DNA, 152 bp, Glycine max
ctacaaacgagcactgggtatgtcatgctccgcacctccatagacgacgcagctattctgccattcggcgaaaacgcatgcgtgtcatggatgattatcacatctgaccccccacgaccttgcctaccaaatggaccgccgctaaagcgcgg

SEQ ID NO: 244347 - DNA, 370 bp, Glycine max
  unsure (1)..(370): unsure at all n locations
tcaccctcggaagcggaaagaatataacggaaattntccatcaaagaaaacgacagaaggaagatctccaatccaagagaatgctatacagaaaagaatgaaaattccccaatctaagagtgggagaaagcaaaaagaaaagaaagaaaattcccaatcaacgaatgggagactgtccaacaggaagaagaagaaggaaagaaagctcctgatcacggatcgaaagagaacagataatatgtgcacaaaggtctttggaccggacaatatctgaacaatacagaattgtcccacatctgtgggaagatgttgggtgacaacaattgtggtaatattatgacagcacacacagcgaantcaataatcaaca

SEQ ID NO: 244348 - DNA, 407 bp, Glycine max
acacgctcctatttgattgcagcaaacacggcccactttctctttctgactgcgacccatactcactcacaaaagagagaaaaaaatctgacctttgaaacgctaaaatcctgcctcagtttgcgtgccgcttctctgattcccgctttctcgcgcttctctgcgtgcgtcggggccagcctttgaaagtaagcaatatatctatcacaacgcttacaataaaactcccagcgtggttcacaagccgccttccctaaatcttaagtccgccgccaaacgatgatttctaactaattaattaggaatctaaccataaccctccacgtatggatctctctcccttaactagcctaacgcgcatatctcgccccacctatcctatgctaccaaaacatatctatacatat

SEQ ID NO: 244349 - DNA, 299 bp, Glycine max
ctgacggaaccacttgggctgactgatccctccacccttgagtgtctactttgaaagattcatgccccctctttgcacatgtaatgtagatcatcctatccggagtcatatcagaattgcactgatactgcctaacgaatgtgaccattatgtccttccaagaatggacgtcagaaggttacaagttagtgcaccacgtaacagctatcatagtaagactctcctggaagacatgtatcagcacatgctcatgtttcgcgtatgaccctatcttccgaccatacatcatcaatggatct

SEQ ID NO: 244350 - DNA, 396 bp, Glycine max
cctaactgtcttatagcaagtgcgggattgtagttaatgcaaccccttgttcctatcagcgggatgtttgggtagcccccacatgagaagagaactccctcctttccttctttccatcatggaaaccagttgactattctgcctcctatcccagccaagtgttagtcccaatctactcttcttttttcgacacacgagcgatggcttcagagtggacatggatgccttatgtcttgttggaataagtgtgaaaccaaccatacacaaagagcgggtaaacaatagatgatccgtgcactactcttttcgtaccttcggtcgaatgtgtcaaataagtccgccaagacaactaccaccgggctctctttgctgtgtgatatgcaaggaaagcatcaa

SEQ ID NO: 244351 - DNA, 305 bp, Glycine max
acaaccctcttacagccatctctagttcggtggaaagctgacccctggaatatattacagtcaaatatagtatctgaatataccatgtttgatgaagaagtgatatttatctgaatgagaaatgtcatcttactctgtaaacagcttcaaaccctgcttgttcaagtttatatgaatcagctaattcatttgtagcaactcgtatggtgtcaagttgtattgctatgactcaccaaatgtaatttcatcctccaaattatcttcttctctcttacttcacatgcattaggacccgagtgaaattt

SEQ ID NO: 244352 - DNA, 381 bp, Glycine max
  unsure (1)..(381): unsure at all n locations
tttttaccattcctacaaaagggaatttgacacaattaaggactttcaaatgccattatcattaaatacataattagaaaaatacatttgacaagcatgaaaagtcacccgaactatactctgcttttgacgagtagggagctaaatcgggattcttggaggggatctctaagtatctccctcttgtggaaccaatcaatgtaaccacccatgcattccttgtgagcttttttcataataataatgatgttgaagtgtccactcataataattctgccttaggtttcggctatatttcggattcatggattccttgtgagctttttntttctatataattattatggcgctcagaatatttggtttagttcatttcttctt

SEQ ID NO: 244353 - DNA, 213 bp, Glycine max
caatagctacatatagaccaaggggcttataagcatggaccaatagcttggaatctgcctccagccaaatccataaccacgcttacagagagggtctttcccacagcaataatggctgccataatcttagccatgaaagcacacacaacgccaatatccgcaacaaaagctcccaagaatcgcatattgggctcataaataaaccgtcacaac

SEQ ID NO: 244354 - DNA, 412 bp, Glycine max
  unsure (1)..(412): unsure at all n locations
gatacaccaaatntgagagattcccgatctgaggaggaatcttccccatgaatccagtatgagagaggttgaggtgagtcaaggaagtcattgtcccaaggaaagaaggaattgacataccttctccaagaaatctattgccgctcaagtccaagtaattcaaatgctttaaatcagccaaacaaggacttatctctccaccaaagctccatctccgataagcttcctcatcgaatctacggtagaatccattatagtagtcatactcgaaagcagaacgtgaagtgttgaggtgaagctgaagaagatgggaagtaaggttgtggcagaggactccataccagtggcaacagttggtattattatgattccaagaccaaagcctcattgaaggatcattcagattattctt

SEQ ID NO: 244355 - DNA, 371 bp, Glycine max
  unsure (1)..(371): unsure at all n locations
atatggttggagcttttttccaaaacaacgtgacccggactagtgttcctatgattttacctacgcgcncgatgaggtttatcactgacatggtaccacattgcatataggattgagtcttactgtatctattgcataacgcttgtgtattgatctgatattgattgatttaatgatattgtgttttgatccttgagtacatgagtgatgtgaaaatgaatgacatgtgttgtgttgtgatgtgatgtttngtgacaaagcactggaatgacgtgagctatgtttaagtaagttacattttgcttatatgatactgatatctacatcgtgtcgtgctcttctttactacctatgaatgcgataactcactc

SEQ ID NO: 244356 - DNA, 380 bp, Glycine max
gttatcttgaaaaaagtgtattaatagcttctcatccttagagtgtgcgcccatcttgcgacagtacatcttgagatggtttttgggacaagttgaccctttatacttgtcgaagtcccggaccttgaacttcggggggataacaacatcgggtactgagcatagatccgtcatgtctgtgaacagatggtccccaaatccttccacgactctcaatctctcctcgaggaggtcgagctttctcctttcttcagttgccgggggcggaccttccgtggacaaaactattggttgtgtcgtgatgttgggctgaagcaacgtgctgggtgccggcccttcggggatctggggatagaactcgacatcccttctagcatagt

SEQ ID NO: 244357 - DNA, 178 bp, Glycine max
aaggctgctcacaggcggcgcaatgcggaaaatgatacagaaaggctattgaaccaaacccatggagtgctcgcattatgtccacacaaaatcaaaaatgaataatataagaaattgagagaaaaagcagctcaaaaaaatgccacatgccgggggaaataaaaacatgtaaagaaaa

SEQ ID NO: 244358 - DNA, 405 bp, Glycine max
cctcgaagtggcatctcctctctctcttccttctccattctgctgccattcatcttccaagaagcaaaggaatccattgatgaagaacattctaggcctaccagctccagtggagcttacctcttgtggtatcacagcatcttcatctaggagatattctttcgcttcctctatctttttcgctggagaattctctttaattccttgttcttcatcttattctccatgtatatcctccactgtcctgcggtttggtgctgtttacagtacattcaaaaaaaagataacccgactaaatcttagatctacacttgttcttgcatttctatggctcaaattctgtagatctactcttgaatcatgtttctgtgtcgattttacgctctatcatttttcattcataat

SEQ ID NO: 244359 - DNA, 378 bp, Glycine max
ttaaagtggaattaaacaaggaatatacttaaagcgcataaaaaagttaaataatgctcaaaataggcaatcctagcttaaatcttaccctttccttgatgtcacccaaagtcagcaagtacagcttatagaattcctctctgaatgcaaccacaaacctatataaagtttagaaaccaacaagaataagacaattagaatctgtttgatttgtataaatttaagggacaacaagatacatctactatattatagtattttcacttttaaaggactaaagacgaattattgaccataattgatatattagcatttgtatatcactaactcattggtacttagtctgtctctcaacttgcaattacaacttcattgcaa

SEQ ID NO: 244360 - DNA, 433 bp, Glycine max
  unsure (1)..(433): unsure at all n locations
gttcactttgagatttaatttggatatacaaggcttatatttcatctagatctggatctttgatctgcaatgcagttttataacaagttatatattacatgtctgcagctggatatgcatatatataatttaagagtaaaatatattttcagcctctgtactttcttgtgaaacttggttttagtctttgaactttggtaaattatgtttctgaattttacaaagacagtagttttcatctttcttcaccttgaaaactatctatgaagagagacaaaaatcactatttttatacagttcaggaaccaaattgatgaaagttaaagaaaccaaactaataaccaattttatcgtanatacaacggctaanatcatanattagcccatatttgattataacggatgtgcttaaaaatctggatgatatacatca

SEQ ID NO: 244361 - DNA, 344 bp, Glycine max
aacgaagagggggagcccacttgaagagacaagcgcagaattgatctttgattgtgctcacaagactctcattcatccagttgcacaagtgtacacatgcttatattataactactagcttccttgagaagttccttacgacacttccttgaaaagctcagcttacctaacacacccatctacaactagctcacctcttgagaagcttcttgagaagtagctaccccacccatctaaaactaactcacctccttgactaaatcatgaaaatcaaaaaaagccctactcaaagactactcaaatgcctgaatataagctaaacccttatactagaaggcaaaaca

SEQ ID NO: 244362 - DNA, 133 bp, Glycine max
tctctttcttacatttaagccactagctcaaaagctatcccgataaatattcgttttatcattcgcacgtcctttgagcccaacacttcatattttggcggaacactaaacctaagataaaaatgtcctacct

SEQ ID NO: 244363 - DNA, 391 bp, Glycine max
aattgaacgacaaaaaagggacacaatttgaactttgagtagtgtctcacaagactttcattcatcaaacttacaatacgcgccacacatgcttctatttatagactaagtagcttccttgagaagccttcttgagaaaaattccttgagaagcttctttgagaaagctcccttgagaagttagaccttatctaccccacaccctttaataactaacttcagctcttcgagaagcttccttgagaagattcctacagaagctagaccttacctacacacacctctttaatagctcagctcacgtccttgagatgagaagctataactcagctacacacccctatctagctcagctaccccatgacaacatcatgaaatacagaacagtcct

SEQ ID NO: 244364 - DNA, 323 bp, Glycine max
  unsure (1)..(323): unsure at all n locations
acttcatggacatcaatttctgaaggagagctctcgcttttgctcgctgattgcgaaccgctttttaatttcagcaaggaagtcttcggcactagatatatgaactgaaacagtgttcctaaagacctcaagaatgtcgcgcttagtgatcataagactcatgcgagttgagtgatcccacttctcatgaagtttgctctgttcagagggactggaatcccgtgtgactaaggggtgttntcaatccttaatgcaacgcctacatccatgccaccgagaagaatttgcatgttctcttgttaggccttatnatatacaccact

SEQ ID NO: 244365 - DNA, 373 bp, Glycine max
caaacaatcttggaagtcattgctttcacaacatatataattaaatgaaaatacaaacaaaacaaccacatgatttgatgttatataacaattctttataggtgaaatgttatagcacatacaataaccttatcgcccccttcttttcaataatttctaccagctccacctacagaatgatattacaatataagaaaagattaagttataccaacacaactctaaaagaggtatatctactctctcccaatcattgtattattacatatcaacttgaatatataattctacaagtatataacacataagacataacaatatatacatgagctatatataaacttataaataccaaaaaatgtatgcatgtcgt

SEQ ID NO: 244366 - DNA, 286 bp, Glycine max
tatgctatggccacaaacaaaagttaatacaactcacgtgttgcccatttgtcacctttgacaaatggtgacactgttgataatgcagtggagcacgctcataagaaagcacggaatcttgggataccatgagccactctatgatgtattacttaacagaaaacacaagaacgaaacctcactacagtctgataaatacagaaaaacaataaagctgcatgtcgcttccaaataaaaaatagacattaatctgctgtctcaaacaaagcaaggcagcatcttcatt

SEQ ID NO: 244367 - DNA, 373 bp, Glycine max
  unsure (1)..(373): unsure at all n locations
tgtagcggtgcggtggtagtggggtgggaccgtcagctccaacggttaatgttagaaaaatagtgcataatgttagcgccatggttactttggaactcgccacttagtggactgtgacgtcaccaagttatgatattcaatggagggaaatgtgtgccttttctacatgtgagcaaaaagattgactcttgccatgcatgatgacttaaagctcggttattgcaactgtcgttgatcgacatcgattgagagtcacgaaatataatagacatttatgctattgttttattagagagcgccggagtatttattatggatatacctatatcttcattctttccattataacactngctgtatttatatttattac

SEQ ID NO: 244368 - DNA, 432 bp, Glycine max
  unsure (1)..(432): unsure at all n locations
ctctctataagcaagcactactcttgactcacctctccatgcatgtctctttccccttacgcaacacgaagatcaacatagtttttttctcttcttttcttgtttgttgcattttattttgctttgcattacttattatcgcggagatgatgacaatgaagattacactttggttctctctcgtgcgtaagagcataagatgctttgtcgacgaaatggtttctgagtccatctcctatcacttcatttcatgcatttaagcatatatatccctttcaactcgaagtaagtgacattttaattcgtattctctattcgatggatgatgctaattcacacctgagcatatatattctcttgttgataggataacatgcgtacgtgttatcacatgccgtacaattatatntctcttattgaatgccatatatt

SEQ ID NO: 244369 - DNA, 386 bp, Glycine max
  unsure (1)..(386): unsure at all n locations
ttggcttctacatgcgcaattcctttgagtgacatttgtattggctgctaactcgaatgctgcattttactacatttgatatatgcgctgcattgtgcatcatcatagtgtgtgcgaaggaaattntctaagttagaaaaatctcttcaaaggcaaaaactctttgttttcatcgattacagagctgtagtaatcgattaccacacagtgtgaaatttcgtgcttatcccaaaaagtggattctcgcttaagaagatgagatctctaatacagatctatgaatgatcaatatgttcttcactgtaaaaaatacgattgcacacctctctctcanaaatctgccacaacaaccctagaaactccttcttcaccacttaccagcactg

SEQ ID NO: 244370 - DNA, 373 bp, Glycine max
  unsure (1)..(373): unsure at all n locations
tttatcatttttaaaccgcacgcgactgacgacgcatcaccaagaatcaagctcaaggctattgtgcaagcaatcaatggggcaaaacacaccagccgattatgatgatggatggctcatattctcacaaaggtaaaactatcacttccaaatagagctttcacaactatcatgacctgtagagaagaatcaaggatttcaacgcacaaaatgtcgagaacttttattttcaaaacaattacccatttctagaacatatgctataattcaaagaaaaacatgctaagtcgtccgtgcacaccaaattgacccanaatattaaactacaaatccgacacactgacaacattgtctgattaacacaactaacaaa

SEQ ID NO: 244371 - DNA, 355 bp, Glycine max
ctcacagataaaagggatgccccacattatttccatgacacaaatgcaaaaatgacgatttggaaattttatgcaaaactggttatgcatgcacctatgcggacactcaagtgtcaaatttttatggtcatgtgatgctagggctcaagattcatttcctctattttagtcaacccaacgtttccaaaatatgttcttttatcaattcgtgcattcatccgagtccattttgggcgtctgggaaaatcttcacagcattcacccttcaggtgtatacacattttttcaaaaactagttatgatcagtgaatctttccaaagaaaagttggaagtcatctcttttcacaagcatgt

SEQ ID NO: 244372 - DNA, 233 bp, Glycine max
ccccataacctagttttattttttggggcatttcatagagatgaatgactcgggcatacttatgctatgcatagaaaatgtaattatgagattgacatgcccaaagaagcatcatttcctagatagcaacacattaggtaccatgctcaatcattttgatttgtagctcttttttttggaaagaggttcatgatcctaacatggttggctcatggtacctaacacatgccatt

SEQ ID NO: 244373 - DNA, 237 bp, Glycine max
ccctgtaacgaacaacatcgacccactcaattcccacaagtatctccccactctcaagatttctcaatttcaaaaacatttcttggacaatctttccattttgccaaaagccagctgctctcttcagcaaggtcattagcactatctggctggatcctcttgagtgaacaaccatttgggagcttaccaacccatctggttacactggaacatatgggcccaaagtctatctctgcc

SEQ ID NO: 244374 - DNA, 189 bp, Glycine max
cttccaaatgtaaaaaaagcgtaaactcatagtcctcacagaaacgtaaccttacggaaggaaaaggagtatccttacgacaatcccaaagtttcgcaacgttccggaaaaagaattacaaaaaactataaaagggggctgtctttactaaaaatgggggtgcaaatagcaatctgggccacttgggcc

SEQ ID NO: 244375 - DNA, 215 bp, Glycine max
gagctcgatgtggcatgctaactgccaagtcttggcgcaaaaaaagcgcaatacttcaactcccagagtaaacccaatcttgtcaagtccacgcaaccttcctttcacataatgaacatgcctatatagccatgaacaaagcaatatatcatttattaatgaaagctattttaacaatagattaatagatgtatgaaatcctacatttaactttt

SEQ ID NO: 244376 - DNA, 288 bp, Glycine max
  unsure (1)..(288): unsure at all n locations
agccaccgccggaatgcatatcacgctaatggcgttgaaaattggcaagggcgatgaagtgattacgccttccctgacctgngtttcaaccctcaatatgatttccttgttgggtgcaacgccggtaatggtggatgtcgaccgcgatacgctgatggtcacgcctgaagctatcgagtcagccattacgccacgcactaaagccatcattccggtgcattatgccggtgcgccagcagatattgacgccattcgcgccattggcgaacgttaccgcatcgcagttat

SEQ ID NO: 244377 - DNA, 324 bp, Glycine max
gacgccccacattattcccatcacaccaatgcaaaacagatgatttgcaaattctatgcaaaactggtcatgcatgcacctatgcggacactccaagtgtcaaattttatggtcatgtgatgctagggcttatgattcatctcctatatcttaaatgaacccaatgttttcaaaatatgttcttttatccatttgtgcattcatcccgagtcatttcgggccgtccgggaaattttacagcgttcacctttcgggggtcacacacatttttcacacaactagcctgaccagcgaattcttttcaaagaacagttggaagtcatc

SEQ ID NO: 244378 - DNA, 281 bp, Glycine max
tcattgaggatgaaagactaaaaaattaagtgtatgatattaatataagaaatatctgtgactaaaatatcacatgtaagataaaagatcagtttaaaaagataactaattaaaaacaacatgacaagctactaaggaaagaaatgaccaccaaaaatgctaatttagatatccagttctatataatatgaatgtgtaaggctttgtcctaaaaacataaattaatttttctttacagaatttattttctttcatttacctacatctttttttcccagtct

SEQ ID NO: 244379 - DNA, 324 bp, Glycine max
agcggcagcaatgcggcatgccccattgcttcaagatgcacccttggcctaaggccatcccttataacccctcaattcaaaccaatcaagcatgaaaacaaaccaaaattgccccacaaatttgagcacatctccacaatttagagcatcaaaagaagaccaaaatacaccaatggaaagctagaaagctcaaggatgagatacttacttgttggagtgagtaacaacactaagaatggaagcaaaagcgcaaaaatggcggcctagggggtgaaaaaccccttaattccgtgagccttcttttttgaatgagggggggggggg

SEQ ID NO: 244380 - DNA, 283 bp, Glycine max
ctcgaaacgggtgggcgactaatgcactgcagaagtgatcggaattagcatcaacaatcaccccactgttctgcaccaaacttttatcatcttgtgactaggtgcagaaggaataattgtggatatcatatcctttccaagtgggtacattgagatttggcctaaaaactaacaatcttaatgttttggaagcacaatcatcaacaaatattgtttctctaaaccagttaatgaaaggtctattgtgctcttgcaaaaccctcaccatgttcatttttgggtt

SEQ ID NO: 244381 - DNA, 296 bp, Glycine max
ccacccgcgggatccaatggacttgccgacttcacacaataatgacggttcttcttttttgcatgggcaacaaaatacaagtcgcgcgaggcatatgcaatggttcatagacattacacccattctatcaatcccatccacacaactaaatagacatttatgagaaataaaaaatacggtcattccttcaaaataaataaacaaacacaaggtgcgaaagagtattgaatataaatatcaaaatgtacaacactaacaagacaactgaatatgctataaggcgctacaacccataa

SEQ ID NO: 244382 - DNA, 365 bp, Glycine max
ttttttttttcacaccgaagttcttcaatcgacctccaatctttaatggagagggttaccactactggaatacccgaatgcaaatttttattgaggccataaacttaagtattcgggaagccatagaaatagggccatatatacccaccatactagaaagaattacaacagatggtaccacatcaagtgaaagcataagaatagaaaaacctacagatagatggtctgaagaggatagaagacgagttcaagacactctaaaagccaaaaatataataacatatgccctgggaatggatgaatatttcacggcttcaaattgtaagagtgctaacgaaatgtgggacactctaaaattaacacat

SEQ ID NO: 244383 - DNA, 297 bp, Glycine max
tttgggagagcacgcatcgatgcataatccgggaagtctcacaatgtttcagaaacaaagcacgcaccattgcgtaatccataaaggttcccaacgtttcggaaagaaatcaaccgcaaaacatgaaaatggggtgtatttagtaaactataggggggtaatagcaatttggccaacttgggcccttcctaaatgtttccgagaaaggggattgcttcaagtggaagcaacatatctcgcctgtgagagctaagcgggaaccacctcccctttttcttctataaaaaaaaaaggggg

SEQ ID NO: 244384 - DNA, 333 bp, Glycine max
tgatctgcaccacgcttgcatgggaatgttcgcgacaactcctttaaaaccttatcgatccattctgacaggctggttgtcatgcggccatatccacgtccttctctatcataagccattatccattctttctttgatatgcgatcaatccatgttgctatggctggactcagttgacgaaatttttctaaatcttgatcaaacatgtgcttgcacggagtgtacgctcgatacaattagttatgaataacaattctaagtatatatgacagttaaataaacgtgaccattaaatacgataatttacccaattcttgaacattttttttgttg

SEQ ID NO: 244385 - DNA, 274 bp, Glycine max
acaagcctgagcaagcggaaatggtttttgttgattctgaggtatattttgtgctctctatttgattgttggattgttgttgatgtcatttattgattatatagtttgcatatttcagggtgatcaaattcatgctatttgtaaatcggaccacctcaagtcttggaaagctgatttgaaagagaatttcacttatgttatgcataatttcaaagttgttaaaaatgatggtcaatttagattgtgcgaacatgagtacaagttatttttattg

SEQ ID NO: 244386 - DNA, 305 bp, Glycine max
ttttttttcaccacgccatctcggggctttggcttacgctcacctctttcagaaaattttctgatacattagttatgcaccatctgtgacggtcgaataatacacgtgcctctgaataaccttgaaatatgaatatggtgggcatgtgggcattgctccatcgtgctgacgacgagggggttgataataagatgttctactcttgtcttttctgaggcacttgaagaaaaatgtgaaattactaaataacaaccaaagataacgccgtaggaaatacgtgctatggtctacaaaaaaaatatgtt

SEQ ID NO: 244387 - DNA, 259 bp, Glycine max
agaaccgtggtgcatgatctgatttggtgtcacctacatgcaaaaaagttatgcaatgcatgtcatctggggtgttttatagacagtacctacaaaacaaacatgtacagactaccactacttgactttgttggagtgacaccaaccgccatgaaattctctgctgggcttgcatatctggaagctgaacgtgttaataatattgtatgggctttggaacaattttgaggcctatttttaagaaacgaccgacttccta

SEQ ID NO: 244388 - DNA, 288 bp, Glycine max
tttttttacgccagagatctggatgactactacaaaatcgcattcacctgtactctttttgatgcactctctactccttatgactgagtcttattaagaattaggaatcattgccggggatcatgccttttttttatatgaccgtgcccaatcttttgaggcacagtacatttggtggaaataaaccaagacaccaactattggaagaagaactgtgtgtttctccatgtggaacataatacctaacccatacaagggggggtgatatggcaccaaattacaatctca

SEQ ID NO: 244389 - DNA, 246 bp, Glycine max
tgaggatcacgcctcacgtttgttttcttttaataaacacagagattctccccctcttccacaatcacaagggtcttcacaaaagtattcaaagtatcttcatcaaatttgatcagatgacctctgaccctcacctgcttaagtgacttgtcttccgggtcgtagaggtttgcataaaaattccttcacaatggcaacataaatgttgttgtcagcaaaactagttagctccttatcccatttcct

SEQ ID NO: 244390 - DNA, 358 bp, Glycine max
tacccccagacgcaaaagccccgaccaaatcacaaccttgccatcactgcgaccgggagagaatcaccctccatggggcaacagtaaagggacaatgtcattcattctacacaaccagaacacccagaccatcggccatataacgaaaaaaaaacctagcccaacccaaactatgcgcatcacacaaagcataccaggctctgtataaaacaaagcaccacaccaaaacaacagaaaccatacaccccctcagaaagcgaacacacgcacagacacccctgaacaataaaccccaatgaaacaccaaacaacgcaacaaaacgaggcgaaaaacaccacctgactgcaacgcgaaacc

SEQ ID NO: 244391 - DNA, 291 bp, Glycine max
acacaaaagaggcgtattacaaatactatcatcatctgcccttctcatttattactcctcagaccaacaacacgtgttcacaaaggattccccaaataatccagattgattttggcgacagccatgggtcttttttgccgtgtttaaatggcaacaaggcttttaactactaaatgatggtcctatgaccactaaaaacttttttaaaaaaaataaataattttttttccaaaaataaacgatcccttaccataacaataaaaaaattggttaaaaattttacccaaacac

SEQ ID NO: 244392 - DNA, 269 bp, Glycine max
gagaagccacccgaagaagaggccgaaagaagccagagggcaaccacacacacccccccaaaaggcaagcccacccccagaagacgagaagctagagcctagcgacacacaccccataacaacgaagcccaccccaagggaaaacccatgaaaagacaaaaaaaaaaagccccaccaccaagacaacccaaaagaacgccgaaagacaaggcgaaaaccccacgccaccagaaaggccaacatacaaggcccaaacgaagggaaaaccc

SEQ ID NO: 244393 - DNA, 229 bp, Glycine max
aacacgccgcgaacgacactttttttatgttatggcatttgaatctctgagagtttcccatgattaatcgggagcgcacagatatagcataactctgaaggggacatccgtgcgaaaagcttttgaccatttacaatgtttacgagagctgccgttgaacattaacgagcgtccctaaatgttacgccccctgaccggactatcgtgagagaggttgaccatttaaatt

SEQ ID NO: 244394 - DNA, 339 bp, Glycine max
ttttcttccatatcctactaacttcaaggcacaaataacagaaatatcaccttcttatttcaatcatataaaaatgtgcactttttatggattgcggccaactaccaaacacagaccaaccaacctcataccaaaaacagtgatgctacataaagtcatgcacatcattcaaaggatacctgccgaaagtcttctgctttaatactctctctacttcagataatccatctccatcagaatagttaattcggacactagttccacctactacttgcttgccaaatgattcatttgccatcaattcctcctcacatacgcaacaaaaacaatgaccatgac

SEQ ID NO: 244395 - DNA, 367 bp, Glycine max
cctttcaggattacaagaaaagtctgtatatatataaaacacctctctctactaattataaaatccacacgtcacatttcaactttacatcattgctcttaataaacaaggctttggacttgactattacctgcgctggagttgctttgtgtttgaaggcaatcgaccggattatagagtgatgaaccacagctgttgatccccatgcattccctggcccaccaagtggcgaataagcacttacatggatctttcgcgccccacatgtctttctcacccttccttgcctccacatgggatgcatttccacctgtgtaccaattttgggtgacttactactgccaataaatacaacaaatatcaaccg

SEQ ID NO: 244396 - DNA, 219 bp, Glycine max
cctagaggatggcgcctcctctcacctcttctcctttgtcttccgctgcatttccatggtggaaaatcaccattaaaggacctcattgaagctcaaagatccaccctccatagaagccccacaagcaagcttccatcaagtggtaatcaaagcacaacagcttcaagtaggcgctccttaaacctccattaattttttttccttaccttcctttccatt

SEQ ID NO: 244397 - DNA, 283 bp, Glycine max
caaacccaaacccagggcgacacccccctccgccacagacagttctttttttttaggcccaacggcgtaatcaagataatattttgaagcatcatcacaaagcatactgcaatgtatgtgagcgtccactaaaagaaaaatatttgaaaagacagtctatcataagcgactgaataaaaaactttcaaacaaacttcaacaagactctatgacaagaatgatcaaaaagctccaaatacctatatacctaataatgacaacaattacaatgtcatttcactac

SEQ ID NO: 244398 - DNA, 293 bp, Glycine max
tttatacggagaccacagagcggcacctgcagatatgtcgcgggggtcacgagactttggggacgtcaggtggggtgctattgcccacaaccaagcttgatcaatcccgacccaacccgggcatagtcagtcagtgagaacctgtgatgtacctaagcacgcgagctcttggcaatcaaccgataaaaggaacaaagaccacaaagcaaggaggcttgtgtggtggctggccagctgtgaatcttgtgtgatatatgcggtatggccctctgtaatcaattaccaagggtggg

SEQ ID NO: 244399 - DNA, 276 bp, Glycine max
ggcgaccaccatcaacacaatacttccggcccctactatatgttgacttgaccaacgctgttattgcagtgctgccacaatctttcaacaccttattcacacattctgacagcgccggtgtcatgtcgaccatatccgctcccagatgtatcgcaagccacgctccatctttcctttgaaatgcgaccaatccatcttgctatggctgatcaaacacatgcttgcaaggagtgcacactgcatcaaatttgctaccatcaaaagttgctcctagac

SEQ ID NO: 244400 - DNA, 378 bp, Glycine max
atgatttgcttgctccacaagggatacttctgtcgcgaagagggaaaaatgttatgcactgctggtacgggcatgaacgatttcaacgttcttaaaaccaagtgtgcctcaatttcggcacacaccactttcatcttttaaggtaaaatatacatttcaaaagaaagtgctccttggattgcttatggcacatgatataatccgtctgaccgttagttaatcatcggtgtattctgtttgtacaaaggtttggccgtgctccacaactctcgcagactgtgatattcaattggaccaacacctacgcttgatttataccatctttatattccatatttgagctctatatagcccggaccgtacgctttaccatgacaa

SEQ ID NO: 244401 - DNA, 275 bp, Glycine max
  unsure (1)..(275): unsure at all n locations
tttttgacncaacccggccaaaagtacatgagggcaagtgtgatctcgaaaatctgcactttatgcaaaattttgctgttgaaatgcgcaacacaattttggctttgtgcacaaaatgatgcgtattcgctggttggggaaacagtaatacatattgggttctggccgttttctagcagatcccaacggtcacaatggacatttatgtcctagggaactccagcaacatttttcagtccatccaacggtgaacgaattgtaaccaaaggaatgtt

SEQ ID NO: 244402 - DNA, 253 bp, Glycine max
atactcccattcgggtatattattaactctgcctacaatggttgttccatggtattagactgaaacacaagtgtgcttttgcgtattgctacaatgagatgaagcctccctggatgctcgtgccccgtgcttggccttactgggcttactatggctaaacaccttccgtcatgctcaagggccataagcgctttttttcatacacaaccatttacgttttaccccagtaactgtccttttgccaacctggcta

SEQ ID NO: 244403 - DNA, 129 bp, Glycine max
cgaaaacacgacaaccggcgcgccaccccccaggaacaagccatgcaagaaggagctccccaccaagaagatccctggaaaagaagcttggaaggacgctccactggaggaaaacaaccagggagagaa

SEQ ID NO: 244404 - DNA, 235 bp, Glycine max
ctcaaacccaagcacctgggtcaagcacgactttctttctgcttttggtggctcgccttgcatagctcgcatttttcttttcaatctgaaccttcacttgctcatgcaacttctttacatactcagctttagcctgtgcatcccttagcttaaacatagcaatgttacgcataagcacacaatcaagaggagtcaaaggattaaatccctacactatctcaaatggggaacaatt

SEQ ID NO: 244405 - DNA, 294 bp, Glycine max
  unsure (1)..(294): unsure at all n locations
attttttggaaaagnggcctcatatatcttaagaaggaggggttgaattaccatattacaaattatttccccaattaaaaattgcatttaactttctattcacgttattaattcccttaataatgaatttcttaaatattgattcaaatagaacaatttgaatatgaatataaaacaataataaataaacgagtttaagggaagaaaaagtgcaaactcatatttatactggttcggccacacccttgtgcctacgttcagtccccaagcaacccgcttgaaagttccactatc

SEQ ID NO: 244406 - DNA, 284 bp, Glycine max
ggccatcgattacccgagagtacaaactattcggtaaaacgccttgagaaaaattcatgtgctactcagttcttgaaaaaaaaacctaatacttatcctgattgagtcttctcttgattcttgaatctttagtcttaaatcttgatctgtccttgattcaatctttaactcatctctttgattcttgagaccatcatctttgttatcatgaagtgttcttgacttttgagctttgctttttggcatcactcttgataacatcaaaactctttgatcaatcctga

SEQ ID NO: 244407 - DNA, 276 bp, Glycine max
gcttgagctcggctcattacctgtcatttctttcaaaggcttggctcggcttacataaaagtctgacttggcgtacccgcctatttaaaaacttgtctgaagaccctcttgatcaattaattattttaaaacctataaaaataataaacttataaaactttgtataagtcatgggcaaatccccaaataattgataaacaaaatcatattaaattcacagcgttaaaacacaacgttatcctaagaaaatgaaaaaaaataacattattttaaaag

SEQ ID NO: 244408 - DNA, 391 bp, Glycine max
  unsure (1)..(391): unsure at all n locations
gaacgaaggatgaaaacgacagtgcagttgccgaattgagccacggcataaattctacaccacagacctctcaatcagctccaaatatttgtggaacacgagtcatgaccaaggtgagagaggacacaacacaatcacctgacatgcctcttttttttttcattgagtctcacaattggcactattcaatagcatgctaaaaagttattgtgtttaattcttgtacatgttaaaagatatagttgtaataataggaacactcccttttctctcaaaatttgtttgttaaaaaaagacttttacatgcttttctttntgcctaaaagaaagcccttttttatcaaaaagaaaagaaaagagaaaaccctcttaaaaggaaaactactttata

SEQ ID NO: 244409 - DNA, 294 bp, Glycine max
  unsure (1)..(294): unsure at all n locations
agataaaccagagctgaagactttagtccatttacatgctaatgaggttagttgattttattggttcaagaatttaagtaacattttattatgagatgctcaagttcattatcangtaaggaaaggtggagagttgtcacttcatgaaactacaataatgttggtattatcttggcatacaaggggcttaataattagcaaaggtcacagccgaataccagtctactctgaaaaacagacaaatattggtggtattatcttggtaatcaatcaatttgaaatgttctactttat

SEQ ID NO: 244410 - DNA, 331 bp, Glycine max
gcttcttgaccaccaatggccccagaatggagaatgacgaaaggtgattggagatgccgcttcacggagaagatgagtcaagaataagctcaccaccataggaagccgtagctaacagcttgaaggtaggagaagatgagcggagggagagggggagacatagagacggcggggggctccttcccctctctcctgtctctccccctctccttccctcctccttccctcccaccctcttcctcttcctcctcctccctccacttccccctctctcctcccccccttctcccctccctcccttcctcccccccctccttctttctcacccttc

SEQ ID NO: 244411 - DNA, 199 bp, Glycine max
catgggaatttgagggtgtgattagggagtttgttgacaagtgaaatttcaatttaattttacaaactattcgtaaaccaatctggatgctacccggatcgcttcaattttttgagcttataagaatgttctaagttgacgtggattggaaaaaacacattatatccgtaccgcattcataaagagtgcgctaccccaa

SEQ ID NO: 244412 - DNA, 387 bp, Glycine max
  unsure (1)..(387): unsure at all n locations
ttttactcccatgtctggttgagtcccatattatattgagacgctcgaaattgaatgttgaacctttgagcaaattcaaacgacaataaccttttactcggatgtctgattgagtnccgccatatatcgagacgctccaaattgaatgttgaagctctgagccaattcaaacgaccataacttttttctcgtatgtttgattgagtcccgcaatatatcgagacgctcgaaattgaatgttgaacctctgagccaattcaaacgacaataactttttactcggatgtctgattgagtcccgtaatatatcgagacgctcgaatatgaatgttgaaactttgagccaattcaaaagacaataaatttttactcggatgtccgattgag

SEQ ID NO: 244413 - DNA, 278 bp, Glycine max
ccaacgacatccgagtaaaaagttttgccgtttgattggctccaagttcaaaatcaatttcgagcgtctcgtttattacggtactcaatcaatcatccgagtaaaaagttattgttgtttgaattggctcataggttcaacattgaattttcagcgtctcgatatattacgggactcaatcagacatcccgagtaaaagttattgtcgtttgaattggctcaaaagcttcaacattcaatttcgagcgtctcgctatattacgagactcaatcaaaca

SEQ ID NO: 244414 - DNA, 256 bp, Glycine max
  unsure (1)..(256): unsure at all n locations
actattcctatagntatactaaggaagngnatcctgatgaaggaaaaggtnnatgctntangggggtatgggccaagggaactagtttttcaagagtttcccatcagacaaatttttgctccctatccaaacagtcttatctttaaacataggccaacaacaataaaggtatattcttccagtgccattctttggaaaaatagggaaagtgaaaccttctagaagccattttttactttcaaggatcttccataga

SEQ ID NO: 244415 - DNA, 325 bp, Glycine max
cccccaccccggacaggtgacgctttggttgctgttgtaaagacgcccaaggaggacattgatgcaatcctacccccaagggcattggatagaatactccaaaaagattgggccagagatgcaagagaaaaccctagggttctcatgagccttagggtagatttcagacccatgggctaaatatgagcccacttatctttggacatattaaattaaggctttattatttttgggccttgtatttaaggcttcatagcggtaggagggtacccttatattgaggaatttttaacccttgtattttacgtcacttaaactaatcttt

SEQ ID NO: 244416 - DNA, 247 bp, Glycine max
atgaaacattagcagcacctctgccgaagttgttattttttactacggtaaatgcctttagaatcttttccactcaatgttgacgatgatccccatctttaagtcaccaagttttataaaacgcatcttaggattaaacatttagatgcacacaccctgctgcaatggttgcatgttagaatagacgcttaacaatgagaaccgatcacggataggcaagttttcggatctttttggttcgggagag

SEQ ID NO: 244417 - DNA, 274 bp, Glycine max
gcctcttgctgtctgattttaaattggacaagcatgtaacattggaactatgagcttagcaccaattacaatgttgacaactagattgtgaagttcactagctagatagatagctagattgtaaacctacgtagctagtgagaagacacagcttgcatgcattgtccaagcatgcaagctatgtcttataatatccactactctttttgtaaaatcaatttcaaaataaccaaagttaaaaaatcatatataatatcaaattctatacaacttt

SEQ ID NO: 244418 - DNA, 374 bp, Glycine max
ttgttagacaagcgcgcctcagatatctcaagaaggggggtcgaatcaatatatcccaaactgtttcccctaattaaaaatctatttcactttttactcaaggtatgaattcccttaatgacaatcttcttaaatattaattcacacgaaacaacccgaatatgaatatcaagccctaataaatacaggagattaacggaacagaaaacgccaactcagttttatactggttcggccacacccttgtgcctacgtccagcccccaagcaacccgcttgagagttccactatcttgtaaattccttttacaagttctaaacacacaacgacaatcctctctttgcattagaattccttacaacaagagactacat

SEQ ID NO: 244419 - DNA, 278 bp, Glycine max
atacaagtagtggggatgtctcatccacctctaggacctcacaaccactcacaaactcatctcaagctctcgggacgacttcctcttcaagctccattctttgcaggtctttgcacaaaaaaatctctcaaaactctatggattcagacacttctctctcttgaatctctcacatgcagaagctcctcgagaaaatggccaaaatccctggaacttggacctttctttctagaaatctctaaacatgcacaagcttccaaaattgcccaaactcctct

SEQ ID NO: 244420 - DNA, 82 bp, Glycine max
aaaccccgccaaaaaacacaccccaaacgcacgggcccaacggaaacccagaaaaagcacggccggaacagccacaccaacg

SEQ ID NO: 244421 - DNA, 280 bp, Glycine max
aaaaagcacaacaagactttttgtgattagtttaaagatacaatctttgcagatgagaatgcttcagaaacattaagaaagctagcaaatgggcctaaatgaaatgttataacctggccaggatacgacataaaccagtattcattttacacaaaagcccaagatgacaaaagtacaatgcagaatagcggggtcaccctaagggctaaatctcaacactttgcaagtgtcaatgaccccaatccctggggagcttccattccatactttgggttcattg

SEQ ID NO: 244422 - DNA, 322 bp, Glycine max
gaccacccgcacaagcgcgcccgggaacggacacccacaacattccaacactagtgaaccacgaccgcgaaacaaacaaacaaagaataccacacttacacacacgacaacaccaaacatataacaaccactgaacccaccccaacgacacaactatatcgaaaatcctgacaacaacacacaaccacgaccatcaccaactgaaaaaccacgacaaaacacaagccttgcaaacaaaagagaaaaaaaacacaacggaaaactaacaaagcccagcaacctaaggaaaccttaacacaaatccctaaacttcaaccaaacc

SEQ ID NO: 244423 - DNA, 241 bp, Glycine max
tcgacactgagtgtcatgccttaaatgtctgggactggggctgcgttgatgcacgacggccatccaattgctcattttactgcaaagctaagtggtcctcacccttaactattccccttatgataaggagttgtatgccttactaccggctctgaaaacatgccaccctaccttcatcccaggacattgtccttcatagtgaccactgattcctccaatatctcaaggggcaccgcaagct

SEQ ID NO: 244424 - DNA, 307 bp, Glycine max
gggaccaacttttttttctttaaaaggaagccgcatctagtcaaggtctgagagaccatacaagtttcctaacgatttctaattatgtgggccattaagtctatcatatgctgacaatagccgagaagcccatgaatctcttcgggggcggagtaggtgtctgccatcgccttggccttggctaacaatcggggaagttcttgactcccgttcaaggtaagagcaaaccgatccatccacatggttgcctcttggtgtaaagaagccatcaccctttctttagcctcttttttcgcgtatacttggg

SEQ ID NO: 244425 - DNA, 282 bp, Glycine max
  unsure (1)..(282): unsure at all n locations
cccccgacccccacggctcatcgaagaccaggaatacccgtaagaggcctttgacaacgacaatggcagccggttttttcctaagtgggaatatcctgtacaagaggaaccatgatatggttntgcttcgatgtgtgaatgctanaaaggctgaacaaatgctggtagaagcgtatgaaggctcctttggaacacatgccaatggacatgccatggccctgaagatcctaagagtagggtattactggctcattatggaaaatgaatgttgcctccatgtga

SEQ ID NO: 244426 - DNA, 237 bp, Glycine max
  unsure (1)..(237): unsure at all n locations
cgctccggagcacgacagactccgatttaggagcgctgtacaccagccagcgactttgatggccactcaacgcggattggtcgttttntccgggagcgacgcgtccagctcacggacaacgaatatactgatttccaggaggaaatagggcgccggcggtggacatcacctggttactcccatggccaagttcgacccagaaatagtccttaagtttcatgccaatgcttggccaac

SEQ ID NO: 244427 - DNA, 209 bp, Glycine max
ggcaccttttttttttttcaagcccccgcagcgcaagagaagttcaaggccatagccatcaacgtctgaagagagtatgacgaactcaagggacgtcaatatgggccaccgctgaagcccttggaacgagaaaccaaataagggccccaagcgaataacccgacccaaacaaagttttgaagggctctatagggcaccaatagtgagct

SEQ ID NO: 244428 - DNA, 227 bp, Glycine max
ggctactgctccagaacaaaagacgaaaagcttatgaacaagaaagcaccataattgaccaaaatgatcaaaacaacattctatcttattcattgagcaaaaggaacttatatacacattgagaatacatgcagaaactaacaccaaggcagttacaaagtttgttacaaatctattacggttcaaaatgaatttggcgggaaagggtagtttcttgtagcttgctt

SEQ ID NO: 244429 - DNA, 306 bp, Glycine max
tccttgttctgaaccccactatcagccttacgtgaaaaaccatgatattaccatatccttaaggaatttcggagctttggaattgttttgggaataagtgtggggggttcttgtttcattggacaacttggtttggtgactatgcttcatgaacgaaattcatggggctccgaaatacgctgagaatggaagaatgcactaactaataattacacctgcgctccaactcgaaggtggagacgctgaatgacaaccactctttggacctctcaaaaaggttacaatggcaattgcctcaccattcct

SEQ ID NO: 244430 - DNA, 267 bp, Glycine max
ctatcgcataggttcggggtctgtgctcctttgctgaccaaccatacagacctttgcccttccatgcaggaacctggagcaattgagcagcctgaagcttatgctggaaatatttacaatagacctcctcaacctcagcagcaaatataaccatagcagaacaattatgacctctccagcaacagatataaccctggatggaggaatcaccctaacctcagatggtccagccctcaagaagaaaccaaagccttcattcaaaactta

SEQ ID NO: 244431 - DNA, 175 bp, Glycine max
caatccttgacatctggaaaaagaaatagcaatttctttagtcatattaagaagaaaatttacactttagtacaaatatcactgaagcccattttatgaataaagcaattagtccatgttctaacatgctgtccaaaagtggtcgcattagatggctttctttgtaatcaaatgt

SEQ ID NO: 244432 - DNA, 306 bp, Glycine max
accacctttggacagacacaaaagaaatacgccactgagacaaacatatggaagaaaaggtccatattccttgaccttccatactagtctgatcttcatgttaaacattgtatacacaccctgcatgtggagaaaaatgtctgtgatagcttaatcggcaccctccttaacattaaaggcaaaacacaggacggctcgaaacttcgccaggactcggccgaaatgggtatacgacagcacttgcactcaatctcacaaggctaccgaacatatccacctctagcatgtcacacaatgtcaacaaac

SEQ ID NO: 244433 - DNA, 275 bp, Glycine max
tttttagcagctatttatgaatatggaggctgatcttgatattgtggacttggttttgattttgtgattttgtagtgaggaggatccaacatgggttatggaaccgatgcaagcacagaccattgatgttgtaacacactatgaaagaaatcacacttgtgatgcatactccataacaagtattgaaagaccctggagtttcccctgccgacattgaacgtattcaacatttatccatgtgcaagacttatgaaaaatacactcccttttatttt

SEQ ID NO: 244434 - DNA, 212 bp, Glycine max
aaaaccaacgccccaaaaaaacaacccggaccggagaaccccagaaaccccaaaaaaccaagaacaacgaagaaaaagccaccaaaggaaaaaggaaaaaagcaccagccaacgggggcaacccggcacgcagccaagcaccgggaagccacaccgaaacctcacagccaccacagacacccccggcaaacccaaaaaacaagcctaaccaa

SEQ ID NO: 244435 - DNA, 248 bp, Glycine max
cgacatggctcccgaccggaaccaacttccgggtatgactaaccgagagcatgagcccattaacgaatatgccccgagatggagagatctcgcagcccaagtcgtaccgcccatgaccgagagagagatgatcacaactatggtagatacgtcacccacgttctactatgaaaagctgaaaggctacatgcccgctaactttgcggatcttgtcttccccggagaaaggacggaatccgggctacgaa

SEQ ID NO: 244436 - DNA, 331 bp, Glycine max
cacattgcacatctatctggagctcttgttggtctgctttaggttccgctccttagcaaagtctcttcagacctttctgaccaataatcctcgcagttctacaaaacaggcccaactccttagaaagtttcttcagacccttcacaaatgtccatctgtcttgctatttctgctactgccgctgatactaagcgtccaaatacagcaatatgtcaatggtaggggtattgtcttgataagaacttactatataggctttcgtggcataaacacttttgtatcgagaaggattctctttcaaccccaaagcttattgcatgtctatggaatt

SEQ ID NO: 244437 - DNA, 319 bp, Glycine max
taccaaaactaaaggttttttttctttttgccggcacacgaatatgaaaatgtgaggaattagacctgcctacaagtcgaatttctttgattctaatttccttcattcttcaaaagctttgtttggataaattaattcaaattcctttccttttaacaattttatttggatagggcacattcaactatttccatatgccaaatttcaattctttattttaaatacatgaaatcttgatattaaaatttttagaaaatagacccgatctacttttgaaatattaaatacaaaatattttcaatttttaataatttaacaa

SEQ ID NO: 244438 - DNA, 119 bp, Glycine max
attcctttattaatatatatgtgaggggtagagggtgtcacagtctccatgagaaatgccatgaccacactccaccacaccaatcagcagccttccactggatttaaatctcacaccaa

SEQ ID NO: 244439 - DNA, 127 bp, Glycine max
cactccaaatgcaagcttcccgcaagacttacggaaagatcttagagttgaccttagcagaggtatccatagaagccattgcatcactcacccaatactacgaccagcctttgagatgcttcacatt

SEQ ID NO: 244440 - DNA, 133 bp, Glycine max
  unsure (1)..(133): unsure at all n locations
aaatatgactganaatgttagtcagcttatcagattgattgtgaaggaatgcattgatcgtatcccggtgagagtgtgatccttaaattttgggagaaacaactatcatttagtactgattcttgcatgaatc

SEQ ID NO: 244441 - DNA, 349 bp, Glycine max
tacgcaacccttgatcggccgctttgagatacttggcatcctttggtttacattatgtgaagtcccgaaacatgccggaaatcaaaaggaagcaggcttacgtgatccgtgaaattccgtaatgtggcagataccaaaaggaggtgttgttacgcaatccgtgagtttccgtaacttcttcgaaagctaaaaaagagtaaatacatgatccataaggatccgtaaccttacggaaagaatataagtatccgtacgaaattcgtaaagttttcgaacgttacggaaaaagaatcaccaaaaaagggtaaggggggtgaacttatcaagataggtgtgtaaatagaaattc

SEQ ID NO: 244442 - DNA, 364 bp, Glycine max
cgagacctcacccagagtggaagctacgcattgggagcttctgccctagtgcatatgtatgacaatttgaatgatgcgtctaagcgcaacggtagacaacttgcccgatatatcacactattacaggtaattataatcgaatttaatttttttcgttctttgatgttgactatggcactgatttaattttcttagttttgaaaatatgtgtagcggtggattcatgagtatattccatctattgctaaggcattaccactgggtttccacataacttatagggacactcacatttcctactgccaatatctcttcttacaaaatatgtctttcttcctagacttacactgaccactcctttcac

SEQ ID NO: 244443 - DNA, 459 bp, Glycine max
  unsure (1)..(459): unsure at all n locations
ggggagaagcgatttattattggttgagccccttaggcacttctctctctttcgaatttgctgagaanaattggttccgcgaagaaaattcaagccgaggcgcttccgtaacgtttccgtaacgtctccgtgagtgatatcgcgaagggtttcgaccgttcttcaacgttcttcattcgctcttcatccgtcttccgtcttcaacgggtaagtaccccgaaccaagcttttcgattcattctatgtaccccgggtggtccacattgtgtttcgtgcatctttcttctctgttccatttactctccgcaccccttatgacgtgcttaagccgatttatttaaggcatttctcgcttaacctacaaataacatacaattccaccgatcgtttgatctgattatacggtaatttcggctcaatgaattccgaccgttcggtcggccgcaccacgttgaaata

SEQ ID NO: 244444 - DNA, 350 bp, Glycine max
gcaagccctccaaacggagctcgagaaagcccaagcggtcaacgaaaagcccaagacaacagccgctttgaaccaaacagagaacgtccagctgagagacctcaataaagccaccgccaaggccatggagcaagagaccaacaggactcgccaggaagaacacgaccggaacaagtcccgaggggatctcgggggcagtaacagcgaacttaaactctaaagagaggaaagggaccacgcatgaatagaagacatgattctgaatgatgaactgaagacttggctgaagtcctacaagagcttgtcttaacggctgagcgagatcgaagccaacatgttgccctcatcag

SEQ ID NO: 244445 - DNA, 80 bp, Glycine max
ctaacgctataatcaaacaatccaaccatgatatccacaaaattgaattaataaacacacatatatgcttataaaacaac

SEQ ID NO: 244446 - DNA, 423 bp, Glycine max
  unsure (1)..(423): unsure at all n locations
tttttttttctccnaccagcacacaccacccatattcttctagggaccacctttacctataatagttatatgacatccaacgcgaactctgtatctatattacacgcatttcctctgctaaattacatacatgcctaactcaagcacttcggctatcaaaaacgcctacgtgcacattcttggttctctaatacctgtacatacacagacttcatgatgaatcttgactatctacacaataacgtgctacattctatgcttcgtttgaagagcctttactacctatagccgcatgcacattcaagcatactttcttttgccgattaaaatctgattcacactaaaacgtattcttgtaacgatattcttacataacagcaacatatatattattttggagacatttcgccattcaaaattacc

SEQ ID NO: 244447 - DNA, 128 bp, Glycine max
aactacctaactagctaactccacaaatatatacagtgactactcagaagaaaaggataggccttgattaggctcatataatctacctaattaaactaattacacaaagcaaatcccaaattcaccac

SEQ ID NO: 244448 - DNA, 263 bp, Glycine max
aataactcttccacattattactagtgaatcacaacaaaccaaccttatatctttcacgtgcagtatgtggcagcagactgaatggtgattcccttctccctctccaagtccatggagtccatcttggcgccgactccgtccctgcccctgacctcgtggatctcgtggatccgacccgtgtagtacagaacccgctccgtcagcgtcgtcttcccggagtcgatgtgcgccgagatctcaatgttgcggagccgctccatcg

SEQ ID NO: 244449 - DNA, 339 bp, Glycine max
agcggcacccggagatatgtcgcgggggtcatgagaccttggggacgtcacgtggggtgctattgcccaaaaccaagcttgaccaatcccgacccaacccgggcatagtcaatcagtgagaacctatgatgtacctaaacaggcgagctcttggcagtcaacagataaaagaaactaagaccgcaaagcacggaggcttgtgtggtggctggccaactgtgaactttgattgatatgtgggttatggcctctggtaatcgataacaagggtgggtaatcgattacaaggcttaaaaatgaagacaggagattaagatggtctctggtaatcgattacca

SEQ ID NO: 244450 - DNA, 404 bp, Glycine max
gtccatcatccactctcttaatgtaacctcaccattcacaaattgtataaaacctttggttccttactatacctttggacatcacgctcttgctgccacatcgtgtgcataatcctcatgcaatgtatgacaaacatataaaacattccacaaaaagatataagcgaggatcaagcatacgtactattctcatgaaacccatctcaatctctcaagtcacaataacaacacataacacataacattacggacaacataacagcttcaaaaatacaaccaaccaacacttataactaacaatttgttgagggtcgaacacccccgaacccacccagagtgctacagactaagataatcactatatatatatatatcaaaatataaattccacacatcacagatat

SEQ ID NO: 244451 - DNA, 115 bp, Glycine max
tgcctccctcgcccagtattatgatcagccgttgaggtgcttcacctttggggacttccagctatcacccatggtggaagaatttgaagagatcctatgatgtcctctatgggga

SEQ ID NO: 244452 - DNA, 390 bp, Glycine max
  unsure (1)..(390): unsure at all n locations
ggattttcaaggcttgagatatgaaaatgagcatggggtaaatctggagcaaaccctcacctcatacaagtctatatcattaatctaaacttgctcaaactggtttcacgatgaaaactctaccgaatcaaaatttgactactcaacacccaaatttaccctagaaatggctcttgccttcactttggtcatttgnttttctctcttgcacagcccaagctttctcataagttctaaatgacatttcaaactacgattaactcattttaacctctatgtaccattgaatccagagttagccttccaactctcaaagcctcactctattttcactcataacaccacattctcactttctaatcctaggttaactctacccttcatctctaa

SEQ ID NO: 244453 - DNA, 312 bp, Glycine max
caaaacaagtctccacagccacaaagcacatacaaacccaccatcccctgttgcccacctgcaaccgagcccacgtactcccacgaagcccttatccgcagggcgctcaacaccggagccccagcaagcctcccaagatgccacaacatccaacgaaggcaacagtcaatcaccacaaactaacacagccaagaaaacagggcaaaggcagaaaacactgcccaaaacacagaccaatatcacagcttcgcacattcaaataccccacgaacattcgctccgtccaggtcggaacccgtggatcgacccaaa

SEQ ID NO: 244454 - DNA, 129 bp, Glycine max
  unsure (1)..(129): unsure at all n locations
acagaanacatctctcaagtactacaacatgacaaacactttgtttcacaaaaaaattccctcacacggaagcctcctttcgatatggattcgtatactataatatcatgacatgatttcatatcatgt

SEQ ID NO: 244455 - DNA, 100 bp, Glycine max
tgaggaggagcctcacctgctggttcgctctgtagaggctactgttactgctgcatcggaggaggaacatatggctcgcttggaccaacaacattctgaa

SEQ ID NO: 244456 - DNA, 63 bp, Glycine max
cctgataacgccaaggaaatcggggaagatgggttggctatagcccactcagcagattaaaga

SEQ ID NO: 244457 - DNA, 318 bp, Glycine max
  unsure (1)..(318): unsure at all n locations
ggatacaaacccaaaatgtactataagctactatgtacaaccaatagttccttgactagcaaatatgattgaaacaaaaaagaaaatcaccttgataccaaacacataaagatagtaaaacttcaataaaaggataccaagagcactggaataatgttttgctctaagaagcaactcatgtgcacgataccaaatggttacaacaacctgcatgttagtatctcttatattcacgaaacgaataatcaaatgagagcaagcaatccatatttaagcaacccatgtgtggtgaatcaaacactagaaacncttgcaaat

SEQ ID NO: 244458 - DNA, 110 bp, Glycine max
agactttttcctttttttcttcgggtggagcggcaaaagtagatatatatattaatgaaagcagtacaagtggtactgatatacaaacagcctagcatcaacgagagcag

SEQ ID NO: 244459 - DNA, 425 bp, Glycine max
  unsure (1)..(425): unsure at all n locations
taagacctactagggtcactatcgagnnagnacncacaaaaacgccacgacctattntttcagacttctaagttataatctttattgccaatatcatactgatttgagttgtatttttattatccttttggttgttacatttctaggttggtttccctctgcttatgtatggagacaggagatgatactagccagcaagataacaaaataacttcacacgataccaacattggtcttttgattatgtgaggcaaaaattgtatattataatcacggaatacatgcagcatttgaaaagccatagcatgtgcttgccattatttttgggtggctctatcatgtcatctgtgcagtatgttgtatatgtgagtcataattgcaataggaaatagcactggcagtctgatatgatattgatagttata

SEQ ID NO: 244460 - DNA, 127 bp, Glycine max
cgactcaattagacatccgagtaaaaagttattgtcgtttgaatttgctcagagcttcaacattcaatttcgagcgtctcgatatatgacgggactcaatcagatatccgagtaaaaagttattgtc

SEQ ID NO: 244461 - DNA, 311 bp, Glycine max
acgctcgtaagtgaatgttgaagaactgagcaaattcaaacgataataacggtatactcggatgtctgattgagtcccggaatatatcgagacgctccgaaattgaatgttagaagcgtctgagcaaaattcaaacagacaataaactatttaccacggatgtctgactgagtcctataatataacgagacgctcaaagatgaatgttgaagctcttagccaattcaaactacaataactttctagtcggatgtcttattgagtccgggaatatatcgagacgctcaaaattgaatgtcgaaactctgagc

SEQ ID NO: 244462 - DNA, 395 bp, Glycine max
  unsure (1)..(395): unsure at all n locations
cttgatcatggcttaactggtggatcgtgtgagcaatcattggaaggtggttatagaaatgaaagaatatagaaacagtttgaggaagtgggtagtttcttttcacgtaacaattagaactctctgaattcttatgttttttcaatatttaaaattatttatctccaaattcttatgtttgtgatattcaagtgaatctatctaataaaaaaacaaatgataaatatatttgtttcttatcttataaatcagttttaacttcagtaccaataagaagtaatttgttaacgaatgaagagataccgatnaaanaacaaaaaaaaaaaagctatatgagagagagcttcgaattggaagttattgtaaanaaaaaacaacttgggatgtgaaaggat

SEQ ID NO: 244463 - DNA, 156 bp, Glycine max
ctgaagttcacaatagagaaattcataattttaatgctcctttggattaatcatttattagattatgaacaactacccctaactttaataaaataagtttattctctttatatatcaaggttggacgtgttggcatggcatcattaattggtgaaa

SEQ ID NO: 244464 - DNA, 376 bp, Glycine max
  unsure (1)..(376): unsure at all n locations
taatttgcttcatgcctctatatctgataccaatatattgatatatttcactggtacaaatatgtgaagtgaccaattctttaaaaaaattatgataatcaaatatagtgacgtgtaacatagaagtaagtataatatagaaatataaaaagtatagtttcttgatgaaccaaatatgaaaattgttntgttatagataatttcaagaaagaaatgagattgatcattgatagtaccattcttatttgtgatcaataggaaaaaatgatctacaattttttgattttggttttaagtaatgtctaagaagtatgtatggtcttcaattaccgaaatgcattgtatattattatgcctttataattctacatattac

SEQ ID NO: 244465 - DNA, 132 bp, Glycine max
actcaatcagacatccgaggaaaaagttattgttgtttgaatttgctcagagcttcggaattcaatttctagcctctcgatatattacaggactccatcagacacctgagtaaaaaagttattgtcgtttga

SEQ ID NO: 244466 - DNA, 396 bp, Glycine max
aagacgctcgatattgaataccgaagctctgagcaaattcaaacgacaataactttttgctcggatgtctgattgagtccctgaatatatcgagacgctcgaaattgaataccgaagctctgagcaaattcaaacgacaatcactttttactaagatgtctgattgagtcccgtaatatatcggaacgctcgaaattgaatgttgacgctctgagcaaattcaaacgacaataactttttcctcggatgtctgatggagtcccgaaatatatcgagacgctcgaaattgaataccgaagctctgagcaaattcaaacgacaataactttgtactcggatgtccgattgagtctcgtaatatatcggaacgctcgacattgaatatagaagctctga

SEQ ID NO: 244467 - DNA, 318 bp, Glycine max
gaggaatcttctggagggccaactgggcctggttgctatttgcacccccccttttactaaatgcacccccttctattttttggtaattctttctccgtaatgttaccaaactttacgaattttgtaacgatacttatttttcttccgcaaggttacgaaatcttacggattacgtatatactcttttttagctttcgaagaagttacggaaacttacggattgcgcaaaacacctcttttcgatttccgtcacattacgcgaattcacggattgcgcaagcctgcttccttttgatttttgagacgtctcgggacttc

SEQ ID NO: 244468 - DNA, 378 bp, Glycine max
ctacagatatcctcagcattgtttcatagacaatgccccccatccaccctgctggaccttagaccaagactcctgcaccagctttcgatatcctttttgatagagccacaagtccaacaccctaaagggcttatgaccccaatcaaccaccttagtcttcaaaattaccgggctatggtcagagtaatctctgtgaagaacatgttgggatgtgtcaagccatatagctatccattgatctgacactaggaatatgtcaagttagctcttgactgaaccgataggcctgaaccaagtgaagcttccaccacaacctctgatctcatgaagatccatatctgagatccagtcattaaaatctgaaatgtcagagttatc

SEQ ID NO: 244469 - DNA, 194 bp, Glycine max
gggggcccaaaagacgcaaagaaaaaaaacaaacaggaaaccagcccacaccgacacaaaaacagaataaccaaagaacaaacaaagccaaggcacaaaccaacgaacaccgcgacacaaacccaacaacgtccgcaaaaaaaaccacaagcaccgaaaaaaaaaaacgcgaaccgcaaaccagaaacccgcaa

SEQ ID NO: 244470 - DNA, 128 bp, Glycine max
gtgctctctgctcttatagattgttagttagttcgttaattacttactactactagggtttggaatgcagctagtcttgcttccaaagctgtgtcaaaatattgccttattttgttgagttgttgcgt

SEQ ID NO: 244471 - DNA, 400 bp, Glycine max
tgggtgattatgaaaacctcctctgaacgaacctccacagtgaagatgtccacattgcaactgctggccactaaattctaaaatctgaacatgaaggaggaagagtgtattcatgacttccacatgaacattcttgaaattgccaatgcctgcactgccttgggagagaggataacacatgaatagctggtgagaaagatcctcagatccttgcctaagacatttgcatgaaagtcactgcaatagaggaggcccccgacatttgcaacacgagagcggatgaactcattggttcccttccaccttcgagctacgactctccgtagggctgacatgaaagcaagaactcggcgttcgtgtcaatgatgaatgagaagaagagatcatgacctgatactga

SEQ ID NO: 244472 - DNA, 239 bp, Glycine max
gatctaaaatctctacctttgtaatataagcctcttattcaatggaggggagattctccaataccactttgcattttggtcccctcttattagactcagatatggatgttctttctctgatctatcccatctggcccacaaaattggtttgcttctaacatgattaccaattgcacgccatggctccccaatgaaattctggtatgttcttcggtttcgcgactcatgccttctcacac

SEQ ID NO: 244473 - DNA, 308 bp, Glycine max
tataatgacctgaagatccaagctttctctgattctgattgggctacatgtccagttagtcgcaagttaatcactagctattgtgtttttcctggtaattccttaatctcttggaaggctaagaagcaatcaacagtttccaggagctctactaaagctaagtatagagctcttgcttctcttgcctgtgaattacaatggatacagtatctttgcgatgatcttcatctctccactcttgatcctttctgcacttgttcttataatgaatctgcaattcaccttgcaaagaatacctcttttcatga

SEQ ID NO: 244474 - DNA, 102 bp, Glycine max
agaagaaaggaacacgaccggagacaccactctaaagagaagaagattcaagaacaagctcgccaccataggaagccatggataagagcttgaacgcaggac

SEQ ID NO: 244475 - DNA, 408 bp, Glycine max
atcatggctgaactgtgggatcgtgtgagcaatcattggaaggcggttatagaaaggaaagaataaagaaacagtttgaggaagtgggtagtcttttttcacgtagcaattagtactctctgaattcttattgtttttcaatttttaaaattatttatctccaaattcttatgtttgtgatattcaagggaatctatttaaaaaaaaaacaaatgagaaatatatctgtttcttatcttaaaaatcagttttaacttcagtaccaataagagtgtaattgttaacgaatgaagagataccgatctaaaaactaagaaaaacaagctatacgagagagagctacgaattggaagtattgtataaaaaacacttgggatggaaagatgatcccagaaaatgtatatgtga

SEQ ID NO: 244476 - DNA, 329 bp, Glycine max
  unsure (1)..(329): unsure at all n locations
ataggtaggacctcccaaaagagtatggaatcaccaccactcttaataattatgatctaagtccttgtgtacgtggagctgatatcgaataggaggaaccaacgaatttgaggtcaaatcctcttcaacgggggaagggatgatgcaatcctccctaggaagggaccacttaccagagctatgagtaagacgctccaagaggattaggctaaagttgctgacgaatgccctanggttcttatgaacctcatggtaaatgtttgagcccatgggccaaggtcacgtccacttatatttcgacatattagatatggatatcattattgttg

SEQ ID NO: 244477 - DNA, 329 bp, Glycine max
cgcataatatatcgagacattcgatattgaacaacggaagctctcgagaaattcaaatggtcataacctttcactcggaggtccgattcatgcgaataatatatcgagacgctcgaaattgaacaatggaagctgtcgagaaattcaaatggtcattacttttcactcggaggtccgattcaggcgcataatatatcgagacgctcgaaattgaacaacgaaagctctcgagaaattcaaatggtcataacttttaactcggaggtccgattcaggcgcataatatatcaagacgctcgatattgacaatgaaagctcttgagcaattc

SEQ ID NO: 244478 - DNA, 332 bp, Glycine max
cctggagatatgtcgcgggggtcaggagaccttggggacgtcaagtggggtgctattgtccaaaaccaagcttgaccaatcccaacccaacccgggcatattcggtcagtgagaacctgtgatgtacctaaacaggcgagctcctggcagtcaacagataaaaggaacaaagaccacaaagcaaagaggcttgtggtggctggccagctgtgaactttgattgatatgtgggttatggcctctggtaatcaattaccaagggtgggcaatcgattacaatgcttaaaaatgaagacaggaggctaagatggtctctggtaatcgattaccac

SEQ ID NO: 244479 - DNA, 132 bp, Glycine max
tcaagattggactaatacatttgctgtccaagtttcatggtcttgcacgtgaagatccttataagcatcttaaggagttccacattgtttgttccaccatgaaaccccctgatgtccaagaaggtcatatct

SEQ ID NO: 244480 - DNA, 82 bp, Glycine max
ccactggtaaactaactttcaaatgtttgccttctcaagaatggccccgaggaagcttgcctcaaagaggtccatgaaagac

SEQ ID NO: 244481 - DNA, 425 bp, Glycine max
cggagaatgtgataatctataagtgccattctctccttgaacaacaacacttctcttgcaatggtatggaagacatttctaggatacatgagtttcatggagtctccggctaagaagcaaaaatgcaaggaagatgtgttccatgtgacattcgtgccaccttgaggcatctgacccgtcaaggtagtgatgttaaagaagcgcttatgggaggcaacccaggatttcttactttatctttttttttatttaattgcatgtatgtttttctgttatttcttaagattgttgtgttcaatatattttaatagtaatgtgtgcttgccttagctctatgaggttaagaaaactgtagaaatgtcttgcaagagtgaagtgataataagcgaccaaatgactgtacaagttgcctggctaggagtcca

SEQ ID NO: 244482 - DNA, 122 bp, Glycine max
  unsure (1)..(122): unsure at all n locations
tccacaagcaacagccttctagaggaatcttctggagggcccaagtgggcctggttgctatttgcaccaccatttttactaagtacacccnccctacctttttttttggtgattctttttcg

SEQ ID NO: 244483 - DNA, 288 bp, Glycine max
tgagttcactattgctaccccatagagcttcgcgaaatttattccggccatactcttccttgcgagccttcttggtctcttgttcaagggctcttgcggtaattgcattctcttcccgtaacccggcacactccttccgaatgtgtgtagcggccaacttgaacttctccttggcaagtatcgcctgtcctaactcgcttttgagagcttggacgttttcgcctcttccggagcttcaaactctcttcctgacgacttttacttggcagccatctaacctcgtatatg

SEQ ID NO: 244484 - DNA, 131 bp, Glycine max
ctctcctaaactgggaaagggaatcagcatcgttgaaaatattgtgtgccaagagtttggcagtggaagaatccaaatttgagaggccatgattaacagtaactgaaggtggttgagaaagggagttgggg

SEQ ID NO: 244485 - DNA, 288 bp, Glycine max
  unsure (1)..(288): unsure at all n locations
aaacgaagaaccagagagagccagagagagagagagaggagccganaggcgaagaaagacaagncgaaggagagaagagaagaagngagccagagagagggcgnngacnncagaanaaaagcggnnnaaaaaaaaaaanaaagaaaacgcacncgctttttttgcttggtgaattttataaacaaaaaagggggggatttgatttttattttaagagtggggcgttgactacattgaagataaagtaaaactcanaggcttatgtccggttttgatatcttggtcaat

SEQ ID NO: 244486 - DNA, 328 bp, Glycine max
acaaatttaagtaccaagtcaagcatttcacttgtcacaacatcaccggggatctaaaatcataaaagatagcaatgcgaagcctcattggaggctcctgactacttctcttcacttcaaaccttaaataagttgggaacagtgcaaacaggaccttccaggcagaagaagatattattcccaattgcaaaaaaagggttaacgtgaagagagaatacacatggtcaatgaaactccgagcagaaattttctcatataacaaaagatagacgcataataagcacaacaaactacgaacattggagatgtgaatggacatgtgcataat

SEQ ID NO: 244487 - DNA, 100 bp, Glycine max
acacctacctgaccgttgattggaccaatgctgttatgggaatgttgcacaatcctttaaagccttaatgatacattctgagaggttggttgtcatgtgg

SEQ ID NO: 244488 - DNA, 237 bp, Glycine max
tgcttgtgttattgcacaatatgcttccttaagagaacattttacccaagagtcactacgaggcaaagaagatattatgtcccgtcggcatggagtaccaaaaaatccatgcatgtcctattggttgcattatgtacagaaatgagtttgcgaaaatgcgtaactgccccacgtgcggggtatcacgctacaaagtcaatgaccgagaatgcattgatggtgcatccacaagtagta

SEQ ID NO: 244489 - DNA, 129 bp, Glycine max
ggcatcatcgctcaagaccctccaatgtctgtggtgcagtatgaaacacctgctaatggcatgacacaaaaatgtatagcttcaggtgatggagtaggaaatttaaaacctccttcaggaccactgctc

SEQ ID NO: 244490 - DNA, 390 bp, Glycine max
ttggttgaaaacatgcgaagaaataggaggccatcttaggcttttaatgtcaggtccatatgcccagccttccttgtcaacatattgagacttatctatggaccaacccgaagcccatttccacccaggaggaagtggaagctcaaagaaatcctttaaaatggtacaagtgaatgatgaaaacaatcataatgatggaatcttaagagagttaacaagtgataaaacagaaaatttataaatataccaaccttagatgagtatgagaagtcccttgtgctccaatgtccaggattatcattgtgcacagctcgccaattgttaccccaaccagatgatggctgataatactgattttaaagactctgctgtacagtgtagaactgttac

SEQ ID NO: 244491 - DNA, 102 bp, Glycine max
tatgagtcatgtggcttcttaagtctcaatccatacgtgtgcacttattatttttgcttctacaaccatgtctttatttttctccccctttattcttttgct

SEQ ID NO: 244492 - DNA, 277 bp, Glycine max
ccccacatataaaagaatttaattgtggtattttattatttttttttttttttgatattatatatttttttattgggaattttattttgttatttttatttttacaataatattattttgttttgtttgttattttatttattattatttttttaaatggtaattatttattatgatttcttttatatataattttttaatttattgtttttattaattttatttttattttgttctgtagaatttttattttttttttaaatattatttgtatttt

SEQ ID NO: 244493 - DNA, 283 bp, Glycine max
  unsure (1)..(283): unsure at all n locations
tgcaagcagtcaatgaggctatgcacaccgtangattctgatgatggatggcacccatactgacgtcggtatacttatcacttggaagatgacctctctaaaccatgctgacatgtagatgaataactatgatttgaactccaaaatgtgcatagctgtcatgctcccacaagtacgcatacgttgaacagttgctatactcaaagaggacatgcaagacgacatgcaccagagtgtgactgctattgtagaccatagccctcacatctagcgcatcaccaaa

SEQ ID NO: 244494 - DNA, 415 bp, Glycine max
tccctcttattactagctatgtggaattctttagttcctgaatgtacaaccttcaaattgttgctcgttcccctatttgtgttctgcaaaaaagaaaattaatctgaaacaattcaggctgaattgttatcgttattattactcgaaccataaggaataacagctaaacaagtaatttaaaatgtaacttttaaattctgtggtagttttctaattacaattttacttcaatatgtaattttgttaatctacttagggcgttgttttaatatcaatatgaatttaaaggtgatctactaataatataaagtacttgctaatcacagattatgatacctatcatcttaaatcttaactgaatcttataaatattaattgaattataataagacaattctttaacatgtgctacagt

SEQ ID NO: 244495 - DNA, 339 bp, Glycine max
acagaccacagaacagatagaaccatctaattccaacatctttggaagttcaaatcaccctgatgtagccttttcttaccaactcatagccaattcagaaacttctatggttgccaataacccatttcattcttctattatgtctacaaggcatcatgatgcttattagtcaaactcacgatcaatatccaatatcaacaacatcatcaacaccaaagaaacatcacatagttctcagaccccaagaagtcgctttatgaatgtgctattgcactttcagaaggaaatgaagtagaaggatcatatatgagaaacaatttccaacaaatagtctcaatt

SEQ ID NO: 244496 - DNA, 298 bp, Glycine max
taataaaaatatatttaataaaatgaattaatgcaactatctttattctaaataatcataatttacaatatatctttatggtttggtgcatgtcacctatcacacaatacaaagaacaaatcaaatgtcttaccccaaatttttatttaggtgtctcatggcttctttttcaatctagtgtagttgattcatcttcaagtttataaaagtctaagtcaatgtcgtggtttaattcagtctccatcgatgtaatgaagtggcgtgtcgactcactacaatggcgctacaatgatacaac

SEQ ID NO: 244497 - DNA, 393 bp, Glycine max
taactgcaaaccaggaaacatgctttgtccatgttctttaaccaagttacccttgggaccctctttggtaagttccatatccacaaaactaaggtacgcaaggtctccctcgaaatctttctattacatctttatctgtgcaggaatacaagttataaaaaccatgtccctcttgttccaaaacccaagtctacccttggtatgcaccctacaaaccaagcaccccttgctgctcattccacacacactgcaagtcaagctagctcatgataaacacctccctaactgctgcagctaaccatcatccaactactctacaactaaaaaaactccaaccaagacccacaagggtattacttatagttaacaacaaatatcattctttattaacta

SEQ ID NO: 244498 - DNA, 384 bp, Glycine max
atggctcaactggtggatcgtgtgagcaatcattggaaggcggttatagaaaggaaagaatatagaaacagtttgaggaagtgggtacgtttttttcacgtcacaattagttctctctgaattcttatgttttttcaattgttaacactatttatctccaaattctatgttggtgaattcaaggaatctattaacaaaaacacaatgaaaaaatatttgtctttatcttaaaatcagtctaactcagtccaatagagttattgtcacaatgagagatcatatatataactacataaaactctttgaaagactggattggagtatttaaaaaaacacttgtatgtaacgtgatccccgaaatgataaggtgttctattaaactgt

SEQ ID NO: 244499 - DNA, 341 bp, Glycine max
agactgcgaagacctactttcattcagatatgaagcaatatatctattaacataataacaaaagaaaaataactactaacagatagataaaatcactaactgatcatgcctaaagataaggactaaaacaactttatcctatcaggcaacatgactcttatttttcgtaaaaaatagcgtaaaaatttgatctactatagtttgttagacagttccaacagtcacatcttcaacactcctccttgactttggaatggcaaactccaagcttttgtctcaagtattcaaatccggcgtttggaattgcctttgttagaatagcaactctttgattctctatt

SEQ ID NO: 244500 - DNA, 407 bp, Glycine max
gccctcctgataattcgagaatcacttgaaattagtgaaaaaaattgtttccgtgaagaaaatccaagccgaggcgcttctgtaacgtttccgtgggtgattttgcgaagatattcaaccgttcttcaacgttctttgttcgttcttcgtcattcttcggtcttcaaccggtaagttcccgaaattgaacttgtcaattcattctatgtacctttagtggtcctcatttgttttcacgtgcttttattttcattgtatttactctccgtacctccttttgacgtgctttagtcacttacttaagtcattttcttgcctaatcaacaaataaaataaatttccaccgatcgcttgaattgtaacatccggtaatttctgttatatgaaatccgatcgtcagtcatgct

SEQ ID NO: 244501 - DNA, 276 bp, Glycine max
tttaagttgcacactcttgttggatgttagcaactttgcatgtgtgagctgatgggatacacaactgtcttcgatatttacgatgttgttgatgtcccgtgctgatttccatggtatacaactttgtactatgctaaatttagcatctgcttaaccatgctaaaatttcccatcgccattttgatgccggaaaataattgttagactttctattcggtcatgaaaacacctataacatttaaattaaatctcttgctataattctctcacaattga

SEQ ID NO: 244502 - DNA, 414 bp, Glycine max
  unsure (1)..(414): unsure at all n locations
tctcagctgaccgagttatctgtngcagagcttcaaatatctgtcttttgggtgccctgattcaaaagtctttattgtgggttgaagtggagaactctaatcacaggaaagggaagtatgtggaatgccangatcaactacgatatatatatatatatatatatctctattatatattatgtatattacatatgtatttatcctggacgctttgattaaccatcaacaactttgggccctgcgtaaatcatactccttctgcctctcttttgggccatactcctcagatatactcttaacacctaagctgcttatatcaaatggagacttttagtctgtagcctatttccagcgacaccaccattaaatctaatgtcttttacacacggccctctcaccctctctttacatctg

SEQ ID NO: 244503 - DNA, 457 bp, Glycine max
  unsure (1)..(457): unsure at all n locations
aactaagctgaagaggatgcttaatggggcaaagataagagaatgtgggagctttatatttgaaggaataaaagagggagagaagtggaaatttgaagtgtatctcataagactttcattcatcaaagttacgacaagtgttacacatgcttctatgtatagactatgtagcttccttgagaagctttcttaatgaaactgtcttgagaagcttctctaagaaaacttccttgagaagcttctttgagaaaactttcgtgagaagctagagtctagctacacacacccatcttaaaactaagctcacctcctcgatgaacttgcttgagaagctagagcctatcttcacacccctatgatagcttagctcactctcatgacanaataacatgtatatacatagataaattcgtactatataatctacttcaaatgccctgaaatacaatgcttatac

SEQ ID NO: 244504 - DNA, 177 bp, Glycine max
ctataaataagaggagaagtgaagaatatatggtgtttttttcacttcactctctgtcgacattgcggagggagattatgctcgtgaagaaaatacaatcccacgcacttgcctcacgatttcgtgagggattacgcgaagatactcgaacgttcttcaagatccaccgtgcgttct

SEQ ID NO: 244505 - DNA, 292 bp, Glycine max
  unsure (1)..(292): unsure at all n locations
tctcagctttccccatttctataagtggaggagatttgagtttgtttccnncaccctccggtaatcagaatccttaaattagaaaaaaaatggtttcggaaaactccaaccgagttcttctgaacgtttccggggtgatttcacgaagactttcaccgtcttcgacgtcttcatcgttcttgtcatcttcgtcttgactggtagttccctaattaactttcaattattttatgtcccttagggcccattgttttacggcttttttactttatttatttcgtcccctttgcgt

SEQ ID NO: 244506 - DNA, 387 bp, Glycine max
  unsure (1)..(387): unsure at all n locations
ntaggttgctcattaactcctgatcgctgcattgaaggactaatatctgnatggngaattgcagaagaacatataccacagactcttgcaacatgtgcagatgcatatntctaattcatggcaagctgaattactaggttgaccaatgcatcaagattttcctcaagctttttatgtacagcaaatgaagatgaatccgtggccacctcatggactcctctaaggacaataacataatttcttgcactgaattgttgggagttggaagccatctactcaatcaaattcctagcctcaacaagagtcatattaccaagggctccaccactagcagcatcaatcatactcattatcatgtcgctaagtcactcatagaaattttgcaga

SEQ ID NO: 244507 - DNA, 259 bp, Glycine max
aaaaatcttcagaaacaagtcacttgaagaattgtgactcttggaaatgtatttttcgaaatcagtcactggtaatcgattaccattaacgtataattgattgcacatcaacagatgtgactcttcattttatattttgaaaatcaaaacatttagatgctctggtaatcgattacaggtattgtgtatatcattacacacgttttaaatgatttaaaactgtttaaacataagttgttactgctgaaatttgaaatct

SEQ ID NO: 244508 - DNA, 243 bp, Glycine max
ttcctacatactcttgcttatcactaaacactgaaaaactatatatatttctctacttataaggaagtgacttcttaggtactttacatgccttccacatgtggatgttgtataaacctctaatctcatgattttctcaatgcgtgcatattctactctctttcaaaactatccaatcaccgaaatactcatgtaaggaggcatgtctcacttacgaatgattgttcacagcaggttaactgt

SEQ ID NO: 244509 - DNA, 312 bp, Glycine max
  unsure (1)..(312): unsure at all n locations
ggccaagaaaaccggccaaatntgagggaaggtatcgcgtgatgataatcgtggtaagacaagcaacaaccacagacaagtgtatcaacaagcagtaagtaaaaaccgctataaaaagagggagaatgaaactttaagaataagcacaatctatgtgtgtcgctgcttaacgtaagcgtcttatataattgtggcgagtcaatagaagttgggaataaaaggaaaagatgtgatctcatgatgaatgctctcctaaaacctaagttttgcatcttagaaaaaccatgaattgtttgtagcccaacctcatta

SEQ ID NO: 244510 - DNA, 292 bp, Glycine max
  unsure (1)..(292): unsure at all n locations
aaacagaataaccttccatatggatgtaagccacagcccacaaacacaccacactcgaactaacatccatatnagacacaaactgctccctacaagcacacatgaacttaaaccccaacaatgcaacacntgagcaaagcgtgatacggagatcaaactagctcttcggaacaagctttatgaacatataaacaggattgtgtagagagctcatcctacgaactctgactctacagtctaaccgaatgaagtgatgtctaacatacatatgcctgggtctatcatgatgaac

SEQ ID NO: 244511 - DNA, 372 bp, Glycine max
ctctcggtagatctttggaattgcttccttttagcagtaactaatgtatgtaaatcaccttcatgccatcgcttaactgcatatttaccttttcttgtcctcttgaaaacaatctttgcatcgcatatctctcttggtcttttctttttctatctttaggcaaactattcttatcaagtatcaattcacgcaaaactatctttcttttttctttaaaaccctcctttgagcaaacataatgcttccatattattatatcatgcttatctttggtttgagatgatttgcgcatactaaagcccatagcatgtgcattaccttgattaaattctaatccatctccaaagaatcaatacaatgccatgcatgttc

SEQ ID NO: 244512 - DNA, 280 bp, Glycine max
aagagaataactagaggtatatatagcccacagtagaggtgcaagtagcactagttctaacatctgatcctctatggaagagactctatatagcaaaaatataaactcagccaattaataagaaacaccacctccacattgtgtgaaccatccgcagccaccccttcgagaaatctcacaagaattgttcatgtattctggcacggttctcttcccaccacagtctaacatgcatctcaccaaacttttctcgactgcatcaaatatgagggaacaccaa

SEQ ID NO: 244513 - DNA, 456 bp, Glycine max
  unsure (1)..(456): unsure at all n locations
tcaacacccgccagcggccatagatgcatgggagatcctgaaaatcactcatgaaggaacctccaaagtgaagatgtccagattgcaactgttggctacaaaattcgaaaatctgaagatgaaggaggaagaatgtattcatgacttccacatgaacattcttgaaattgccaatgcttgcactgccttgggagagaagatgacagatgaaaagctggtgagaaagatcctcagatccttgcctaagagatttgacatgaaagtcactacaatagaggaggcccaagacattngcaacatgagagtagatgaactcattggttctcttcatacctttgagctaagactctcggatagggctgaatagaagagaaaaaatctggctctcatgtccaatgatgaacgagatgaaagtgagtatgacctgatactgatgaaggtccgactatgcactgt

SEQ ID NO: 244514 - DNA, 248 bp, Glycine max
tactcaaatgccttgaaatacaaggctaaaaccctatactaatagaatggccaaaatacaaggcctaaaagaaggagaaacctattctaatatttacaaagaagagtggatccaaccttgacccatgggctcaaaaatctaccctaaggttcatgagaacgctagggccttctttagtagctctagcccaaacctcttggagtcttctatccaatacccttggggggtaggattgcatcaactaactt

SEQ ID NO: 244515 - DNA, 417 bp, Glycine max
  unsure (1)..(417): unsure at all n locations
ccacatggntggagcattctcgcagaacattatgatctttactagtcttcctatgattctacttagtgagagtgacctgacgtatccattgtgtgatgtgtcttgttatgtactcctaagcgcctcagggtggtttttcactgacatggtaccacattgcatataggcttgagtattagcataattgttgcatacgctcgctaattgcttattatgaaattgatgtgttattatgtcttgatcggagtgtgtgattcttgtgtaatgtaattgatgattgaaaagtgtgatttatgattgaaaagtgaattttgaatgacaaagtggtggaattacgtgagttatgtttaagtaagtcttattttcgttatatgatatgtatatctaattgtcttgcttctttattagttaagaatg

SEQ ID NO: 244516 - DNA, 478 bp, Glycine max
  unsure (1)..(478): unsure at all n locations
gctgctcggtaaaatgcttctctgcctttgtttactcgtggatcttctcgaatattaggtctacaacttcacaagagaattttccatgatctgaccgttgggatctttgagaagatgtctggagtgtgctagaggcctcttaataaagcttctggaggaagcctcttaatgaagcttctagagaaaactacatgcagctgcctcggtaaaaacgcttcccatccttcgtaaactgttggatgttctcgaaatttggtttgcaacttctaaagacacttttccatgatctgaccgttgggatctttgagaagatgtctggcatgtgctataagctttcgttcccgagagcatntcttatttaagcacttcagccttttctttcgtgagcttacggaataagtatttcttcttcttcttttttcaagcctttttaagttcaagcacttttcataccacagcccatagcatacaacatatg

SEQ ID NO: 244517 - DNA, 469 bp, Glycine max
  unsure (1)..(469): unsure at all n locations
acacagatttgtataatgtanaacgaagaaagatgattgtgaaaatagcanaatgttacaatctgtcatatggttataatattgccatttgtattggtataacagtttaaaaaacaaatgtcaaacaaatgtaaaatacagctaacagtattagtgaaagttattgtaaaatgtagtgtcaaacttaaatatgcatccacaactgttatnttgaagtgtgcttatatgcttcctttgcactgaccatccttctcttaatcattctttanaagaaagcagagaaacaactactactagaacaaatatcaatatcacaaagagcaatgtttcaacatgatcaacaggaccacatggattagcatcatttcaaattgagttcactattacattaaagattataacaatacaaagntctccattgtagtggttagtatacacacctaaataagatcacaatctataccatatc

SEQ ID NO: 244518 - DNA, 406 bp, Glycine max
  unsure (1)..(406): unsure at all n locations
cactccatttttangatttttttctgacatctcaaacaaacaaatcaaacgtaacaagacaatcatagttgctgtttgaatacctcacccactcaagtgtatcacacaattatggcttttctctaatgaaacactacttgcctttaccactctaattccccttgagttcttacgcaattcaagagattatggccacaacaaagaacaattcaccaatatgtgtaaggtaaggctagagagacaaggaaaaggttaaccaagaaaaaggctaacaatgttgntaggcacaaatgaaggaaataaaattcataatttaggaattctagtaacaatccttcatgccaccaatatattaccttaaagagattgtttttctaaagttcttcaagcatgaaccattcagccc

SEQ ID NO: 244519 - DNA, 266 bp, Glycine max
atggcttaactggtggatcgtgtgagcaatcattggaaggtggttatagaaaggaaagaataaagatacacgttgaggaaatgggtagctctttttcacgtcacaattagctctctctgaattcttatgttacttcaatgcttaacaatatctatctcccaattcttatgctcgtgatattcaagtgaatctatctttaaaaaaaaccactgacaaatatatttgtctcttatcttaaacatcagttgtaacttcagtaccaataa

SEQ ID NO: 244520 - DNA, 417 bp, Glycine max
taaccacgtgaagcaccacaaatattccagctcctcttcatttttctgtactcaccaaccagcattgaatgttgaattaaaggccaatcaatactgcctctaaagtctctgcacagaaacagtcgcagagcaccactgaattagctgcatcatagtcatgactctattagccatgctgttaatcctcctacattattcctaatgtggtcgtgtaaatggcaaccttaataatgatatgacagcggagcggatagttgtcacattattaaacaacattattttaaaatagataaacaatttattgtacgtatctagacatagtctttcttcaatgtataaaattataacatctgacccgaaatactggcgaatgttacgtacaatagtcacttaatcttccgctaaacacatcattcg

SEQ ID NO: 244521 - DNA, 316 bp, Glycine max
tccaaatctagaacgatgggtgatcaagaggagacgcaggaacagatgaaagccgacatgtcggctctgaaagaacaaatggcctccatgatggaggccatgttaagtatgaagcagctcatagagaagaacacggccaccgctgccgctgtcagttcggctgccgaagcagacccgactctcttggcaactgcgcaccatcctccctcaaacatagtatgacgaggaagggacacactgtggcacgatggcagccctcacctgtgatacaaccgaagcggctacccttatggattgccgccaactactaccaccc

SEQ ID NO: 244522 - DNA, 490 bp, Glycine max
  unsure (1)..(490): unsure at all n locations
agaaactgctttgagaaactgtagtgagtttctatagcttagnnacacacccctctaataactaagctcacctccttgagaaggttccttgagaaacttccttgagaagcttccttgagaaacttccttgagaagcttccttgagaatattcctagagaagttagagcttatgtacacacacccctctaatagctaacttcacctccttgagatgagaagctagaagttagctatacacctcctataatagctaagttcactcccatgccaaaatacatgaaaatacaaaaacattcctactacaaagactactcanaatgccctaaaatacaaggctaagatcctatactaataaaatggccaacatacaaggcccanaagaaacaaanacctattctaatatttacaaagaagaatggacctagccttggcccatgtgctcataaatctgagaaacctagggccttcttagccactctagctcaatcc

SEQ ID NO: 244523 - DNA, 434 bp, Glycine max
  unsure (1)..(434): unsure at all n locations
agcaaggagaacccccaaagcagaatgtgttgcattatacatcanctcaaaaggggatgtccaatcaggtgcctgaataataagggtggtagtcaccgcacgcttgaggcaatcaaaagcctctatgcatcggtcatcaaaataatactccaaatccttttgcagcagattggatagtggaagggccaccctgctaaaatccttgataaagcgcctataaaaccctgcatgaccaagaaaagaacgaacctctcgaacgcaagaggggtaaagcaaatgagaaataacatttaactttgcagggactacctctatgcccctactggaaatgatatgctctaaaactataccttgttctaccatgaagtgacattattcacaaatcagcacaacgttaggttcaaagcatctattaagaactctatccaaaccat

SEQ ID NO: 244524 - DNA, 271 bp, Glycine max
acacaaggctactactgagcatagaaagggagtctgtaccataaacactatgggcaacacatcttcatagaagtacaactttccgacgtcaccttgcgctcagagctcacttagtagcatacaaattgaaaataacattcgaagcatatgacaaatggatttaagaagcgccgcaacatgcccttctgccggcgacaacgcaaggctcacaggtgcgctttccaaaggaggaaagatgcgcggagtcgccaccaacgtttatttgcggaaa

SEQ ID NO: 244525 - DNA, 252 bp, Glycine max
  unsure (1)..(252): unsure at all n locations
atcgtcataccatatgattcatggatatgatctaggcattctttctttctttacattttaagccactggccaaacaactgtcccaatgtatattattttaccattcgcanagccctttgagccaaacacttgatattttgttggaacactaacctatgataagagttcctaccttaccttaagattaagagagcacaggtgtttngatgggaaattctatcattcggcagctaatgtgatctaaatactcta

SEQ ID NO: 244526 - DNA, 408 bp, Glycine max
  unsure (1)..(408): unsure at all n locations
agaacttctaatctgcccctaggttcacttgaggctcatgcacgatgcccctcattgccccagtgtaaggctatgaggtaccaatcattgtctttcgtcatgaccttgtaagagggaacctattgggtgagaacttctaatctgcccttatgttcgcttgaggtttatgcatggtgcctttcattgcctcagtgtacggctatgaggtaaccatctgtgtcttgttttcatagcctcgcagtgaggaagaatgaaagatatagttgattctcgcacaaagaattattccaatgactatatatagttgaaggatctttttatggactaagtcaaatgactcttatgtataagcaatatgtctngatgttttgatgatgccaaatgatcaagcgctgccaagttctattc

SEQ ID NO: 244527 - DNA, 387 bp, Glycine max
  unsure (1)..(387): unsure at all n locations
attgaggtccatgacactaagcaccagtcatggcagctaagcgagattaattgcggcaatatgagcgctaagcgagtccctctccactaagtgcatgctcctctgtacttaagatgcatcattttagctaagttggctagagccttgcttagcgagagttgcagcttttctaatctacaaacctctctaagaagacgtaccctcgtgctaagctgagtttctgttaaaaaaaaactgattttgaatttgaaacgtcagctaagctcacgggtccgctaagcgagccttgttgagaaaccaaacgtctctcttgctcgcttagcacagcggtccgctaagcgatagtatcgaanaactacttaagtgagtgtacagcgggacactcat

SEQ ID NO: 244528 - DNA, 241 bp, Glycine max
caagtgcaatccatgccgaaaacacatccgagccacccactgactacgactccagacccaatctgttcctacaccggccataatctccaactccaaataaaaaaaaatcaacagcacaacatacagcaaaacgacaagcaaacttgcaacacaacaatacagttctataagaccagacaatctgtcaacgaacgggacactcaattacgggtcagcaaaccaattgacggaatcacaaaca

SEQ ID NO: 244529 - DNA, 275 bp, Glycine max
aataaaaacgaatatttcttatgcaagaaacaattcaaaagtcacttttccatatagacatattaaaaatccaatctataataccaatttcacattatacaaaaaacatcaataaagaaattacaaagaagaaaaaatcacctggcgaagattcagtgttctggtgagtccgcgcaaggtgataccaaacacacggaaaagaaaatctgaaatgttattactcaacaaaaactaacaccaaaaaaaagagcacaggctaactctgattcttctaa

SEQ ID NO: 244530 - DNA, 315 bp, Glycine max
gactgaaaggggaaaactgttctatctcagccggaccattaaaagaggttttattaaattaacaaaaataaagcttccacaacggcttgcataagttgccatatcctttatgtgacgatgatcttaaaaaaataaaaaagtactcaaggaatgtcactttcctcaatcttccctttcgcacaccgtacacgatggtcgggaagctcaagtccgaatgttacaccctatacaataccaaatggaattagatacatcacaaaccagaattcaccttaatcaacaactaagtaaaggaaaatcttgaattatctatat

SEQ ID NO: 244531 - DNA, 447 bp, Glycine max
  unsure (1)..(447): unsure at all n locations
aagcttaagaaaaagatggcctcagcaaattccttatgtccagatgggaattctttctatagacctccaatctttaatggagagggttaccactactggaaaacccgaatgcaaatntttatcgaggcaatagatctaaatatctgggaagccattgaaatacggccttatatacccaccacagtataaagagtttcaatagatggtagttcatcaagtgaaagcataaccatataataacctagagatatatggtcttgagaggatataaaaccagtacaatacaacctaaaagccaaaaacataataacatctgccctaagaatggatgaatatctcacacgttcaaatcgtaagagtgctactgaaatgtgtgacactcttcgattaacacatgaaggaactacatatgtttaaatatctaggattaatgcactaactcatgag

SEQ ID NO: 244532 - DNA, 475 bp, Glycine max
  unsure (1)..(475): unsure at all n locations
ctcttaatatttgaagagtatccttgtggaaccttcacccgatgaagacactgacaaaaacttatcttctccttcttggacaaagtatggcaggctgggggcaagtaaatattctttccatcagaccgtggatgcaaaccatcaatcttcttccactgngagcaatcagccggatgacgaaccattccatcagaaatccttccatttgcatgccatgtaaggtcttttgcatcgtcctcgttagcaaaaagacgcgtaaaccttggaatgattggaagataccacaaaacctttgctggggggcccttgttggagtnttcatcanaactactttcttcttatccttcactatgaccgngaagtncacagatagggcattggacattcttggaattatgcctgtacagatcaatcattgggcaagatgaatctttgatactcataccattgacaaaatcttttccctatagacttt

SEQ ID NO: 244533 - DNA, 388 bp, Glycine max
ggctgatgagcataatccacagactcttgcgacaggcacatatatctgatttaaggctagctgggtcaccaggtcaactaaggcatctagtttacctataagcttcttggtttcagctactgaagatgaattcgtggctacttcatgcactcctctaatgactatagcatcatttctggctctaaatcggtgggagtcggaagccatcttctcaattaaaattctggcttcagcaggggtcatgtctccaagggctccaccactggcagcatctatcatacttctatccatgttactaagtccatcatacaaatattggagaagaagctactctgtaattccgatggtgaggacaactggcacatagtattgtaaatctctcccagca

SEQ ID NO: 244534 - DNA, 360 bp, Glycine max
ctggtggatcgtgtgaccaatcattggaaggtggttatataaaggaaagaataaacaaacagtttgaggaagtgggtagctctttttcacgtaacaatgagttctctctgaaatcttatgtttcttcacattttaaaactattcatctccaaattcttatgtttgtgatatccaagtgaatctatttaaaaaaaaaacaaatgaacaatatatctggttcttatcttacaaatcagttctaacttcagtaccaataagagttaatttgttaacgaatgatgagatacagattacaaaccacattaaaaaacgctatatgagagagagctacgaattggaattatcgtaaaacataacaac

SEQ ID NO: 244535 - DNA, 372 bp, Glycine max
tgtctgatacaatactagatggaattccacgcaaccttactacctccttgatgacaactccccgacgtgctccagttcatacttcatatccacctgcataaaatgagcagatctggtgagtcaatccactatgacccacacagcagcctgcccactgctagtcatgcgtagactaaatacaaagaccatagagatgctctcccatatccatacctgaaacttcaatggctgcaattctcctgatggtcgctggagctcaacctgaccctatcgacatgccagacatcatgctacaaatgcagctacatctatcttcatgccatgccacccaaaactttcttcaatcctgtacatcttagcattccggaggaa

SEQ ID NO: 244536 - DNA, 414 bp, Glycine max
  unsure (1)..(414): unsure at all n locations
cacgacccgcatactaacatgtgaatatgccatcatncgtaacaagaacataacacaattcatgtatgcagatgacgtccatgggatatggcatggtacctatgatgtctcctggaatacagcagtatatgccaccaacgggaatggggatcgggatggggatgggcatggaaatgggaatgggaatgaacaaaccagtaatgccactcaccaacatgtcagctaagaccactntgccagcagcaaccgcagctggtcatttgggaccaaggcttcctatgcctcctttccatatgccccatgtagctgcacccgattcatccagaacgcaaggagcatatcacccagataataatatgctgaactcacttgtgacactagagccagatcaatcacgtatgccatacttcactg

SEQ ID NO: 244537 - DNA, 385 bp, Glycine max
  unsure (1)..(385): unsure at all n locations
gtngcatctntaggacagcctagagagtgatatgtccaagttccagagagtactgagagaatttgctgtgtgaagatatgcaaagatgagagctcggagcggaagtcgntctgagagcttgagatgagttcgtgagtgattgtgagatcctagatgtgaaggagacatcctcaccacttggatgtttgccatctttcatcttgtgcttctctgcgtagtcaaggagatatctggactatggaaagctaaatactgtgttggatcttccctgtatgtacctgatgtgaatatatttctatctatgtaatgacgttttgtgggttctttgtgctatctgcttgtcattccaatgtgcctatccttgatcacatacatgcatgccatg

SEQ ID NO: 244538 - DNA, 443 bp, Glycine max
  unsure (1)..(443): unsure at all n locations
aaagctattgtcgttttaattggctcagaggttcaacattcaatttcgagcgtctcgctatattacgggactcaatctaacatccgagtaaaaagttattgtcgtttgaattggctcaaggcttcaacattcaatattgaacgtctcgatatatgacgagactcaatcagacatccgcgtaaaaagttattgtcgtttgaattgtctcagaggttaaacattcaatntcgagcgtctcgatatgttacgggactcaatcagacatccgagtaaaaagctattgtcgtttgaatttgctcagagattcaacattcaatttcgagcgtctcgatatattatgggactcaatcagacattcgantaaaaagttattgtcgtttgaattggctcagagcttcaacattcacatttgagcgtctngatatattaccagactacatcat

SEQ ID NO: 244539 - DNA, 464 bp, Glycine max
  unsure (1)..(464): unsure at all n locations
aaggaaacaacaattaatgtatcagtatatcagcaactaatcatcatcagatacaaacaacaatcacacacactcaaattaaattgtaaaagataacctcatatcctttaaattcaaaacaaccctcgtatntttggatgacacaatatcggaataccacttcatcaaccactccaataacatctaaaacaaccacaaggtaaacgtatcttactttaaaagccataagcaagtcaatcaaaatcaatccacacattgcaaacaacgatcttatcaaccaagagtcccaatttaaaatgaccagcaatgacactggagaaatcaacaaaactgaatntcctataaggtaactggttcatatcacattgcctaagaacgagtactccagtcaaacatatattatattcatgatcacagactctgaattcccatcatcttgataccttataatatgcatacataag

SEQ ID NO: 244540 - DNA, 450 bp, Glycine max
aggaagcttctaatattatcaatcttagccttggccccctcaatccccctcactaaaattttatgtcccaacactatgccttcttagaccataaagtgacatttttcccaattaagcaccagattagactcttcacatctctgtaatactctttctaaattccatagacaacaatcaaaagatgagccaaaaacaaagaaatcatccatgagaacttcgatacatttctccaccatatcagaaaaaattgccatcatgcacctctgaaatgtagttgaagcattacaaagatcaaaaggcatacacctataagcgaacacaccaaacgggcaagtgaaagtggtcttctcctgatccttaggatccactatgacctgattataatcagagtatccatccataaaacagttaaatgctcgccctggcagtctttcaagcatctggtccatg

SEQ ID NO: 244541 - DNA, 405 bp, Glycine max
agtccttaccttacgacctgaagtggtacaacaaaccaccgagaaagtcaagttaatccaagaaaggatgaggactgcttatagtacgcaaaatagttatcatgataagaggaggaaagatctggaattcgaggttgatgatcatgtattcttgagagtcactctgtggactgtggttggtcgagtgttgaaatcccaaagactcacacctcgctttatcggtcctttccaaattcttataagagttggccctgtggcataccatattgcattacccccgtctctttctaatcttcacaatgtctctcatgtgtctcaactccgtaagtatatccgcgatccatcccatgtgatataaattggatgatgtacaagtgaaggagaattcgcatatgaaacattgcc

SEQ ID NO: 244542 - DNA, 312 bp, Glycine max
cgcccccctcgcccagtattatgaccagcctgtgaggcgcccaccttcggagacctccagttaatacccacgggggaagagcgcgaagaaatcctaggatgccctccgggaggaaggaaaccatacctcttctcgggaatctacccccctttagctagcaatcctaagatagtcaaaacctcgacacaggaattagaccgcggaaagcaaatcgaaaataaggtgcgccgggtaccgaggaaaagttcggaagtaaaaagaagactcccggcaggtcaaggagaatgggccccgatcatggacatcctgaca

SEQ ID NO: 244543 - DNA, 341 bp, Glycine max
  unsure (1)..(341): unsure at all n locations
catcctcagactgatggccatatttaacggaccatncagacgntggagagacctttaagagcatgtgtcttatagcagacaggaagctgggaggggttccttccattgatagagttcacttataacaacagctttcattccaccattggcatggctccctatgaagctttgtatggtagaaagtgtagaacacccctatgttggttagaacctgaagaaggcctcaccttaagaccagaagtggtacaacaaaccactgagaaagttaagctaattcacgaaaggatgagaactgctcacagtaggcagaaaagttatcatgataagacgaggaaagaact

SEQ ID NO: 244544 - DNA, 304 bp, Glycine max
agcttgccaaaaagggaaactatgtttaaagttcttttaaagccaaaaatgttgtttccacttctaggccctgagagcttctacaccttgacttgtttggaccaaccagaactgcatctctttctggacacaaatattgtctggtcatagtggacgattacaccagatggacatgggtcaattttctaacctagaaggatgagtattttgataccttttataaattacgtaaaaatattgaaaatgaaaaaataatttgtatcttttcaatcagaagtgatcacgagggagagtttggaaatga

SEQ ID NO: 244545 - DNA, 409 bp, Glycine max
gttgatggtgacccggtgttgagagaaacgatgatatgttctacgtgggagtacgtgagctcagatggaggtgggcaacaggggatgatgggtttatgcgcgcattgtggatgtggaaaacttgttgtgcaccatcgcccgactgccacctagtaccacatgtgatgggtaccccataatcctacaagcttgagatgaggaagtgttgaagggtgaaacttcctgcttttattgttgaccacagagtggtacctggagatatgtcgcgggggtcaggagaccttggggacatcaggtggggtgctattgcccaaaaccaagcttgaccaatcccgacccaccccgggcatattcggtcagtgagaacctgtgatgtacctaaacaggcgatgctctggctgtcaacaga

SEQ ID NO: 244546 - DNA, 303 bp, Glycine max
agcttgaaaggttaaattattattttgaagtctgttctttcttaatggttttaaattttaatatattttacatttctagcatctaaaagcgacgttatcctcaccttcctctgccttatcacctgcagtctgctcagggccgtaaggggaaaaaaatcactaacgatgtcacaatacactatcatataaaagtttagtttttaaaattatagcagttataatgctgatatatgttacaaaacattggggactgtgaatatccaattttatttgcctgcatacagttttatgtgaaaaaagtat

SEQ ID NO: 244547 - DNA, 470 bp, Glycine max
  unsure (1)..(470): unsure at all n locations
tatatagaagatncgnncntaatttctctacaatggcatttcctctcttgagcnggngaagaagaatgtggcatttacctgtggtgaaaaacaagagcaagcctttgctttgctaaaagataagcttactaaggcacctgttctagctcttcttgacttttctaaaacttttgagctagaatgtgatgcctctggagtgggagttggagctgtattgttacaaggtgggcatcctattacttattttagtgaaaaacttcataatgccaccctaaactaccttatctatgataaatagttttatgtcttaataagagccctccaaacttgggaacattaccttgtntccaaagaatttgtcattcatagtgatcatcaatcacttaagtacattaaagggcaaagcatgttaaacaagaggcatgcataatgggtagattacctagagcaattttcatatgttatcaaat

SEQ ID NO: 244548 - DNA, 305 bp, Glycine max
agcttcaagaaaaagatggttttttcaaattccttatttccagaagggaattctatcaatagacctccaatctttaatggagagggttaccactactggaaaacccgaatgcaaatttttatcgaggcaatagatctaaatatctgggaagccattgaaatagggccttatatacccaccacagtagaaagagtttcaatagatggtagttcatcaagtgaaagcataaccatagaaaaacctagagatagatggtctgaagaggatagaaaacgagtacaatacaacctaaaagccaaaaacat

SEQ ID NO: 244549 - DNA, 415 bp, Glycine max
  unsure (1)..(415): unsure at all n locations
ctaagcttatatgttttcgttttgggggaaaagattggatcgcttaaaaggaacataaaaaaaaaagcgtataatgcttatcaaaaactacaaatgaataatatataaaaaaaagtatttgataagatggttcaaacattcaaacaaaaaatatatcaaaagagatttgataatatgttaacatgccttaccattgaaatgcatgatggccattcttattttggtccaaatcgaggtgacttatttcgcaagctactgcaaccctaccttttcgacacacaactacatatttagggttgctggggagtgataactttggtcttcatgacccanatggtattataacactatgcattacttaccaacatagtcatttacaatgttattcgtaatgtcaaaataaatggcacaaaaa

SEQ ID NO: 244550 - DNA, 330 bp, Glycine max
atcctatcagtacacccgcaggcctgccctcggtgagatgataccgggaattatactaaagggtgcgaaggtgaacccttggttaccagagccccagggggtcccttggtgaactatgctttacataggggatgtccttcctctggaggctatatgcttgcctcagacgaactttgttcttgcattatagcttccataaaaactataataagagaactaatcctgtgctataagaacggttttaaataccatgctatcccggagtaacctagggttccctgaccggtttgggggtcgatgaacaggagctgctgaccgtaggggccataa

SEQ ID NO: 244551 - DNA, 466 bp, Glycine max
  unsure (1)..(466): unsure at all n locations
aagctgtcagcncccagccgactaaattgctgggctgtcttttgttatangcagggntgacacattttttttttacaggcaaagtcaacgtgtcaggtgagtggagtccctgcatttgacaatttttccattttctgaccgttggagaacacattgaagacaaaggttacatttgtcttttactgcaggcgagtgcatcacacgcacattactcttgcatatgtgtcacatcaagagtgggcacatactggagatgtggtgtgtgggttaatggggctgcatcgtggtgcgaactttcggggagtcatttcagctcccgctagttaccgaagagttaggcctctccttanatgaagtgtacgtttgattttaatcactgccactntgaattatgctatctctctcttaaacttccttaccttctactcgcgatttgcgattntcctttctcccctgatgttcttct

SEQ ID NO: 244552 - DNA, 298 bp, Glycine max
tgattagcttggtgattttttttatgaactcttcgctatggaagattgtgaacatttacaagccatgtttggaagtttccaaactattttaaatgaattacattgtcttaacacaaattttgataactatgataatattgacaaaattctaaaaactctgtccagaaagtggagaccgcatataacaactttgagaactgtgaagaacttgcactccatgtccattgaaaaactgattggaaccttaaaggttcatgagtattaactttaacaagataaaggattctaaaaggggaaa

SEQ ID NO: 244553 - DNA, 300 bp, Glycine max
agcttctagcccatggttattattttaactttccacgccgatggatgctcgagtcccgtcacagaacaagacgctcaaaataaaaagctgtttttaagaaccaattcggacgacaatatctttttactaacatgggctacagaagtccctaaaataatgacactcttctaaatgaaagtggaagctctaaaccaatacagacggagaaaccgctttacactgatgtgggaatggggcccggaacataatctatacgcttaattttaatgtgaaagatctccacggaaacgaacgaaatta

SEQ ID NO: 244554 - DNA, 377 bp, Glycine max
  unsure (1)..(377): unsure at all n locations
cganagccacaatgaaggattatgttttcttcttgacagctcgaacatacaaaatatgcgtgaccagacaatcatagctgtggaatgaatacctcacccagtcaagtgtatcacacaattatggcttttctgtaatgaaacactcttgcacttttaccactctaataacccttgagttcttatgcaattcaagagattatggccacaacaaagaacaattcgccaatatgtgtgatgttatgctagagagacacggaagaggttaacctagagtaatgctctcaatgtttctatgcacactatgaaagaaataaaattcagatttgttgactatcggtgacattccttcatgcaaccaatatattaccttctataga

SEQ ID NO: 244555 - DNA, 302 bp, Glycine max
tgcttgttaatcacggtttattaatatgaattcgtggctacttcatgcactcctctaatgacactaaattgctgggagtttgaagccatcttctcaattaaatttctggctttagcaagggtcatgtctccaagggctccaccactggcagcatctatcacacttctctccatgttagtgagtccttcataaaaatattggaggagaagctgctcaaaaatctggtggtaagggcaactggcacatagtttcttaaatctctctcagtattcatataagctctctccactgagttgactaat

SEQ ID NO: 244556 - DNA, 441 bp, Glycine max
  unsure (1)..(441): unsure at all n locations
tatcatagaagaatcttgtccctcgacgatggcctctattttctcatttcgngcttgatcatggcttaactggtggatcgtgtgagcaatcattggaaggtggttatagaaaggaaagaataaagaaacagtttgaggaagtgggtagttttttttcacgtaacaattagttctctctgaattcttatgttttttcaatttttaaaattatttatctccaaattcttatgtttgtgatattcaagtgaatctatttaaaaaaaaaacaaatgaaaaatatatttgtttcttatcttaaaaatcagttttaacttcagtaccaataagagttaatttgtttacgaatgaagagatacagatntaaaaacaataaaaaaaaagctatatgagagagagctaggaatcggaagttattgtaaaataaaaacaacttgggatgtg

SEQ ID NO: 244557 - DNA, 305 bp, Glycine max
agcttcttagtctcggtttatgatttatgaattcgtggctacttgcatgcactcctctaatgacactaaattgctgggagtatgaagccatcttctcaattaaatttctggctttagcaagggtcatgtctccaagggctccaccactggcagcatctatcacacttctctccatgttagtgagtccttcataaaaatattggaggagaagctgctcaaaaatctggtggtaagggcaactggcacatagtttcttaaatctctctcagtattcatataagctctctccactgagtcgtctaatg

SEQ ID NO: 244558 - DNA, 263 bp, Glycine max
  unsure (1)..(263): unsure at all n locations
gcgcttgatcatggctgaactggtggatcgtgtgaacaatcattggtaagtggttattgaaaggaaagaattaagaaacagtttgaggaagtgggtaattctttttcacgtaacaattaagactctctgaattcttatgattcttcaatctttaaaatgatttatctccaaattcttatgtntgtgatattcaagtgaatctatttaaaaaaaaaacaaatgacaaatatatttgtttcttatcataaaaatcagttttaact

SEQ ID NO: 244559 - DNA, 306 bp, Glycine max
tgcttcttagtctcggttgttatatatgaattcgcggctacttcatgcactcctctaatgacactaaattgctgggagtttgaagccatcttctcaattaaatttctggctttagcaagggtcatgtctccaagggctccaccactggcagcatctatcacacttctctccatgttagtgagtccttcataaaaatattggaggagaagctgctcaaaaatttggtggtaagggcaactggcacatagtttcttaaatctctctcagtattcatataagctctctccactgagttgtctaatgctt

SEQ ID NO: 244560 - DNA, 410 bp, Glycine max
  unsure (1)..(410): unsure at all n locations
tagaagaaatctttccctagacgatggcctctactacttcattncgngcttgatcatggcttaactggtggatcgtgtgagcaatcattggaaggtggttatagaaaggaaagaataaagaaacagtttgaggaagtgggtagttttttttcacgtaacaattagttctctctgaattcttatgttttttcaatttttaaaattatttatctccaaattcttatgtgtgtgatattcaagtgaatctatttaaaaaaaaaacaaatgaaaaatatatntgcttcttatcttaaaaatcagttttaacttcagtaccaataagagttaatttgttaacgaatgaagagatacagattaataaacaaaaaaaaaaaagctcttggagagagatctttgaattggaagttatt

SEQ ID NO: 244561 - DNA, 296 bp, Glycine max
agcttgtccttggtttattttttattggtacatgatttgggacttgtaggattcaatttgggaaaaattggatgagggaaagagtggttttcaaaatctgcactttatgcacaactttgttgttgaaatgtgcaccacaattttgcataagtgcagaaaaatgctatgtattttctgattgcggaaagagtaatacagaatgagttctggatgtttgctagtaaatcccaatggtcaaaatatagacttatgtactagagacttccagtaaaattttcgagtcgatccaacggtta

SEQ ID NO: 244562 - DNA, 456 bp, Glycine max
  unsure (1)..(456): unsure at all n locations
cgcttatatttanactntaactntaaaacagtgtttaagtattatacaaaaaggtaaaataaaatacaagtcaacactagncgattttggtgctgcacgcaagacaagtcatgaccacatggtggaaagttgaacactcaaactgccatattaagtcacgcactgtcattttggttgaaaaatcagaacttttttctctttacgtaccgccctggaatcagtacgtacagctgtaaacatagacgtttcaattttcaatattcaacagtcaacaaacatattgatgctaactgtttatgcatgtcgtcccatgaaatattcatcaactntnttatgttttatttcagtcaaaaaatactaatatttttggatgtatattatatttatgttaattcttataattcagcattnnttatctcgtctttntggaaaaatatatcnttttttacttcttat

SEQ ID NO: 244563 - DNA, 295 bp, Glycine max
agctagtccttattattttattttgagctaggcccgaaaacaaagccttgttgataagcaaagcaactggaggatgtctgactatatagagggctggagaaaggaagactgcagtggaattgaaagctatttgctattaatccgcttacaatagacataatcctctaagttgaaaatatatctagaaagcatagtacagaagctcatctacccatgcataataataaataagaaatacccatgctccacaatatgtattcaaacataaggttggaagtgcataccaagggttcac

SEQ ID NO: 244564 - DNA, 465 bp, Glycine max
  unsure (1)..(465): unsure at all n locations
tcttatccaaagctcatctagagggagaagatccttcttctatggctaataccttaatggatggcgcgtcctctcacctattttcctttgtcttccgctgcatctccatggtggaaaatcaccattaaaggacctcattgaagctcaaagatccagcctccattgaagccccacaagcaagcttccatcatatggtgctaacgatcggttaagattaaactttacaaaagaaaggagagtaccaatgatagaagaaagagatgaatatgcacaaaacatcaacggggacccctaaggatgcatagatcgtatccaaatccttaaaacaaanactaaccggatgacgaatgaataataccaactgaagaacgatgtagaagacgattacggtcgcgattcggtagcgcctcagccttgtttactcttcttctctcttatgtctccaattccttcactttggaccat

SEQ ID NO: 244565 - DNA, 298 bp, Glycine max
agcttggtgtgatttaaacatggatttaacttaagacttgcaattgtaacttacctcttcatctcttttatgttaaagttgttgacattgtgcatggcacaataaacaaggaaataattgctgcctgctcgtacaaagatgctgcttccaaggattctgtagaagaacttgtgatgtccccagcacaaactgctagacatgaatttttagcatgctaaaaattgtcctaccccaccccagcaactgcaagatttaagttctattggaacagtaaatacagggctgaaaactgtaaata

SEQ ID NO: 244566 - DNA, 474 bp, Glycine max
  unsure (1)..(474): unsure at all n locations
tggttgaagagggtatcggctacctagaaggatgagtgaatggaatatgtagtctacgacatgatcatgctgtcaactgtctatatgcattggttgcgagacttgcttgtcagtatcctatgattttggccaatgactatcaatggccttgttcttccagaagctatggttggcccaaccttgcatgatgtggcagccatcttgaacttgccaatatatggcgaggagctgccaccgctttacaaaacatgttgttccaccactgccaacacttttagcataaaatttaccaaagatgactttgtgttggatcaagtggcctcagaataattaagaaagggggttgaattaattattcctaaacctttactaattaaaaatntactcttctaaggctnttacttatgttgtaagagaataaggagtagaagataaacttaaccaatagtaaaagcggaaattaatatgcacagt

SEQ ID NO: 244567 - DNA, 304 bp, Glycine max
agcttaaagtatgcccgagtttttcttccctatgagatgttgttgaagtattggcgatcagaattgccatttcttggattatagggttgaaccaagctcatgcttttacaaaaaggttcatcaagtcaagttgaaatatggaagtaaccgtcttgcaaaattggggcaaaagatgaatcgagtcacatcactgcttcgtctactgccaaacatatttaggattattgatgtccttgttacttccagtttcaccttgacaaagatgtcatggagcatgttgaaaatctaaattgattcaaccccc

SEQ ID NO: 244568 - DNA, 391 bp, Glycine max
  unsure (1)..(391): unsure at all n locations
atcaaaaatcngctcctgtcgccaaactctgtggtttatgctcctctggcgaccacaacacatacctttgcccttctgtgcagcaatctgaagcaattgaacagcctgaagcttatgctacaaacatctacaatagacctcctcaacctcagtagcaaaatcagccacaacagaacaattatgacctctccagcaataggtacaatctcgggtggaggattcatcccaaccttaaatggtcgaatccttcacaacaacagcagcaacaacaaaaacaaccttatttttagaatgctgctggcccaagcagaccatacattcctccacaaatccagcaacaacaacaacaacaaccccagatacaacaaacagttgaggctcctccgcaacc

SEQ ID NO: 244569 - DNA, 305 bp, Glycine max
agctttgcagatttggtcttcgtttttgaaaggatcaatgtgggtccgaaaagaggcaaatttgatcatcctactaggacgactgagaaaactggggcaaataaagagggtgaggatgagggagaaacccatgctgtgactgccattcctgtacggccaagtttcccaccaacccaacaatatctttactcagccaataacaaactttctccttacccaccacccagttatccacaaaggtcatccctaaatctaccacaaagtctgtctaccgcacttccaatgacgaacaccacctttagcac

SEQ ID NO: 244570 - DNA, 460 bp, Glycine max
  unsure (1)..(460): unsure at all n locations
tgcgactggatntgngcatctatntcgactgtcctatgctgtctctacatacacaaaatagccccaccatcccaattntgcaaaatcatattcattcatcattggggaatttcaccgagcacttggtgagcgcatgtttgaacataaattgcaagaggatggggacaatgtggcatgccccattgcttcagaatacaacctaggcctaaggccttctcatccaaatcctcaacccaagaaaacaaggatcaaagcaaaccaaaactgcctcacagatataagcatgttctcacaatttagagtaccaaaagatgaagaaaacacatcaatgggaagcgaanaacatcaaggatggaatacttacttgttggagtgaatgataacaccaaatatgaaagcaaaatgcaaccaaaagtggcttgatggggcaagaaccgcaagccttcgtgttctttctttc

SEQ ID NO: 244571 - DNA, 305 bp, Glycine max
agcttaagtcatgtgcaagatttattttgtattgcattcctatctcaaattttataatttacaggtttgctcacttggggcacaaggatgttgtctgtgtgaggaaagctctacatctcgaacaaaatgagttacgaggtcttccacttgagagtccaaaaagcaaagcctttacgtgaaaaccagggtataggtggtggtagaggtggtggtggccggcatcattttggtggaagggatggaagtggctataccaccagattggcctggggacaaactggaggtggagcgtggcattctcttca

SEQ ID NO: 244572 - DNA, 411 bp, Glycine max
  unsure (1)..(411): unsure at all n locations
attgaacatagaaccgagatcagccagctttctttctcccaccnactanggaanatatatcgtatatgtggccatacccttacaagctggaactgtttccatgatatgaacctgtgaccttccggctcacaatgcagcatcctgacctgattgttgtgccaagaatcaccctcatagaactatgattaaacatttattccttcatttcacccatgtagtgtgcaagagtttctattctgacagcaatattatcttgccattatatttacaaagaaggtacatgtaaatttgttacttctacatacacacacacgcaatgttcctccggtttatagattccacttgacttccttcatacatacgtgctgcaagctttctatcattgtttacttctatgatgcattcctttcc

SEQ ID NO: 244573 - DNA, 334 bp, Glycine max
ctctaccgggatccttaagtcacctgcagctgcaagcttcatgctgtcaatggttttaatagttcacgcaacggaatgcgctcgtgtggtgacccataaaggatcgtagaccacaaacaccggatacaggagcatattggcgatacatgagcagatgtgttaccaggctaacccacgcgtataatctacctcactgcttcttatgctcacgagatgaatttaaggatactggatgcaatcctgttatgacaatagcgtgacttgtggcactgaacagatgggagtagaaatccatcttcataaataaaagctctgctcactcaggggtcttgtg

SEQ ID NO: 244574 - DNA, 363 bp, Glycine max
  unsure (1)..(363): unsure at all n locations
agatgctcgcaaatggcaccctttctcctttaatgcnagatatggcctgtcgggtgggtctgtggatcgagctcctctgcgggcgcccatacaggcctttgtccttacatgcatcgacgtggagcgttcgagcatccagaagctcatgctgcactatctgacaatatatctcctcaacctctgtagcaaaatcatccacagcatatctgtgattgtgataccaatgacagtatgtcgtaccggatgtcacgacgatcatgcttcatagcatgctatatatatttgactgtgtgaactgattacccaagtgagttactctggagaattgtgaacacattccggtgcaacgtcacctacatatgg

SEQ ID NO: 244575 - DNA, 297 bp, Glycine max
agcttaagccatggacttcttaacaatacttctgcttattacctttgtgagtgaaaccattcttatcttcatccctaaattattcaaccatactccagaatctaccaaccttccacccgggccaccatttttctatcataggaaacattttggaaattgccacaaatccgcacaaagcagcaacctaactttctagaatttatggacctcttatgactttaaacttagcagcataactaccataataatctcctctcctcaagtaggtaaacaagtattgcatgaaaatggccaaat

SEQ ID NO: 244576 - DNA, 458 bp, Glycine max
  unsure (1)..(458): unsure at all n locations
gagacgaccttggggagtcgagaatactatattatttatttggacaagtttaaatatgatgtagaagaaaatcaatgtgagcctttttcccctttgaaagacttgtttaaaaaaaatgttttaaaaatatttttaattaatatttgaatttttttttattccttattagtatgtatgtgaggggtagagggtgtcacatgaagcatcgatttcttggacattcaccaggcaggcaggcactatgcactatgtgttggtctctttctgcagaagcagagcttcgaggccaaatttctgctttgtcctttattttgggatcttgagatttagaaagactgatactganaagattaaacattcaacagggcatgagggaggactgggacactagatgccccatagatgataaaactgatagagggtttgctctttgttcctacanaagtccatcgagtagt

SEQ ID NO: 244577 - DNA, 302 bp, Glycine max
agctttaagttacaatgttttattcaggcttagcaccactacctgcgctaagtgcacttccaatgacttcaaaacaaaatgatgttggcgcttaacgcatcctttcccattaagcccagcttgaaagcttaacttacagaatgaatctggggcttagtgcagctaaaataaattttcacaaagaggaagtggtgcttagcgcattatccacgctaagcccactacttaaggtgaaacttacagtgaagatgttgggctgagcacaatgatgtgtgcttagctgaaccattcagccaatcaat

SEQ ID NO: 244578 - DNA, 465 bp, Glycine max
  unsure (1)..(465): unsure at all n locations
actggatgcgtaggtcaactaggtttcccatctggccnngaatcanaaatctgtacctgtcgcaagggtttgtggtctgtgctcctctactgaccaccatacagacctttgcccttccatgcagcaacctggagcaattgagcagcctgaagctcatgctgcaaatatttacaatagacctcctcaacctcagcagcaaaatcaaccacaacagaacaattatgacctttccagcaatagatacaaccctggatagaggaatcaccctaacctcagatggtccagccctcagcaacaacaacagcagcctgctccttccttccaaaatgctgctggcccaagcagaccatacattcctccaccaatccaacaatagcaacaaccccagaaacagncaacagttgatgcccctccacaaccttccctcgaagaacttgtgaggcanatgactatgcagaacatgcc

SEQ ID NO: 244579 - DNA, 328 bp, Glycine max
  unsure (1)..(328): unsure at all n locations
ccccggatctctaagcacctgcagcatgcaagcttttagtctcgttttttttatgaattcgnggctacttcatgcactcctctaatgacactaaattgctgggagtttgaagccatcttctcaattaaatttctggctttagcaagggtcatgtctccaagggctccaccactggcagcatctatcacacttctctccatgttagtgagcccttcataaaaatattggaggagaagctgctcaaaaatctggtggtaagggcaactggcacatagtttcttaaatctctctcagtatttatataagctctctccactgagttgtctaa

SEQ ID NO: 244580 - DNA, 453 bp, Glycine max
  unsure (1)..(453): unsure at all n locations
tatcatagaagaaatctttccctcgacgatggccactattttctcatnncgngctngatcatggcttaactggtggatcgtgtgagcaatcattggaaggtggttatagaaaggaaagaataaagaaacagtttgaggaagtgggtagttttttttcacgtaacaattagttctctctgaattcttatgttttttcaatttttaaaattatttatctccaaattcttatgtttgtgatattcaagtgaatctatttaaaaaaaaaacaaatgaaaaatatatttgtttcttatcttaaaaatcaggtttaacttcagtaccaataagagttaatttgttaacgaatgaagagatacagattaaaaaacaacaaatacaaagctatatgagagagagctaggaattggaagttattgttaaaataatacaactcgtgatgtgaaggatgatacc

SEQ ID NO: 244581 - DNA, 306 bp, Glycine max
agcttcttagtctcggttgtttaagatgaattcgtggctacttcatgcactcctctaatgacactaaattgctgggagtttgaagccatcttctcaattaaatttctggctttagcaagggtcatgtctccaagggctccaccactggcagcatctatcacacttctctccatgttagtgagtccttcataaaaatattggaggagaagctgctcaaaaatctggtggtaagggcaactggcacatagtttcttaaatctctctcagtattcatataagctctctccactgagttgtctaatgctt

SEQ ID NO: 244582 - DNA, 477 bp, Glycine max
  unsure (1)..(477): unsure at all n locations
tatcatagaagaatctnttccctcgacgatggcctctacttcctcatttcgggcttgatcatggcttaactggtggatcgtgtgagcaatcattggaaggtggttatagaaaggaaagaataaagaaacagtttgaggaagtgggtagttttttttcacgtaacaattagttctctctgaattcttatgttttttcaatttttaaaattatttatctccaaattcttatgtttgtgatattcaagtgaatctatttaaaaaaaaaacaaatgaaaaatatatttgtttcttatcttaaaaatcagttttaacttcagtaccaataagagttaatttgttaacgaatgaagagatacagataaaaaaacaaaaaaaataaagctataggagagagagctaggaattggaagttattgtaaaaaanaaacaacttgngatgtgaaaggatgatacccaagaaaatgaataaagtgatgt

SEQ ID NO: 244583 - DNA, 295 bp, Glycine max
agcttacatcaagtttttttcttagcacaggagcttcaagtaggagctccttaatcctccattaattttttttgctttaccttctcttccattgttgatacttcattaattctacatgtatctccccatatgtattgcgctaaatactcttaactggattctttatagggtccaccgattaaactggctataaaagctacatttgattttctatggctcaaatttcttgatcttgttcttgaaccatgaattgcgttgagtctaggctcctttgagttttggcttgatatttttt

SEQ ID NO: 244584 - DNA, 403 bp, Glycine max
  unsure (1)..(403): unsure at all n locations
tggtcatgcaaatgtcanaatcaagaattgtttcatatcttcattgngaagaaaatataagcaacttaaagacaataatttggtgggcacaatgatccaacactttatactcaagatacagctatgagttggaatttatttggatgaattacataattntggactagagaactaattaagatccattttcaattttcacacttatttttcatttaataagtttagatgcagtattccttatatatatatatatatatatatatatatatatatatatatcgaaaagaaagttaaatataaacttggctcctataaaatttctaatttctggttttaatccctatatttctaatctcttgtttattttttggcatcaacatcaatttcagggaaatgataattt

SEQ ID NO: 244585 - DNA, 300 bp, Glycine max
agcttgcgtccgaataatgttttctttaaagcattaaatgtgtgcattaaatgcacatacttcttaatgttgagaaatcactctttgtcattgacatgttgaacactatagcaggaaaccacttcctttttttgttcgagaaagtctgtacaacatacctcttctttttaggaattttagatcttaacttcctttattcttcattcgattatgtcgatcctagtataatgtctatgaaaaatacatcttaaacacaaagtattaaataaagtcttaaatatcatctctaatgcgatatta

SEQ ID NO: 244586 - DNA, 386 bp, Glycine max
  unsure (1)..(386): unsure at all n locations
tcttgcgtagccgctcttggtgctcagaatatcccatattcaatccctcttattactagctattttgaattctttagttcctgaatgtacaaccttcaaattgttgctcgttcccctctttcttttctgcaaaaaagaaaatcaaatgctgtgaaaacatggatgaagtcctaagaaaatcaatatcaaagaaaacatggatgaaatcacaattaaaaagcacaaccacctatctttcagagtcctttggttaatttgtcttgtctccttatgtggtggggttttgtntaataatattatacttttgccttccaaaaaaaacttatgactgatcctctttccattaatccaattttgtatgttattgtataaaagatcatgggttc

SEQ ID NO: 244587 - DNA, 301 bp, Glycine max
agcttgtagaatggctagacatgattcatgtcagggtttggtttggttcaaggataaaaagggatgccccacattatttccatgacacaaatgcaaaaatgacgatttggaaattttatgcaaaactggttatgcatgcacctatgcggacactcaagtgtcaaatttttatggtcatgtgatgctagggctcaggattcattttctctattttagtcaacccaacgtttccaaaatatgttcttttatcaatttgtgcattcatccgagtccattttgggcgtctgggaaaatcttcaca

SEQ ID NO: 244588 - DNA, 477 bp, Glycine max
  unsure (1)..(477): unsure at all n locations
ntagcttcttaagggaagtttctcaaagaagcttctcaaggaagttntcttaagaaagcttctcaaggaagttacctagtctataaataaaagcatgtgtaacacttgttataactttgatgaatgagagtcttgtaagacacaactcaaagttcaacttctctccctttttcttccttcaatttcgtgctccctcctctctttcttttagcaaatgctcacccccccctctaaaatttaattggattgggcttctcccaattcaattaaatttattttcaaccacacacatcaaatattcacttaatgcatgccaaattagaaaactacccctaatacaaaaaactagtctaggtgccctataatacaagagatgaaaaatcttacatttctagggtaccttaactatattgtggagccctaaatacaatgcccataaataatgaaaccttaatctaatatgtacaaagataagcg

SEQ ID NO: 244589 - DNA, 283 bp, Glycine max
  unsure (1)..(283): unsure at all n locations
ttttatccacacgggcgcaccanncgctgcaattgaatcgttccatctgcgcacgcccccaatcggtagaacggatataacagatgacttgcgagaccccccctttcaggagaagatgagttaaacacaagctcaccaccataggaagccctggataaaagcctgaaggaggagaaaatgaggggggggataaggagaaaaggacgccccaaatttcgttcctatatgagggctgaaccttgaattataattttccaatgatcgaacgtgtaaaaatgccccc

SEQ ID NO: 244590 - DNA, 306 bp, Glycine max
agcttgagctttgaattgagtatcatttgttggatcgagtggcctcagaataattatgaaggggggggttgaattaattattcctaaacctttactaattaaaaatttactcttctaaggcttttactatgttgttaagagaataaggagtagaagagaaacttaaccaaaagtaaaagcggaaattaaaatgcacagcggaaagtaaaagagtagggaagaaggagacaaacacacaagagtttttatactggttcggcaacaacccgtgcctacatccagtccccaagcaacctgcggtccttg

SEQ ID NO: 244591 - DNA, 477 bp, Glycine max
cttttgacaaaggaagaagaagaagaaattcaagatgtgttttgagactcaaggggttgaaaggattgaaatcaatgtattcaaaatgtatgttaaaatgcaagttaaggtttgcttttatagactcttcatgtctgatcaagaaaaccattagaagagttatagctgatcaaggccatacccgaatcaaataaacattaaaaatgcaatatctaggaagtgatcctagattgtctcccaacgagcaatggtcaaccaaacgttcataacagatagtaggaaaatagtaacgaattgtggggcgggagggttgtttgcttttgtaaattaaatagcaaatagatgtgaattagaaaatatcataattaaaacacgttgcttccccttgattcacaagtaagtctcttatcctatgttacgaaaagttatcctttatcagttcaaccgcttaatccaaccctaaattaaattactaag

SEQ ID NO: 244592 - DNA, 304 bp, Glycine max
agcttcatacagtcatttatattgcttcaaaggcaagaatggggaagaaggatgttacttgagaccatttttttaaaaaaaattattagcttctatataagttgacggcaaggctcaattatgattttttttgggagacttgtggattttttttaaaattcctagttgaaattttttacatcgaatgctatacatatatatgatatgtttccacctatttcttgttgtgtctttcatttttacgttttggtgcgatttatgactaaaattagcttaatgattcacaatttgattcatgatttgt

SEQ ID NO: 244593 - DNA, 477 bp, Glycine max
  unsure (1)..(477): unsure at all n locations
ntacaaatggatagtaagaaccataaatacctagccccacctgttggttacaaaatatttataaagtataaaccgtacctatttaaagcctatgaagagagagagtcacacagttttcccatcacaaggtcatgttaaaactcaacatgaaaagatacattccctaagttgatttgtgctctcttttaaactgactactaaattgagagggacttttaaattactgaactattcttcaattaacattaataaaggatccttgtttcctttgtaacaaggtcctcttgctgctccggttcttcaacacctgacaaaagcagatttaagcaagatgtactttgggggtttccaagtgttggacatcaatggtgtgcagtgctttctcacacggacagggtatgttttcatgttgtttgctttctgtaacattagcaattcaacttgtaaagttggtctgagatgtagtaatgttacctg

SEQ ID NO: 244594 - DNA, 308 bp, Glycine max
agcttgtaagccttggatcttgttctttaatggagtcctttgcttcttgaagattaatggtagcggaatggagatggaagaatactgattggaaatgccacttcaaggagaagatgagtcaagaagaagctcaccaccataggaagccatggataacagcttgaaggtaggagaaaataataggagggagagggagagaaggaacacaaaattttgtgcctcaaaacaggtctgaactttgaagtgtaattctcaaatgagtcaaagttgaaaaatgcacacacatgacctctatttatagcctaagt

SEQ ID NO: 244595 - DNA, 382 bp, Glycine max
tctaagcttgaacattacttgtccacatgaactgtcattgtgctggctgtccactcaacaaatactttgacacctactgtcgtgatttaccaatgctgtatgggaatgttgtgacatcctttataaccttattgatcattctgagagtgggttgtatgtggccatattatgtccttctttatcataagccatcatccatgtttcttgaaatggatcaatccatgttgcttggctggactcattgacgaatattctaaatttgataataatgtcttgctagagtgaggctgcataaataagtttgaatacaattttagtcctctgaaagtttattaacgaaccatcaatccaaatcataccctatttcttaacatttcttttg

SEQ ID NO: 244596 - DNA, 298 bp, Glycine max
agctgtagtgctcttattttttaaacaatattggacattcccataatgtattccctgacattttctttaccttgataattcatggaaatcaagttctgaaggagagtacttgtttttgcctcatcgctttttgcaaagcccttttcaatttcaacaaggaattttttggcactagttatataatctgaaacagtgcccctaaagacctcatgaatgtcatgcttaatgatcataagactcatgcaatttgagtgaactcacctctcatgaagtttcctctggtcagaagtactggaat

SEQ ID NO: 244597 - DNA, 470 bp, Glycine max
  unsure (1)..(470): unsure at all n locations
cttgaaaatgaggggntctccatgtactcactcatgtcatttctcaccatagctcccttagagccataatattcttgttgcacgactaattgcttctacagcttcgtgttgtcccacaattctcttatgcagtgtttcctccaatttcattagtctttcagctcccacctgtgaaacattctcagcaggcattcatgttctcataaagatgatatggcgcatgtctgaagttgtgataatacctttcataggtgaattctgcatttgggttagctgaactcttgaaccagcttcatcaattacatctattgccttatcaagatgaaagacatcactatatcacatttagatgccatcacatccaacagagtgattaatgcattacttactanaatcaattcaattccgagttgcgtaagacaaggaaatgaccttatgtactattttgacaaactagtngttgcaactaa

SEQ ID NO: 244598 - DNA, 300 bp, Glycine max
agcttgtaggcattggatattctttatcaatggagtcatttgcttcttgatgttcattggcagcagaatggagaaggaagaaagatgattggagacaccacttcaaggagaagatgagtcaaacacaagctcaccaccataggaagccatggataagagcttgaaggaggagaaaatgaggggaggtataaggagagaaggagcacgaaattttgtatctcaaatgaggtctgaactttgaattataattttcaaatgatcaaagttgaaaaaatgcacacacctggcctctatttatag

SEQ ID NO: 244599 - DNA, 436 bp, Glycine max
ggcgcctggatgagagagacctgtcgcgatgcgcatatcatggtcttgaaagaggagatagctgcttgctcagggtccaaaagaaactagactcagcgttcatgcgagacagataacaacatgttagccattgtcagcaagtgccaagaagaactaaatctagccatggcccatgagcataaagtggcgggcaagtatgcccaagtgtacgcggaaaatgaggctagaggaagggtgatcgactcgttacatcaagatgcaacaatgtggatggacgcgattgctcttaccttgaactggagtcaagaacttccccgattgctagccaatgccgaagcaatggtggacacctactgcgcccccgaggagatccacagacttatcagctatctgtagcatatgatagactttatggcccatataattagatactgct

SEQ ID NO: 244600 - DNA, 303 bp, Glycine max
atctttacaacaccccttttttatccattccaaaactagaatcatggctgagatagaggacgtgcaagagcaaatgaaggccgatatggaggccataaaggatcaaatgacctccatgatggaggccatgttaagaatgaagcggatgatgaaaagcaatgtcgccgtaattgccgccaccagtgctgccgctgaggcgaatttgacccacccatccgccataaaccaagcaaaccaaccaatcccaaacatagtaggtcagggaggggaggtgttaggtagcatgggcggtccacacacggg

SEQ ID NO: 244601 - DNA, 444 bp, Glycine max
  unsure (1)..(444): unsure at all n locations
ntanaggtggatagtatgcagagactttgctcatctttgtaacctcttctcaagaaaattgtgagctacttttgctttccttgtattaaatcctgcataatagtagactgtataccctctgtttgagcaattcttcgcaaaagcagtggcatgaaagtattatgtaatgacatttagttacagtctgtagtttaaaattgttattacaaaaagaaaggaaaagataacgtgtaaggccccgccgaaacatgcagtaaaatgaactatgctcttattgagaacccgcatgtttacttacagcctctgtaatggttttgttagagatgatagttcaatataatgtgttgctttcatttagaagtaacctatgtgtggctgaatcaatataaataaaacctgttaatcaagacatacaatgtataataaggttattctgttgatcct

SEQ ID NO: 244602 - DNA, 303 bp, Glycine max
agctttgataagtgaaattttttttttccatctccctaagagtcctctcacgaggtggaggttgagccatgttctccgtatgaaaattatcagtctaatgctcaaaatcaaaatgttcataatcaccatcaacaaaatactcagagtgctcaaaatgctcaaaatgcacagaatgatcaggatgcacactatgcctaagtaatctatgaaaggttctatctattccaggatcaaaggtttgtaaatcacctggattgcccctattcatgtactatatgtagcaaatcatgtgtttctcaaaca

SEQ ID NO: 244603 - DNA, 457 bp, Glycine max
  unsure (1)..(457): unsure at all n locations
tgtgatggctttcttctaactctatgagagagcttgcctgttcccctaagnaaatcaatgagtaagacaaatatattgcacattacatgccaaccatcaaagaataaaatagataactagtagaagcagatatttcttttctcttttcctatgtccttttgagacagagcaatggaatataaatgttaaaagtgaaaattctgtctaaaacaacaaaattatatacatctccatcaattgcaaccaaataaggcaaaaatatgtataaaagagtctcgaaagatgaagagaacaaacagacaagtgaatcaacctaactatataagaactggacaggtgagaaaataccaaaagcaatatattacactactagtaaacccatgggagtaaatattgtatgagttgcgatacgaatcgtactatacattacgagtctcatggtaggcgattcaagctg

SEQ ID NO: 244604 - DNA, 305 bp, Glycine max
agctttatatagactttagttctttgatctgttaagagatcttagttagccattgtctaatagcttgagcactttacacgaggcacgttactgtgcagagaaagagtgtgacgaccacaaacattttctatagcaaatcttcaaagaagtacaacttgtcagagtcgctaatgcaatccttcctcccaagggcattggatagaagactccaagaagattgggctagagatgcaacagaaggccctagggttctcataagccttagggtagattttggacccatgggctaagtatgagctcactta

SEQ ID NO: 244605 - DNA, 476 bp, Glycine max
  unsure (1)..(476): unsure at all n locations
nnttgatctgcanaattgcataccatatgttttcatgtttgctcatccttgcgttttcctctacaaaacaaaaacaaaaaagggggaagcgtgaaacttcacactacattcttagtttcatgtgttaggcaccacgagccaaccatgttgggatcataaacccgtttcacttaaaaaacaaaataattgaacatggtacctaatgcatggttaactaggaaatggtgtttcttcgggcatctcaatttcataattactttttccgtgcataagcttaaagtatgcccgagtcattcatccctatgagatgttgttgaagtattggcgatcagaattgccattccttgaattatatggttgaaccaagctcacgctcttacaaaaaggttcatcaagtcaagttgaaatatggaagtaacccgcttgcataattggtgcaaaagatgaatcgagtcacatcactgcttcgtctactg

SEQ ID NO: 244606 - DNA, 296 bp, Glycine max
  unsure (1)..(296): unsure at all n locations
agcttcttantctctgctgtttaagatgaattcgtggctacttcatgcactcctctaatgacactaaattgctgggagtatgaagccatcttatcaattaaatttctggctttagcaagggtcatgtctccaagggctccaccactggcagcatctatcacacttctctccatgttagtgagtccttcataaaaatattggaggagaagctgctcaaaaatctggtggtaagggcaactggcacatagtttcttaaatctctctcagtattcatataagctctctccactgagttg

SEQ ID NO: 244607 - DNA, 334 bp, Glycine max
tatcatagaagaatctgttccctcgacgatggcctctattacctcattacgggcttgatcatggcttaactggtggatcgtgtgagcaatcattggaaggtggttattgaaaggaaagaataaagaaacagtttgaggaagtgggtagatatttttcacgtaacaattagttctctctgaattcttatgtattttcaattcttaaaattattcatctccaaattcttatgtttgtgatattcaagtgaatctatcttaaacaaaaacaaatgaaatatatatttgcttcttatcttaaaaatcagttttaacttcagtaccaataagagttata

SEQ ID NO: 244608 - DNA, 300 bp, Glycine max
agcttttgccaccattttttttcttggccatcggggaccgcaaagaaatcaactatgtcaaggttcagaaaaaaaaaaagtctttgtcaattttctttaacttttaacactcaattctattttcttacgaaaatagtcaacaaaacttgataaattaaaaatacaaaatattgttatttttaagaactaaagatgatattcagtgaataagttttgaacgaaaaatgttcaacatcaatcaattgttttaattacggaaatttgaagtaagaaaatgaccaaaaaaattaatcgcaacaa

SEQ ID NO: 244609 - DNA, 308 bp, Glycine max
  unsure (1)..(308): unsure at all n locations
cgcctaccnnaagcgagggtagaagaaattgcatttattgtaacnggaatatacaaagacgcataattcggtgccttaacacttgacacgatcacaggaattaatacatgttgtgattactactactccgtccactacttatgtgatggaccattaagagatactgactgttctctggatctttattggatacaatggatcacttgctactatgtgttacgccgactgataattgaacatttaagttatatgctgatgaatcaagctcaaaaatatgtaaaattcacgaattgtattactggtggttt

SEQ ID NO: 244610 - DNA, 300 bp, Glycine max
agcttcaaaagattgttgatcttcctctccccatttaaaattgtccttcttggtaagctcagttagcggtctcgcaactttcccataatcttttatgaatcttctatagtaccctgtgaggcccaagaatcctctaacccccttgacattcttaggctgtggccacttaatcacactggccactttactagggtctacagcaactccctcttctgttattaaatgccccaaatactctactgccgtacaatcaaagtgaaatctctctcaatattcatataagctctctccactgagttg

SEQ ID NO: 244611 - DNA, 474 bp, Glycine max
  unsure (1)..(474): unsure at all n locations
taaaggcaatgaaagggatagcatgggcataaatgtgtctgcattgataggtaaatatgttccttacattcctgagaaatgtaaggacccaggtactttttgtataccttgcattattgtgaacagtaaatttgagaatgccatgctagatctaggagcatcagttagtgtcatgcctctgtccatgaaatttggtgatattgttgttcattttaacattcttgatgccatgaaacatccatctgaggatcattctgtttttcgtgctgagatacttgatcagattgttgatgattatatgtttgattttgattctcttcatggtaggaaacatccattnttatatgatttgcatacttgttattcctcatgcaatgaatctgaatctgagtntgaatttgatcttgtatctngattttatgctgatagtaaatttgagtctggntctgattntctgggtgttgtacctcttga

SEQ ID NO: 244612 - DNA, 301 bp, Glycine max
agcttgaaatgaggaagtgttttttggtgagacttcctgcttttattcgttgaccacagagtggtacctggagatatgtcgcgggggtcaggagaccttggggacgtcaggtggggtgctattgcccaaaaccaagcttgaccaatcccgacccaacccgggcatagtcaatcagtgagaacctgtgatgtacctaaacaggcgagctcctggcagtcaaccgataaaaggaacaaagaccacaaagcaaggaggcttgtgtggtggctggccagctgtgaaactttgattgatatatggg

SEQ ID NO: 244613 - DNA, 489 bp, Glycine max
  unsure (1)..(489): unsure at all n locations
cggacctataaatctcagcttccaatcatagatcaatccaggtagatgttgcatatatggttttccgttactngtactattcaattccaatgcaacccattcttttatatcctgttcatgagtagggaaacttaagctttttgtattttctttaaataaagatctagtggtagagaccccaactagtggttatgtgttaacttctaatgtgtgtttgaattatcctgtggaaatttctggtagaacattcttgattgatctgatttgtttgcctttgagccaaattgatgttatcctgcgtatggattggttatcttccaaccatgtcttgttaaactgttttgataaaactatggtgtntgatgattctggagtgagtaaggatatgatgtttatctctgccaaccaagttatgacatctttaacagaagatgctcaagtgtacatgatcttgtctaacctagaaatagagacaggtttccatgtgtg

SEQ ID NO: 244614 - DNA, 306 bp, Glycine max
agcttctattctgaatttctttcgtctctatatactatgggacacaatcagaaatacgagtaaaaagttattgtcgtttcattttgctcacagcttatgttctgaatgtcgagcatcttgatatactacgggacacaatcagacatccgagtaaaaagttattgtcgtttgattttgctcaaagcttcaattctgaatttcaagcatctcgttatattacgggattcatttggacatccgagtaaaaagttattgtcatttgatttagctcagagcttcggttatgaatttcgagcttctcgatac

SEQ ID NO: 244615 - DNA, 467 bp, Glycine max
  unsure (1)..(467): unsure at all n locations
ttgagcanaatcaaatgataatatctttgtactcgtatgttcgatttgtgtcccgannatatcgagacgctcgaaatttcaaaccagagcctcttaaaaaaatcaaccgacattaactttttactcggtggtccaatggtggcccgtagtatatcgagatgctggaaattcagaatagaggctctgagcaaaatcaaacgatattaacttttttctcggatgtccgattgtgtcccgtagtatatcgagacgctcgaaattcagaacagatggtctgagcaaaatcaatcgacaataactttttcctcggctgtccgattgtctcccgttgtatatcgagacgctcgatattcagaatagaagctctgagcaaaatctaacgacaataaacttttactccgatgtgcgattgtgtccgtagtatatcgagatgcttgatattcataatagaagctgtgagcaaaatc

SEQ ID NO: 244616 - DNA, 308 bp, Glycine max
agcttgtcgatgaactatgatttttttgatatttttgagtttatgggtgatgacattgataagacagttacagtgaaaaatggaggtgagttgagcaagggtcactactagcacaacaattcaatggatggatctttgactatattgtttatggcggactccacaatggcaataatggaaaatgtgaagaatgttgtggcccccaataagctcgtagagcttgctctttattatcctaaggcattatttaattttgatttccttcaaatatctaaatgtattaattctttgttcttaataatggaaaa

SEQ ID NO: 244617 - DNA, 478 bp, Glycine max
cttggactgatcctcatgaccaaatccatgtacaggagagtgcttagatagttgcaaagcttgtgagtttcaggacaggaggcaacatgtcaaaggagatgtttgagctgaactttgtgcttccatctgacaataggccatggttgatgggctggaatcacttgacaaacttgcttaatttgtaatggatttatgtttgtaaagtaccattaaaatcttgtacatgctcattattttggcgcttttctctattcaaaattattgttttggactattttttttccccataagctaatccaattcattggattcccattaggcaaatttccccagatggtgcacttttaaaaactaattccccaaatgggggtagtttgaaagaatttacccaaggggactgtttttcacgtaccatgcatgcagtacgaagcaaaccgccattgccaatggcgggttcactgcggagagcacatgtggg

SEQ ID NO: 244618 - DNA, 306 bp, Glycine max
  unsure (1)..(306): unsure at all n locations
agcttggcgggaggctngtttttttttttcagaatatcgntcgctccaaaggctacaatatcaaagaaatcttcgagagcaacttttgtatccgtgctaactaaaagagggagtttccttggaggctccagaacttccttttctgtacagaaaaacttttgatatccaaccttgttaattacagcttaaataatatttcatgcacaaaatagggaaaattttgagtccctcaccttcagcttttctcacacgaagaagtcatgtcatattgnttattggtaaataattaatatacatatgattcat

SEQ ID NO: 244619 - DNA, 420 bp, Glycine max
  unsure (1)..(420): unsure at all n locations
nttgcttgaccttcattnntggattggatgactcagctttcttcaccttcaccaccaccagntggagttcaatcaacttcattccatctcactcagttctatgtacttgtcctcatacccataattcagcctctcccataattcagtattgagttttatgtctatatgggcaagaagcatatgcactcctacactcgtcaacaattaaacaatgtatattatagttgttggaaataatagtaaatgtcctgaggaaatagtatattcatgtatctcatgttaagatgcacttagtcccccatccgcagttgtctaaagttaacactagcaatcaagttttatatttaaacgtgatatgcacatgagcatgttattgttattgtttttatatgagcacatanaattgtgtattaatctaat

SEQ ID NO: 244620 - DNA, 336 bp, Glycine max
  unsure (1)..(336): unsure at all n locations
ctgatgatattcccgactcgagctggaagcctgcaagtgtttggtcgttcagtttttttctcanaaaataccactagttctctatttgttaagccagttgctcgaaatggttctcccccttggcgagatgatgacaaagatgggcattacatgtttgcgctaggagaaaatctaacttctcgctgtaatgacacttttaccatcattaagaaatttacattcatatatatcatcatggttataattttagagctgtaatcatttgcttgcaaaacacacaattcggattcacatgcatcctcacacccttaacttttaaatgtacgcttaatattt

SEQ ID NO: 244621 - DNA, 468 bp, Glycine max
  unsure (1)..(468): unsure at all n locations
tattgttactagaaactaaacatgacgtgtggtgtttattttttgggacaactttattttgaagatacacaataataggcagattgagagtgtgaatattattatgttatgaatgagattgagacaaatagaatactttcttatgaattgactatctttatccaatagtccaattttatgattagttatgaattgattcttagtattttgaatataacatgaagaataagaatgaagaatgatttgtgtacctattgaatccttaattttgagagtgaggatgaagaatgaagaatgggagaaatggaaatataaaactgcattcacatgacaataattcattgtaaacattactaggtcacactaactaacatcattaatagaaactcacttagtaacaaccttaaataaacaatacaacatcaattcattttaaacaatcacctaanaatacttacttaaagatac

SEQ ID NO: 244622 - DNA, 295 bp, Glycine max
  unsure (1)..(295): unsure at all n locations
agcttgtgaccanccgctgttgtatatgaagcaccgaggcccacatgaagcggtgttttaacgccacgtagaagggggcatactgcgagaacacgcttataaatgcatgcgcctctgacgagcttcaaccattggcgttcagcgttgagatgaacttgcttacttcgattccggatgcaagcgaactaatatatatgtgggtggagatcaaatacaaataaattgcagggtaagggatctgattcacaagcgttcatgagaaacacttgaactttgtaactcgcttatggacatg

SEQ ID NO: 244623 - DNA, 415 bp, Glycine max
  unsure (1)..(415): unsure at all n locations
tgataccctccattcntttgccatgaagatggctaattgtgtgttttctaaagctcaagcacggcaatactgtgtgaccatgtggtgaaacctatgaggtgtgacatatcattgattatggaatgacacatcatcatgcacttcatggagggtgggaatatgccacaccaggctttataagacatgatcctagcctacgatgaatatttgaggtttgagtctggcctatagcctatcaaacgatgtgattctggctcggcctgacatttttgaaagcctatccgggcttgatagcctttatacaggggcacatgagtcacacctaaatgtgaattagtgtcttactggattatacaaatggaagttctagagcagtaatgtgttatcagagaccgctagtgtttagaaaaatatt

SEQ ID NO: 244624 - DNA, 306 bp, Glycine max
agcttgcatgatttacatctttttctttctcaagcaaattcttcttgatatcatcaaaagcttcatgatttacagattatggtgaatcaagtgataatgaatcaaaaaaataagtttcttcctcaagaatggatgcaactgttctatcttgcagaagtttccttctcctctcgaccctgttccttctcaatgtagctttaatttctaagtccagaggaactaaattgcctgtgggagatctatgcatataaaatactaacaaacacaacgattatccaattcaataagagaagataaatatgattt

SEQ ID NO: 244625 - DNA, 313 bp, Glycine max
  unsure (1)..(313): unsure at all n locations
tctaccactctgatgtgcaaagcatttccttggtcatattacaatnttcactgaagtgattctagtctttggcattgtgatccataaactcttgggcgcaattatgagagatactcaaagttgcattcgctataagcaaaaccaggcggaaaaccaaggtagatctaaagtatattaaacaaggaaaggacaaacccctctaaaaatatgtcactaggtttaacaaggaagctagggaaatctttggcatcctcccgggcatcatccttatgttggaaaaaatagagtaaggaaggctattgttcatatctca

SEQ ID NO: 244626 - DNA, 294 bp, Glycine max
ctgtcttgataggaaacactttctttttttgtgaacaacggatccatttggaaaaataaaacctaatgtggaggtctcaactgtctgactgcttgtctctgccaagaatgccatagttttttttgtaagagttgggttacaattgaaacttgtgatttttttacaatgttcagttgtgtcatatatatagatgagttttaatatcagtgttgcattttataaagattaaaaatacccatgcgcatgctttctgtatgagttgcaaactacaccaatgacgtgacatgctttagc

SEQ ID NO: 244627 - DNA, 469 bp, Glycine max
ctcagcttctatggaggggacatgaatgaatagaaactcactctttttaagagatcccaagttatggaagtatgaaactatacagttgattatgaatgaaaggaattaattagtactacctattccaacaagatgaatcttctttttatatgccatctattaaaaactccacaatttagtgtgctggcttggagcaaatatgagatgtgtgaccctttgaaaagattttatcatagagggtggttgagaccacacacccctctacatcttgtggtggtgttgggggaggataatcaactatcctacaagtagtcaagcattgcacctctaatctgcttcttagacactaatatatagaatgtcttgtgtgacaccctttatcccgacatacatatttatattatatcatacatgacaatgtagaattaattaaagagaatttattcaataaacataaaagatgtcacgt

SEQ ID NO: 244628 - DNA, 306 bp, Glycine max
agcttcttagtctcggctgtttaagatgaattcgtggctacttcatgcactcctctaatgacactaaattgctgggagtttgaagccatcttctcaattaaatttctggctttagcaagggtcatgtctccaagggctccaccactggcagcatctatcacacttctctccatgttagtgagtccttcataaaaatattggaggagaagctgctcaaaaatctggtggtaagggcaactggcacatagtttcttaaatctctctcagtattcatataagctctctccactgagttgtctaatgctt

SEQ ID NO: 244629 - DNA, 453 bp, Glycine max
  unsure (1)..(453): unsure at all n locations
tatatagaagaatcttntccctcgacgatggccactaccacctcatttcgtgcttgatcatggcttaactggtggatcgtgtgagcaatcattggaaggtggttatagaaaggaaagaataaagaaacagtttgaggaagtgggtagttttttttcacgtaacaattagttctctctgaattcttatgttttttcaatttttaaaattatttatctccaaattcttatgtttgtgatattcaagtgaatctatttaaaaaaaaaacaaatgaaaaatatatttgtttcttatcttaaaaatcagttttaacttcagtaccaataagagttaatttgttaacgaatgaagagatacagataaaataacaaaaaaaaaaaagctataggagagagagctaggaattggaagttattgtaaaaaataaacaacttgggatgtgaaaggatgatacc

SEQ ID NO: 244630 - DNA, 298 bp, Glycine max
  unsure (1)..(298): unsure at all n locations
agcttcttagtctcggctgtttaatatgaattcgnggctacttcatgcactcctctaatgacactaaattgctgggagtttgaagccatcttctcaattaaatttctggctttagcaagggtcatgtctccaagggctccaccactggcagcatctatcacacttctctccatgttagtgagtccttcataaaaatattggaggagaagctgctcaaaaatctggtggtaagggcaactggcacatagtttcttaaatctctctcagtattcatataagctctctccactgagttgtc

SEQ ID NO: 244631 - DNA, 454 bp, Glycine max
  unsure (1)..(454): unsure at all n locations
tatcatagaagaatcttttccctcgacgatggcctctattctctcatttcgngcttgatcatggcttaactggtggatcgtgtgagcaatcattggaaggtggttatagaaaggaaagaataaagaaacagtttgaggaagtgggtagttttttttcacgtaacaattagttctctctgaattcttatgttttttcaatttttaaaattatttatctccaaattcttatgtttgtgatattcaagtgaatctatttaaaaaaaaaacaaatgaaaaatatatttgtttcttatcttaaaaatcagttttaacttcagtaccaataagagttaatttgttaacgaatgaagagatacagataaaaaaacaaaaaaaaaaaagctataggagagagagctaggaattggaagttattgtaaaaaaaaaacaacttgggatgtgaaaggatgatacc

SEQ ID NO: 244632 - DNA, 319 bp, Glycine max
ccgggatcctctaagtcacctgagctgcaacttacggccgattattttttgataagcacgttgagcctcattctttaatatccccataaaagaaggaaactaacaaaaatcaatcaacaatgtattagacaacatacttaaaaccaattgacattaagtgaagttgtctaatagatatataagctatactccaaggattgaggcagccgttgtgggacttgggtattttccaatacacccccttcacgcccatcacttattgggcttggtgcgtgaacaacaaatggtgggtgttcgtcatagcggaagcgaatgcgag

SEQ ID NO: 244633 - DNA, 376 bp, Glycine max
  unsure (1)..(376): unsure at all n locations
tctagagagnnctacactactcagattctccaggacgttctatanaatnctacacttttctagaaagctctagaattttctaaaccctctccaattaaggaggaatcccaccaaatttcccctcccgaacttattggggggtgtttaccaaactgacacttacaacaatcttcaaactctttttgggggaatactcttggcataatatgtgagaaaatctctggtgtgtgaaaactgtcaagatatactttctttttcctcaagacatctctgatcccatgataccctatgtcaatgtgcgtttgtcaccatgcaacgatagcctctcttcttgaatggctcttcttcaccaccaattcatatagtgtattctcat

SEQ ID NO: 244634 - DNA, 317 bp, Glycine max
  unsure (1)..(317): unsure at all n locations
acacctgaggcatgcaagcttgatcagtaagcngtttggctttgtttgaaaagccacaacgagagtgctttttcaagaattcaaccaaattcacagtcgaatggggataaaattaacaaagcccaaacttggccaggttgatgtatatcttttactacgaaatgatataaattttctacgacaagctagttacttattttatatgcatgtattgataacgatgctagtttttttaagaacatcttgggttatattattgacaaatatatcataatactcctatatattttgatatttttaattaaaatcgagaaatt

SEQ ID NO: 244635 - DNA, 109 bp, Glycine max
tggagatgtatttccccctgctttatttgacatcatgagtcacttgatggtgtatctgtgcatagaataaaaaatgttgtggtcctatttatttacaggggatgtaccc

SEQ ID NO: 244636 - DNA, 301 bp, Glycine max
agctttagaccaaggcaactcaatatttatgtatccaaaacccctcaatttaatggattttcagggtttgagaagtgaaattgagaatgaggtaaatttggagcaaactctcacctcacacaagtctataacatcaatttaaacttctcaaactggatttacacctaaaattccaccgaatcaaaatttgactcctcaacacccaattttaccctagaaatggctctttgttcactttggtaatttgtttttctctctagcacaacccaaactttctcataagtcctaaatgacatttcaa

SEQ ID NO: 244637 - DNA, 445 bp, Glycine max
  unsure (1)..(445): unsure at all n locations
aaatctcactgatattataaacccaagtatactgaattactcttactaataagccacaaggaccatgcagtgttatctgcgatcatcaaaagagagcctctaatagtatcacctttggagtgcacaattgttaaagggtgagaagtatggttctaattctctggatagcatttcatgaaacccaggtgaggtcctttgactaaagcaaatgttattgccccatcaaggcttataacggaccccaaaatcttggccaatccatgcacacgttttacggaaatgctttccatcctgaaatttcgaaaaccaatttcagttttcaccatatcaaaactttgatttctctctataggtcttgaccctgcttcagaaaaataaatggatggttatntttaatnttacctaattaaaacagccatgatgaaagtaatggcagggacagtat

SEQ ID NO: 244638 - DNA, 308 bp, Glycine max
agcttgaaattgaaccaaggtttctctcgagaaattcaaatggtcatatcttttcaaacggaagtccgattcaggcgcataatatatcgagaagcttgaaattgatcaatagaagctctcgagaaattcaaattgtcataacttgttacacggaagtccgattcaggcgcataatatatcgagacgctcgaaattgaacaacgaaagctatcgagcaattcaaatggtcataacttttcaaatggaagtccgagtcagatgcataatatatcgagaagcttgaaattgaacaacggaagctctcgaga

SEQ ID NO: 244639 - DNA, 421 bp, Glycine max
  unsure (1)..(421): unsure at all n locations
tctatataagctgaaccatttatcaataaacacaagttttttttattcataaaantagagtntatctcttntatcttagtgagagtgattctcctaaattcttgagtgattcaagaacaccctggctgtatcaaaggactttcacaacctttgtgtgttgccctcgctggaaagagtgattctttccttcctatcatctccacccttgttctttcaaaccacaattccagaaaatccacctctgcccaaaattatctcgtgaccataactcccattttacacactcaaattaagtgattcttgagcctaaattgaatntcaaaacgagacctttcacctcgttttggaatcacctcatttggagccctgtagcttccgttattgccatttctatatttctgtccagccaccacttaaccta

SEQ ID NO: 244640 - DNA, 309 bp, Glycine max
agctttgtattaactcagaatttttttgttatttcagagacataaatggaataagattggagttttcaaatgcttggaagcattcaaaattctcatttgagaagaactccatatctatgaattttgggtctacaatggaacgagaggaaaagagatttgtgtaccgtatacgttgttcctctgatgagaataatgacccatagggaatggagggaggaattggagcttcctgtgacccaaaatgtcgttgactccgactcgaagttcctttgcgctttttcgatggttccgtcatttgaagagtttttt

SEQ ID NO: 244641 - DNA, 414 bp, Glycine max
ctatatagggttttgaagtattattctctacactagttgccatggattactattttattcatgtttgttaatatgtattgtattaattgctttgtttttaaaataatagcttgttgttgaagtccgtggcagaaaatatgcaaattgaagaacctatttcacaccaaccaacttcacaatcttcagaccatcctactccgctatcttcacaccaaccaactccagtataaagttctaccggtacagctgaaggtcctaataatgaacctatgcaacaaccacctatcatggaggtggatgaccatggtgtatcattaacaaatactggaggagggaggctcataagtattgtgtggaaccattttgataagattaaaactgttgatgggcaagacaaggcccaatgtaaatact

SEQ ID NO: 244642 - DNA, 314 bp, Glycine max
ctgcggctgcagatagatttttatacttgttctcagtatatcacgggactcaaacggacatccgaaatgtcacttattggcgggggaattaaagcaaagcttttgattacaattccgggtgtatcaagggattaccagactcaggctgcccccctggcaaaatataatcgccgatagaatttgctacgagcatccgatttcaatatcgagcgagtcgctatattacacgactcgggcggacaccccagaaaaatgttatcttagatagaattcagtaatagcttatgctctctaatacgagcatcttgatgcgt

SEQ ID NO: 244643 - DNA, 441 bp, Glycine max
  unsure (1)..(441): unsure at all n locations
cttcaagcgcgggttcgggagacaaaggtcaagcgttcgctatatgctaagatgatattccgagtactttgggtttggtacgaccatgccctcctgatttccagctgggaaattggcgagtggatgaacgccccggcatttgcgcaacaagcataatgtaaacctttacggttttaaaagctctatagttgggcctaggctttagagtatttccttttgttaaagctttgtgtcttttgtttttgaatttataatacaaggatcttgcttcatctgttcctggtctctacccattctcattcatttgcatgtttacttctttttctgaaacggcagatccgatgacgagtcccccgaaggtactaatacctgngacccgtctatcgacttcgagcaagagatgaatctaacggaagatgaaggagatgangatgtgtgact

SEQ ID NO: 244644 - DNA, 355 bp, Glycine max
tctgtgcctgaatcgacaaagcgaagcgatggaatgctttttatcgcacagacaaccaactctccagatgttttcctcagacagggtgcaccaacgcttgttcctttcttcatggtatcaaccagagctgaatgcacctgtgaatgtgttgttgagtatagaattcaaattaacactatccattgagagtttgcttgttgtgctcttgatagtatatcagacttgaagaatcagaataagagagcattggctattactagatcatcatcgtgaccaatgattgcgggaccacaataaccgacgtaatcaatgttctcatctgcgccgaggtcccacatacgagtacacttgtctg

SEQ ID NO: 244645 - DNA, 249 bp, Glycine max
gcactgagctgcagctgagagagcctgtttcttctgccacctatgcaagatgaaagagccgataacattaaaatcacctctcccaaaataggactgcacaactgtataacacaggacaatcacacacctacacactagccatttacacctccgtagtataacgaattagtcgcatgtatgcatatgcattttgtagcaatttctcactacaacaacaatttatgataataacctagtgaaggaatggaa

SEQ ID NO: 244646 - DNA, 455 bp, Glycine max
  unsure (1)..(455): unsure at all n locations
tcaagctntgttcacactaaagatactagggccttacttattttcagggcctagaagttgcaaagtctagaatgggcgttgtcttgactcagtgaaaatatgccctttctctgttagaggatactgtgtttctttgctgcaaaccatcctcccttccaatggatccaaatttaaagctcaacatgcttagtggtgatttactgcccgatccctcaatgtacaggcatttacttggtcgcctcatgtacctaactatttcaaggccggatattacattttgttgtaacaagctaagccagtacattcagcatccaaggacacctcatctagatgttgtgcatcatctgctacaatatatcaagggcactccaggtcatgatctccattttccatcatgtaactccttcaacttatctgcctaagctgatgcctgatgnggaggatgtttggacaca

SEQ ID NO: 244647 - DNA, 306 bp, Glycine max
agcttgttaaacggctatatttaatacatggccggggttggtttggttcatcgattaaagggatgccccacattattttcatgacacatatgctaaaatgatgatttggaaattttatgcgaaactggtcatgcgtgcacctatgtggacacttatgtgtcaaatttttacgggcatgtgatgctatggctcaagattcatttgctatattttagacaacccaatgtttccaagaatatgtgcttttatcaatttgagcattcattcgaatccatttcgggcgtccgggaaaattttcacagcgtt

SEQ ID NO: 244648 - DNA, 454 bp, Glycine max
  unsure (1)..(454): unsure at all n locations
tatactgcanacatctacaatagacatgatggtcttatttgttaaatcagccactacagatcaaatatgacctctgcagcaacaggtacaatcctaggtggaggaatcatccagaccttatatggtcgaatccttcacaacaacaacaacatcaacaacaaccttatttttagaatgttgctggcccaagcagaccatatgttcctccaccaatccaacaacatcatctacatcagctactacaaccctagaaatagcaaatagatgaggctcctccgcaaccttcccttgatgaacttgtgaggcaaatgactatgcaaaacatgcagtttcaacaagagaccagagcctccattcagagcttaactaatcagatgggacactnggctacacagatatatcaacaacaatcccaagattctgacagattaccttctcaatctgtctataatcc

SEQ ID NO: 244649 - DNA, 305 bp, Glycine max
agcttataagtctggaatgatctttatgaatccgtggcggcgacatgcacttcattaaagacactaaactgctgggagtttgaatccctcttataaataaaatttccggctataacaaggggcatgtatccgagggctccaccactggcagcatctatcacacttttctccatgtgaaagagaccttcatagcactcttggaagataacctgctcaataatccggtggtatgggcatctggcacatagatacataaatctctctcaatattcatataaactctctccactgtatgatctaatgct

SEQ ID NO: 244650 - DNA, 315 bp, Glycine max
gctagatcatggcttaactggttgatctggacagctatcattgagacgtggttatatatacgctataataaaaaatccgtttgatgataagcgtccatttatttcacgtcactatcattacatgctgaactcttatgagctgccaatttttaataccattgacctgcaacttctgatgtttgagatatcctactggttcattttagtgcataagccgatgaaaagtatattagtctcttacttaaaaataggatcaacttctaaccgttgcagtagcttggttcattgatgaatcggcctaacccaaacaaaggg

SEQ ID NO: 244651 - DNA, 305 bp, Glycine max
atcttgaagaggatgctttattttaggaaaagaaagagagaaggggggagcacgaaattgaaggaataaaagaaggagagaagttgaactttgagttgtgtctcacaagactctcattcatcaaagttacaacaagtgttacacatgcttctatttatagactaggtagcttccttgagaagctttcttgagaaaacttccttgagaagctagagcttagctacacacacccctctcataactaagctcacctccttgagaagcttccttaagaagattcctaaagaagctagaggttagctaca

SEQ ID NO: 244652 - DNA, 463 bp, Glycine max
  unsure (1)..(463): unsure at all n locations
cttgtccgcggatcccttatgtaagactaggcttaaactattctacattatagnaacacagaaaacataatcaattagatattacgtatttacatcagatgttcattagaaatccccaactagggtgtttagccagccattaaaaagaaactccaacaataaatgagattaaaagcagagaatgatagttccttaaacaagaagggggatttctcatcctcttctcagcatctcacactcactctctactcaataatctctcaaatgacaaaacctatgcttcaatgcacaagatgctcttctttgctgcttccagggctctnttcctgaaataggcattgtggctgctgtagaattttgtgccctgggccttgtctaccctaattctgcacaaaacaggctntaaatatgctcttaaatcgtgacgctgcgcttagcgccaccctcgagcttatcctggctg

SEQ ID NO: 244653 - DNA, 298 bp, Glycine max
  unsure (1)..(298): unsure at all n locations
gagaatgtaaaganatttttgttcttatccanaacagcgggacacgaagtttgagaacgcctaaaaacaaaaaacaaaacgctcaaaccaagggaaacaacattctctgataagatgtctctaatgacactaaaacaacctctgctcttgttgtaaaggaattataaacccgtaatgggcgtgattaattatcaatacgcgctatgacttagcattatttagaaaatattcatataaagccacagcaacaccaatcaagcatgacaaacatggcatattccaatcagattgaaaactt

SEQ ID NO: 244654 - DNA, 270 bp, Glycine max
taacccccaaacaagtgacttaaataatgttcatacggcgggtctcggaggttcacatgatataccctcttcttattcccaaatgataagaggccttacttaaaaccttcccagcttcccttccattgctatatcatccatccaaacatatctagctcaatgagaagggatccaggctttaattaactatctagctggtatcaatggttatacgtctcaatgtttcttgggtattctcttccattttattgcccccccactcacatgttt

SEQ ID NO: 244655 - DNA, 301 bp, Glycine max
  unsure (1)..(301): unsure at all n locations
agcttgtgtatctaatcaattttttttccatacgaattncaaaagtattgtggttctcataattaagtctcaatagttaccatgaatatatttaggagtgatcattcctcataaagatcactaaaatagacagagaaatagcagcttaacaagggcacattgcgaatgacatgtaatgggtgaatctagatgactaaccatgtaggatagcgatccaccacaacctgcatccgagtaactacccatatcaagttctttttgcacatttctggcgtggaaccgaagccatcaccaataagcc

SEQ ID NO: 244656 - DNA, 468 bp, Glycine max
  unsure (1)..(468): unsure at all n locations
tgctntatcangtatcaangaatgatactgatgttctgttatttatttctgaaagcatgaaaaatactatnttttaacaagctgataatattttggataagcgcattaatgttctgtcaagtcaagtcaggttgggaattggaatttctattgtttccaacaactgggcaattggagtatggctactttcggtttttcatttcttataatcgacagatgttagatgatgataggcttcaaattcaatcaatatttttctttgggaatattcattgttgaaaatgacaggattctgactgctgtgatagaactattgaaaaatgcaaatngctaattttgtaaatattggaaatagttctttcctttggatggtcagagttgctcactcttgctgcctaatacttaagctntagatngctgttaatacagtgaaatagctgttgtggcttngttcttatacacggcatg

SEQ ID NO: 244657 - DNA, 301 bp, Glycine max
  unsure (1)..(301): unsure at all n locations
tacaagatggaaaaatggcctttttttttcaaaaccaatnaaacacacgtattattatgataagccaccaaattcaattggtagtagccgatacataactcaggatccctgacccaaggacgggataaaccacccaccgacacaaaccaaaggaagaaaatattcgggtggaaatgccacaacaacagtctctataggcatagaaaatcgcgaagtgtcaaagccagaactaaagaaatcaggaaccactctatttacctaatttgctcattggagaaaccgccctggccaatgccctttt

SEQ ID NO: 244658 - DNA, 354 bp, Glycine max
  unsure (1)..(354): unsure at all n locations
cttagaccacattaaancaggatgattggttttttgttttacgaccggtacttcgcagaaagccactgtctgactaatgctcttatagacttcatgaaagctggaggatactattaaacattactctagaccttagctgcatctgaccgatctgacctgtctatccatactcttatcagtttactatgaattctctgccgagtctattgatttagagagctgaataacaacaccgcaacgaatcctcaattctggtttgacttgacaaagcccctggcattactaaaggtgtgtcaaaaccttaacctcgccaattgacgcatcctgatctctaatgttgatgcattgagactt

SEQ ID NO: 244659 - DNA, 309 bp, Glycine max
agctttgttccctttgcttgtttgtttgaaatcctccaaattagtgacttaaaaaatgttcatacggggggttttggaggttcacgtgatataccctcttcttattcccaaatgagaggaggccttacttaaaaccttcccagcttcccttccattgctatctcatccatccaaacatatctagctcaatgagaagggatccaggctttcattaactatctagctgttatacaattgttatatgtttcaatgttttttgtgtatttctttccattttcttgcccccaactccacatgtttctcactttt

SEQ ID NO: 244660 - DNA, 465 bp, Glycine max
  unsure (1)..(465): unsure at all n locations
tcagacattgagaagacagtatgagcttcttgcaatggattatactgaatncagagctgagtatttcaccaagattctcacactcaccaatcagatgaagtgctgtggagaacagattaatgaacaactagtgattgagaaggtgctcagaacactgacatcaaagtttgatcacattgtggtggccattgaagaatcaaaggatcttacatccttcaagcttgaagaactacaaagttcacttgaagcgcatgagcagagattaagagaaaggaatcctgagaagcacaatgatcaagccttacaagctcaaacaagcagaaagtttgacaagcaaggagacaaatccaaaaagaacaaaggaaagtggcgtgatgagaagtggagaaagactgaagattcanaatgtggtgattctggatcatcttcacagaaagctgtgtcaaatccaagaagccaattctc

SEQ ID NO: 244661 - DNA, 307 bp, Glycine max
agcttgaaatgaggaagtgtttatatgtgagacttcctacttttattcgttgaccacagagtgatacctggagatatgtcgcgggggtcaggagaccttggtgacgtcaggtggggtgctattgcccaaaaccaagcttgaccaatcccgacccaacccgggcatagtcagtcagtgagaacctgtgatgtacctaaacaggcgagctcttggcagtcaaccgataaaagaacaaagaccacaaagcaaggaggcttatgtggtggctggccagctgtgaatcttgagtgatatatgggatatggcc

SEQ ID NO: 244662 - DNA, 478 bp, Glycine max
  unsure (1)..(478): unsure at all n locations
tgtccttaaattcagttaagagcaacgcatagctcacattatctgcttcaactcctaaacaatccaaaatttttggcttctggttttatgtcaatacatcaaaatcttatgttttacttgtgtcatcatgtaatgcttcctctactattgattccataaaacagaaaaaaaaacactaaaaaatgaaacctaatatcatcaacaacataaaccaaaatttttggctgctggttttgtgcccattccccacatttgatcttcgatgatccaatctacaaatctcccccccgccccccataaaaatgaataaaagaaagaaaataaaagaaacttcagaaaccagttcagaaagaaaaaagcgctaaatntaaaatccaattgagaaattaaatatgaagaanaatgagcagaaactgtgattaagaactcgaggtgagaatgagcttgagatccgtgagctgaagaggatcggctacca

SEQ ID NO: 244663 - DNA, 310 bp, Glycine max
tagcttctaaactttatacatttatgattctctgataccacttgttagacacgttgcctcaaatatcttaagaaggggggggggttgaattaacatattccaaactattttccctatttaaattctatttcactttttactcacaccctgaattcccttaatgacaatcttcttaaatattaattcaaatgaaacaattttaatatgaatataaagcaataataaataaacgagattaagggaagaaaaaatgcctactcacttttatactggttctgccacacccttgtgcctacatgcagtccccaac

SEQ ID NO: 244664 - DNA, 443 bp, Glycine max
tataagaacgaaattgcctaaatcatttccaaatatgcatgtgttttatgaagcatcaacaagaatcaagccaatgctattgtgcaagcaatcaatggggcaaaacacaccaaaagattatgatgatggatggctcgaattctcacaaatgtaaacttatcactttcaaattgagctttcaaaactatcatgacatgtaaaggaaaaacaaggatttcaagtcacaaaatgtcaagagacttttattttcataacaattacccattacttgaacatatcctataattcatagacaaacatgcatatttaacacaacaaaactaatgaaattaatactataacccaacaaaactaacaaaattaaactaatttaacacgactaacaaaaccaaaaccaaagaacacactccccaccatacttaaacaacacattgtcctcaatg

SEQ ID NO: 244665 - DNA, 284 bp, Glycine max
agcttgtaggcctttgtttttcttcattaatagagtcttttgcttcttgaagatcaatggaagtggaatagagaaggaggaaaggtgattggagatgccacttcaaggagaagatgagtcaagaacaagctcactaccataggaagccatggataagagcttgaaggtaggagaaaatgagtggagggagaggcacagaggggggaacaaaatttatgcctcaaatgaggtcagaactttgaagtctaatttctcaaatgaacaaagttgaaaaaattcacaca

SEQ ID NO: 244666 - DNA, 454 bp, Glycine max
  unsure (1)..(454): unsure at all n locations
tatcctcataagagtgcagaacagttggcgagtctgcattgattataggaggctgaaccaggtaaccatataagatcattttcccctgccattcattgatcaaatgcttgagcgcttggcaggtaagtctcattactgttttcttgatgatttttctggttatttacaaattcatattgctcctgaggatcaagaaaagaccacattcacttgtccctttggcacttttgcctataggaggatgccctttggcctatgcaacgaccctggtaccttccagcggtatatgcttagcattttcagtgactttttagagagtttcatagaggtgtttatggatgattntactatntatggatcctctttngatgcatgtttggatagtctaaataaagttcttaatagatgcattgaaactaatcttgtgctgatatttgataaatgtcatttcatg

SEQ ID NO: 244667 - DNA, 293 bp, Glycine max
agcttccaaaatgtttttcttttttttgacttattgagaggaagatatcatgaggattttccaagagtgatgatgattatcaacatagaaaagatcttgcaatctgcatcatggtttgataattgataaagcttgaagaagttgtaatctgcatactaaaggtgtattctatccaattctgatttctttgtaggttttaatcttggttagggttaccaaagggctttgagttgatagggtttcaactcttggaatttcttgttatagggttcaacaagcttttgaaatttctc

SEQ ID NO: 244668 - DNA, 463 bp, Glycine max
taagctccttcaactgcacaaggctcttaatatttgaagagtatcattggggaaccttcacccgacgaagacactaacaaaaacttttcttctccttcttggacaaagtatggcaggctgggggtaagtaaattttcttcccatcagaccttggatacaactgtgatcatatacccatatcaactagatcttgacgggtattcaagtcatccttcgtcttgccttgaatgttaaggagcgtctcaatcacactgtcacaaacattttttcttcttttagttattttgtgtttaaggaaattagatgggttgttgaatttgttgtattagcaaactgtcagaccctttaattgttataagatgaagtggattaagtgggctgctattagaaagcttaatttaaagtataaagtggatcttgtatgcctacaggatacacagaatgataattcaccaagctcatt

SEQ ID NO: 244669 - DNA, 305 bp, Glycine max
agcttaatgttaggtctttttatttaattctatggtagcgatggttgatcacaatttagaacttcataatactgaaaacaaagtggcataaatattcaaggtaagatgggagagaagaaagttctggctcttgtcatgcttgttgcggcttatggtttggcagtaacaacattcactgcttgtcaacttcctccaacgtgcaatgggtatgagccattaatttaccaatgtgtgccttatttggttaatccaggcccttctactccaactcctcattgttgcgaaggagcaagagtggcgattca

SEQ ID NO: 244670 - DNA, 468 bp, Glycine max
  unsure (1)..(468): unsure at all n locations
tcatgatgaatcagancgattcagtggagtgtttatgttctcaaaggcgatgacaaaaagctcaaaggtcaagaacacttcatgattacaaagatgatgatctcaagaatcaaagaatgagtccaagattgaatctagaacacttcaaggttcaagagcaaatttgatttcataaatctaagaatatagtttcaagattcaagcttccaagaatcaagatcaagattcaagactcaagattcaggaatcatgataatatcttatcaagataagtattaaaaagtgttttcaaaaactgatgtagcacatgaatttttctcaaaaccttttaccaaagagtatttactctctgtgtatcatttaccatattattgtaatcgattaccaatatcatatatggtttaataaagctttctacttaatttacagcgtacaattgattcaacatgtgtaattgattacatgctt

SEQ ID NO: 244671 - DNA, 306 bp, Glycine max
agtttcataatgatgaataatgttgattcaagtagttttgatgatgacaaaaagcccaaaagaatgatgtcaaaattgagtcaacaagttcaagatcaagattaatttcaagattcattagaagaaattaagaagattcaagaattcaagagaagttgatttcaagattcaagagaagatgaattcaagattcaagagaagaaatcaacaagacttcacaagggaagtattgaaaaagatttttcaaaaaccaaacatagcacaattttgtttttttcaaaagagtttttctcaaaattttctaag

SEQ ID NO: 244672 - DNA, 473 bp, Glycine max
  unsure (1)..(473): unsure at all n locations
tgtctcagcatctatgcgagacagagaccaacatgttatctatcatcgccaagtaccaagaagagttgggtctagccacggcccacgagcatataatcgcggatgagtatgcccaagtatatgcggaaaaagaggctagaggaagggtgatcgactctttacaccaagaggcaaccatgtggatggatcggtttgctcttaccttgaacgggagtcaagaacttccccgattgttagccaaagccaatgcgatggcagacacctactccgcccctgaagagattcatgggcttctcggctattgtcagcatatgatagacttaatggcccacataattagaaatcgttaggaaacttgtatggtctctcagaccttgactagatatgatttcttctttttgaaataaaatgagttggtcccatgtttctactccaaaagcttgtgcanatcaaatcactcctacatctcatct

SEQ ID NO: 244673 - DNA, 306 bp, Glycine max
agctttgttttttacattcttctctctcttgactaacatttgcattaattgttgtattgtgtgttgcatcttagtttctatcatttcatatgtgcatcatgcatcatcatgtaggagctaggagaaagtttttgaagttagaaaatttctctagtagttcaaactctttgttttaatcaattacaggctgatcgtaattgattactcaagtgtttgaagctagcaaagaagtgtattgtattggtttaatcgattacaggctcattgtaatcgattacacaattctttttgagacaatgattgatt

SEQ ID NO: 244674 - DNA, 473 bp, Glycine max
tgagttactattgctggcccataaagcccctcataacttgtttcggccgcattcttctttttgggccctcttcatttctcgttctaatacttcggctgtggccacgttgacaaccctcagcttgtcacattccttcctgactctaatggctgttgtcttgaacttttccttgaccactcgcattctttgaagttccactttcaaggcttgcacctcatcgctctcctcaaggatttcagcctcttcctcattgtaaatctttagcttcgggagccaagttatcccttgcgtccaagccctcaaccatttatgatatccaccaattacaccattgttgcttcctctaagctccttatccttcctttgcaccacattccatgattttcagactctctgaagcattcttgcattatggtcactgaagcctcgtgcgatgaaaggtgtaatactctcttccgacaacgctcctctca

SEQ ID NO: 244675 - DNA, 298 bp, Glycine max
agcttccgggcagatgatctgtcctgaaaaatgtctcttcttcctgggtgctatgtctcctagaaaaatttatgaagttaaggatcaattggggtttttgctattgggtccatccccttctcatacctgggcatccctctttttattggtaagcctaggccaatccatctcaaacctatctctgacagaataaaattgaagcttatttcctagaaagccttgctcctctacctgatggggggagtgcagctagttaactccattatcaatggcatgttggcttactcgttcaaagttt

SEQ ID NO: 244676 - DNA, 452 bp, Glycine max
  unsure (1)..(452): unsure at all n locations
tgtgcgaatcaaatcactcccgcattgtatctctagcatgcattctttctttctttacccactcctcacgtttggttttttagggaaaaacaccataactaaacgcgccacaaggcatccttatcgcaccagatccaaatctagaacgatgggtgatcaagaggagacacaggaacagatgaaagccgacatgtcggctctaaaagaacagatggcttccatgatggaggccatgttaggaatgaggcagctcatggagaaaaacgtggccaccgctgccgctgtcagttcggctgccgaagcagacccaactctcttggcaactgcgcaccatcctccctcaagcatagtatgacggngaagggacgcactgtggcacgatggcaaccctcatctgggatacaaccgagcggcttacccttatggattgtcgcccaactactcaccacccg

SEQ ID NO: 244677 - DNA, 303 bp, Glycine max
  unsure (1)..(303): unsure at all n locations
agctttagttcaaattagttttttttaatcncttgaaatcatgggcaacttctcttttgaaaatatcaaagccttcaattaaccgatttttttaatagtcaaaaacatattaactacaaactcaacaaatatatttgagagtttttttattagacaaacctatttctaatatgcacatacccatgttttcttcctgcaccaggcaataataagtagcgcagccaatgtaacttaataattactttgttcatattatagaatagaatcaaaaagcttttaaattaatttgagcgttgtgctaat

SEQ ID NO: 244678 - DNA, 299 bp, Glycine max
agcttagactaagtttagcctacctttttcaaactgatggccaaattgaatggaccatacaatcgctggaggactttttgagggcgtgtgtcttaaagcaaaagggaagttgggagagttttctgccattgatagagttcatttacaacaatagttttcactctaccattggcatggctccctatgaagctttgtatggtagaaggtgtaggacacctctatgttggctagagcccaaagaaaaaaccttatcttaagacctgaagtggtacaacaactgccgagaaggtgaagttgat

SEQ ID NO: 244679 - DNA, 302 bp, Glycine max
agcttgaacacacaagatatttttactaagcaaaggatagaactatttttagtgtttagagtattctccaatgactactacaaaatatcgcattcaccttgttacttctttcttgtatgtcacttctctacttcacttcatgatctgagtctctatttatagaatttagtgaattatttgttgtgggattcatgccttctttttttatatgactgttgtctcatatctttttgtagggccacatgtagcagtttggttggagagataaaagcaaagtacagtcaactatttgtgaagtatac

SEQ ID NO: 244680 - DNA, 452 bp, Glycine max
  unsure (1)..(452): unsure at all n locations
tgggaccaactcattttatttcattttgattgtcgnatctagtcaaggtctgagagaccatacaagtttcctaacgatttctaattatgtgggccattaagtctatcatatgctgacaataaccgagaagcccatgaatctcttcgggggcggagtaggtgtctgccatcgccttggccttggctaacaagcggggaagttcttgactcccgttcaaggtaagagcaaatcgatccatccacatggttgcctcttggtgtaaagagtcgatcacccttcctctagcctctttttccgcgtatacttgagcatactcgtccgcgatcctatgctcgtgggccgtagctagacctaactcttcttggtacttggcgatgatagctagcatgttggtctccgtctcgcataaacgctgagacaagctttctttggaccttgaacaagcaactaac

SEQ ID NO: 244681 - DNA, 308 bp, Glycine max
agctttgataaaggtaaaatttttttttcttgccattttttctttcatcttgttatttttttataggtaaaaacaactcggaatattaaagatttaatgtgaagaaggcttttaaataggctaccaggtcaggctaagcttttaaaaaggccaggccgagccaaaataaaagcctttgataggctataggctaggctcagacctaaaaaattaatcgtaggctaggctcaggcctgttaaagcctggcatggcctggttcccacccctatatctaatagagtgagcaacaaccatggcttattagtaa

SEQ ID NO: 244682 - DNA, 475 bp, Glycine max
  unsure (1)..(475): unsure at all n locations
tcccgccagtgtcaatggcggcacccacgtagaaaacatatttcttccctcccccccgntaattttcataaatgaaaccccattgagtaaattggttctaaaaccaaccctccttcgtaaatttgccacatttaaatatgtaaaaacgttatttaatatacaatatattatatgcaataaacataatctttaatataattggacagtcagtgtaaattcaatttatttttaaatatgtattctctgtaataaaaattaactcaacatatatatatatatatatatatatatatatatatatatatatatatatatatatatatatgaaaaggatacatattatatcaatatctaactctaacattatattactagcgaaaatcgcaagcgatctataattaaatataatctatttgcacaagtgaacaacatttattgaccgactcccaattttgatgagcctaatcctgataaa

SEQ ID NO: 244683 - DNA, 304 bp, Glycine max
  unsure (1)..(304): unsure at all n locations
agctagtaaactcttnnactttttttacctgccacccactttctttgggactggttcaaaaaagcctatacattccatttcttattcttactctacttcatcctatggatgctctttaatatgttctaaaactgccaacccttgttgatacttattcatcggcggaggatagatcttttctttttctgctttcatatgatatgaatttggtagattctcctgtggtatctactacctttgttcggctgagacttcaggtctgcggattctctactagctgctctagcgtctgcttcctccggtg

SEQ ID NO: 244684 - DNA, 388 bp, Glycine max
  unsure (1)..(388): unsure at all n locations
gggggggaagangtgatggaccaacgagtaaccttaatggatgcgccactaatgaaaccctgagagagaataacaaagatgataacaaagaagatgggtggtggaaacagagtcgaaggccaatcctcacaaatgatagtgtagccgatcaaaatcttttcatgggcatttgttgaatttctccatcaaaactttgtggtcactaagattattattctctcactactaaaaaaacctttttctacgacgcgctttctaagacggttatacataaccgccttataatgttacgtggtggcagttttgtaattataaagaatatgtttttttattccacacattctaagatcggttcacggaactgccttagaatgtcctatgggaacac

SEQ ID NO: 244685 - DNA, 308 bp, Glycine max
accttagcattcgtctcaggttttgctccaaatgtgaagagaaattcatacaccatctgcagatgacgccatgccggttccaaaacatgttcctcttcgtcaggctcacccatgtcttccaaatttccatcatgattggaagaaggcagagctccaaacagattggccgccaccatcttcgccatctcctgcatggctaacttgttgaacttcgaattcacagaccaaacataatcaccaagctcaagtagagtctgccgctcaacatgcttctttttgaaacgcttgactggatcattgcactcaaa

SEQ ID NO: 244686 - DNA, 354 bp, Glycine max
gttcacttttaaaggaatgcggactttcctcagagtcttttacactctaattgagtcatattggcgtaaaacaaaactgttaaactatgatgtgttggaaccccgccagccatgatggaataaatatttatcttcttctaaagaatcatcacacatatcattgtacctattgcatggctacctgatacactttgtttgtaaaacaaaacacaaatatatatcatgggaataagcatattcgagtttattaagacattattatcatccttattataagtaatgacagatctggcacatatatcccacatcttcttaactcaatattactgacttaaacgcgacagcataaatgta

SEQ ID NO: 244687 - DNA, 296 bp, Glycine max
agcttaatgaaggcgtttttttttatgtacgagaagccgccgatagccaacaaagtatacttgatgcgtgagttgttcaaccttaagatgggagaaggtatctctataactaatcatattaatgaatttaatactattcttgcccagttgaagtcggtgcatatcaaatttgaggatgaggtgaaagcattgattctattgtcatcactatcggatagttgggttgcaactgttactgcaattagcagttctacaagagagaacacattaaagcttagtgacattcgtgacttgat

SEQ ID NO: 244688 - DNA, 473 bp, Glycine max
  unsure (1)..(473): unsure at all n locations
tgtaggattatggggtacccatcacatgtggtactatgttgcggncgggcgatggtgcacaacaagttttccacatccacaatgcgcgcataaatccaccatcccctgttgcccacctccaactgagctcacgtactcccacgtagcccatatcctcgtttctctcaacaccgggtccccatcaatcctcccaagcttccacaacatccaagcaaaacaacattcaaacagcacaagctatcacagccaagcaaaacagagcaaaggcagaaaactctgctcaacacaccaaccaaaatcacagcttttctcacttaaagaccccagtaacaattcctttgttccggttcatcaaccgttggattaactcgaaacttttactggaagtctatagtacataagcctacattgtgaccgttgggatctactagcaaacatctagaactcattctacattactctntccacaacca

SEQ ID NO: 244689 - DNA, 299 bp, Glycine max
agcttggtgtgatacattttttttcatctttattgcgagccatatacaaagattgatgatgggctaacttcctttgatgccaagaagctaattctcttcctttcacctgaatcaagcccttgtgatacatgcatcaatacacataaaatgtaacgtgcctaggctagatcactataagttgtattattacatacacaaggaggagactccagaacctgtattataatacaccctaagcttccaatcacccttaatcattttaaatgaaaaaagaggctgagtttacaaggaagaagaat

SEQ ID NO: 244690 - DNA, 358 bp, Glycine max
acgatatattgtgtatgtattcaaatcaagatctattcgctacgttcccccacatagttgaaatataggtgaaaaccgtggcaaataacaataacaattgaactttgtattctgaggaacttggtatctgtacatgcatccactgttgaatgttttgtttttcattcttaccccagaacttgataccatcatacagtctgattgtttttatgtatgagtctcaccctaatagtgtctagttagattactatcgtcttcctggtgtacgtatagcatataatatattatataagagagtcacatgaattgaatctatgtaaattatgatgccattgcatctacatgcctataatgaaat

SEQ ID NO: 244691 - DNA, 306 bp, Glycine max
tgcttgaggaagaaaatttttttacaagtatttttgtgcaaaaatggcctagttagtttgtgttaatattcaactctcattctttaaatgagaaacataataaaagaacaaaattaacaattaaaatttttatattcttgtatattcattttctttctatgataacaagtctaaaaaatacttaagagacatttaatattttatattttaaattgacattcttgaaggtctaaaatagttaattttttccaataatgttatcatctttcaaatgtccatttatattgaggtgtaaaataaatctag

SEQ ID NO: 244692 - DNA, 464 bp, Glycine max
  unsure (1)..(464): unsure at all n locations
actaagctatgaacatagataaaaattacaaattctttcttgcaaatnaatattttttctatcataattctttatatattttctttgtttttcttctctttttttattggtttgtgggatgctatcctactttttaacttaaatgcacatatctaaacacacttatgtgtaacctttgaaaaactaaaatataattgatgtagaataaaaaacatttattaactaaaatcacatttcatactcggacccctcatatgggagtctctggcttcgttccctgaatgcatctcnaacaataattttcttcggntattggtattagaattagaattaacaatatttgaattactttttggaggatattagtctccatagtttgtgttgtcaatatatcaatgatgttgcattgataattattatgatgatacatgcatggcacgccattatgtacctgtaaatgtctc

SEQ ID NO: 244693 - DNA, 302 bp, Glycine max
agcttggtgcattgagattttttttgtccagttggaaggacttcacttctttagtgggtttcactctcgactttgcttttctcaaatcgagttcagtttctcccaagttactattgagggaggtgcatgctaccgattgtactttgggctttgctacccttttccctttagcaatcttgaggcttacaatataacattccattccactcatttgatcaactctgatagtgataattttcccatcctcacttgggaactttatcgctagatgcggagttgaaatgatggcccctaactcgtta

SEQ ID NO: 244694 - DNA, 472 bp, Glycine max
  unsure (1)..(472): unsure at all n locations
tatgacctgtacganacacaagttccctaagctctgagttcaatatgagngaaagaggtttatgtatgtttgaccaaattatcacacaaaattagatgacttgtgatgttagtatctgtcgtaagttgtattgtttagagacattgcattttctaatgatatggagatattttaaatagttttgacacgtgtcacaatgtacatgattgtcttgtctttgacatatgtcgcaaccctagataacattgcaaacatcgagggtggctttttactacagaaatgtcttttgggggtgttgccttgtttggtgccccctatggatgatgactattgaagtagctcttggagaatgaaagacaccattaatgaagaagtttttctataaatgttcttagatgtgaagatgtttattgatgagatgttactgttggttacgggaaatgaagatgtttatggtgagtcattactaatg

SEQ ID NO: 244695 - DNA, 292 bp, Glycine max
  unsure (1)..(292): unsure at all n locations
agctttcctagngtatgttttttatgaagtggtataagcattttccgctccgtataggaaactaatactcagtactttcatttcgagtgtctaataatcatttcctgtcaattccaaggtaattaggcgactgtctaaagcgctgattttcaccttctcgctaagtcaatctgttggcttaccctgctgacgctaatcgaagcactcattgtctaaccacgaggaataatgccgaataacacaaactttattagatctctgaacgcaccgcttcatctcactaaacgcaccg

SEQ ID NO: 244696 - DNA, 476 bp, Glycine max
  unsure (1)..(476): unsure at all n locations
ctcagcttacgggattggtcttcaccggcgaaaggatcaaatttggtctganaagaggcaaatttgatcatcctgctctgacgaatgagaaaactggggcaaatgaagagggtgagaatgagagagaaacccatgctatgactgccattcctatatggccaagtttcccaccaacccaacaatgtcattactcaaccaataacaacccttctccttaaccaccacccaattatctacataggccatccctaaatcaaccacaaagcccacctacctcacaaccaatgttaaacaccacctttatcacaaaccaaaacaccaaccaataagtaaattttgcagcaaaaaagcctgtaggattcaccccatatttcggtgtcatatgctaacttgctcccatatctacttgataatgcaattgtagccataacccctgccagggtcctcaacctccattttgctgaggatacgactcg

SEQ ID NO: 244697 - DNA, 298 bp, Glycine max
agcttgttgacatgtttttttttacgtcgtcttccgtgcagacaacctatttcagtactaactcgtgaagttagggggcaggcggaaatacccaagtggttatccggataaacattcttttaatatctctaagactcaacgcatgatagcatgcagagactaacgtcgtcttctgcaccttttgtcaatcgcgggcaacaagcccattgccacgtggagatttacgtcatcttctgtgcagacagcctctgtcagtactaactcgtgaagttagggggcaggcggaaatacccaagtg

SEQ ID NO: 244698 - DNA, 464 bp, Glycine max
  unsure (1)..(464): unsure at all n locations
tctcagactntggtacttgtcacaatggtattggacgtttgtttctacacgacatattggacgatgtatgttaacattgataaaacaagttgcatttgtggacactntgagaatgtattgtataggcttaagagattaccactcatatgatggacatattcctgtaacattaagataaatccattagttcatataaaatttaaacatttgttatcataaaaaaccatacattttgaaggacctagcattgtctaatgtgttaggttctaacagttcgatcccatatttgaacccccattaatgctaacaatgcaaccatcaatttggaatgcatcttcgacattgattatcttcacatacataggttggagatcaagaagaacatctcagatcgtggaatcctaagcttacttaacatgataaaagtgatttaccagagttgataagaactttctcgaggaaca

SEQ ID NO: 244699 - DNA, 303 bp, Glycine max
agctttttgctggattttttgttgcccctgtgattggcctgtcaaatataattaataactaatttcagtcctcaaaagtgagttcctagtttgcacaaagagaactacctacacaaatagaacaacctacacaaagagaactacacatcttagataatcttatgaatgctcgtgttgtgtctccacgaaataaatttatctcttctcaatccaagatcaatccgtgaaatttttaaaacatatctatataatttggagtttttagggggttttatattttaaaatttatttaatttttcaatt

SEQ ID NO: 244700 - DNA, 440 bp, Glycine max
  unsure (1)..(440): unsure at all n locations
tggatgatgctgngtatactggtaagtatcgngaggggtgtgctggggtttcngccaagtaggagccgaggtcacggcgtgggcatctccttctttcttctttgccccaatcgctctgaatcttttgttgcttgtaccggtaggggtgacatagtcaaactttccccttttcaggcctacttcaatcctctcgctcgcaaatactagatccgcgaagctagaggcctacttcaaactttccccttttaaggtaaaaggatttgaattaaagtcaaaatattttttaaaaaataaatatatatataacattaaacttttgaaaacactttatgaaagaaccttaagcaagtaattcacatatcacattcaaaatcatgcataatcatttcannaaacatttgatatattncaatatatcataataatcaacacaagtattg

SEQ ID NO: 244701 - DNA, 304 bp, Glycine max
agcttagagcatctccaacttcatttcgatggtgagtttcttaacatgaagaaagggatttttgaagaaattatgcagtgaagacaatttacatggaaggaactgtttcttcaaaataaaatgagttttgtatatataaaacgggtacttagcattaaaaaaatgattatccaacatcaacaaccttcaatccacccatgtacaaaaaagaggaaaaataatcacaacaagaaaaatgagcagatctgggaaaatacaaaggggaaaggaatattgaaagaatatgaaaaaatctcatgtcatc

SEQ ID NO: 244702 - DNA, 457 bp, Glycine max
  unsure (1)..(457): unsure at all n locations
ttagtgtaccaaactaccgcggctccagccaagctatcttgaanaaagtgtattaatagcttctcatccttagagtgtgcgcccatcttgcgacagtacatcttgagatggttcttgggacaagtcgtccctttatacttgtcgaagtccggtactttgaacttcggggggataacaacatcgggtactaagcaaagatccgtcatgtctgcgaacggatagtccccaaatccttccacggctctcaatctctcctcgaggagatcaagcttcctcctttcttcaatttccatgggcggtccttccatggacaaaactattggttgtgtcgtgatgttgggctgaggcaacatgctgggtgccggcccttcggtgatcggnggatagaactcgacatcccttcgagcatattcttgatggtcttcgtggacctcgtcnggctattggagaggctctc

SEQ ID NO: 244703 - DNA, 301 bp, Glycine max
agctttagtttcattattatttttttaaaatattaaaatatttaataaaaatgcaattctaatacaaataatttttaaatttgaaataaattttaaatttatacttttaaaatgtggctaaatttggaagacacgttgaatatcaacttgtctccaacaaagttaaaatgaaataaaaatttcctcaagaacgaagaagaagaagaagaagaagaagaagaataagaagaagaagaagaagaagaagaagaagaagaagaagaagaatagcactatactttgagtttgattctctcgaaac

SEQ ID NO: 244704 - DNA, 471 bp, Glycine max
tccttagatactcatcacaacagtcatatatatatgatgtcatgttaataggacttcaaggaggagatgagtcaagaacaaactcaccaccatatgaagccttggataagagcttgaaggtaggagaatatgagtggagggagagggagagagggcgcacgatatttatgcctcaaacgaggtttgaactttgaagtctaatttttcaaatgatcaaagttgaaaaattacacacacaaggcctctatttatagcctaagtgtgacacaaaattggagagaaatttgaatttctattcaaatttcactctgaatttgaattgaatttgtggagtcacaattggagccaaaatttcactaattattattaggtgaattcagctatggttcaatccactaatccaagatcaagtccaagattctccactaagtgtgcttaggtgttatgaggtatgtacagtatgaaagacat

SEQ ID NO: 244705 - DNA, 308 bp, Glycine max
agcttctattctgaattcctttcttctcgagatattatgggacacaatcgaacatccgagtaaaaagttaatgccgttagaaatttctcagagcctccgttatcaattacgaggatcttgatatattacgcgattcattcagacatccgagtaaaaagttattgtcatttgattttgctcaaagcttctgtttttaatttaaagcatctcgatatactacaggacccaattggacatccgagtaaaactttattgtcgtttgaattttctcagagcttccattttcaatttcgagtgtctcgatatat

SEQ ID NO: 244706 - DNA, 437 bp, Glycine max
  unsure (1)..(437): unsure at all n locations
ttgagcaaantcaaacgacaanaacggtgcagtcggatgtctgattgagtcccgnaanatatcgagactctcataatggaatctcgaagctctgatcaaattcatacgacaataactctttactcgtatgtctgatcgagtcctgcattatatcgagaccctcgatattgaataccgatgctctgatcctatccaaacgacaataactttttactcggatgtctgattgagtcccgtaatatatcgagacgctctgaattgaatattgaagctctgaacaaattcaaactactataacttcttactcggatgtctgattcagtctccggaaatatcgagacgctaggactagaatgccgtagctctgagcagaatcaaacgacaataatcttttactcggatgtctgattgagttccgtaatatatcgagacgctcg

SEQ ID NO: 244707 - DNA, 306 bp, Glycine max
agctttagaagggattgcttactctttttatgaacggtgaaatatgcctttatatctctaacattcttaaagcttaattctacttcctccaaaataattcctatctattttttgctctcccaaactttgaaatgttcaatttttgtttaaagcgcaatttaaagtctcattcttctgtaaagagttatataaaacattttgaaataaaaaatattttaaatatggaagaaaaaatggacattctaaaattagaaaaaaatgaaaaagaagcaattttttaataggactaaaattaaattttaaaag

SEQ ID NO: 244708 - DNA, 303 bp, Glycine max
tgctttaacaaatttttttatttggcctacattttggattttaaaaacaacacttattataggtgaaatgcttggaccaatggaattacaaggccttatccttatcttcttaatctaagcactttgaatgaccattaatatgaataatcggaagcttggacaacccttgaggttctctccacaagctcagccatgccttatatggcttcttgcacttattcaaaactaactataaaagaataaagtatagttttgccaaaaatggtaaaagtgcttttgttaaatctggtatatcttatcata

SEQ ID NO: 244709 - DNA, 431 bp, Glycine max
  unsure (1)..(431): unsure at all n locations
tgtaaccatgcatagccatagatgatgtgttccaaagtgtttnnngnncctctgctgaccctgctaatctacaactacgcgtggctggaggaagtatgccacctgcaaagagtagtttgtcccaaagagtagtttctcaaaaaactattagacaacttgcacacttgtttgttacataaaataataaaaaatataaaatgatgcatcctctaatggtgacgagctcgcagttttggataacatcacccatctgacacgatgttgacacattggactcattgttggtcaaactgtagttcgcgattctcacgacctcgatgcaccgaaatgcatcattagtcataaaactggaccaacgatggacgaacgatgttgtctcaactttcgtcatggtagggctcacccgcaagaatcatcacgtcaatgaactc

SEQ ID NO: 244710 - DNA, 301 bp, Glycine max
  unsure (1)..(301): unsure at all n locations
agcttggatattcaactttttgtgggattgagggtttantaatttaggctacaacatagaacacaagaacacgattgattagagaaatatatttctatgcatcagcttgtttgttagaaagacccaacatatctacctactgttgtcattttatttaccttgcatttgataatttttagcatacaagtttagtataaattttgtttgaatttatcacttatacatgttctctcaacaatgctttgattctaaacttaattcaggctaacattagttccctatgttcgatactcggattcat

SEQ ID NO: 244711 - DNA, 472 bp, Glycine max
tccacaacatccaggtaattccacatccaatcatcatggtctaacaaaaccaagcaaaacagggcaaaggcagaaaactctgcccaaaacacaactcataatcatagcttttcacatacaaataccccagtaacatttccttcgttccaattcgttaaccgttggattgactcaaaaattttactggaagtctctagtacataagtctacattatgaccgttgggatctgctaccaaatgtccagaaccccatatgtactatccttttcacaaccagccatacacaagcatttttctgcacttatacaaaattctgctgcacatttcaacaacaaaattctgcataaagtgcagatttcgaaaaccactctttccctcatccaattgtgcccaaattgaatcctacaagtcccaaatcatgtaccaatcatgtctaatacaaggacaagcttcagaccaaagcaacacaaaa

SEQ ID NO: 244712 - DNA, 303 bp, Glycine max
agcttgtgcattcaatattcttttatgatcaacatttcagccaacaattcaatcaccaaaactcaaattcacaatagacacaatcacaaggaaacctaaaagttcaagaaaaggttcacaatcaaagactctctaagaattttgcttgaacatgttaaggactaattaacatgaaagatttgactcaaatccaataataggctaaaagaatttcatacactcatgaacaaaatgagttagacaaagaaacaagaaaataaaattcagcaaaacataagaaatcttatgtgacaagtttcatga

SEQ ID NO: 244713 - DNA, 468 bp, Glycine max
tgtgcgaatctaatcactcctgcattgtatctctagcatgcattctttctttctttacccactcctcacgtttggttttctagggaaaaacaccataactaaacgcgccacaaggcatccctatcgcaccagatccaaatctagaacgatgggtgatcaagaggagacacaggaacagatgaaagccaacatgtcggctctgaaagaacagatggcctccatgatggaggccatgttaggaatgaggcagctcatggagaaaaacgcggctaccgctgccgctgtcagttcggctgccgaagcagacccaactctcttggcaactgcgcaccatcctccctcaaacatagtaggacgaggaagggacacactgtggcacgatggcaaccctcacctgggatacaaccgagcgtcttacccttatggattgccgcccaactactcaccacccgtcttgcaagacgatgc

SEQ ID NO: 244714 - DNA, 307 bp, Glycine max
agcttgatcatgtcattttttttaaggataataatggcaacttcagttgcaaactggggaaataaaaaaacttgatgctcacgcagctgtgtaaggaagctatatattgaagtcaacaacaattgatatttaactaaatacatacctgaataatttttacttggcccattgcactaggtaggcccgtaattttgtgaccagctcaatggcatccttagtagcattaacagaaaacacctagaacagttaagtgacactaatatatacatttcagtggtaaaatgtttggaaacaagaaccaattaat

SEQ ID NO: 244715 - DNA, 444 bp, Glycine max
  unsure (1)..(444): unsure at all n locations
tgtaactntctctggaacaaagtctaggagggggtattttttcagaaaattaattcataagaacttcacctatattctcaaaggcatatacaaatctcccatcatcctttttaagcctctgaatagtatttactttttgcctctaagataccttttggtggaaaaaagttgtgttttggtcatcgtgttttagccaatttgcacaagaacattgttctcacttattttcgtcctgcaacaagacatcatcaagagtattttcaccaactattatttcagctaccacttcgttagtctacataggaagttgaagcttctcaatcattttcatttcatatcttatttggttctccaatctttcatanttttcttggccatattattgaagaattgttcctattttaataagaattcctaccacactatcattggcacaacaagaat

SEQ ID NO: 244716 - DNA, 232 bp, Glycine max
tacttctctcggagagatagttttttttacaaaacaataaggactttattatatccccctgtaggggcaaaactcacactgacgactacctgtaactgagtaaatattctaaatagttggacattgggggcaaaaagacaatcccttaactttgagacttccattgatatgtattttgtctgctcctcacaccataaatgtcgttgcgtacgtgtataagtttattacccat

SEQ ID NO: 244717 - DNA, 306 bp, Glycine max
tgcttgcataactcttaatcttaaagagtccatgctatgtcttgaaattgagataatgccaaccaaaaagctacccttcttaagaaatttcaggagttggaaaactaattgaaagatcttcaaaaggatctaaaggagctgaatgaacttcatagtcataaaaaagaagaaagatatgatctttggagagaatgtgcacaagcacacaaagattatgaagacctcaaaatgagtaaacataatctctaggtggaatgtgaagaacacaagaaatatgtgaaattcttgaataatgagcttttgaag

SEQ ID NO: 244718 - DNA, 436 bp, Glycine max
  unsure (1)..(436): unsure at all n locations
cgcttgaatggtcatcgcttcattcttgtggcaatatttttcttcaccaaatgggtcgaagcggcttcttatgccaatgtcacaaggagtgtggtggtcagattcataaagaatgaactgatttgtcgatacggactccctatgaagatcattactgacaatggaaccaatttgaacaacaaaatgatgcatgaaatgtgcaaggatttcaagatccagcatcataactccaccccttatcggccaaagatgaatggggccgtagaggttgcaaataaaaatattaagaagattattcagaagatgacggtgtcatacaaagattggcatgagatgctgcctttcgccctgcacggatatagaacctcggtacgaacttctattgtggcaacaccgtattccttgngttatgggatggaagcaggactcccatttg

SEQ ID NO: 244719 - DNA, 300 bp, Glycine max
agcttcttagtctctgctgtttaagatgaattcgtggctacttcatgcactcctctaatgacactaaattgctgggagtttgaagccatcttctcaattaaatttctggctttagcaagggtcatgtctccaagggctccaccactggcagcatctatcacacttctctccatgttagtgagtccttcataaaaatattggaggagaagctgctcaaaaatctggtggtaagggcaactggcacatagtttcttaaatctctctcagtattcatataagctctctccactgagttgtcta

SEQ ID NO: 244720 - DNA, 447 bp, Glycine max
tatcatagaagaatcttttccctcgacgatggccactttctcctcatttcgtgcttgatcatggcttaactggtggatcgtgtgagcaatcattggaaggtggttatagaaaggaaagaataaagaaacagtttgaggaagtgggtagttctttttcacgtaacaattagttctctctgaattcttatgttttttcaatttttaaaattatttatctccaaattcttatgtttgtgatattcaagtgaatctatttaaaaaaaaaacaaatgaaaaatatatttgtttcttatcttaaaaatcagttttaacttcagtaccaataagagttaattcgttaacgaatgaagagatacagatgaaaaaacagagaaaataaagctcttggagagagagctaggaattggaattattgtaaaaataacaactgggatgtgaaggatgatc

SEQ ID NO: 244721 - DNA, 304 bp, Glycine max
agcttcttttttagaccttttcggtcgtctttcctgaccgacgccgactgtcattttttcgatcaatatcggtgaataatattttttttgccgaggggggctaatgttttcctggccgaataaatcggaacatgccaatttcggccgaaacgacacatcggttgagctcgcacgaaaaaacctagccgaactacattgttagttttttatgcaacaccgaaacaagaaaacttcccctgccgtaagaaaaaacattatcggccagcgagcgttttttaaaaaaaaaaattgcgcaatgtcggct

SEQ ID NO: 244722 - DNA, 336 bp, Glycine max
  unsure (1)..(336): unsure at all n locations
tccgntggtcaatttcgagcgtcacgatatgtgatgtgcctgaatcggacatccgagtgaaaagttattagcatttaatatttttcagagcttccgttgttcaatttcgagcgtctcgatatgtgatgtgcctgaatttgacctccctgtgaaaatctctgaccatgtgaatttctcgagagctcccgttttcaatttcaagcgtcttgatatgtgatgcatctgaatcggacatccgagtgaaaagttatgaacatttcaatttttcgagaatttccgttgttcaatttcgagcattgctaaatagtatgcgcctgaaccggaccttcgtgtgaa

SEQ ID NO: 244723 - DNA, 293 bp, Glycine max
  unsure (1)..(293): unsure at all n locations
tttttaaatgacatttttttattgataaatattaattgttagcattattagttttggtagtgaagaaattaaacccataatctcttctctttccattctccatttatcatgggacaactttatatctcattttttctgatagtacataaacccttgagttgttattaatataattatgatatataatttggaggtttaattactactcacttggctttataattcatcatttgacccttctagtttatagtgtaaagagttctttagtnctataatcatatattaatctcttt

SEQ ID NO: 244724 - DNA, 277 bp, Glycine max
  unsure (1)..(277): unsure at all n locations
cgtttcgtgagtaattacgccaaaaattctcgaccgttcttcaagttcatcgntcgttcttcgttntcttcagtcttcaacgggtaagtacctcaaaccgaagctttcaattcattctatgtacccgtggtggtccacattgtgtttcatgtattttcattctcgtnttcatatactttttataccccctttttgacgtgcttaagccattatttaagtcattttctcgcttaatctaaaataaaataaatttccaccgatcgtttcaattgtatca

SEQ ID NO: 244725 - DNA, 283 bp, Glycine max
acatgtttgtttctggtacacaatacatgtgacttataaaagagagaacactcccattgcaatatcgcttcactcaatcctaatgtggtgttcagtcggagaaattttataataatcctttctaattccagcatatttgtgttccgtaagaaaatacatatgactctgaaaaagagaacggattcgggggcactatagacagataaaatcacacattttttataatatatttattctcttagtggatcacgtttaggtggcggagcgtgtataaaattatgac

SEQ ID NO: 244726 - DNA, 371 bp, Glycine max
acatgtacaaatgaatggttgaggtattggatgtcattctacccttgaccctctttagtgtgctctactggagcactataatgcggccccttcccagctcctcccacatagttgggcgatggtaagggcgtataatatattgtgtcctttcatcaacatcaagcctagcgtgtcaaacttattctttctcaaatgacagttcctggaaagactacatgagtctccttgaacagcatgtccaagaagctgtttgagtttgatccaaacattcttcgtcgtttaaggaccacttttttaaaggcctagctactgattcatggctactggcatgcactgatcttaacacggatgggagcccacttcctgtctat

SEQ ID NO: 244727 - DNA, 409 bp, Glycine max
atcgatgccactgtatgacactaaaaaaatataacaactctcttgtacattcacatgccaagccaatgatcggtattccaatataacacagtctcacatttatataaggatttatctatgctaagctattattaaatatctacatacgcacattcttgattattattacatcctcttcaaatattattctacagtcaacttatatataggatgtcatattgtgctgttattatgcagatgaacatcacacaccaactaacactacactcgatgatcaatttgtcacccatgacatttcagatcccaccaatgatgatgtatacatcacacaggagaacatcgatataggcatctatccattaattatatgacatattattgcgctcctccatcatcaacataataaatc

SEQ ID NO: 244728 - DNA, 447 bp, Glycine max
  unsure (1)..(447): unsure at all n locations
acctcacaaagtatatatatgtatgattgtgtagtgaagatacctaagatatgcatgtatgtaaacaaaaatacttcacaaaatatatatatatatgtatgtttagatatgcatgcatgtagganaaatacttcacaaaatatatatatgtatgtttaggtagcaagatacctcggatatgcatgtatatagcaaaaatatctcacataacatatatatgtatgtgtaggtagcaagatacattggacacgcatgtatatatcaaaataactcacanaaatatacgtatgtttaggtagcanattacctcatgaaaaaaaagagcaaaaagagagtgagcaagataggaataagaaggaagaaataaaagtcgtctgctaataacaacatgcttgtgaaaagataattccaacttttctttgaagatttactgatcttaaccagttt

SEQ ID NO: 244729 - DNA, 294 bp, Glycine max
  unsure (1)..(294): unsure at all n locations
tgcaagcaagggctaaatttaaggtttggtttagtatttctaactattgtgaatgttcatctttttcttcaatcctactttcgattttcatgagtatgattatgcttaggattgaaaacagattacgttatggattaatttcataatttcaaaatttaatcacagatttcttggatgatattccaacctaatttgtgatctcaaacaantntagggattgattgattgaactatctctaatgcatntaactgaaccttcataccttgaaacatcattgtagcaactatgataat

SEQ ID NO: 244730 - DNA, 251 bp, Glycine max
tcatcatcattgaactatgctcccttataaaaagcttagacaatctacgatgctgcttcgaacctttattatcctgaagagctaactctttctattgcgtccataggaagaggagactgaatcgtctgtcaactcttgatttcctttcattcacagaacctaaccatcactgccctgaatgccataacaaaattggcatgaacacaccacctcaaccctgtgacgcccacacctgttgaaaaaacaccaac

SEQ ID NO: 244731 - DNA, 365 bp, Glycine max
  unsure (1)..(365): unsure at all n locations
aacaacaactttcgtgtggtgaatgaaaactagaactatgcatggtgaacaccatcatggcgtttgaaacttaataatagatcatggcaccacactcacacggtgagcactaccatangcgttgtgttcatcctctgctctgtgtaaagcgaccacacaatcaagggaacacatggaacaccatttatggtggaaccctaatttgcggatccaatttttagtatcatcaaactgggaaacctatttatgactctctgaaattgcggaatataaaaaaggaaaaaagcgaaatattaaaaggagatggataaaacaatgccacaggaaccatgagagtcactctctttactatgtctaatatgaaa

SEQ ID NO: 244732 - DNA, 454 bp, Glycine max
  unsure (1)..(454): unsure at all n locations
ctcatggtggcctgtacatgtttgtcaattttcatgctcgctggtttctatgaacctcatgaaggcagaataccttgtttaatgttaactaattgatgnttaaattatcttttttaaaatgattgactttgttgtaggttgttgatgaaaatagtgttaataagagtgttaaaccgagcaaacggaccanacgaatgccgggagacatccttgttaggcattatggaagctatacatagtcacgagtactctgtcatatttatgttctatacaatttagcgcatgtttgaatcaacgcacgtacttttgaaacgtgggcaatgtgtatccacacgtgcacttgcacatttaattccttgtaacaggccttggttccttctgcagctcatatgctgatcctattaaatgtcgtgatgagtttatgagggtaaggtgaatattggtatatgtgcta

SEQ ID NO: 244733 - DNA, 390 bp, Glycine max
  unsure (1)..(390): unsure at all n locations
cttgctagacaacaagttgcatatntccttatgctgttacctctcaagcttttctcgtttaanaagccaaaagtggtctttcatttattatctcatgtggctttatacgagaaaataggcctattggctgaaaatcatgatagtaactcgccaattatcatttcttaaatcaagggtacgggaatggcacaacaggacactcatattggtggagcagataatgatttcgagagaaagcctgattcaccacctttaccaaacaagcacccaccaactagctccaagcgatctggtacaaagggtgagggtatgttcacaaacctggctatgaatctgaacccagcactttctttatatngtgtaatcagaactactaccanatacccctca

SEQ ID NO: 244734 - DNA, 443 bp, Glycine max
  unsure (1)..(443): unsure at all n locations
agctntaanatntgaattanaacgatcagaaactgcttgttatctattaccatatatgtgtaatcgaatacacaatgcanactntgaattncaaatttttaataactcggtgtaaaactcaagtttggcccactggtaaatcgactacactccttctggtatatcgattaccaagagaggtaaatttcttgtaaaagaacttttaacttaaatttcttggccaaaccttttgctacctcaattggaattccctttctatttaatataccctttctaagactctagagactgtcttgatcatccatcttgaatatctttaatttctttgtcttgaataaagctntgaaacgcatgttaccctttggcatcatcaagacatcagcttgatccttgtctacaaatgttactggtgtcctattattttcaacatactatcatgtcat

SEQ ID NO: 244735 - DNA, 383 bp, Glycine max
  unsure (1)..(383): unsure at all n locations
ttcaatcatcaaccatattggaataatctatctttcaatctattttcaacatcatctctcaaacatctatcaatcaagctttcaatatctttctacaggaatttcttattcatttctctgcatctatctaaaagtttatgatcaacactatcttttccaagaaaagttctttgttcaaaaacttgagctattcatctttttcattcttttctccctttgccaaaagaacgaaggactaactgcctgaattcttttgtgtctctcttctcccttacaaaagattcacaggactaaccgcctgagaattctttngattcttcccttccccttaagcaaaagatttcanaggactaaccgcctgagatatcttttgtttccccttt

SEQ ID NO: 244736 - DNA, 368 bp, Glycine max
  unsure (1)..(368): unsure at all n locations
cccaagcgactgggctgcagcttgcctatgaacgaatctagcctaaatatttacactagtntagtgtactaatgacaccagaatactcttcataaatccagactctagttgagatatatgaataaagcctaacctgtccactcattactcttggtgaaatcaacaccaacgataagaatagaagactcaaggcctgcacatgcaagagccttagtaacctgtaatcaaccataagtgttgcgaatgatagagatgctaagaaataaaataagttcgaagtggtgatcttttcccgaatgccagaacgcaagagcatctcatgaaaaggatttgaaattcagaacatattaacccacctaaccatccaa

SEQ ID NO: 244737 - DNA, 149 bp, Glycine max
aggattcgacaccgcccggacaagtcgattagagatggcgcggggcccagtctcaggcaatgaccaaaccgaaatccagctgccaaagggcggagaaccggaggaggaccgcagcactcacacccggatcagatgaagccgagattgca

SEQ ID NO: 244738 - DNA, 352 bp, Glycine max
  unsure (1)..(352): unsure at all n locations
ttacgtgcttgaacatggcttaactgagggatcgtgtgagcagacattggaagaggggcatagaaaggaaggaataaagtaacacgttgagggagtgggtagttctttttgacgaaagaataagatctatcagaaccctgatggtttttcaaaatatgaagatatctatctccgaatccttatgagagcgagagagggagagaatcctatttaaaaaaaaacacacgaaatacatatctgtntcttatcttaaaaatcagtttaacttcagtaccaataagaggtaagttgtaacgaatgatgagatacagatcaataaaccaaaataacatagcctattgagagagagcta

SEQ ID NO: 244739 - DNA, 312 bp, Glycine max
  unsure (1)..(312): unsure at all n locations
ctaccatctcatttcgngcttgancatggcttaactggtggatcgtgtgagcaatcattggaaggtggctatagaaaggaaagaataaagaaacagtttgaggaagtgggtagttttttatcacgtaacaattagttctctctgaattcttatgttttttcaacttttaaaattatttatctccaaatccttatgtgtgtgatattcaagtgaatctacttaaaaaaaaaacaaatgagaaatatatcttgttcttatcttaaaaatcagttttaacttcactaccaataagagttagtttgttaacgaatg

SEQ ID NO: 244740 - DNA, 371 bp, Glycine max
agcttattagaaccagccaataccactcattcactgttcttcttcttcttgaaataccatagcttaatcttcatgggattatgaaaactgtctgcttagctagggaacataggtgaaatatcattgttgtccaggcctgagttaaaaaaaaaaagcatgggctgtaagtccctgagtgactattatcatgttgtggagtacttgtaaaaacaggaagctctacgggtctatttgcaatatctctggttttgtgaagaaaggtcccggataaaattgtgacaaagccacaaacctcagtagcaatttgagatgcatcttctgtgtcccattcctgtgtcagaataataaagcagataatgacttgcaatcca

SEQ ID NO: 244741 - DNA, 415 bp, Glycine max
tatctctaccctccactgtgttcataaacaaatcaagttgggggatgatcctctgaagcatctcatctacatgtttcaagatccatacataagtatcactcactaaaagcaagctagtaacgggaagaaacttcataattgtaaacatacttgtaagcatgtcagaatgtgttccataataaagaaattacacgtacttgtatttccttaagagtagttccctctttgtaggttgtctaaatcttgatactgactggtttcaaggatgtgataagtaatggtgactgcaaggtgatataaaagtacacacaccgaaattatattagggttaaattaacatttacatatgtatatttgaaacactactgcttgtctaaccaatttctaaacagagataatatctccagatcatttt

SEQ ID NO: 244742 - DNA, 482 bp, Glycine max
  unsure (1)..(482): unsure at all n locations
ccgagcgtctcgaatattattatattaatcggacatcggagtaaaaagtatttatcgttgaatttgctcagagcttntgttttcaatttctagcatcttgaattattaagggactcaattggacatccgagtcaaaagttattgtcgtttgaatttgctcagagcctttgttttcaatttcgagcgtctcaatatattacaggactcaatcggtcgtccgagttaaaagttattgcgagttgcattntctacgagcttctgttttccattaccagcgtctcgatatattacaggactgaatcggacattctagtanaaacttattatcgtttgaatttgctcagaagctttgtttcaatttcgagcatcttgaatattaaggcactcaattggacattngagtcacaagttattgtcgtttgaatttgctgacagcttctctattcaatttcgagcgtctngaaatattaaatgactcaatc

SEQ ID NO: 244743 - DNA, 365 bp, Glycine max
  unsure (1)..(365): unsure at all n locations
atgacaataaacttttactcagaagtctgattgtgtcccgctatatatctaaatgctcaaaattgaaaacaaaagctctgagcaaattcaaacgacaatagcttttgactcggatatccggatgagtcatttaataattcgagacgctcaaaattgaatacagaagctctaagcaaattcaaatgacaataactnttgactcgaatgtccgattgagtcattttataattngagacgctcaaaattgaatgcaggagctctcanccaaattaaatgacaataactntttactcagaagtctaattgtgtcctgtaatttatctagacgctcaanattganaacaaaagctcttaggagattcaaa

SEQ ID NO: 244744 - DNA, 174 bp, Glycine max
  unsure (1)..(174): unsure at all n locations
gagcaaacccccagcggaaaaaaacccggaagaaacaggccaccgagcgaacaaaagagagccccccccaaacaaacaaaacccgaggaacaagcagcggacaaacaaagaggcancatggttggcaccgccccatccacggaaaggaggagaccccgataccacagcaaagaa

SEQ ID NO: 244745 - DNA, 297 bp, Glycine max
  unsure (1)..(297): unsure at all n locations
atgactgcctcaatactgtctcgggggggatgaactgctgacagaaactatggaggagaagagcagcgtggacatgatgaacattcgtgtactgaaagcccaacactcatcttcgacccaccatccncaggtgcaagacacttgaagtggaagaatgcccgtactaagcgggatggtcaaatgacgtctgaagtggccaaaaaattgcagacaaaattgcagntcatatattttttggttactgcattggcaataatggtagctaacctagtcaatttgtttattaaattcacaatt

SEQ ID NO: 244746 - DNA, 260 bp, Glycine max
  unsure (1)..(260): unsure at all n locations
tatttacatgagcaacaatagtaccatntctcagcattctttccctaatcccattgttgcttgcaactgaggcaataatcagaagcaacccaaaatttcaatcagcactagcaactgctctcacaacatatgtnggcaatgaagctagtagtggtaggacaagagaaaatcatgttcttgagagtgcagaactgatgaagttaaagctgctacgtagtgaaaatagtataggaaactcaagtatatttccactaccacta

SEQ ID NO: 244747 - DNA, 314 bp, Glycine max
cacctctcaaggagctggtgaagaagaatgtgacatttacctgggggtaataacaagagcaagcctttgctttgctcagagaagagcttacgaaggcacctgtactagctctttctgactttgctaaaactattgagcaagaatgcgacgcctctggagtgggagatggagctgaattgctacaaactggacaccctattgcttaatttaaggaaaaacttcatattgccacccccaactaccccacctatgataaagagcgttatgccgtaataagagccctccaaactcgggaacactaccttggtgccaag

SEQ ID NO: 244748 - DNA, 288 bp, Glycine max
agcttggaatcgtctgggaataagatgggggggctatgtacattggacactgattggtggtacgcacatgatgatttgggcctacttatgacatgtgaattggtaaattaggactgctgatgaaaggggactatatgcctcacgtaaaaaaaaatatcgaaaataatattcaacaagaaaaaaagcattagtgaggataaactaaaggcacaagagaaacctggctacctcgaaaaaaacaaatactaatataatgagtgaaaagactatacctcgtctaaacttgaa

SEQ ID NO: 244749 - DNA, 345 bp, Glycine max
  unsure (1)..(345): unsure at all n locations
tatagaacacctgtatattctgaattatgttaacctcgaagtgtgtgaagaatcttaaagcaccttgttgattatctttgcatcatcaaaatatgtattatacttctattctgccatttttatgatgatatattataagcaaactttttcgatatcaaaacctgctgattaaactatctaagacatngtgtgtcctgcctctgacgaaagttgctctaaggaccctcactttatatgaaatcatctggtcgtaaggtgactactaaattgctctattttatatcgactatatttcttatatatatctacactatagcatcatgacatagtggggtgataattttt

SEQ ID NO: 244750 - DNA, 452 bp, Glycine max
  unsure (1)..(452): unsure at all n locations
ttggagatgatgaaaatagtttggatgctggtaagcattgtggtacatctagatggtaacccaacaagaagaagaaaatagctgcgaaggttntacgttactttccattgaaaccaagaatgcaaagattgttcacatgtcgtaagactgcaaaagatataagatggcatgtnttggaagacaataaagatgggttgttaaggcatccaagagatggagaggcatggaagacatttgatttaatccatcctgagttttcttcagatcctcgaaatgttcgcttattctgagctctgggagagtgcgatgcatgggaatcgctcgtttgcacgaacacattgaagtacgattgactcatagaatatgtgatgaatctgaagcttctcctcttgatgtatgtggagagtgtatggttatacactctgtaaagtgcgatgcatggataagaggtg

SEQ ID NO: 244751 - DNA, 329 bp, Glycine max
  unsure (1)..(329): unsure at all n locations
tgccgctgcagcttctagccttcataggagagtttgttcttctttcgttgtctctaaatgngggaatgtgctcaaatatgtggggcaatattggtttgttctcttgcttgattgggttgaattgagggtttgtatgagatggccctatgcctataatgcatttagaagcaatgggacatgccacatttgccccgttctcttgctattgatgcctatacacgcgctctgcaagtgtttggtgaaatgcctcaatggcattatcgcgtgattttcgtaaggaaacaacccatggggcgaattggtttgcacatattttctattntttggga

SEQ ID NO: 244752 - DNA, 394 bp, Glycine max
  unsure (1)..(394): unsure at all n locations
gctcgggtcgncaaagagaagtacaagtccatagccatcaaagtctgaagagagtatgatgaactaagggacgccaatatggccaccgatgaagccttggaatgagaaaccaagaaggcccgaaaggaagaacacgaccaaaacaagtcttgaggggctttatagggcagcaatagtgagctcaagctccgaagaggtgaaaggaatcatcacgggtcaaaggaatgatcttgaagaacgagctaaaggcttgccttaagtcgaaaagaaatntgtcccaacagttaagcgagactgaagggaatatgtgggccatcatcgatgagtgcaaagagaagctaaatctaacggcgactcatgagcaaaggctataggatgagtacgccaagatatc

SEQ ID NO: 244753 - DNA, 85 bp, Glycine max
aacacccccccaaaacacctaactcaacgacaccccctaacacccctaaacacaccccccacacccctcaacaaacaaacccaaa

SEQ ID NO: 244754 - DNA, 495 bp, Glycine max
  unsure (1)..(495): unsure at all n locations
cttggtagacagagatatcttatattttatacttattgtttattcactcactgagtaatattgaatactcctattcactctaactactattgttgatagccaagagtggcttagtattaaacaatacttgggtttcttatatactgggggagtcttagacaatgacataagtggtattaagaatacgtatatagttaagagtgacaggagaaaatacttgttttatattcaagttcttattagtggaattctttactattgtgtanggaagaactggatgtaactcaatttgagtgaactaaatataaaccaagtgtctatactcttctactatacagttcattaagcattctcttaacactctatgtcattcttctcataccaaagtatttgcttgagaaatatagtttaaagactctatcctattcagtcattagatgatcaaacttgacttgtctatacactattattctttctattgacaactttatcatg

SEQ ID NO: 244755 - DNA, 321 bp, Glycine max
aacgtccgattgattttcttgattattatattcaaagatattctgattatattattattattgtgactttttttggtttaaccgtggttgttgtgtgaacaatagattatattttgctcttacagtgattaaacgagtatacaatgcaaatgattggttgaaattcattttatcatttattacgtgagataaccggcttaacgatcggttaaagcttgtaaaaacggaagataaaaaacaccgattgtgaacgatatatagatgaacgccaacataacaataaatgaattgaaagtctctgattccaaaacttattggttg

SEQ ID NO: 244756 - DNA, 259 bp, Glycine max
aatactgtgtccacaaaccgttttacctacggcctcggatcatcaacaagcgacaccgttgcgaaaccacccaccaccaactcacatcgttacttctccgtgttcaaccaatcaaagcaacgatggatcattattatttcggcattacaggggtttacatctcgttatttatgaacaataattatacttacatccgactaagtagggaaagtatgctatgaatgaaatataaagtaaaaaaatccataaattttaacat

SEQ ID NO: 244757 - DNA, 358 bp, Glycine max
cacaaaagcaaaaatggtttataaaatggtgagttagtagaatacccactggagtataaaaaaagaagtaaaagaataccagcacaatatttcacctcaacagtgctcttagttgagtcatctgactccataagagtagtaaaggaacactccagagtctgatactgagcacaaattccaggttacatcagaaaaattagttattgaagctaaaaatgagagctacatataatagggggggaattgaaaagggtgattcttacgtgcacatcagtccacatgacacaagaatgtgtccatctgttgatgctgtcaagcctcgtacagcaccacggtgaccaggaaactgacaaactat

SEQ ID NO: 244758 - DNA, 375 bp, Glycine max
cttgccaccttcacttttcaaaaggaaatcattacacgaaaccgattcttataggataatttgactaacttgcaaagccaaatgtgtttgtctgattcccttaatgagtttgttcttcttagtgagagagcatatttgtggacatccctcgctcatttgtggaacaatcgctcttgctcagctacaaacgttcttgtagaaccaaggagggaaagtctctatggagatgcaccgtctatgctgctatatggcgtatatggcttgaagatatattgtgtgttaagaactcttcccacctctatgcacaaaacgatgggaaaccttattctattgatttttattatcaccaaaattatacgataaattaatatgata

SEQ ID NO: 244759 - DNA, 441 bp, Glycine max
taaaatactatcatatatgctggttcgtcacagtgtagaacacacattcgacatggtgttgtgtgagagatatttggattggccaatcaaagtttgaagttaaccttatctttttcttctaagtatcttatgtgtaaataaattactgtgaaatttatactgaaatgagttactctccaatcattgatatttctattagcatcatcatccattagtggtttgaaaacgctaggagctttacaacaggcatggagacagcctcagactatggagcattcatggagaaatacactttaccaccagattctgcaccctctcttcctcttaattcactcacccttgcagtcaaagagatgtatgtacttatctttttgcaccacaatattctgatggtctcataattctcctttgctgacctcaaagtcagttagactctgaatc

SEQ ID NO: 244760 - DNA, 431 bp, Glycine max
  unsure (1)..(431): unsure at all n locations
ctgcagctgcagatttggattgcacagggagcctcttttagtttatatgtctttctattgttntaggcaaacttttatttctgaacaatcttcaattctggatctttccattttctaatattatattattcctattgtttttcacgcaaccaaattcaatgatgttaagtcctgcacgggaacagcattttggatggcccctgaggtttgccttcaatctcctcctctaaagaaagttattgaaaaatgggccaacatatgtattaattgagtagacatagtntgtaattaacagttaataattaagtntgttggtggatccatggttctaggttgagtttatgcatttcttcagccatggacctgacaggctgacacctaataaatgaaattaattggtcatacatctatcacaagcattctggatataa

SEQ ID NO: 244761 - DNA, 423 bp, Glycine max
cttcactttatggatgggaatccaatactctgatatttaaatacctattacatgtctatgactgatcagaaatgctaagatatattctaataatctagtctgtaatccagccttattgattacctgtgccaaattcatagatattatttatgcaagcagattgggaagctattcactctctaattgtagtgtgctcctgatccaaatataatctggatggggctcccttcaccgcaggaatatgctcccttcaccgttggaatactatcggtggagtgatgacaaagatgattccccacaacaatgttatccctaccaagaaatctcatgtggttaacacctaccaagaccatcaaacaattggtctcacttaggtatggctctattagatgactgcaatcctaatctacgctacctttaatt

SEQ ID NO: 244762 - DNA, 458 bp, Glycine max
tcgacgatggccactaccatcttattccgtgcttgaacatgagctaactggtggatcgagtgagcaatcattgcgaagtggctatagaaaggaaagaataaacaaacatgcttgatgatgagggtacctttatttcacgctacaatcatatctctctgaattcatatgttgtttcaagttgtaaaattatttatcaccaaatactaatgtttgtgaaattcaagtgaatctatctaaaaaagaaacaaatgagaaatatatttgtttcttatcttataaatcagttttaacttctgtaccaacaagagttaatttgttaacgaatgaggagatactcattaaactacacacaaatacaactatggagagagagctagaatcgaagttttgtaataaaaacacttggatggaaagaaatcccaaaaatgataagtgtgtatctatttaaactgtttatt

SEQ ID NO: 244763 - DNA, 369 bp, Glycine max
atgaactaaccatctaaaacttgctcacattgcctcctcaattcggccgacaggctacaggggacaggacaatatgcacgtggtattaaagaagaataacaacagtcgagaattggattattccactaacaatatacatctaatcatagtttctcaatttaaaatatctttccatatctatgctgtgaatacaaggaatctttaaaaaaaacaggataaatattgttttgtcccaaataattaacttactccacagagtattgctacgatgtaatccattaaactcaaacatctttgaggaacttgttgaatttgttaaaaacactggtgtatgggtcccgaatgaatcatatttttaaaaaacttatt

SEQ ID NO: 244764 - DNA, 258 bp, Glycine max
gcttctgaaaacaatatcccagaatagggctcttctggagatatttccctacggggtgcttgtctttgcacgtaccctacttgggaagcgccatttgaactggcgacttcatgcatgttcaacaagtggcaagctcttgacgaaagcgcagacatggctgggcgattcacgttgcatgtcgccattctccggagcgcttttactgcaacatggtcaggcagctcttgctgctagcaatgcattggctgccataagtgc

SEQ ID NO: 244765 - DNA, 263 bp, Glycine max
aagaagaggaaactaatcaattggaaactctgacacagataatagaagaatggcacaaggcgggaaaatggaaaaaatacctatagtatacaaagccactaaacttatgaaacaagacgaggacaaacaaacttcaaatgaaaagtagggttcattggccttcagatgatacacatgacacggcaaatcattcacctttgatcacggtgggcgaccggatggaaggacacaagctagttatcccccggagggaaggacaacac

SEQ ID NO: 244766 - DNA, 273 bp, Glycine max
  unsure (1)..(273): unsure at all n locations
tcggactacatgtaccctttactatgagaacacaagagaggatctacnaaacaaatgactccgacgctcaataagcgtggagtgattgagaaaaatcaaaacgggagatataacctgatatttatagcgttgaatgagagcctcgagtccttgatgggcagggttgttacagtacaataacaacccttatatataatttgtttctactagataagtgagtggagtgtttgtaattcgaaagaggataataatatatcattagaattcaatata

SEQ ID NO: 244767 - DNA, 173 bp, Glycine max
tcatcaatcctcataagacgaatgagaaaaaaattaatcaccgaagagaaaaagatgctatcacagaacaggaaggactgtaaccccaaaaacttaaaacacccaaatgatatatggacagaatcaaataaaccaaaccaaattaaagaaaaaaaacaaaacttacgaaaaaa

SEQ ID NO: 244768 - DNA, 417 bp, Glycine max
  unsure (1)..(417): unsure at all n locations
gtagggaactggtagttttcagactaacgtatctcgggtgaacgaccaaataatattgctctatcttattgctttctcttttgcgctttanacctacttaggattcaaatttgatttttggttttgaaaaactctctttcgtctctataaaaatttgggggttatcaatttgaacaccattctgcaaaagatctaataatttgtgtttacacanttttatcaatagacgataacgttattattcaagaataaggttgtaaatttctaaagtcataattcaatccctctttcttgtaatatttacctttacaatatagcaataaagataaagtgttcattccaaataaatcatctgtcaacacatcaacaccaacacantatagaaaatactatataatgatcgatgatatcaatgat

SEQ ID NO: 244769 - DNA, 386 bp, Glycine max
  unsure (1)..(386): unsure at all n locations
gcatcttaaatattatcnattcatatgtgcatcatgcatcatanatgaaggagtcagaagaaaagctctaaagttataaaattgcttctcaagttaacactcntttgtttaattgattacaagatgatcataatcaattacataagtgtgtgaagcttgtagagaagtgtctcatattggtctaatcaattacaagcttatagtaatcgattacatacctctttttgatacaatgattgattcttcaggagtctttgatttaatagattaccaaatgatataatcaattacttctctcttaaaaagtgtttcagaagtgatcaagaacactctaatcgattacatcaagaaactaatcgattacattggtcttggaagttttctag

SEQ ID NO: 244770 - DNA, 420 bp, Glycine max
  unsure (1)..(420): unsure at all n locations
ctactcttaaacaaaaatggatacaacctcctccaataaacacaatatcaatgtaaatntagagcanactcatgcacatacttgcttaccaacattcactcgcacaaaatattcttctaactaagaaaaatgcacctccttggctaaatttacatacatgcatactcaaagcattttggctaccaaaaattgcacacgtgcacattctggtatatctaatacctatacatatacaaaccttgtgatgaatcttggctacctacacaataaggtgctacatttcatgctttactcaagttgttttgctacctaaagccgcatgcaaattcaagtatattttcttttgctgactaanattgtattcaaattaaaaagtattttgtaagggtatttctttacataacatgcaacatatatata

SEQ ID NO: 244771 - DNA, 181 bp, Glycine max
gaccaccaagacaaaaaataaagagcccaccaaggactacaaaccaaaaaaaccacgcaaaaaaacccaaaccaatctgtttcggagagcgcggaagataactacacacgccgcaagaggcccctacaaaggaaagacacaccaaaaatagagtgccctaaccaaaaagaaaagcgaatgt

SEQ ID NO: 244772 - DNA, 415 bp, Glycine max
  unsure (1)..(415): unsure at all n locations
atatgatctttcgacagctttntgaaatctattcacaagtttttgtaatattttgaaagaatggatgagcttgacagtaattcacaatgagcctttttaagagtgtcaggatcatcgagatataccttatccttttgatctgattcaaattctttagaagttatgtatgccattagacatagatnggcttcttcttcatcatcatcaaacgaggtgtagtccaaatcttcctaggtgctcataagacctttcctttctctggccttctaatgattcttcttgtcttgtgacttctacacatctgggcattcagattagaggtgtccatatttctcgtattcataacatagtatggagcttctgttggatcaagtggcctccgaatattaagaacggagtggtgaataatattaat

SEQ ID NO: 244773 - DNA, 420 bp, Glycine max
  unsure (1)..(420): unsure at all n locations
atatcattatctaagatatatatggtattaatttatgggctatagtacgccatacttaatgaagaagataaaacanaggagataccaaacatactcatggacctatgcccacccaggtaacaagctaatgaaaagaggtaaataagggtattgctatttacgcaaccataattgctaatggcattacccatgtgagtgctctttagccatattccaaaatatccccttgaataattgcacaacggaatatggttattgttgtgcacttgcgggtgtgaaaaaaaaaatagaagtactgtttcgttgtacatgtgtacaatacaatcgtatttccgttgttatttttcacccncaaatagcacaaaatcatgatttcattgtgttatttgatttttcccacaacattccatcttgcaatgg

SEQ ID NO: 244774 - DNA, 322 bp, Glycine max
  unsure (1)..(322): unsure at all n locations
agcttcttagtctcggctgatgaagaagaattcgttgttactttatgcactcctctaatgacactaaatngctgggagtgtgaagccatcttctcaattaaatatctggctatagcaagggtcatgtctccaagggctccaccactggcagcatctatcacacttctctccatgttagtgagtccttcataaaaatatcggaggagaagctgctcaaaaatctggtggtaagggcaactggcacaatagttcttaaaactctctcagtattcatataagctctctccactgagttggctaatgcttgaaatatactatctga

SEQ ID NO: 244775 - DNA, 470 bp, Glycine max
tcgacgatggccactaccatctcatttcgtgcttgatcatggcttaactgcgggatcgagtgagcaatcattggaaggtggttatagaaaggaaagaataaagaaacagtttgaggaagtgggtagtttttcttcacgtaacaattagctctctctgaattcttatgttttttcaatttttaaaattatttatctccaaattcttatgtttgtgatattcaagtgaatctatctaaaaaaaaaacaaatgaaaaatatatttgtttcttatcttaaaaatcaagtttaactccagtaccaataagagttaatctgttaacgaatgaagagatacagataaaaatacataaaatataaagctataggagagagagctaggaattggaagttatttgtaaaaaaaacaactggcgatgtgaaaggatgatacccaagaaaatgaatacagtgatgttatcatatttataaac

SEQ ID NO: 244776 - DNA, 275 bp, Glycine max
  unsure (1)..(275): unsure at all n locations
cagctgcagcttnttgtcgaggagcaaaaaattactttgcatttctgctcggctaggatgcctcgcgcgaactgaaccgaagaagcgtttctgccgactggcatgctcgcattatgacgggcaagaaaacaatagcccacctcggcataaacaacaagactcaccgatattagacaagaaaagaaaaatgctagccgacggcggacaagaaagatgaccgaccggggtctgaaaaagaagcacgaccggatgactccggtccaacattttctaac

SEQ ID NO: 244777 - DNA, 205 bp, Glycine max
  unsure (1)..(205): unsure at all n locations
tctgcactttgtgcagaatatggatgtgaaattatgcaacataatgttgcacaagtgcagaataacgctatgcatatgctggttgtggaaagagcagtgcagaatgagttctggacgtntgcctccagaacccaatggtcagaatgtaggcttatgtacatcggactttcagacaaatgttggagtcgatccgacggttaatgaa

SEQ ID NO: 244778 - DNA, 500 bp, Glycine max
  unsure (1)..(500): unsure at all n locations
catgcaagctttgaattctagtaaaaaaattcctcatacatgttcnattactcatgcatcttntacattcaaaaccggaaacttagattcctaggcatgagtcatccttttggcactntagtctagcttctacaaactacccacacactcacaatgtgcacaatttgtttcgcaagctaagttccacaaaatcatgcgcaaatgccattgaggtatttcaccaaacacttggtgggcgcatgtttaagcatgaaaatcaagggaatgagggcaatgtggcatgccctattatctcagaatgcaccctaggcctaaggtaatcccctacaacccctcaattaacaaaaacaagcaataattcaaggataatccctcacattttgagcaaatacatgcaacttaagcaccaaaatacatcaatggaaagccagagagcccacaaatgaggtacttacttgttggagatgataatagagaaaaatggatctaaacgcgaaaat

SEQ ID NO: 244779 - DNA, 410 bp, Glycine max
  unsure (1)..(410): unsure at all n locations
acattctctgctaagatcctcacttgtgtattcatattaattatataaaanaatatatttaggtcataaaattctccttaggtacttgtatatgagtaaaacaaaaagatataatgaattgaacttctctcatgagacaaaatcaatgtatgcgcctcattctttgggaagttagatgagagagcttctacaaaaatcaagtgtatcaaatgattttaatttatggaaattcatctcttttcctataagtggtcatacataattttatccacacatgacttaatggcaaacacactaaatgtgaaccaagtataagcttatacttttagaaattaatagatttctcacaacatctagtgatataaaacttttaactcagacatagtataagagatacacaaattgacaaa

SEQ ID NO: 244780 - DNA, 473 bp, Glycine max
  unsure (1)..(473): unsure at all n locations
ttacggacactaatctcatacattacttaatctttgaaactaatcaaaagaaacttgtgctaatatcatttactggtcttaaaaaataacattntaattcatttagataattagtttcattcttcaaatattatatagtaaagccgcttatctaagagagagaaaagaaaatctggaatgattattntaataataactacgaatcgctactatgtgtgagattaaatctttactaggtcgtaagaagagaataaacccatctttgaagaacgtccacttattntataaaataaaattgtgaacctttttttaatgatcatgttattagtatgtctactagtttttatcgataattaatgtgtcgaactaattaactaataatcttctagagatttcccttcactcatgtgttcttatttattatgttataaaacaatatttctaagataaattagatatagaactattattat

SEQ ID NO: 244781 - DNA, 428 bp, Glycine max
  unsure (1)..(428): unsure at all n locations
ttcttcccctctgacttatactcatgagtgattggactcgtgtaatcatcgcagtacatatggtcttccatcatcgacttccaataagaataattttctgccgttagcttgaagatatccccataatgagtgacaactccctccatcttgaatcacacaggataatagctccccttgaaccanaccagaatctaataccattgttgggaaatacataacactattccctatctgtagactcaaaataggcacttagcggaaacggaaaatcattaatagagtagaagaatgacaccaagaaattttaacgtgaaaaaccctctctatgtgagaggtaaataccacgagaacaagctacgtaatatctccactattaagagtaggattacaatgactctctcaatacatgagaatatctcttaacctca

SEQ ID NO: 244782 - DNA, 355 bp, Glycine max
aacaatgtaattgattacactcttgattaaatcgactaagtgctcttgatcactcttgggaacactctccagaatgatgtaatcgattactatatcctcgcaatcgattaaaccagaaactcgaaaaacaatcatgatctcatattgagttgtgcaattgactatgaatatatgataatcgattaaactagagacatgatttctctacaagctatcaaagacttatgtaatcgattatacgcatgtggtgatcgagtaaaccaatgagttatatagcacatatgagtgttcttatattagaaactagtttgctatttctatatgatgatgcatgatgtgcacacaaatggactaa

SEQ ID NO: 244783 - DNA, 361 bp, Glycine max
  unsure (1)..(361): unsure at all n locations
aataatgactaaattaaatcaaattaaatattataaaatcataccaaccaaataaaagaatcaagatcttctctagccaatatctntggaaatgattagaaatcaaagtataccttgggcatacttttagtttgaaacttaatacgctctgcatacttaaggaaaaaataaaacacagcctaaatttgtgttttattggtgtacttaccaaaatctggagttgtcccatggtagggtggacttgcctaaggtaggctccacgatcttgcacgtcagactgagaagtacccttaggggggacctacaaaacaaaagagcctctgatgctcaagtatgtgaattacgtgagaatgagtgatgc

SEQ ID NO: 244784 - DNA, 337 bp, Glycine max
  unsure (1)..(337): unsure at all n locations
aatgtcttagtctccttggtaagtaattttggtttatttctagtatctataaatcatttatatcgcggcatgatggcattataaagttgatggtgtgacatgatgaaatctcacataacgtgaattacgtgcattntttgttcaatcctccaaatgaattattttgggtcaatgtgtgttcattctttntaaataattggcgttatataacatgaatcatatgcatgcaagaatacgtttttttgggaaggtaccaaaccaaaagagatcatcaccgaccctgagcaaatcaaagaagacgcatgttctacatcggtcaatatcgggattcaacaac

SEQ ID NO: 244785 - DNA, 300 bp, Glycine max
ctcaaccgaagatgtgattaggccgacactggcgtgtgaccatgcgctcgcgcaagataacaatagcccatatcgaatagaaaaaataacatttatcaccgatattgatcggaaacaaagctggttgacgacggtccggaaagatgaccgatcgatgcctaaattaaaagaaatcaccggatagacgccgatcgagcatttcctaagtgacatcatccaaaaattatccagggattggataggaaaaacaatagccgatacgcactcgttatgtagacccgactgacattttcagccgac

SEQ ID NO: 244786 - DNA, 385 bp, Glycine max
gaactccttggatgttggtggcgctacacatctctagtatggcagcgtatatgtcggggtcggctccaatccctcagtgagtgatcatgaagccgaggaacttgcttccacctaccctgaaagtgcattttttagggctgaggcacatagcatatttgcagagttcctcaaaaacttggttcaaggaccccaatgcctgactatgcgttgagactagacgaccatgtcgcccatatatacctcgatgtgtcatctgatctgttgatcaaagacatcggccatcagacaattggatgaagcgcctgcctttttaagctgtaatgctgagcctgtagcaaaagtacatctacatgaaaaagcacttgcccctgcatgggaacaacct

SEQ ID NO: 244787 - DNA, 371 bp, Glycine max
  unsure (1)..(371): unsure at all n locations
ctatcattcaagaattacgaaaatcttttgtgttattcacattccacccaaagattatcgttactcatcgtgaggtcttcataatctttgtgtgcttgcgaactttctctccatagatcatatctttattctttctgataattgaagatcattcagctccctcagatcacttttgaagatcttttaggtttttttccaactcctgaaagttattaagacaagtagaatttatttttggcaatcgtctcattcttaagacaaagcttgtactctttntccttgagagttacacaagctccacatgtctgagtatactcattcagagaaacatctacttgatcttgaaggattctctcaagttttaaatgatc

SEQ ID NO: 244788 - DNA, 212 bp, Glycine max
gaacatagaagatgtattataaacaaaacaacggaactatctaacaagaaatccaactaagagctagcttaacaaacacacactttggaataaataccaaagaaaaaagtttttcatgctaatattatataattgaaaacaattgataataaaagcacaagtggtaaaatagtagacgaaactaaacgctcaagaagcgctaaagtacttag

SEQ ID NO: 244789 - DNA, 346 bp, Glycine max
gatcctttaagtttatcaaaccaggctctatgggcctgctctagtccataaattgctttgttcaacttacatacaagtgtcttgtcagcagcttcaaacccaggaggctgcagcataaaaacttcctcctcaagggtgccatttaagaaggcattgttcacatcaatctgctgtataggccacttgtgagtaacagcaagagtaaggacagttctgacagtaacaggcttcaccacaggagaacatgtctctgtaaaatcagtgccagcttgctgatggaagcctctaactaccagcatggccttatatttgttaatggagccatccgggttctccttcaccctaa

SEQ ID NO: 244790 - DNA, 365 bp, Glycine max
taaatcttcgccttctccaaggacaggctgcaatcaaatttgcttgaagtcaccgtcaaggataaggacattgtcaaggatgattctgtggggagagttatgtttgatctcactgaggttcctcttcgggtacccccagacagccccttggctcctcaatggtacatattggaggacaagaagggccaaaaaattcataataatggggaaatcatgcttgcggtttggatgggaacacaagcggatgagtccttccccgaggcctggcactctgatgctcacaacattagtcactccaaccttgcaaacacccgctcaaaggtatatttctcgccaaagctttactatcttagagttcaagtaat

SEQ ID NO: 244791 - DNA, 346 bp, Glycine max
aagctatgatggagtaccctaacttagaaagcatacgcaacccactgaaagaatagttccctacacgagtgctgcttccctatagaggagtgcggtacagggagcatggctaagtgcacatgagagagggtcattttggtcttcccggtgccataacaacaataatcttggtatattttactccagaacacaaggggtggtataaaattattctgttattccttctcaaagtaggtacatatttaaatggtctttgtgctgcagataaaaactgaaaatcagagaataaagttgagcaagcaccagctttcatggtgttatgatagcacgaccttgggcgggacat

SEQ ID NO: 244792 - DNA, 425 bp, Glycine max
gttgcatagcttcacacaaattatcactaacaaaggtacaattacataatatcgaagcttacacgcagactacaataacagattcttcatcattttaatcaatcataggatcaaccatatctgcaattaccaggagtaatgctcctctaaggaaagcccaactgttattctctctgataggtctacaacttctgcatgagagagcaattcctcactcactatgcctttcacatagcccttcacacggtgctgaagcagctctggactgattttggactacagctgcatagcaccacaagtattaatcgcaggcttcctcgtggtattcattctactttgccttgcagacaccacagaacaagacaccgccactctcttacattatttaccttactagaatgttcggtagcacttcctttcaaaga

SEQ ID NO: 244793 - DNA, 142 bp, Glycine max
ttcagagcctcatttttctctaggagagaagggagttttgtgcaaacgaacgccacggcttaataggggaatctgggcatgggctgtcaacacaaaaccttcttgatcttcgtgtacaagagaaccttctgaggagaaagtt

SEQ ID NO: 244794 - DNA, 374 bp, Glycine max
  unsure (1)..(374): unsure at all n locations
catgatttatactatgatttatgacttgtaggattcacattgggcaaaattggacgagggcaagtgtgatttctaanatctgcactattatgcagaattttgctgttgaaatgtgcagcagaattttggctctgtgcagaaaatgatgtgtatttgctggttgtggaaagagtagtatagattgggttctggatgttttctatcagatcccaatggtcacaatgtagatttatgtactatggacctccagtaaatatttcgagtcgatccaacggttaacgatattgaacgaagagaatgttactggggtatttgagtaaggaaagctacggtattggtttgtgttttgggcagagtntctgtctttccctgtt

SEQ ID NO: 244795 - DNA, 399 bp, Glycine max
gctgatgatgtaatatggagatacttgctcagtaattgcaagatgcaagggaatgtataagttgcagataaggcattcaattcgttattgcagttggaccctcaagattcttctgcttacgttcttttagcaaacgtatatgctaacgtagggatgtggggtgaggttgcaaaaataagaagtataatgaagaactgtaagttaaagaaggagccaggttgtagctggattgaggtcagagatgaggtacacacatttcttgttggtgacaaggcacatccaagatctgaagagatatatgagcaaactcatctacttgtggatgagatgaagtgggctggatatgttccagatattgattccatgcttgatgacgaggtggaagaacaagatccgtat

SEQ ID NO: 244796 - DNA, 199 bp, Glycine max
cagggctctgcctttagatactttgatatacttcagtacaccgaggactgatcaattattaataatatcatatttttgctgtgaaaaaaaaattgggccagctagtcacaagttgtctaaaacaaaacttcctgaccactgtccagattatttaaactaaaatggcatcgggggcaaaacattcagagactcattgtgg

SEQ ID NO: 244797 - DNA, 421 bp, Glycine max
  unsure (1)..(421): unsure at all n locations
ctctccactttcacaaaatcaacatgaacccaccatcccccattggccacctttcactgagctcacatacttctacgtagcccttatccttggtcctctcaacaccgggtccccatcaacccctccaagcttgcacatatcaagaaatcaatttccaaacatcatgaactaccctaaaccaagaaaacagggcagaggcagaaaactctgcccaaaacacattcacatattacaactttccttactcaaatactccagtaacattctcttcgttccgattcgttaaccgttggatcgacttgaanattttactggaggttcctagtacataannattacctttgaccgttgggaatctgctagaaatgtccaacacccaatatgtactacctntcccataaccaataatgcacaagcattt

SEQ ID NO: 244798 - DNA, 305 bp, Glycine max
  unsure (1)..(305): unsure at all n locations
ctatccctgcaaactgatacatagcatctgagatcagctgggcaatatgtacactcacctgagtcaggagggcgtagaccagctaacacttcagcagggggagttctaagttatggtcgctagggagaatgttgctaagcatcaatgtcatccaaatttgtgtgaaggtagtcatgctggtgcgcatgatctgcacccatttccctactacgctctgtgaaaaatcctgcccnanatgcatagcaactggttaatagcctcatcgtcgaagccagaggcctgactcctcctctggctaaactcat

SEQ ID NO: 244799 - DNA, 271 bp, Glycine max
gaaacgtctgtaaaaccgaatgaaactcgtccaaatgaaaattctaagttcgggagttgtatttacgcttgaggaaggtattagcacctcttacgtttgtttcgaaagacaacagccttatttctagaatttgtggaattggtgtatcttaacttttatttcttcttattttttgaggtcgacaaaagcggggctgttgctcctacgtaccctcctttggagaggaaatcagacctacgtagttctttcttaagcgtgaatcgagtgattc

SEQ ID NO: 244800 - DNA, 337 bp, Glycine max
ttctattacacccttatctgtataagttcaccccaccttctttcataattgacggaaaagttacggaagccttaccaaagcatatatgacttaactttcatcttttttctcttccctttcaccaatgttaagtggaatatgcttacccaatgtctctcggaacatttacggaagtattacggaagccgcggaagccccgaaaaccacttttcaaaaacgtggatgagctggccacccagttgcttcctccttaagcaacccaacttccaaaatgttccggaacggcctagattagaatgctattacacccctatcatgaaaagtcacccccccttac

SEQ ID NO: 244801 - DNA, 375 bp, Glycine max
  unsure (1)..(375): unsure at all n locations
tggctgatgcagtaatagcagaanaacttcctttcgaagtggtggataatcaacccctcacgacacctttagctattctgggccagaagatggtttcgacagaccaagggcccaaacgcatggttctggtacaataggcaggcctgcattcggatgaaacatcgtgggaagagtgggcgtgcctttaggaacaacatcaccttgaggacaaggtgttatttgaagaccgcgggtatgttacgaatagcaactgggagtcacaggcctcgaggcccagaagaaagagtagtgttcctgtgtactngaaggactacgagctttaagttngagaggtccccgtgaaagagcagcaacacgaatggcgttggggtcatt

SEQ ID NO: 244802 - DNA, 340 bp, Glycine max
ccacaagagaacttccacgacgaggccaccatttattcggctgacacggaaacaggggatcgggagcaacatggaggggccaagaaagaaagaaaagaacagttgggaagggagagcctctcacgaacaaaagtccccgaaaccagcactccaactaaaataatatcccaacctatggcggaaccaaggaacattaaaaaaaacaacgaaaaatactgtactaccaaaaacaggaacccgcccacaaagcactgcccgaagaaaaacgataaaaccaaaaaaacctagaaaaccagatgaatatgaaaaaacccggaggaagagaccaaaaaaaaggaga

SEQ ID NO: 244803 - DNA, 431 bp, Glycine max
  unsure (1)..(431): unsure at all n locations
agctttctcccattgtgttgctatttggcatggcatctccaccttcagnggggcgcggcaggagaaacaccaacagatatctcgatgcaattcattgaaaatgcttcttgaggaggaggtagaattatttatcaactcagtcacataagaagggaataagaactcgttagaaggaggaggtacaagattcataagggaattcctcgaccctacgtgctaaacccacctttctctcctattgcacgagtttaaaagtgtagtgtgcacttgaccaaaacctactgcagtaatccataatttaagccattgctgttgctgcgttgaccttaaagttggtagcaagtgctacattctctgctgtgcttatttaactgagactgggtactactcccatagtcaaagaatgtgatattgcccatgaaaaaatggga

SEQ ID NO: 244804 - DNA, 424 bp, Glycine max
  unsure (1)..(424): unsure at all n locations
cgttttctattttttggtccatacacagtcacacacaacacatattaaatatgtatgaaactgttctttcacacacacacaaacatttatatcctgaatttcctgttgctacgtacatgcatccatatatgtagactaaaactataagagtaattcaaggaagttatattgtatttaaagtttgaggcgaggttaacagtgtcctctaataaggcatagacttttatatccatccgtcatacccttntgcaaacctgtttctacaaacagcatcaatattgcatttcagaaagactggaaaccctatngagggaggacgcgcgacgactctaagtaatatntggtttgtttcagaaatatatatatgtggtccttggagcttgttgtttcgaatcgaactatgtggatcttctaaaatgtatat

SEQ ID NO: 244805 - DNA, 367 bp, Glycine max
gagagaggggggagcacgaaattgaaggaataaaagaggcggagaagtataactttgaagtgtgtctcataagactctcattcatcatagttacaacaagtgttacacatgcttctatttatagactaggtagcttccttgagaagctgtcttaagaaaacttccttgagaagctttcttaagagaacttccttgagaagtttctttgagaaaacttccttgagaagctagagtttagctacacacacccatctaaaaactaagctcacctccttgagaagcttccttgagaagctagagcttagctacacacacccatctaaaaactaagctcaccttcgtgagaagctttcttgagaagctagag

SEQ ID NO: 244806 - DNA, 340 bp, Glycine max
  unsure (1)..(340): unsure at all n locations
agtgctaaaatctctaacaaacctcctatagaaacttgttaaaccattcatacaacctatatttagttttaaaggttgttttctacccatctccttctctaattctaatttgatgatatccactttntgagtncaatttagagaagacacaagcacccattcatttcaaccaacaagtcgtctaacctaggaataggatctctatacttttctgttatgttattgatggctctacaatctgtgcacatcctccaaattccatctttcttatggaatagaatgactagaactgcacatggacttctttaacccaccccttttgcatcaagtcttaacttgc

SEQ ID NO: 244807 - DNA, 210 bp, Glycine max
gcaaacggagagaataaggaggagggaggaacccatgttgcgactggcattcctacatgaccaaatatcccaccagcccaacaataacaaaactcagccaatatgagcccttctcattacccgccaccctatcaaccaagaacactcaatcatccacaaaggccacccctaaacacccaataccaacaacacccttacacaaaccaaaca

SEQ ID NO: 244808 - DNA, 352 bp, Glycine max
  unsure (1)..(352): unsure at all n locations
gacatgcaagtatccataaatataaactcggatgtttcatcaagtcgtcatcaatacagagcaaccacaagataagaagatggatgcacaaaacactacagtaatcagaagaatcaccagaagacatcctactgaagaacaatctttaaaagataacccattaccagctcaagaagatatcatgaggcaaccactaagacaagataacaagcattaacaactatatgtcaaattcaaattttgcaagctgtatagtagataatagtagaaaaatgtagtatccaaagttgagaagctggagaagtnggaggaanaacaattgacatacagatagatgaaagggaagctcatg

SEQ ID NO: 244809 - DNA, 394 bp, Glycine max
actttgagttgtgtcacacaagactctcattcatatagtacaacaagtgctacacatgcttctatttataaactaggtagcttccttgagaagctctcttgagaaaacttccttgagaagcttctttgagaatactttcttgagaagctagagcttaaatacacacacccctctcataactaagctcaccttcttgagaagcttcctaagaagattctaaagaactagagcttactacacacacctctctaataactaagctcacctccttgacatgagaaggtagagcttatctacacacccctataatagctaagctcacccccattccaaaaatacatgaaaatacaaatagagtcatacctacaagactactcacaatgcccctaaatac

SEQ ID NO: 244810 - DNA, 319 bp, Glycine max
actcatctctttaccttacaatacacgcacatatatcattaccctctctcaatatacagacatggctacatgcaaacatatctaatccaggaaaccccaccactaatagtgagcctataaaccaaaagcgatgaagtcccccatctgcaatttatttcatcaaccaatgttatgggagcccttgcacaattaaaaaaagcacgtggagctccaattaacataaatctattgatgaggttataattcaccccattctgcctttagtcatttgcaacacgcagaactatcaacatcatatgagatctgatactgcacaagc

SEQ ID NO: 244811 - DNA, 330 bp, Glycine max
caagacaacgagcgaagctattctttgagaatgagacaaggagcccctgcatcctggacgaccggagggctaatcacccgacgaacaccccgaacctatatcaaaacaaaccattttggtttgacgttacttaaaaacgaggggcactcgccgtttcccctggaaagaacctcggtattatttgccttgcatcccacggaggtagagcgaagtctattacattcaagatcaatgtcatcataccttcaaaacacatgctcattacttcaaactcaagctcaccgtacctcaaagacaaagctcattacatcaaactcaggctcacattag

SEQ ID NO: 244812 - DNA, 340 bp, Glycine max
catccaatcgccaacatgtaatggtattgaatgcctatatcggtcaacatacttcttcatttgatattgtgccttggccaaatatccttagagatcatgtaacatttggtccctgtcattagtcatcacgtatacctcttccacagttgatggaatagtggctcctttcaaaagatggggtgggtcacaaccatacaaggctttgaaaggaatcaatctcacacagtttgtgagttggtgttaaacaaaacttagcccaacttaaccacttatgccattgttgaggtgtaactcctgtgaagcaccgcacataaatctccaagcgatgattgaccacctc

SEQ ID NO: 244813 - DNA, 284 bp, Glycine max
  unsure (1)..(284): unsure at all n locations
ctggtttctatatgcacccccgtgtacactaaatacacctcatgcctttgcgctgatacttattcgtaactctacagacactctagaactacgtaacgatacttgctttcttctctggatgatacgaaaccttaaagatgacataatcatccccttttttaacttccaggatgttaccaaactctgacggattgcgcacctacacttgctcgtgaacttcggcatggcacagaacatcacgggtggtgcaacaatgctatcntttgactactggcatgtcacgg

SEQ ID NO: 244814 - DNA, 356 bp, Glycine max
gggacaaacgagcaatgcgttagagacatgttatatttattcgaataataaaatctatccttcaataggaggcgtgagtaatttgttctaataataaatcaatggattctttgatgaccatttatagatgagattttacagtggatcattagttttaatacgttatgagaatagtaataggttctttgattcttcaatgagtccctcagatttttcactatttttaattcttagaccaatatgagacaacccttatataagctaactcattaaggtcatgccctcgaactagtgtcactagcatgcataagactgtattaattgataataagcgatcttatagagcggctatcatt

SEQ ID NO: 244815 - DNA, 326 bp, Glycine max
atacaacaaacaacttagatatctgggatgtgaaacttagaatcaagagatatatgtactaaactctatcattgtatatttacctaaagtacaaaagactggaataatgttccaagatttgacaataagagcacatagactaaaccattaattataagatcgacattactaatatcctataagcacatatacatctatttgtgcacatggtagatgttgatatgactccaacaaccagtcactgaagcaaagtccattgggttttattctcttcgagagcctctattgtatcacctccttgagcacatatcacaatctttaatcta

SEQ ID NO: 244816 - DNA, 440 bp, Glycine max
  unsure (1)..(440): unsure at all n locations
cttttgatgatgacaaccacctgtttggtaggagcaaccacaaagaaaatatctatttgcatatacgttactcccccctgggtttacaatgattgcttatatgagacaattgaagacttcatatattttcatatatanaaaagttgtctcataaaaccaatagataaatgtttcttactattttatcttttatctttctctccccccttgtcaacatcaaagacaaatcatgaatagaaaggagaaagatgttaccactngtcgcaatgtatgagaatcaagtgataccaaaaggaattaaaacaatcattcaatattaatcaagcgaaaacaagttcaataacacatcaatcagacacaatcaatcatcagatatttcaaatcagattaattaaagtaacaatcaacttactatacacaatagtntctattattaaaaa

SEQ ID NO: 244817 - DNA, 191 bp, Glycine max
aatatatatgttactaaacatactctcaaatgttagaaggttttcggtaatgaaaaactgattatatatctatcatggcctgggactctcttaacattagagaaggatgcctttcaacattcaacaaggtggataagagcatattgccttaaagatagggtcctgacaggaattgagaacctctctattag

SEQ ID NO: 244818 - DNA, 363 bp, Glycine max
  unsure (1)..(363): unsure at all n locations
gaataaaagagggggagaagtataactctgaagtgtgtctcataagaccttcattcatcaaagttacaacaagtgttacacatgcttctatttatagactaagaagcttccttgagaagctttcttgagaaaactatctcgagaagcttctttgagaagacattcttgagaagctagagctnagctacacacacccctctcataactaagctcacctccttgagaagcatccttaagaaaattcctaatgaagctagagcttatcaacacacacatctctaatagctaagctcacctccttgagatgagatactagagcttatctacacacccgctataatatctaagctcactcccatgaca

SEQ ID NO: 244819 - DNA, 263 bp, Glycine max
tatggcaccatttctggcgctaaactgctcggagatggaagccatcttttcactaaaagtctggcatcaacaggagtcatgtctccaaaggctccaccactggcagcaactatcacacttctctccatattactggagccttcataacaatattggagaagaagctgttctgacatctgatggtgggagcaactgccacatagattcttaaatactctctagaactcatacaggctctctccactgagttgtctaatacctga

SEQ ID NO: 244820 - DNA, 247 bp, Glycine max
  unsure (1)..(247): unsure at all n locations
gctcactacaagccttaagtgaaaaaccatgatattccatattcctctagagatttggactctggaattgttttgggaataaatgtgggggggttttgtatcattggaacaacctgngttttgtggctaatgcttcatgatgaattttgggccatacttgatgcacattgtatattggttaatgttggcatgctgatagaatgttgtttttaaaggccaatgattaaaaaaaaaaaaataaaagaaa

SEQ ID NO: 244821 - DNA, 379 bp, Glycine max
cgaggagcacaacaaagttttcacatccacaaatcgcgcataaacccaccatcccctgttgcccacctccaactgagctcacgtactcccacgtagcccatatcctcgtttctctcaacaccgggtccccataaatcctcccaagctttcccaacatccaagtaatacaacattcaaacagcacaaattatcacagccaagcaaaacagggcaaaggtagataactctgccaaaacaccaaccaaaatcacaggtgttctcacttaaagaccccagtaacaattcctttgttccaatacgttaaccgttggatcgactccacaaatttactggaagtctctcgtacttaagcctacatttgtgaccgtgggatctacta

SEQ ID NO: 244822 - DNA, 233 bp, Glycine max
  unsure (1)..(233): unsure at all n locations
ccgaggaagcttgcctcaaagaggtccatgaaggacaaggcagccgaaagaactanttccgctccggagtatgatagtcaccgctttaggagtgctgtacaccagcagcgcttcgaggccatcaagggatggtctgttctccgggagcgacagcgtcagctcatggacgacgagtatgctgattttcaggaagaaataaggcgccggcggtgggcatcactgggtactcccat

SEQ ID NO: 244823 - DNA, 370 bp, Glycine max
  unsure (1)..(370): unsure at all n locations
catatctgcctccaactctgtgtgacacttacgctataaatagaggtcatgtgtgtgcattttttcaactntgatcatttgaatattaaacttcagatatcaaagctcttttagagcacagaatatcgagctcttctcttcctctcccttcattcatctccttcttcctccaagctcttatccatggcctcctttggtggtgagcttcatctagactcatcttctccttgaagtggcatcttctctctctcttccttctccattctgcttctattcatcttccaagaagcaaaggaatccattgatgaagaagatcctatgcctacaagctctaatggagcttacatcatgtggtatcagagcatcttca

SEQ ID NO: 244824 - DNA, 310 bp, Glycine max
  unsure (1)..(310): unsure at all n locations
cgacctaacatgcttctcagttcaagaaaaccaaggttacattcatcattgactgttagacaaagaaagctaccattatcttctgcatgccacccagatcttgaccactcacgaacaacaggctcaacaaccaccattggatcattntgttcaacagcatatgggttcattatgtgttacacttatattttcctcaccatgccggtgatcacgaccttgacagacaaactccaacataatagatctgcaccacctacaactggccagttcaagctcgcgacaacagatgagacaaagtcaaagacatttg

SEQ ID NO: 244825 - DNA, 376 bp, Glycine max
cattgcagacggatattcaacttctcagatgcctactcgggtcttgattttgcatgttacaatttcactatgcttatttcatcaagacctccactatattattgttttaagattttctttattttttctagttatttgagactatacaatcattaatattatgagattgtatgtaatgtgatgtcgtaatgaaaaaaatattctaatgtagaattaatatatcctctacacaattagtatgggtggctcactataaaaatagcataaatattaaagagaattcaaaataacattggttgatctaacaccgatgtagacagtgtatttacaacatcacgtttgaccacaacccaatgctataagacattttctacat

SEQ ID NO: 244826 - DNA, 358 bp, Glycine max
acaagttctctgtgtttcttgattggttttcaggagtctctactttaatcgattaccaggtgatataatcgattacttctctcttaaaagtgtttctgaagtgatcaaaaacactttaatcgattacatcaagaatctaatcgattacattattcttcaaagttttctagtttttgaaaaaaaaaaacactttaatcgattgaaatgataatataatcgattacttcttcaacataatcgattacattgtacatttaattggatacaggaggttataactattttctctataaataaccatcctggtgtcttacttcatgtgtggaaaaaataagtgcgaatttgatgagttgagtta

SEQ ID NO: 244827 - DNA, 430 bp, Glycine max
ggaagtatatgagggtaacgttaacctcttgaggctgtctttcactgtctctcctatgggagtgaagtctaagatgtgacctatgccttccttcataatagacacgaagttcttcacttaggctcttgcaagagttatgactactataggaggcatgtttttctctttacatttctttgcttatttctcttctttcttcctatcttattttctctctttgatcttgacttatgtcttccactcttttttttcctttttcttttctctcttgattttctttccacaacttaagggatctcaactcatctaatatattatacaaggggtccgtaggagtagaaccctcaccattaacactagatgaagaatgaagactcatgttggctcccaagttatgggtctttcttgtcgggggttcgaaaacaaaagg

SEQ ID NO: 244828 - DNA, 167 bp, Glycine max
caacaccgcgaacaacaaacaagcaacaaacaaaaccatagtagacaatcaacgcaactactgcatggaaacaacacgctcacggactaagcacataactattccacttagtccacagaaggacacaaccactttcaccaagccgcccaagacatgagggacggaca

SEQ ID NO: 244829 - DNA, 387 bp, Glycine max
agaaaaagagaagatgctttatacatttttggagatgtctcctccacctctatgacctcacaatcactcacaaactcatctcaagctctaatgatggcttcctcttcaaactctggtctttgcagatcttcacacaacaaaatctctcaaactctctggaacttggacctttctcgctctataactctctatacatgcacaagcttcaagaaaaggccaaactccccttcaaaatcagatttctggcttaaatacgtggctatgttcgtgctcgtgcacttaccacaattttgaaccgcttatcacgcattagtgaatttcagcttatcgcagcttttgtcactcagcgggtggaccaaaacggtgcgcttagcgggatggaccttc

SEQ ID NO: 244830 - DNA, 290 bp, Glycine max
ccatattccagcgatacttccggagatgccctttcggacatgtgtccttttgacttattaagtccggacttgacctggagggatgacagtggcccgacacataatctgccaaccagaagggtattgccaggcctcgacgctctaccttctgaaggctaatcttcctatctccggaagaataatctttacggtgaggtaagccgattggcgactatttcggtgggcatcatggtgacgtctttagcggactacgaccaatggatttcttctcatgctgccggataatctat

SEQ ID NO: 244831 - DNA, 430 bp, Glycine max
  unsure (1)..(430): unsure at all n locations
tcaaagagaaataaatacgaaggattgatttttacaagcggttgtgatgtctcctccacctctagaacctcacaatcactcacaaactcatctcatgctctcatgacaacttcttcttcaaactcggttctctgcaggtctctgcacagcaaaatctcaaaactcttcggaacttggacctttctctctctaaaaatatctagacatgcataagcttcatgataaggcgaaactcctctccaaaatatgattttatgcttaaatatggggcgttgtttgtgcttgcgcgactatcgcaactctaaaccgcttagcgcgcattagtgaatntcggcctatcatgtgtttttctcgctcagcgaatggaatgaaaccgtacgcttatcgggatgacccttcgctcagcgaacatgcatagctcatccttctt

SEQ ID NO: 244832 - DNA, 326 bp, Glycine max
  unsure (1)..(326): unsure at all n locations
agaactagcggaggcatgactgatcttaacatacataccttgatgaaaagcttcctcattcgaaggcattgcattctacaagtgagaaagagcttgcggaataaaaggatggttgctatccttgctcacttccttatctttcgatgatgggtccctagtaatatttgttctctaaatattttgaattgaagatccntccaatcattaatatgtcttgatactgttttcaattaacttccacgtaagagtctcgaatatggacgttgttgagcatcactgccttttgttctctgccttggcacatgtcttgtagaagtggcctcact

SEQ ID NO: 244833 - DNA, 354 bp, Glycine max
aacccgaagatatagaacatagtagtctcactaaactaaggtactataataaattacacctatatgaacagtgtgctcatgaaaaactattagtgtgatacctttaataagtggatcacgtatcatgcaaagatttcctattatgcttatacaaatctgaattttttaaatactttatttaacaactaaatattttatgtcaacaaacttttacttggttgaatacttaataataccgctaatatatcgtgccgatatatacccaatgactacttaatgttggcgacaacatgcaatacaattacattaatttaccaatcataaattctattatgatgtctcatataaaagtac

SEQ ID NO: 244834 - DNA, 207 bp, Glycine max
  unsure (1)..(207): unsure at all n locations
tttctttaccttctcttccattggtttttctctcatttttctccatgtatctcctcaaatgtcttgtgcnaaatgttgttaacatgattctntanaagtttcaccgattaaacttgctatagaagctagatattattttctatggnnnnnattcctcgtccttgtccttgaaccatgaattgtgtagagtttacgttcctttgagtt

SEQ ID NO: 244835 - DNA, 414 bp, Glycine max
tgatgacgaaaggagtagcaagttgttatctgaaaataaggaagcctcaccggagataatggatacgaatcatgaagaagaaaggtttcagaagcaaggaagaagaaaggttttggaagaagctgaaggggttttttcgtttggagttctagcgctatctatggagttacgcttttaaaaggggaaaaacaatataataagaatcaagggtcagaaatcaatcacatcagatttcccttttaactccccatcgtgacacgtgtcccactctgcctataaaggtggaatcaatgatgggtagtgggagatcgaggcgacggttgccattataacgtgccatcgtgttgccattccagtgaaactgttagaagaaggaaaatatgtcaacttctcatcttccttcgatctcgaatc

SEQ ID NO: 244836 - DNA, 397 bp, Glycine max
cactcccaccttccaatgttactggaatggtgaaaaggtagatgaaatgtatggcgctggtggggaagagaggctccgtgatcgcctgtggttgcactcttaactccgtgtaagagaaacattatgtttgcaatttctctatgtacgtagcattgccaatcatgaacaattccgtgaatgatagaacaaaacttaattattccatgtctccataagaaattgtcttttatgtggtaaacaacttcataaattgaccccctcataaaaatcaaatcgacaacaccaacacgcattgattgatcgcagtacagaattaaatttatattaagcaatacaaccaaagatgtagttatggtgcatgctcctccattgcgctaatgtctactccattttcttg

SEQ ID NO: 244837 - DNA, 258 bp, Glycine max
  unsure (1)..(258): unsure at all n locations
tcctttatcatttcctttggaatcttgttcatgaatattcatatgttctaaagaatctgcaatatcatctagcatattctttcttgacaagataacattagattcatcaaaggtaacatgaatggattcctcgatattcatagttcttttattatatatcctatatgctctgctcttgaatgaatatccaagaaaaataccttcatcagatttgcatcaaattntctagattatctttccattattgacacaaagcat

SEQ ID NO: 244838 - DNA, 344 bp, Glycine max
tccacgctcaattctagttagcctttccccatatctactatgcagttggtcatggacagaaaagggcggcccaatattatggggatgtcaggatcttcctttatatccataaccacaaaatctgtaggaaaaacaagttgcttgacctgaattaacacatcctcaatcactccatatagccttgtaatggagcggtctgctaactggagggtcatgcgtgtaggcattatctctatctctccaagttgtcggcacatggatagaggcattaaatggatactaactcccaagtctatgagaagcttgcctacaacaacctcaccaatagaacacgatatcatgac

SEQ ID NO: 244839 - DNA, 347 bp, Glycine max
tagctatcctaactaggactctacgaattatttcaataatgctgtgatgcaaggtgcatcccactgaaaatatttgcagtctgttgttaaggataatattcagagagtcattttctgtctataatatggattcactgagtgtttttgcatacttgtaattaatatttatatgattctgtttccatctgcacataacctgttgagccatcgaccctctaagaaatagctgaccgttgccatgctactgaacatgatacatattatcacactttattacttcttcaataatgtctactaccctgcctattataatcattccagttcaataacatgtctcacttgtatgc

SEQ ID NO: 244840 - DNA, 348 bp, Glycine max
  unsure (1)..(348): unsure at all n locations
tcataagtagagaacaaaaggactccatctctcaattgggacannctaatcataatagctggaggtgggacatgaggtggaggaggaatctctttgatcatgaaagccatttggctgtgtagtttatggaggaaatcagttctgttcctattcaaagacaggtgaaagataatatgttgtggttggctgaatctaattgtcaatatactactagatcagcttatagcttatgcatgaacaccacttcagtatattctggatggcaacattttaagactatatgcgcagtgaaaattccccctcgggttgtgatcttctgttggagactactttaaaatcgactaccta

SEQ ID NO: 244841 - DNA, 314 bp, Glycine max
ttcgatcgagatagatgtattgctgcacacattctaacttctaccggctatactgatgcaaccggtggcactgattgctcctgcattggacgttgacgtctcgtggagcctgcataccgaacgagccactatgacgcgagctctccagtgacaaaggttagcctgtagtgcatacttatggggatacattaagaagtgttatagcttgtgtgtgtgtgcataccgctgaaattcattgggagtggacaagcgtattcttgaatcatagattcgggctatcgaatataatgtcatatgagcggtggtggtgactt

SEQ ID NO: 244842 - DNA, 322 bp, Glycine max
  unsure (1)..(322): unsure at all n locations
tacatctgcacgagttcatgtatttcttatttgaaaatgtataatgtaatcaagtcttgaacttggtttgccaacataaaagtgcaccagttctttgatgctgcacttgaacttcttttagtgaagctggaacaatactntatttttctctcaattaaagataacatctctttaataacattttgatatttggtttttgcatgtgttgaatatttgagtaaatgatagaaatatacctaggagatattgcaacttgcggcaaagttgaaagtgctcttaaggaagctttagatgatttgggcaagccttgggatataattag

SEQ ID NO: 244843 - DNA, 427 bp, Glycine max
  unsure (1)..(427): unsure at all n locations
attgagttcgaatgttggatatataattattttaaagaacaaaaatcgactataataatcttacatgacttaagtagatntatttttaagaaaagatacatgtaatctttactggtaaaatatataaataatgtattccagtcaatttgatcagactaattaataaaaaaaaaagatttctgatcaaattattaattacaatcacgattaggatcataaaaaattatgtcacgcgaagatattcctattaatttcatcctcagaaatatacatatgctgttaaggcaaaagaaatacattatggaaaagaatgaagcattattcttatgaacataacaagaacaaagtaaaatcttgcattaatgatgatattgattatgcacaatgtatcgncatttactcaacacactaagattatttttacaaa

SEQ ID NO: 244844 - DNA, 445 bp, Glycine max
  unsure (1)..(445): unsure at all n locations
gctcccagctagagggggagtgttgaatatctnttgtggttnctaaatcagatntgtatgcatcattactaaatattttttccttgttttagaagtcagcagacatagactagactatgctgtcacatatactatgctaggctgtcttttccccctttctctctcttatgctgtgtactctataaatggtaagctgaaacatgaatatcaagagtcatgtgagtgaaatttcctcacacttaaattcaagtgtaaccttgccacagaaattgcacacacaactatttccttgtccttgagtgcaatatttctatctatgatcggtgctaggaggatttgatgattcctcatttgccatactgagattttntttaaaaatcagaataataagaaggtctggtataagacatatgacatggacgaagaagaaggtggagtattaaac

SEQ ID NO: 244845 - DNA, 427 bp, Glycine max
caagccaactatccacatccacatatcacacataaattcaccatcccagttgcccaccttcaactgagctcacgtactcccacgtagcccttatcctcgttcttctcaacaccgggtccccattaatccctccaagcttgcgcagcatccaagcaattcaacatccaaacatcatgcactatcaaaaacaagaaaacagggcagaggcagataactctgcccaaaacacataccaataccacagctttgcttactcacataccccaataacattctcttcgttccaattcagtcaccgttggatcgactcgaaaattttactggatgtccctagtacataagtccacattttgaccggtgggatctgctagaaaatgtccaaaaccaatatgtactactctgtcccttaccagcacacaaacatttc

SEQ ID NO: 244846 - DNA, 319 bp, Glycine max
ttttgacacaaaactggtgcaagctatgaatcaaaaaagagtcaggtccatctaaaactctggaatcatcccagatggctttgcccacaaagttctactagaaatgaagactacacaacaacacttatctctacatttcaagcttcattatgcctctactctaaatcaagtttatatgaatctgggggagcatcacattgaatggctaattatgagaattatattgacatctagcaggactcacacttacatcagatctactatcaactagacagcaaacaagatctttatgctgctagaaatattgaaaacactctga

SEQ ID NO: 244847 - DNA, 312 bp, Glycine max
attggctcacaggttcaacattcaatttcgagggtctcgatgtattgcgggactcaatcagacatccgagtaaaaagttattgtcgtttgaattggctatgagcttaaacattcaatctcgagcgtctcgatatatgatgggactcaatcagacatccgaggaaaatgctattgtcgttcgaattggctcataggttctacattcaatttcgagcgtctggatatatgactggactcaatcaaacatccgagtaaaaagtgattgtctgttgaattggctgagaagttcaacattcattttcagggtctcga

SEQ ID NO: 244848 - DNA, 327 bp, Glycine max
  unsure (1)..(327): unsure at all n locations
ctcaaancggtcaatgtaggcttccttcgagccatacttctacnggtactctatcttttaacttctctgtaagacacttatccaaatatatgctgcatgggacactacttctccccataaaggtgatgacaaatgcttctctatcaagagacaccttgccatgtgcatcactgtcctgttcctcctctcagccaaaccattatgttcaggagtataaggagcagagatctcgtgtattaaaccatgattacgacagacagatccagaatcattagatgtggccttcctccaccatcagctcaatgatttgatcgactttccacttga

SEQ ID NO: 244849 - DNA, 351 bp, Glycine max
  unsure (1)..(351): unsure at all n locations
gtcgagtcttctatccacttatcagagacaagatgatccgatagatgtatgtagttgagtgcatgatgaccaacggatgactgattcaatcaccataaggtcaagttgctcacactcaccatgttcaattgttctgtttctctcgcttgtgatccatttatttatcatcacgtccaatccaaagaggagaatcttgtagcaaaagtagtcttcccaagtgtggttctgcgaaaatttgctaacatgatcagaccatgaagctaagaaatagtgtagacggttaatatatatggctttaagcatacctccagcaattgcatntacatctgccatgttaactgatcactctaa

SEQ ID NO: 244850 - DNA, 293 bp, Glycine max
  unsure (1)..(293): unsure at all n locations
acggttctcgcgcaggagnnggcggctattcttatctactccagccactttggtgggctggcatgcttacaagtaactaactaactcactcgctctctgtggatactcttatatctttctcactaacaccactttttaattctaaggcttatgggaggtgcaatttgtcgctatatatatgctctgacttctgtactcccttgggactattatatgcatgttatataacacactatcatactttagatacttctttaaactactcacccatttattatcggataataagtgtt

SEQ ID NO: 244851 - DNA, 146 bp, Glycine max
ccaagatctagacaaaaaacctgaacctattgttcctaacctggactcaagcatgaaaacctggaactaaattcaaggctaaaggtacacactttgtgcaaagaaacagcttgcattatgaaaccgacctgcatcttaattaatga

SEQ ID NO: 244852 - DNA, 376 bp, Glycine max
attcaaaatcatgtcaaaatatttagatagacgttcacatgtttggtctcatatttagaaattaattttgagtcgaaaatcgattatgaattaaagcaatttaaagtattttttgtgttggattaaaagttttatatcgattttcatttctaattgttgaaataaaaacatatatcatttcacttttaaaatttattgtaatcaacatcaatttcattaaaaaaaaatcagttaattgtgtaaaagttgttcagctaagcacacaattagattcatttcagtggcggaggataaaagcaggaaagagcattgatagacataacagaatgatggatgaagaagatacccacctcaacctgatgctgcagtgactgga

SEQ ID NO: 244853 - DNA, 337 bp, Glycine max
cgcatgtaggttcgctactattagaagttggcatcaaactttgataagccacaaccactccatatgacatatctgtgattgccactaacacattgaaaggatgaagataatcataatgggggaaaataaatcacaaggatttaatctaatagattaagataaagaaaagaaaacctgagaactaaaaattcatttcaacccttgttcaatgtgataataataggttgagaatacaaagcttagaagtagaagtgttggtaattaggttctaaacagtgtgtccatctccaagagtgtatttattcatctctcaaaaataaggatttaccactcacat

SEQ ID NO: 244854 - DNA, 365 bp, Glycine max
ggtcgttcatgaagaacaaactcaagatcctcaagaacctatgcttcatgagtcagtacctttgcggagatctacaagagaaaggagaagtgttattccagatgattatgtggtatttctccagaaacatgagaaaaataatggtatgatagaagatgacccagtcaacttccatcaagccatgcaagattccaactcggaaaagtggattgaagcaatgaatgaggagtataagtccatgcaagacaacaagatttgggaacttgtcccattaccagaatgtgtgaaacccattggttgcaactgaatatttaagatcaagcgggattccaaaggtaatgtggagaggtataaggttcgtcttg

SEQ ID NO: 244855 - DNA, 380 bp, Glycine max
  unsure (1)..(380): unsure at all n locations
catatgctagcganccgcaagaccnacggaaagaccatagagtcgaccttaccatatgtatccatagaagccattgcatcactcacccaatactacgaccaacctttgagatgcttcacattcagagacttccaattagtaccaaccattggagaatttgaggaaattctacgatgtcctctcgggggaagaaaaccatatctttcatccgggtgtctcccctctttgaacagatatgcaactgtggtcaaggattcagcaagatggttggaccgcatataacagactcggaacggcataacgggcctaccatggaggtacctataatacaaggcgaggtgtatggccaatcaaggagattgtgtcccgttcatggatgt

SEQ ID NO: 244856 - DNA, 315 bp, Glycine max
agatcttattcaagaagatattttctttaaccttcagcaaatcaagaatacaatatgatagatagattagatcaagagaagatgtacatccatttttatatgggttcactctctatctctagagaagctacttcaattatctaatccaaagcgaattagattgtcactatgcatatagaattcttacaagcaatcacaatcaatatcagttccaaccctagaaaaagagactacagtacccaatcctagggtgctttatgaataatagcctaagagaaatctaccctttacccatactagaaaaacctatcctag

SEQ ID NO: 244857 - DNA, 402 bp, Glycine max
  unsure (1)..(402): unsure at all n locations
aaaaagagacaaaattcctcccaattttacaaggaaggcgcaaaagtgaaatgaggattaatgtttaacacaaatgatgaaagctcaaaagtcctctcaagtttcttactcaatatcactcttaaacactctntgatcctctctgatcctttctttcatagctctcttactccctgatcatgttactagctcaataaagcccatgtggaccaatgaatgactaattttgcttttgagtttggattctataatggaacctgcacatacttgtgatttgtaaaaaaaatgcttcgaggtttgcacttgtacatttgagataaaaactcattctacctgtagctcgtggaagatgcccatagacaattgtgataataaggtacatctgatgttatgtgctcatgc

SEQ ID NO: 244858 - DNA, 300 bp, Glycine max
  unsure (1)..(300): unsure at all n locations
gctccttcttccatggcttattccctagtggatggcgcctgctcttacctctattcctatatcttctgctgcatctccatgaaggaaaatcaccattgaaggacctcattgaagctcatagatccagcctccataaaagcgtcacaagcaagcttccatcacatgttgtataattcttcttaatcccattacactacagatgctcttgtatggcgtccaatatatgtcgtcccccgttcaacaatntatacaaggacaaaaaatatcttgttcccaactggttgacttctttctaaagca

SEQ ID NO: 244859 - DNA, 336 bp, Glycine max
  unsure (1)..(336): unsure at all n locations
agggcatanggggcacgccctgttcaaatcactatagctggtgcacattcgccatttgtcggtggccttttttactgtgatgatgctggcaaaccaagtggagtatctgacctctctgatgatgctggcatggaaaaggatgtccacttcttctttgacaactttgtgtcgttcttatcccatcttccttttgttgtgtgatattgatataccccgtggacaaatggcaagcttgtggcatataatgttggggtggattcccgaaatgtcaactggctgcggcaataatgcgtatgtgctcatggtcggtgaagtactcgctaaattgtatgcact

SEQ ID NO: 244860 - DNA, 438 bp, Glycine max
aataactctcttatgtgatcaaatatctgattcttcaatcagtgtgtataaaataatatctattcagagaagtttttcctttatataaatcttcatactctgagaaatcagtctctaactcttaattgaggatatgttgatcacaaaacatataaaattatgaaaactatattcttgattgagatagcagctaacacacagagatcttacggtatcgatctcaaaagtcaaagcaagtgttttattttataacacagaatcatcagtggcatcaagacacaaaagtgtctcaaaggttagtctatattaattctatggactcgacgaatgacggtactcttaaattatagtgagcctgtagattattttcccccacgcctgcttaccaagtgcggtgatatactcactaagatataagtataggtcagctctattcat

SEQ ID NO: 244861 - DNA, 357 bp, Glycine max
  unsure (1)..(357): unsure at all n locations
atacgcttcgcagagtgattccaggtgctatgaatgattgttcatcataatgctttttttatgcttcattttttggtgttcccctttttcaaatgactgagaaagtgtttaaataatgtgagtaaattgtgaatagtgttgaatcgggtcatgcatgaatggtagatcaaacttcacagggtgtataataatgatttattttacttttatcacttctactggcaattgcattgtgagcatagtttgacaaatcacagtttgatggatttggtacatatcgtgttngcattcattctcatcacagctttgacttattggagtattgtttgagcaattaaaatcattagcactctcttc

SEQ ID NO: 244862 - DNA, 326 bp, Glycine max
aacactctgtccaaaatgggtcatggtcactagatgatttctagtgagtccatagaaatatttgagttctacccatccaaccagtagagttgggttcaccagatcttggttgtatgtaatagagtgcatgtggtcattactctgtaacagatgccaagtgtgttctatttcatccttcgatcttacaacaaaggaccaactgatttcaccataaagctacatttatcaatcaaactaatataagccaatcgtgtatatcatgtcatgtttattcgacactaatcttgaaatgtttacatgatccataatatgaactgtgttgaaca

SEQ ID NO: 244863 - DNA, 422 bp, Glycine max
  unsure (1)..(422): unsure at all n locations
caaaacaacccatcatatctcgcataaccccatacccacaaattttaagagagaatgaagtccacccaaacctgaattttcgaagtcccactcgtagccacgcacttcacgaccccgaaaatgccctcctttcgcgatttggagcagatatgagcaccaaaggttgaagctctgtgtggagcttcaatggagaatgaagaagaagagaatggtaacgtgagggagagagagggctgtctgaaatttctgttttgctgagtgaggagagagaaaagctttttggtcttaaataaaaggttgtcctctttttctattattttattcaagctctgccacatgtccctatttgattggagcaaatatggcccactttctctgtntgactgtgacccatactcagtcacaaaagtgagaaaaatctg

SEQ ID NO: 244864 - DNA, 267 bp, Glycine max
acctggagatatgtcgcgggggtcaagagaccttggggacgtcaggtggcgtgctattgcccaaaaccaagcttgaccaatcccgacccaacctcggcatattcggtcagtgagaacctgtgatgtacctaagcaggcgagctcctggcagtcatcagataataggataacaagaccacatagcaaggaggctcgtggtggctggccagctgtgaattttgtgtaatatgtggattgtggcctctggtaatcgattaccaagggggg

SEQ ID NO: 244865 - DNA, 175 bp, Glycine max
atcataagagtctaactctgacatgactgttggccacccaacactaccgtggggaaaatgattggatatgagcatcttaatcacatggttatttttttatagatatctttgacattaaaagttataaagtcaatgaaaaaaaatgaaaatcttgcaatacatgggaattaaaaaa

SEQ ID NO: 244866 - DNA, 324 bp, Glycine max
gactctatggcgccttacatcattactccatattgtttataatctactactatatatgatactacacccgtgtttcattgcatcaagttttaccaaatttcactatattaccatggcaattgcgaacaaaggtatgactagtcattacagaaacagagataatatctaatatatgtatgtacctatagagggagacgtgcttgaggttgattaattatactagtcgacatcgtatcgaaagttaaatcccactttcattcaataactcaagaattcagcgcaaagtgactattattgtatactcgaaattattggtaattatat

SEQ ID NO: 244867 - DNA, 290 bp, Glycine max
ccacattatttccatgacacaaatgcaataatgatgatttggaaactttatgcaaaactggtcatgcatgcacctatgcggacactcaagtgtcaaatttttatggtcatgtgatgctagggctcaagattcatttcctctattttaaatcaacccaatgtttccaaaatatgttcttttatcaatttgggcattcatccgagtccattttgggcgtccggagaaatttcacagcattcacccttcatgtgtagacacaatttccaagaatcggttatgatcactgaatg

SEQ ID NO: 244868 - DNA, 335 bp, Glycine max
aaaaattttttagaaaacaccgcgtgttatagatcactagtactggatgatgttgccatgatgatttacttacaacaatagctaccaaccagtatggtatggctcttttgaacttatatggacgaaagtcaaactcctactgctggatgatgaggaaacggacttttggacctgaaatgctcacaataacaacaataagtgatcagaaaataaacattatgatagcgaaactatatataaagcgaaccactaattttaggagaaaatgtgtttgaagttctcctaccgagtggaaactctaagcttaagttacccaattttagtcatataattaa

SEQ ID NO: 244869 - DNA, 335 bp, Glycine max
  unsure (1)..(335): unsure at all n locations
ctactgacaagtgttcttgggtttcaggttgaggggtatcttcaacattggttntggatgcttattgcatgagtgttcaagagtgttactcattgcgntttgaatggtacagatgtctctgttaatggtttgatatgccaaaataagttntgtttgttttggggtatgtgggctggttgactcaatcacattgggtatgagtgtntatacaatgagtaatgatacctgagcagagatgtcatgatgaacgaaagtggggttttgctgatattgctgtttggagattgaattcgttagaacttgtagatgcgtaataatcatatgtgtagtatggt

SEQ ID NO: 244870 - DNA, 406 bp, Glycine max
ttgcatttgagagggggttggagtaacatccattgtggaaaagaaggtaaatcctgccttatgtagcttgtatagggaagaatggaagacttataattgtaaataccctaataaggagagtggattagatgaagggtagtgcaatagttgagatagagggagattaaaaaactagaaaaaagtttatatataaatggtttgccattatgtatgatttacaatatggcattatggtgccatttgattcatatagctgatcttatctagtgggaaaaactgttcttgttcctttaattactgtctttatatgtatatgctgctattataatattttgatagtttgacgaagtaagtctttagttataattgtagtacctgccgttgtcttctggtctcatatatggta

SEQ ID NO: 244871 - DNA, 206 bp, Glycine max
ttttttgctttttaaacacattggagtagcttacttaactaaaacttctaacattttactaatataggttaactacctaaaattcaataactgagaaaattcgttaatttccctaactggttaatctttacagcctgcttaactaacatgttagtgtgaggctggctactactaatgcttcttggcccttgtttctacttacatgc

SEQ ID NO: 244872 - DNA, 304 bp, Glycine max
aatggaacactattctcgattaggatgattgttattgcttaaatgcttgactgttgatgtgaaatcatgcatacatgcatcctatactaggatatgtatttcaacatgctcttatcgattagcattacgttgattcattataaatggcccttgtgaattgaaactttcataacagtcttttaaaccactttcaattatgcatcataatagttgatatatgcctatatagttgactaaatcgtgacctttgtatctcataattgagatatgtgtccaaatagtcgactatcttaagtatctaatc

SEQ ID NO: 244873 - DNA, 364 bp, Glycine max
  unsure (1)..(364): unsure at all n locations
aagaaaacaagggagtaagaaattatatagccaaaaaggaagctcctagatctcctaataacagggatattatacaagttggaaataccacccctacaacctttctttgattagatcctcttactggcgccttcattcctatgttatagacctgattccccacccaacaaaaataaaagaaagaaagacaagcattccaacatgttttgatagaatgtcgtacagctatgacaagctaagagtggattccttcgcttntagtcttctttctctctccccatacacagaaattaattaaaaataagatttttttacttacaaaacaaaaggtgataagctgaatcatatagcaaacagattaaag

SEQ ID NO: 244874 - DNA, 315 bp, Glycine max
acaaatatttctaaaactcttgtctgatgcacaatcgttaaaagtcacctacgaatcaattacaattcgaggccttataaaattgtgaactggacatcgggttgaagacaaactaggtttgactatataacctgcttatgtaacgatgtgataccgtgctactccactggattagataaagatgtcataatgtatgacacaaactattgtaaagaagcttctcaccaacctgaactatatatcgtggtagtgtggattgaaaatttataatatcgccctccgctacaatgctggcacgttaaatgttggttttct

SEQ ID NO: 244875 - DNA, 442 bp, Glycine max
  unsure (1)..(442): unsure at all n locations
cttcaaganattataaagttaaactaataacttaaattaattgatacctataaaaagagtaataatacacaaacatctatttatcttaaatactctattaatatcttttatcttttttcttatcacatcataaatcttatatttatgtattcttttttattttctctatcaaggtgttgaataatcattatgagtgtctctactagacatttttcctataaaaagttaaaagataaaatatcaaaatataattaaaatttagtaatagcacaaaaataatcaatttaacagttataaagattatatatcttcatcaatatctgaaatgaatatcatgaatgagtaataaaaattaaaagttgattaattatcttaccaacaatcattcaatatttttattttgaacgctatattatattattcgattaatcgatatttatat

SEQ ID NO: 244876 - DNA, 360 bp, Glycine max
cacccctactccgatgaatgccgccacgcctgatatactgatggccactccggtgaaaggggagaattcccggccggcggatcatcacctgtggccggcgaggaccccgcatgtggatcatctctccaagagtgcggatataattgataataagaagaatgttgttggaaatgggaatgggaatgggttcgtgaaagtggtgagggctttgcaacaatcaatggtggtggagggtgagaatagaagagctttctttgatgggttaggacggttgagttctggatttgggatagctgaattgctgaatggtaatattattgctaataatcataatcataataagtcttcattgcttttgat

SEQ ID NO: 244877 - DNA, 195 bp, Glycine max
atcttagggtgccctcttcactttctcttatctcctgactcaggtgaaatacctgaagacttatgactcaaatcacctcataaactttcaacagcttctcagggttaaactaaacttaataggctttaacctattatttacttcctctctcatgtgtcttatttctcccctgcttgatgcattttgggcaaccta

SEQ ID NO: 244878 - DNA, 278 bp, Glycine max
atcttattaaacaaacaacctttatgcttccattgggtcacttaaggccagcatttaattgaacactgctgattttaagattacctaatgaaccgaaacagatattcttgggcagaaaaaaaataagaagtgatcacattaataaacacgcattgtggtggacaagatagacccactcgaacaaagtgttatactgtgttttcttataatatagttaattaataaaactaattggctttatttacacttcattcaaaacatgctaataaggccttgtt

SEQ ID NO: 244879 - DNA, 376 bp, Glycine max
atggatgaatggtcgagtcaacctatggttagaaagtgagaatgtagtgttatgagtagaaaaagagtgaggctttgagagtcggaaggctaatacgggattcagtggtaaatggaggttaaagtgagtaaatcctagtttgaaatgtcatctatgacttatgagaaagcttgcgatgtgcaagagagaaaaacatatgaccaatgtgaaggcaagagccatttctagggtaaaattgggtgttgaggagtcaaatattgattcgctagagttttcatcgtaaaccagtttggcaagttatattgatgatatagacttgttgagtgagagttgctcatatttacccattctattttcactctcaaacctgaaatcc

SEQ ID NO: 244880 - DNA, 510 bp, Glycine max
  unsure (1)..(510): unsure at all n locations
gctgaagggacatccacatttcctagtcctagtttctcttctaacaaattctttcttcctacacctatactcgccactcctttcacaaccaattaacacaaacgaagtccttcctctactaccagtgtttgtgtcaaaccttataatcaccgccacaaatcggttttcataagcaatggattgatcccaccgcaaaacatcctctcggctatcaaacatgtacaaagcaatccacattatttcagttttctacaacatattcattttattaaatcactcacaatcatcaacattattacctgagaagtattgaacgcttccgaacaatcgacatgtggttcattcacaccacattcttctttattntcataatccatattcactacttcagacattatacntttatacatncactgatcttcgtctccgtcatcttacaataaataaaanattcacacaggatacacacctnccgactataatacatacaaactatactataactatata

SEQ ID NO: 244881 - DNA, 477 bp, Glycine max
  unsure (1)..(477): unsure at all n locations
cacatggagaaggtattagcttttttcacgcccacctcattggacgactgcctttaatcaaatgtgagaaatcatgacttcaatctttattttattttccttttttttatgtttttatctttttggggtcgacaagagcggggctcttgctcctatgtatcctcaattgtgatgaggaactcagacctacgtagttctttcaaagcaagaatgttatacggagtgttgattttagacttttaaacggttcattttaactgataaaagtaaaaagaccgttaaggcgttggacctttgaacagattcaaacgattntgttgtggacaaaagcttgattatgagttgattntagctntggttttgcttgattatttttcaactcattaatagaggacttacgaaacanatgactggttaaaactttattttttcaatgactgaccaatgttatagcatgaacgaatcgatggaattatt

SEQ ID NO: 244882 - DNA, 280 bp, Glycine max
gaccacaaatgctaaaacatatccaataacttgcagaaatatccaggataaaacaaattccttcaatattcaatgatattacattttttaaaagaacttaatgcacctttaaacaaatgacctgactatatacactgattaacattcttacacattattatatttaactccaattacataaacactacttatcaaaacggggacttacactccacctatcaatgctgaaacctgatgaaaaaacacaatttgtatgccttaatcctcaaacacaacttta

SEQ ID NO: 244883 - DNA, 398 bp, Glycine max
cacaaatcatgttggccaagcttcatgcgtatgttttgtactattaagtcaatggcaacatcattatctcctccactcgggatgataatatcagcatactttttagttggcaatacaaaatcttcaaaactgggctttacaaatctggaatactgaacaatcattttgtatttagtcaaggaggactgtaaacatttttaaacaaaaacaactttgaataagttatatgctgaaaagataaagctacaagaatcaataaataaatgttcaactaggggatgtttagtacaataaaagttattcttcatgttcaaaaattatgattcctaattaataatatatttattttgtacgcattatataagttcctttcaggtgtacgtggtattttatcacaa

SEQ ID NO: 244884 - DNA, 223 bp, Glycine max
  unsure (1)..(223): unsure at all n locations
ccacagcacagnatcctactaacctacaaacttggttcttcttatataacagactctgcttaggagcgcctactagatatgcataaagccttctttgagatgtgattctcttgaatcagattgaaatcgagctcatacacatacaatatccctaatgtgaggtcgactagttgtcaaatatagaagcgatccattcatacctntgtagatcgcctaatctact

SEQ ID NO: 244885 - DNA, 371 bp, Glycine max
accgcctcgagaagctagagtatagctacacaaacccatctaataactaagctcacctccttgagaagcttccttgagaagctagagcttaactactcacacccatctaaaaactaagctcacctccttgagaagcttccttgagaagctagagcttagctacacacccctataatagctaagctcacccccatgacaaaaaaacatgaaaatacaaataaaatcctactacaaagactactcaaaatgccctgaaatacaaggttaaaaccctatactactagaatggccaaaatacattgcccaaaagaagataacaacctattctactatttacaaagaagagtggacccaaccttggcccatgggct

SEQ ID NO: 244886 - DNA, 414 bp, Glycine max
  unsure (1)..(414): unsure at all n locations
acacgcaaattaatactttcgtttttaatataaatttatgtatattctcttggnttatttctctaacgtgttgtttaacttgaatgcacatatcttcatagagtgatgtgtaaacgttgagaaaacaaatataattagttaaaaaaatggcatattcttttttagttaaacttttttaatgtgttgatataatgattgttatactaattttttatttaaaaaatatttcttttgaacataataactaaaaggtttaatataaatttaattacaaataattgttatcacattcaaaagagatgtttaataaataatgtatgtaattaatattttacaacatataactattaacattgtatatgaaaattaatacatatatgtatgtattaaaatatctatgtaaactaaaaaata

SEQ ID NO: 244887 - DNA, 358 bp, Glycine max
tgacgcacaaatctgagatctgtaatttcaattagttagaatgatagacacagcggaaacgcttgtgtgctgagtgaaacactatccttgtgaggagtgaagcatggctaatcttcttgaatacttgtggtcataccctaatttcgtctggggaccattatctgttgtgatgcgaccttcggttgaccatcttaaaatgttatcacacatcgtcgtgtattcataaagtctccaacattcctgatgtcaaacaagcattgttgccaatccgtaagtttccaactttcggaagacaaaaaacattgtgcctatttgtaaaggccgaacattcagaggccaaagaatatatgcgcatctg

SEQ ID NO: 244888 - DNA, 352 bp, Glycine max
gcaccaggagatatgtcgcggtggtcaggagaccttggggatgtcaagtggggtgctattgcccaaaaccaagcttgaccatatcccaacccatcccgggcatagtcggtcagtgagaatctgagatgtacctaaacaagagagctcctggcagtcaactgataaattgaacaaagaccacaaatcaaggtggcttgtggtggctggccaactgtgaatcttgcgtgatatatgggtgggggctctggtaatcgattaccaacgatgggtaatcgattacaacgcttaaaaatgaatacaggagactgatatggtctctggttatcgatcaccaacggggtgtaatcgatta

SEQ ID NO: 244889 - DNA, 258 bp, Glycine max
actgtcctattgtcaatatttccactaccatccctggtcctgctttagaacagccatctttaccttgagctaaagctctgacaaatcactaaaaaaaataatctctaaaatattttgaggattaatggatggacaaccattgaatggctatggaaacttatgatggcgtcatgatgtgcacatatataggaatgtacatctcacgatgctcaagactgtacattgaaataatgtgatctttcacgactattgtaagtg

SEQ ID NO: 244890 - DNA, 350 bp, Glycine max
tttatatcgtcactataactatattagcattttctattaattgagcaacctacaagcttggtagatttttctaacagcttactagcttacctacttataccacataaaaacattttaaaaagtgtgtgcatgacatatttgctaaataaactatggcacgccataccttatatataattaacattatacctgatatgaacaacctaacaactaattatatctgaagccctatctcatacaagcatgattgcgtatagatgaatcgaatccaatgtaatgattcgtatcttatgtgtgcggacgtctaaatagatggatagagaatgggttatataatatgacattgcctg

SEQ ID NO: 244891 - DNA, 343 bp, Glycine max
  unsure (1)..(343): unsure at all n locations
gcatatagagctacaaacgtcttggaattgatacatacggacatttgtgggccatttcatacaccttcatggaatggtcaacaatattttacatcactcatagacgatnactccacatatgcatatatgcttcttatacatgaaaagtcacaatctctagatgtgtccaatacattcaaaggtgaagttgaaaatcaactcaataaaagaatcatgagcgtcagatctgaccatagtgatgaattatatggcagatatgacagttcaagtgaacattttccgaagcctatggcagctactttaaagatatggaatcgtccacatacacactgtcgggtcactt

SEQ ID NO: 244892 - DNA, 261 bp, Glycine max
ggaagcccggggaaaacggagagaataagaaggaaggaggaacccatgtggtgataatcaggctcacatagccaaatgtcccaccagcgcaacaatgtcaatactgagccaacaccaaccctgctcatgatccaccaaccgatcaaccaagaacacccaatcatcaataaaggccacccctaaatagccacagaacccgctggcggcacatctgatactagacaccacccttaacatgaaccagaacacgaaccacggaag

SEQ ID NO: 244893 - DNA, 283 bp, Glycine max
ataactcctctctgcttctgctcattttcttcatgcttacattcgatcttcgattttatgacaactatcatgcatcacgataatattgtccacctatatcatcaacataattcacatcatgctattttgtggggcaaaaataaacccagtccagtttactacttacaacaatttgaatgaggttgaaatatcgattatcatcaataaacagacagatctttcaaccttctctccatagcccatacgagattcgttttccacataaaaatgctgagtataactt

SEQ ID NO: 244894 - DNA, 367 bp, Glycine max
ttgagcttcaatttgtccttctatgggattttcatcatggagatgtagtggaagataaaggagaagaggtgagaggaggcgtcatccactagggaataagccatggaaggaggagcttcactaccaagagagtgtcttggataagaaacttagagaggaatcttcaatggaggaaaataatgatagagagagaggggaaggggggcacgatattgaaggagaaaaagagggagaagcaagagcttatctatgcacacccctctaatagctaagctcacctccttgagaagctacaacttagctacacatacccctctaataactaagctcacctccttgagttgagaagctaaagcttactacacac

SEQ ID NO: 244895 - DNA, 399 bp, Glycine max
ctctaacagagctacatccagttctcctttacataactacaaagggttccattaataagaactttgattataaacaagtattttatctgctacttctaactattctttatgtcagtctaaatacacctttagactccccctgaatctaagaacacctaagtattgtttaacactaagctactcctgaatttcacaaacaaaagtttgaataaatatgatgattcaataacactcaaagagtggataaaaagttaagctcaaatacaaataacttttcttagcaaaggatcacaagactaagtgttaagtgtatcatctactaattcacagagttttgcttcagagaacttgctctcgttttttcacttgataaattttcttcatcatttcttgagcatg

SEQ ID NO: 244896 - DNA, 129 bp, Glycine max
acattgtttattcctagcaatctacattaagtggattcagacagtgcatgaactctctttgaggaatatactgtgtgaacatatcatttgggttctaaagtgacaaaaatacaaggaaggggggggggg

SEQ ID NO: 244897 - DNA, 238 bp, Glycine max
gggaccttgtacccctttgacggctaccatttactaatctgcctcgctacttaaataaataattccccgaatgtggaatgatatccgcaattcggttaaataattcgaccgttcgtctgccgaatacattggaaatcaaaagagtaaaaatatataataactaaaaaatatctttagaaaaaaacggaaataatcgcgtttctttggattctatcttaacgatgataatactaaggaa

SEQ ID NO: 244898 - DNA, 447 bp, Glycine max
  unsure (1)..(447): unsure at all n locations
gcatcattttttttatgctatggaggacatagaattatcaattattgcacaattacttctatttctatattggttgtaactttcaactaaatcgaacttgtttttccatgatgcatgttgttttgtctcgatggcactaagcacatacttcaactttgacactctacaaagtcccaacttagaaacaaacactttcgatgaatccatgctataagaagtagcatcaccatacctccaacacctttgtccctattcagatgaaagcttgttcctttcaaacacgtttgtgtagaactacatggaaccaatggtggttgtctctatcctccagagatcaaccctcattatgatncattcactcttcgtgatgacattttttcaactaatgaagataacaaactactgccatgtccataacaccataagtcctactacgaagaataacat

SEQ ID NO: 244899 - DNA, 426 bp, Glycine max
  unsure (1)..(426): unsure at all n locations
tttctctctgacctttcgtcttgctgaagttcttgttcatgaactntgagagtaccaacaagttcttcaagggacataaaatcaagattctttagagcccttagtgttgttacccatggtctctatttnttagacaaacttctcaagattttttccatatgatcatagttatcataagtcctgcttacagatattaattcattaagaatggtttgaaagcatccaaacatactctgtatgtcttcgccttcttctatatagaagagttcatatttcgagtgaggagacctagtttgtcatcttacatgtgacgttcatcacgtgttatacttaagcgtctacattcgtttgcaccttgagcacatacttagtgatccttcttcataagataagctaagttcaacctcgattacctgattgattttt

SEQ ID NO: 244900 - DNA, 310 bp, Glycine max
ccttgtggacgtcatgaggggtgctattgcccaaaaccaatgcttgaccaatcccgacccatcccgggcatattcggtcagtgagaacctgtgatgtacctaaacaagcgagctcctggcagtcaacagataaaatgaacatagaccacaaatcattgatgcttgtggtggctggccaactatgaacttgtttgatgtgtgagatatggcctctggtaatcgattaccaagggtgggtaatcgaatacaaggcttaaaaatgaagacagatagcttatatggtctctggtaatcgattaccagtggatgt

SEQ ID NO: 244901 - DNA, 260 bp, Glycine max
aagagaggactcagataaactgtttgcatagcctatgctcaatatgtgatcatttatcttgctatagcatacccttggcgcttgtgttttgccatacatgaccttgttgagaagataaactttatcttcacctcgcttcacaaatccttctatttgctctacatatattccttcttgtagttctccgtctaaaaaaaattggatttgacatctacttggaattgtaacatcccacttctcgtaaataaatagatttgttt

SEQ ID NO: 244902 - DNA, 398 bp, Glycine max
cctcttgcctctaatgaaggtcataatacaaacattggtgctaatccaactaagaaacatcctgtggaagtttctttcaatgtgcaaggtacagtttgaagtgaagaccacagtcttaaagcaaatggagtacatctagtctaagaaactatagttggatggattgagaagatgaaagaatgtcatacataacaagaagaagcataagataagcccataatcccctttgaacagatgatgctagaaaagattgatgacctcatgagagtgcataaatatgactatgccatgcttaatgagtgcgttgagtctatcttatataagttgaatgctatggaacaacacatgtggatgatatctaacccatagttatcctttacgatccacttagaatctta

SEQ ID NO: 244903 - DNA, 404 bp, Glycine max
  unsure (1)..(404): unsure at all n locations
aagcaccaacaagaatcaagccaaggctattgtgcaagccatcaatggcgcaaaacacaccatatgattatgatgatggatggctcataatctcacaaagggaaactcatcactttcaaattgatctttcaaaactatcatgacatgtataggagaataaatgatttcaagctcaaaatgtcaataacttctattntcaaaacaattacccactctttgaacatantctacaattcaaagaaaaacatgcatagtcgtacatgcacacagaattgaccccaaattataaactagaaatccgacgaaactaacaacattttaaaattaacacactaataaataacaagaaactacaacatttcaattacacactaacaattaccaacccacaaactatcaaccaa

SEQ ID NO: 244904 - DNA, 360 bp, Glycine max
  unsure (1)..(360): unsure at all n locations
agcacatgaagagaagaattttgtgtcatgaaactctccatcattcagtaaggttctctgattcaagttgccatataacgatgcctccatctttggatgaacaagcctcaagtacttgttcctgcaaaattttgcaaagggtgatcttggtttccctgcagaaaagtcctttgctttcactggtgttagctcattgaacctcccataaaaaagntgcctcttgctctttatctgtagagactcatttggtacggagaagttatggaagttgaatgaatcaaacatctccctacacacaaatgactcaattgcataacacttgttatcttctttcaagtaaaccacattctgttcaataat

SEQ ID NO: 244905 - DNA, 294 bp, Glycine max
taacatcatacatagcctttacaatcatcaataccttttcttttttttgaataaatgcattgccatagatctttttgcaggtaaagaaactaatgcttagaaagctaagattttctcttgtaaaacaagtgggaatgaattggccttggtgcaaatttattatccctctttatggcaaaagccttggtgaaatttatttggcttatcaaggtgtacttaaactcattccatctacgtttatggtggaaaaaaaaagcctttaataaaatgtgaaaaaaatataacttaataagt

SEQ ID NO: 244906 - DNA, 372 bp, Glycine max
  unsure (1)..(372): unsure at all n locations
cagaagagtgggagaaaagagtaagggtagtttcaactctatggtgatgtttgcgttcaacaatgctaatgtgttcaggggtataaggtgggttgataaaatgggatatcccatggttattgaaataatgtttgagtttgaaatattcaattccaccatcagtgtaaatagatttgactttgtgggagaaaaaataacttttccattttagagtgaaattgaagaaatatgatagctacattagttttttttagtggataaatcgatgtgtggcgagtgaaatgataaacaaaaacaaggtagtatttgtagtcatttatatacattatatgggatggttgttagaggattggcangtgcactaattcgttc

SEQ ID NO: 244907 - DNA, 310 bp, Glycine max
ccacacaaccaccagaaagcatgcaattccactaaaggaaaaggttctactgacacaccaccatgtatattcgggatgaccctattcttttccatattggtgctgacaatatgttaaggcgatgtgtaacaaacgaagaacaagctagcatactttggcattgccacaacttaccatatagaggccacttcaatagagaaagaacaactgccaagatctttttagccagaatctattgctctacactcttcaaatatgctcacaaccatgcatgatcatgtgacatctgtcaatgaaccggtaacatatc

SEQ ID NO: 244908 - DNA, 382 bp, Glycine max
ctagccatacttttcgatatgtgatggcgtatctaaactctcgtctaacgaattcgatgaatgtatatggtcgtcacatgtgaggcctttcaatcattctaatttcccacactttgtaattttttcgttcaaatgctctatagttccattggcacccctcaacttggcaatataagacccatgtatccttcgcacatctctcgtgtttgatagtgacatggttcttaatgtgtcacattttgactgcatgtttgaggccttccaactcatggaattgctgaccaacataatttgccatccagcgagtcatattgttgttattggtccgaaaaatgcttatattcggtgttcttatccacttggctgtcaccaatatcaacac

SEQ ID NO: 244909 - DNA, 291 bp, Glycine max
catctagtgagaatcaaaacatcaatgattgattgtccctggacgatattagggcctgacactaatcacagaaatgaagatttcttagtgcaattcaagttttcaacatacatagagaaatgaatatggttcaatcacacataatgactatcatgcaacatgagagatgccccataccttgagaaagcctcttagagtcaccaaaacctatgggtctcactatggcttcttgagagctctataaatgccatatataacaatgagatcacacctaccatgatggtgactaac

SEQ ID NO: 244910 - DNA, 284 bp, Glycine max
gacagtggtcaaaatgagaggaatgacttgataccaacacgaactgtcactggctagcggatgtgtatcgactactgcaagttgaatgaagccacacggaaggaccatttccccttacctttcatggatcagatgctggagaggcttgcagggcaggcatactactgtttcttggatagatattcaggatacaaccatatcgcggtagaccccagagatcaagagaagatggcctttacatgcccctttggcgtcttgcttacaaaggatgtcattctgttatg

SEQ ID NO: 244911 - DNA, 399 bp, Glycine max
taagaaaaacgacggagaagagcagcatgacaagggtgatggctaccttttccatcatgtggtaccccatttttggatcctactatactcggctcacgatatactctggcctcaactcactcccttcttcctgtactagtaccacgcttatgacctgaaccaagactgacaggtagacaatcaaccttttgataatgttaggttttgacaaggcagacgatgtttccaatgtttcttttaagtgttgaaaagcttcttcacactcgtcgtcccaaacaaaagttttggtttgtttgaagagatacatgattggtctggccctcttggcgattctgggaaaatatcttaacaaagaagctatcctgtcaactagactttaagcttttgtacattctgggg

SEQ ID NO: 244912 - DNA, 197 bp, Glycine max
tagcaagaaggaccatccacaagacagtcatgaaaacgactcttctgaaattgaacatcaacctcaaattaacgaacaatgataaacaaagcggggtgtgtcaatcatatagaacaaaaaagatgaacactgatcgtaaaactcgatgtcattgatctgtcttatctgtcgatacacctcaataggggggggggggg

SEQ ID NO: 244913 - DNA, 387 bp, Glycine max
acaaggcaaatcagagatacgtatctttccttccatttcccaatccctgagaagttaggcttcaagccttttgaaaccaaccttgcagcctatcacatgcaccaccaatgcattcttacacgatttactctatggagtcatgtcttcatctgataccccaatctctgaacaacggtcaaaggcggcctttgtctttgtcattaacaatctcggcgtcttcactgtctgtgatcatattctcccttgtgattcggaattgtccaactatgacctccaaccatcttatgctgccttcacctgaaggaaccatctacttctttttatagggtgaagaactgtgggtccacttccattctagcctctctcctaaaatagggtatcttttct

SEQ ID NO: 244914 - DNA, 329 bp, Glycine max
tatgcagaccgaaggcatacgataaaataatataggaggctccatccactatggcatatgccaatgaagaatgatcttctccaccaataattgccttggatgaaaatcttgaacacgatgctttattggatgataataaagagagatagggggagcacgaaattgaaggaatataagacggagaaaagtggaactctgaagtgtgtctcataagactgtcattcatcaatgttacaacaagttgtacacatgcttctatttatagactaggtagcttccttcaatagctgtctgagaaacttccttgagaacttcttagagaatactcc

SEQ ID NO: 244915 - DNA, 127 bp, Glycine max
aaagttcccacaaacatgtaagctttgaagggagaagattataaaatttaacttaggggaaggatttctgaacagaaaccaacaacagacaacttggtgtatgtcgtcttctaaaacggaaatttgg

SEQ ID NO: 244916 - DNA, 396 bp, Glycine max
  unsure (1)..(396): unsure at all n locations
cctttgctggagatcagctaattgcacccagagttggattctcagaatgtatgtggtacaagcataaattgcagcacaatacaatgtaccgntactctctctctctctctctctcttatatatatatatatatatatatatatatatgtgtgtggtaatataatcttactcttttatgtgggatacattagcaactcacaaaataaacaatcatgtgttttatttaccttctactatggacaccacagtatattatgatataacttttaaaatatatctgctcctctctctagcactagttctatttccagattctttgtctgcttctcttattttcgctaccactcgtataccatattgctatgacccactcatcttctgaaccgcacgtgtttt

SEQ ID NO: 244917 - DNA, 371 bp, Glycine max
  unsure (1)..(371): unsure at all n locations
gagggcacgcgnntaggcgtcaatagcaagagaacggggacaatgtggcatgtcccattgttccaaaatgcattatatgcctagggccatcccatacacacccctaattcaacctaatcaagcaagataacaaaccataattgccctatatatttgagcacactcccacaatttagagcaccaaaaggagatcaaaatacaccaatgaaaagctagaaagcttaaggatggaacacttacttgttggtgatgaacaaaagcgcataacggaatcaaaaaatgcgaaaaaggatgaccctatggctgcaaactcgtcaatcccgtgggtatggcttttgaaaagggggaaaagaaagttttgaatgcaaaaa

SEQ ID NO: 244918 - DNA, 409 bp, Glycine max
aagccactactgtcgaggggcaactctcaccttatgaagactatcccgggcaagacgatggggaatgatatacccatcttggccccctgctccaccttaaagatccgtccgcacatgaactaccccatccgaacataacccgccttattccggcctcactcacacccgtaaaagaatctgttccctttgcggaagatatgggaaagattgaggcgctcgaagagaggttaagaacagtcaagggccttggcaattaccaattctcggatttggcggatatgtgtctcgtgcccaacatcatcatccctcccaagttcaaagtaccagactgtgattagtacaaatggacgacatgtacaaaagggcatcgtcggatgtatcgccgaaagatgggggcgtattctgcgga

SEQ ID NO: 244919 - DNA, 152 bp, Glycine max
atctaactcagctcactgtgttcttcttgagatgacaggaacccctatagcttcactcaacatctcttcactggcaccccttctcaaattgtccaggatttcttacgcatcttcccgggatggatcatgtctccatttggcgaaaaagtgat

SEQ ID NO: 244920 - DNA, 304 bp, Glycine max
  unsure (1)..(304): unsure at all n locations
ctgagagtgagatcatccatcaacagagattcattggcgttagaaactccttcgcgttgagcgcaacggacaacgcttcgtcgggcttccccattcgctccatcacgagcgctttcagagcctaattggaaaatccgcattcagcagcatataaaaaacaaggcgaattcgatatcaacgaatgtaatgagggtgcaaattatggttcttacgaatgcgtanggggaattaaggtgcttggcgaggagcgtggagacgtgcttgatagcgttcttgaactggcaggaatcaatggcgtaccata

SEQ ID NO: 244921 - DNA, 366 bp, Glycine max
  unsure (1)..(366): unsure at all n locations
acgctcaacaaagtactntcgacacctactgtacgttgatttgaccaatgctgttatgggaatgttgcgacaatccttcaaaaccttattgatacattctgagaggttggttgtcatgtggccatatcgacatccttctctatcataagccatcatccatttntcctttgaaattcgatcaatccatgtggctatggctggactcagttcacgaaaattttctaaatcttgatcaanaatgtgcttgcaaggagtgtaagctgcataaaattagttatgaataacatggataagtatatatgaaaggtaaataaatgggaccatcaaatatgaaatcttacccaatttcttcacatgntcttttgt

SEQ ID NO: 244922 - DNA, 410 bp, Glycine max
  unsure (1)..(410): unsure at all n locations
gaattaattcattggaggtaaagatataaactttagattagacgcattataaacgaaaaacaaagaaggaaagggttcaagttattaataaacctgaggaaaaagcacctgggtagtacggataaaaagagtagttgtagaaatgagaaaaaaaaagtgagggaagatcatggtagagtaattaactaaaccggccatcacanatttagatgagagtggtttgaaaaatgcagactgtaacaaattagtgggacttaatttgaaagaaggaagaaagagacaattgtcgtctctttgtccactactccacctcacgtttttggacatgtctactttgaaactacttattaacattccctgcggaataagctagaagaatacggtagagaggagtatatatagaggacatg

SEQ ID NO: 244923 - DNA, 226 bp, Glycine max
acctaatcatggaaaaaaggatggaagtggaggactgtggtttccctatgtagaaatagctcgtcgggcacatgacacggaggatccatatagagaaagcaattgtttgatgaagattctgcatcatacttgaagaagaccaaggaaactttggtgacctgagcatgaaatgtgactcaaaggtaaatattacactccataattgatgggagagtaactgacattg

SEQ ID NO: 244924 - DNA, 419 bp, Glycine max
  unsure (1)..(419): unsure at all n locations
ttacaagataagatagttgatctttctttattctttgatttcaatgataaattggtggaaatatgtatttgttcgctgttattggccatatattntgcagttttctgctgaaagaagacgttcaattgatggcatattgcacgagcttcttcataatggagatgcagcacaaaagtacatgcaaggatctagaaacatgaaaattgacaattggatccttcttgataattatgtgcacggacgggtgctttcttctggttctcaaactaaggctttgcaacttcattcaaaacgctctaagaaacacatgtctatgaaacggcataagaagtatggatcattagaacttcctcaagagttccagaagtaagttaanaatacacttcttgagtatgttgatgtcgatctctattgatatt

SEQ ID NO: 244925 - DNA, 445 bp, Glycine max
  unsure (1)..(445): unsure at all n locations
cacaagcnccggcatgaaatagaagttcagcgaatccagacagagcgttaaagaatgatatcgagagttacctcgagagaggagagggcgttccatgaagagagagggagaacggcggcgtcgctgaataggttttggcgaagggagagcttctggagatgggagaggttccctatgcgcgggtccagcgtggacaagcgattcgcggtgaggtccaactcggtgaggctgggtggcaactcgaccgagtcgaggtcgtggagctggtaactcgtgagatccagaagcgtcgatgaaggatcgtcttcgcattaaccggaaccgctattgttcctcctcttcatttncaacctacgatgcactatccgcctaataaaagcacaacttatgttttttaaggcttccttgatttcttttatatactaaatgcttttcttttataaac

SEQ ID NO: 244926 - DNA, 262 bp, Glycine max
actgatgatggtttaatgaatgaaaatgtaattcaccattagtgtttgtgcatgttcatggcaggctgaagtgggatgactgaatgcaacgttacatttttggcattgacaatcaatccgaggaaccatttgtctgatgaacctctcatggatgccttaaacccgtggttggcccataaacaccaatctgaggattactgaattgaaaacattgaaaacgcaccttatgatgtaacaactctagctattaagaggttcaatc

SEQ ID NO: 244927 - DNA, 301 bp, Glycine max
catgccttcccactattatccatgcatgatcaacaaacctcattccaagcttcttgagatggttttcagtaatctcactagaagctgtggtgaaatccacaatcttattagagacatcaacaacgaagtagtcagtgtatcttgaggcgaacacaacatatggaaactcataatccaccaggcgaagacactccagcataatgtcttcaatcagtagtacccgattcatcttgataccagagtgcagagcaaaaactaattgtagaatatcagttgttacctaagcatgatagcctgacct

SEQ ID NO: 244928 - DNA, 255 bp, Glycine max
cggaagaacaggaaggagaggccagcacctacacatcgtgaagacaaccaccactagcaatcgatacgcgatgaaacggaataaaatggcaaattgggaagcgacaacatgcccaacggaggaggcacagacaaaacagggaaactagaacaaaaacctagaatgaccgggataacagccggaagaacaaggtacatgccacatggagaagggctaaccgagctaaacaagcaaatacgcgacaaacgggacaag

SEQ ID NO: 244929 - DNA, 210 bp, Glycine max
tactctcggttgaaaccctcggcactcctgataggagggataatcatgatggtttcaccaacaagatctctatcacacatcaagacaaagagatagggcctcaaccattgagtccacaagaagtgtgtgaggatcacagaattatgagagacaaaaatcttcacgacaagagagaaaaagacaaagtgagccacacacttgagagttcaa

SEQ ID NO: 244930 - DNA, 337 bp, Glycine max
aagagattctctacattaattattaaatcgtcaacctaaatttattgatatttatcttaataattagaaaaaattatgaattatgtgtgtaaaatatgtttactttattatctaattacaaacatcataatgagaaatttgttatctttcataataattctctaaaaagtattccaatgataatttcttattaattgataaagatagtgtgtctttcttttatctatgagcaccactgttgacaaaaaaagaataatccttacaacgaagtatattaatctctactaagagaagtgttcatacttagcacttgataatgtcttacatgaatattctt

SEQ ID NO: 244931 - DNA, 402 bp, Glycine max
aaagatctattaacaacttccgtttgcccatcggtttgtgggtgacaagtggttgaaaataacaatttattgcccaacttgctccacaaagtcctccaaaaatgactcaggaacttagagtccctatcactaacaatgttccttggcaaaccatggagtctcacaatctccttgaaaaacaaatcagccacatgggaagcatcatcaacttttttacatggaataaaatgagccattttagaaaacctatcaacaaccacaaaaatggaatctctaccattgcttgttttggcagccccaaaacaaaatccatggattaatcaatccaaggatactccggaattggcaatggagtatacaatccatgatgctctaccttagactttgccttttacatacaat

SEQ ID NO: 244932 - DNA, 256 bp, Glycine max
  unsure (1)..(256): unsure at all n locations
aagttcatatgtagttcataatctattctccaaaggaatagcggatattacaccattcataaagacttagaanatggatctcgtgatagtatagatctatgtagatgacagcatctttggtatttcctcaaaaaggatgtgcaaacaatcttttgagctaatgaaaggaaaatttaaaataagcatgatgggagaactaaagntctttctaagggctctaaatcattcaaaagagggttagaatggatgaaaccag

SEQ ID NO: 244933 - DNA, 353 bp, Glycine max
  unsure (1)..(353): unsure at all n locations
atcaaatgganaatagagatcataatgaacaacaaaggatgagaagagggaatgatggtgttcctatacaaaaccgaattgatggtgttaaactcaacattcctccatttaaaggaaagaatgatccggaggcctacttggagtgggagatgaaaatagagcatgttttctcatgcaacatctatgatgaggaccaaaatgtgaagcttgccgccacggagttttccgactatgctcttgtgtggtggaacaagctactaaaggagagagcaagaaatgaagagccaatggttgatacatggacggagatgaaaaagatcatgatgaagcggtatgtgccagctagttactca

SEQ ID NO: 244934 - DNA, 321 bp, Glycine max
  unsure (1)..(321): unsure at all n locations
atgatgaacatatgtacacttttcatgtgaaaaagaggctaagttttgaattgcaaaaagtagcagttgggctaagcgcatatccaccgctaagcatagcttcagcgcgcttagcgcataggagaatctggcagagcatcaacatcaaagtcgtgcactaagcgtgagatcagtgcgctaagcgcagcaggtgcattcaaccaagctaagcgcgagaatggcgccaagcccaatctcacttatcggtgctaagcgtgaattatcgtacaactttttagactttgtatagaaagccagggcacagaatntcacagtagacat

SEQ ID NO: 244935 - DNA, 317 bp, Glycine max
  unsure (1)..(317): unsure at all n locations
gggctcatgggccactntgggatatacaagacccttgtcnactcaaaaagtttattggcccatatgaaaagatgtccaaagcattacacttgtgtgggcttgttaaaagccaagtctagggtgatgcctcatgggctatacacacccttacccatcccctctgcaccttgggtagacattaatatggactttgtccttgggcttcttagaatccaaagaggtgtagactctatctttgtggtggtggataggtttatcaagatgtcacactctataccatgccacaatgtggatgattcttcccacatttcaagact

SEQ ID NO: 244936 - DNA, 350 bp, Glycine max
  unsure (1)..(350): unsure at all n locations
aaaaagatataaaaacgtaagacggaaaataaaacaaattgaagtcatatttgcacatatgattaaaggcttgcgactattgtgacggacgtgtggtgtgctaataccttcaccgcgcgtaaatacaactcccgaacctttcacttaaagtttgtagaccacacctttccggtttttccgatgttttcctcgaataaacgttggtggagactccgcgcgtattcctttcttggaagacgcacccgcgagtcacgcgtctccctcccaccgaagggtatggtgctcaatagcataaaatcaacatgtgacttnaccaaaaatcaagagatcgtttaatggtccaacgcctt

SEQ ID NO: 244937 - DNA, 387 bp, Glycine max
acgtaatgaaactaaggtcatgctatcacttaatgtccacattatatggaaataactaaagcatatgaaaggaaaatggttcaaacatgttgatcggttctcgaaaagtttacgaaccaaaaccataattgccgaaaaattcaaggatgaaaatcataatttacccgtatattattactattaattaaattaaaatataaaatgttattattaattagaatatttaaattatgattaattactataattaaatatgtcatacataattggtaaataaactaaagagtgattttttcacatacacatttatttccccaacacatatgcctattaacatgttaacatttacaatgcaacacatatgccacattctgtggagacaaatgt

SEQ ID NO: 244938 - DNA, 365 bp, Glycine max
tatacaccctgttgacgtgcttaagccattatacttaagtcatttctcgcttaacttaaaaataaaataaatttccaccgaacgtttgaattgtactatccattaacttcggctaaaataaatatcgacccgtcggtcatcccgaaccacgttggaatcaaaagaggtaaaaataattaataatcaaaaagatatctttagaaaaaaagcggaaatcaagtggacattttcttggattctcattctaatcaatgataaaactaaggaaactaagtaaacaatcgctatcagctgtcataaaatagcttgaagtgcattcattcctatagaaaatgacatttaagtcacgctaaatgacaccatta

SEQ ID NO: 244939 - DNA, 304 bp, Glycine max
atttacggtcagaggatgaacaaaaggggagagatagggtcgtcttgatgaatcccacgctacggagaaattcgctaattgcatcttcattgacaaggatggagtatgaaataaattggacaaacaccatgatccacctcacccgcttggaatggaacccaatcttggtcataattgttgaaaggtaccccatgtgaccctatcatacacctcgttaatgtctatttacaaggctatctctccgctggctcccttgtcttcgcatttaacgtgaagaagaacatttgtagtgatgatggcattg

SEQ ID NO: 244940 - DNA, 397 bp, Glycine max
  unsure (1)..(397): unsure at all n locations
atggaaacagctgaagctgtgtgggtaccgaaaattcgtcatgaccgaacacgaggaggtcaatggacactaggcttcaatgttgttaccatgagtctacaagatgtgtcacaagcgcatttgtatatcttgaataacacacaggaggtcgttccatacttacaaactcacaaacaatatctgacatctattaacccacaattgaacatgatgaaattgttgcaagagcataatagaactttcatgaactggtataaagaataaattatgagtgatgacaatgcttccaaaacattaagaatgttggctattggtccgaatctaaatgtccctacttgtgaaggggatgacataaacanttattcgttctatacatagtcacacgatgataaaagta

SEQ ID NO: 244941 - DNA, 418 bp, Glycine max
  unsure (1)..(418): unsure at all n locations
gatctccatggtatattatttgtaacagggttgcacgttttaaattacagtaaatttggctagtgccttaattagactggactgcttcgagaagctttgatagttgtttagttcgttagtttcaaaatttaatctccctgttctcaaatacgattaacccaatactacttatacatatctgtttggaaggcacgaaagtataagaatagatagggagagaaggaaaacaatcaattttatttactttttttcatagtttaatttggtatatcacttagaagaagaacagagggaaaaatngtaatacgcatctttaatcatttcaaattaacacgaagaacaacttatataattaagagactgaattatctttattattatactttntaatagtcatgttacattatctacatatata

SEQ ID NO: 244942 - DNA, 429 bp, Glycine max
  unsure (1)..(429): unsure at all n locations
attcatagaaataggaccatggatgattnttcaaccattatctcatgatccaaacatggtaatcaaattttatctctccagctacgaagattgaacagacattggtttggatccatttcaatagtctaaactttatctattatgatgaanacatttttctagttctcaccacaacactgggaaaccaagtgaaggtcagtattaacatagagtacacgataagggagggagatatgctagagtatgtttagaagtggactaagctagctatttgatgagtgtggcttanaggatttaggtaccctgttgaatacgaagggatgcatagaatatgtggatcctatatatgcgtgttaacgacacctcatgagagatcgtataaagaaacttgtggttgaaagtgatgtctccgatgttcttcgataaatg

SEQ ID NO: 244943 - DNA, 221 bp, Glycine max
acagaaagaaccggccatcaaaaaagaccaaaagacccggcccacatatatcctctgaaaaaaaaggaaataacatggcaaaaaaagggctaccaaagaagcatccaaaaggggaaagatgcgctacaacacggccaacaacaaacccaggacgggccaagacgaagaaatccccagacactaaaaataggacaaaacaaaaacaccgggaaagggggaga

SEQ ID NO: 244944 - DNA, 335 bp, Glycine max
tgctaatcttgaatgttgtgaataatattaaaagcactttgttgattattcttggtatcatcaaaaccatgttcatacattacattgtatatctacacgatatgcttcaagtacaaaatatgaaaaggaataactgttcttataactaataccaacttcttatttattactaatcttagtggatggattggttgacgatttttggcaagccctgtgacagtatacatgataattaaatcgctctcacaactgtgtagataacaagagcaacctacctagctagaacattgataagataacatgactgaagggtttgtgatacagcaatcgtataa

SEQ ID NO: 244945 - DNA, 310 bp, Glycine max
tttcatctcccacaccaagtaggcctccggatcattctttcctttaaagggagaaatgttgagtataataccatcaattcggtgttgtctaggaacaccatcattccctcttctcatcctgtcttcttcattatgatctctattctccatttgagccaacccctcatggagcgcatcatctcattgagtcattaacctctacaaatgtcgcatcaaagcttgcatttggaatagcgagagccccattccatcattacgattagtacctgacatctcagacaaacacatcacacatgacaagaaaattata

SEQ ID NO: 244946 - DNA, 281 bp, Glycine max
  unsure (1)..(281): unsure at all n locations
catataccagcgcattctcaccaaaagagagtaaaaanaaaaaaaacaacggccacacaaatttacaaggagacaaaacggcgtcaccaaccaacttaaacacaattagagatcagataacaacacgaggcaaattctgtgccaccgtcatgtcagaacaaagaaccttacattaccaaaccgagcaaaaatcacatacggatgagtgctaagggaaccatcataaaacctaacatacatgaagaaaacgcgaactgaggacagtgcaacaacgcacttaa

SEQ ID NO: 244947 - DNA, 413 bp, Glycine max
tctaatgactatggcatcatttctggcgctaaactgctgggagttggaagccatcttctcaattaaatttctggcttcagcaggagtcatgtctccaatggctccaccactggcagcatctatcatacttctctccatactacagagtccttcattaaaatattggagaagacgctattctgaaatctgatgtggggggcaactggcacatattctcttaatctctcccagtactcatacggctctctccactaatttgctaaacctgagaatccttctgatggctgtggcctggaacatggaatttttttctaagaatactctttaaggcatcccactcgtgaggaccttggagcatgtatacacacgttctttgcactctcttaataatgagaaaacctcagaatattatc

SEQ ID NO: 244948 - DNA, 496 bp, Glycine max
  unsure (1)..(496): unsure at all n locations
tgagaactgngaaagattcaagagatggtgtgtaagctgccctcaccaccatatttctaagcaactatttcttcaatatntctatgagggattagcaacatggagaggagtatgattgatgttgccagtagcggagctcttggtgatatgacccctatcgaggctaggaatttgattgagaagatggcttccaactcccaacaactcagtgcaagaaatgatgctattgtccttagaggaatccatgaggtggccacggattcatcttcatctgctgaaaataaaaagcttgagggaaaacttgatgccctggtcaacctagtaactcaacttgccatgaatcagaaatctgcatctgcacctatttcaagagtctgtggtctatgttcttctacaaatcaccatacaaatctttgttcttctttgcagcaatctagagtcaatgagcaacctgaagcttatgcttgctaacattattatataccatctcagcagc

SEQ ID NO: 244949 - DNA, 376 bp, Glycine max
agggatatcattattggaaatcccgaatgcagatctttaaagaagccatagatttaaagatatgagaagccattgaatctgattcctttattcctacaatggtacagagaaatgcaactacataaaaatactatagaatacagaacatgatgatgaaagaacaacgaagaagattcctccttagccccaaaatgctgaatgcgatcaatctgggcacatgacattcaatcgtcctatcttcaaaagaagaatgaaagatctgactagaggaaacttagagacaagaaagaatatacaggatacatcactcgtgaagagactgcataatatgcccacctgattcagagaataaaatcataagtttgggtatcatgat

SEQ ID NO: 244950 - DNA, 439 bp, Glycine max
tctcatgaggatagtatttatgtgtatgatgaacaaatacatgaattgaagaacatgctggcaaaagaagaggctcattgtcgaggatatgccactggagttgaagagctacataaaagattaacaaagcaacaaatgaagacaagcatttatagataaaaaagatgaaggtcctagggtgcattgtggtcttcctttacggtttgtgtgctgtcacagatgcatttgcaattaagtagatcatgaaatatgttgctattttgtttttgagatgtagtgaatgaaattatgttgtgatcaagtataaggttctgggtttggtatttagttattgtaaggacaagtttgtatgaacacatgactagtaatcacatctttgtggaagtaactatccgtgcttgaggtctatgtattgtgcaattacattgatgagtcgtat

SEQ ID NO: 244951 - DNA, 397 bp, Glycine max
  unsure (1)..(397): unsure at all n locations
aacgacattcacaaaaggagatatgatgaatatatatttaacgaactaccaacatttggaagaattataaacaacaattattggattgatacttgtatcattcacaactacgttattgggattgtatgaccataatttaagcctggtcatttcaatttcatgttgtatgtattgtattattagcattagtagtagaatttcttcaaattatcactgcatgctctaatggtggtgctgatggggattagatatcaattcccactgctatagagatatatatttgctaacaatatatatggaanattaaagcaaggttaagatattctgcttctttgtatctactcagatagatatagaataagaaattacaaatgtatgaattgcattatttcatatt

SEQ ID NO: 244952 - DNA, 246 bp, Glycine max
taaactcaccctacaggcttgagagaactctgtgctctccatgctttaaaaacttctcatactcatactgattgccttctcctgatcaggatctggactaattattcttgatcctgatctcgaaactttaacctggaacttttggatctttcctggagtctgaccgacatgctcaatttgaaacattctctgggctttcacattatcttggcacatcacacattctagaaatctggtcatcctttg

SEQ ID NO: 244953 - DNA, 413 bp, Glycine max
  unsure (1)..(413): unsure at all n locations
agcgagtatgcattttatcatgatgctcacccacaaatgctcgaagatcgctgagctttgtgaggactctattccacagagaacaacaagcgtgccttcgtggtggaggacatggcgtacctacatcangaataggtggtggcaagtcttgtttgcgaactcactgaccattaacatccttcccataaccagaggaggtcacatcaccggcaccaatggagaaagaccttatcaccttgacatatggttcgtcctccaaaggaacattggtttgatcacgacatagagtatcaaggcggcgatacctgcgaggtgcatatgacccgtatgccctatgcatcctataccgaactaaatgcggctcatctatctgacgaccagtttgaatggccacagtataatcacatctctct

SEQ ID NO: 244954 - DNA, 299 bp, Glycine max
cctaaaacaatcaaataaattattcaataacaaaacacaaacatataaaagtcatgaaatataccttatcaatcatgaaattactagaaaaatcatattagttaggctgtggtcgcatatcaatgtcatcatcacccacattttcatcattatcatttcccgaaacaatatcattaggctcagctccaaataaaaggttgggttgataaaagaaaccttggcttcaaccattcatatttctccatcagttggtattataaccttatccaacataaaagtatgtcaatccattgacctaa

SEQ ID NO: 244955 - DNA, 297 bp, Glycine max
acacatgaaactaagctttggagttaaactgggaccactcactgttttcatttaagaatcatactagtcagggctgaagaccatgcaatttcttaacgatttttattatgtgggccattgagtctatcatatgctgactatagccgataagcccatgaatgacttcaggggcggagaatgtgtatgacataggctatgacttggactacaattctgggaatattgtgacttcccttcaacgtatgagctatcagatccattacatggaacgctcttggtgttaagattctgacatcc

SEQ ID NO: 244956 - DNA, 433 bp, Glycine max
  unsure (1)..(433): unsure at all n locations
ttttcttcccaactaatccatttaataattttatctatccaactatctctcccccaaattattaacataactatctcatttactattcacagtgtgaattcgggccccgaccctgaatttacacattttttattttacttttttagacttcgtttagaattcgtgatcagtttttttttcattcatttttttttcattttgatttttttttattttggaattttttaattatactaataaaataataattggtaatatatttaattattatatttaaataatataattaattattataatttttaatatataatgtcaactaattgaagaataattattcgtggggtgacttnttgcattttaaatatatatgttntatgatcgaaaaaatagttaagtttgatagttttcatgtaaatgaaattaatggtat

SEQ ID NO: 244957 - DNA, 428 bp, Glycine max
  unsure (1)..(428): unsure at all n locations
ggatagatactcgaaatctcttcgtacgtttttgtaagctattaagagaatagatgagttagatagaagctcatgataagcttttttaaaagattcaaggtcatcgaaatttaccttatcttcctagtctgatgcagaccccttacaagtngtattcgccatcagacatatgatggctgcttcatcatctccatgagacaagggttcattcaggtgctttcacgtgctcataagacctttctttatatagtcttacagaatctctatttatcttggactttctccaaatcgggacattcagacttgaaatgtccacgctttatgcagtcatagaaaactatggagcttctgtccttatccttcttgtctcatggcattcttctaaggagttctccacttgacccactttgttctcatatttgcaaatt

SEQ ID NO: 244958 - DNA, 345 bp, Glycine max
  unsure (1)..(345): unsure at all n locations
atattgtaatagacacatgttaatatcaggaagatagcccttattgtaattagggatttgatttgtatttaagaattgacccnctttttactctaatatattactatatatagtactcttgtatagtacacatgtgcatacctctgagacgcacaacattaagttatagntcttctctatagaaacaataaagaagcactaaagcaaccagtaactgaaaatctagtcacaagtaaagtaacaggaaagacaagggtacattatccagatattgagagattggtgttctcaataataggcaggcttctattacttttcaagctgacatggttcagactcatacat

SEQ ID NO: 244959 - DNA, 380 bp, Glycine max
  unsure (1)..(380): unsure at all n locations
atgaaaatttgtgtcccattcttgtgttggacgacacacccttctttgctaaaggaaacatcaagtccactgtcacataattgacttatgctaagcagattgtgtttaagccctttaaccaataatacattatcaattggaggatagggatcaatacttatacttcccacttctgatttcctccgaaagtgactatttcatcaagcattgaaacatacacctttctccaatcatgtgacatgagcagccattgtccaagtaccatgattggtgtgttcttgatgtggctgaatacatctacaacgggaattattntctctttaaatactcaaaatttctttggtccctttcttgttaattctcaaagcattgcatgatcc

SEQ ID NO: 244960 - DNA, 418 bp, Glycine max
  unsure (1)..(418): unsure at all n locations
atcatgggccatgatatcttttggtgtcaccctagtacagcgaagttatgttatgcatgcaatttgctcctgatattgatcttctatcatatggacccgaagcccaatcaacatcatagtatgcttgcacataaaatttaaggaactggatggctgaagtcataatccaaacgtaagagtgccaattaagtatcgatgaattctttctacagatgtccaatgctcgtatgaacgatttgacataaactggcacaccttgttgacaaaaaaactgacttttggtctttntatggtggcatactgcaacgccctaaccactgattgatataaagtacgatcttcgtatggcgtgctggttggacgaatggcctcatctgattggccgcaaataatgagacagctcacatctctgatgcat

SEQ ID NO: 244961 - DNA, 434 bp, Glycine max
  unsure (1)..(434): unsure at all n locations
aggctgatctgtgttatggatataccaacactggatggtgccaaagatggcaagatttaccaaagtgtaggaatcctggcgatttgtttgtgaaaaagactctcgtccccgattatgaaagtgtaagttacgatacaaatccggcttttggctacagtgattgtgaggccagatgctggagcaattgtagttgcgatggattcagagcattctggaggaatgaaactggatgtaaattctatcattggaattcatcgaaaaattatattgttgacactagtgttgctggtgtagagttttacatgctggagaacacaggcaacataacctcacataacggtaagtcgaatgtanaatgcctggtgattttgtttctggactacttccatagtactactatactgatatatatgcacaatatcttctggttaact

SEQ ID NO: 244962 - DNA, 237 bp, Glycine max
agaatggaaatataaataaatgtactctgcagcgaatgctgaggcatcaagcaaacaaatagcaccttctggcaagggaagaaatctgtgctacaaaaagtcacaaatgggaaacgcgtaggaagatgtatcaaaagacgctcgaacgtaatcgcgaaatgccttaatttaagcttcatgcctaataaactaccaatcatgaaagagaatatattatcaatcaccgattgcacaaat

SEQ ID NO: 244963 - DNA, 315 bp, Glycine max
atgttagctacatttctcagcacaatcggtcggatgcttttccctcaaaattacctcgtttatccaatcatacgaagcttatgatgttgtacattgggaagcatactgtaaacaaggttatactcttgtctaacagaatggaaaaaaaaaacttaattccccaaatgggaattgaagaggaactgtacttatatgaactcatgtgacaaatgatgcgggacattatttcaaacgacttatgtctaatgtgccccacttaactaccagctatagggtcaattacagctgtcaacctgaaaactgatctttctaaga

SEQ ID NO: 244964 - DNA, 241 bp, Glycine max
cgcgagtaagtggttaggtgctaagcgagccatgcgcactaagtgcccttttgcctgactgcaagttctctaagtagcttcttcgagccgggtggacattctgccgctaagcgagctctgcgcgctgagcgcgaaccattaggtcttcaattcacttcctattctttgcctgtgaaattgcaaataatattatcacaacagtatgaattagaatgttaaggcacctactgcataaaactca

SEQ ID NO: 244965 - DNA, 371 bp, Glycine max
  unsure (1)..(371): unsure at all n locations
cttgaatctcagcttctaaggaagtnttctcaagaaagcttctgaaggacaggtctctatgtctataaatataagcatgtgtcacactttgtgtaactctgatgaatgagagtcttgtgagacatctntcaaagttccacttctctccctcctttattccttcaatgtcgtgctcccccctctctctttcattccctcgtcttctacctccattgaagcattcttccatgcttcttatccacgctcatcttggtggtgaagcaccttcttccatggctgattacctagtggatggcgccatctctcccctcatatcctgtgtcttcactgcatctccatggttgtaaaaccaccattttatgacctcattg

SEQ ID NO: 244966 - DNA, 343 bp, Glycine max
attgtgatggaacaagactctgaaatgaaggaacagacgaatagtggttctttgaagaggctatctctgagttctcccggggggaggttgaggatccactcgccgagaattgctggccggaggggccggataaacgtgtcgtctaccgcgagttctggctcccggagaagcctctccgatagctttgcggttgtgaagacatcctataacccacagaaggatttcatggagtccatgatggagatgattgtggagaacaacataagggcatccaacgacttggaagatctacttgctcgctacctttctcttaattcagatgagtatcatgacctcatcatca

SEQ ID NO: 244967 - DNA, 356 bp, Glycine max
ctcaactttaaaccgaagctcgtagcaaatttgaacgacaatgacatttcactcggaagtcctattgagtcccgtaatatatcgagacgctcgaaatttaaaatcgaagctcgtagaaaatacgaacaacaataacttttcactcggaagtccgattgagtcccgtaatatatcgagacactcaaaatttaaaacccaagctctcagatacttctaacgacaataacatttcactcggaagtcctattgagtcccgtaatatatcgagacgctcgaaatttaaaaccgaagcccgtagcaaattcgaacgacaataacatttcactcggaagtccgattgagtcccgtaatatatc

SEQ ID NO: 244968 - DNA, 452 bp, Glycine max
tttttgacataatatatcgagaagctcacaattgaacaacggatactctccacaaatacaaatggtcatgactttttattcggaagtccgattcatggacataactcatctatacgctcaaaattaaccaacaaaagctctcgagatattccaatggttatcactttttactcgattcggggacataatatatcgagacgctcgatatagaacaacagatgctctctagaaattcctatggtcataactcttcacacggatgtctgatttgtggacataatatatctagacgctctaaattgaacaacagaacctcctcagataatcagatgttcataactattcacaccgatttctgattttggatatataacccgaacgctcaaattaacaacgaacctctcaaaatcaaaggtcaaactttcactcgagtccatcaggcaaatatatcg

SEQ ID NO: 244969 - DNA, 135 bp, Glycine max
ccaaaaacccgggagaaaaaacacacggggggggggggtgtagatgcgacacacccacacagcgcagaaaagacacgcggacccaccacaccaaaaaacggccgggcggacaaacggcgagagagggcgcgggac

SEQ ID NO: 244970 - DNA, 435 bp, Glycine max
  unsure (1)..(435): unsure at all n locations
atgcgaaggggcctggcaggagtctagccttctccttcaagaggggttgaggcctctgcagcttatgagcctcagcctgcacaggaggatgcttctagtgacatctcatagccctctccacctgagccacttattttttaggaggatgttgcagtacccgagccatctcctcaacctgagcctgagcctgagccatctgcaccagtgccggacttgcctatttctcaggatccaccatctgcaccagcactagacctgaacgagcatgcagaggatcatacataggatggttgacaggatctttattttcttacactcttgaaaatttatattattctggcgtcagtacattctatgtatatgtttcaatactaaatttcagccatagtatatntcgttcggagcttgataaagcttgttgacatgcactattta

SEQ ID NO: 244971 - DNA, 395 bp, Glycine max
  unsure (1)..(395): unsure at all n locations
ctactttttgaccaaatataaacaaaattaactaactcttatgctaattaagttagtaaatatcatttaattccacttattacatttaagagataaacttttttcctaaagtacccttcaatggaacctgatatcaaggacaaaaagagttattggaaatagaatctgaattaattgaagggtatatttgagatagtatcattaaatagggtgaaagtagctaaaatttacttatgagtcataaaaggttttcgttttttctctcttaaaaatgatccggagggagtaatanctattctaatgacttcatcattgtatgtgaaaagaacaatatataacatccttacctgtggtggttttggtaatagttatcaagctgataatagatataaaat

SEQ ID NO: 244972 - DNA, 366 bp, Glycine max
  unsure (1)..(366): unsure at all n locations
ccatccagtacaatctttcaagcctgcacgctccttcctggataggctaccaccataatataatgcttgatgtcgatccggtattcgtcaacttggcaccgagcgactcgactatataacactaatccattacacatgcgaatcaccctactaccaatgagacaaacttcgatagttgagaacagtaataaatgacatacctatgaccgcgatgcccccacaaagcgagtaaatgactcctaacacaagggctgaacgaccaatactcagcaaaaatgagaaacacacattcaaaccgacaacgagngacatattaaatcgatcctctaagtatatgtgaccgaacattacggacatgtcatacaa

SEQ ID NO: 244973 - DNA, 432 bp, Glycine max
gctcacctccttgagatagctaaactcaccccatgccaaaatacatgaaaatacaaaaaagtccctaatatacacggctaaaaccctatactactagaatggcaaaagtgcaaggcccaaaagaagaaaaaacctattctaatattgacaaagaagagtgaatccaaccttggcccatgggcttagaaatctaccctgaggttcatgagaaccctagggccttctttagtagctctagctcaatcctcttagagtcttctatccaatacccttgtggggtaggattgcatcacttggtcaatgaggaccttggaaaccatgaagatggcaattacgatggagacaaccatgtggtcattgatgtgtcattatattctcttatttcttaaccctttttgtcaccatcttacttactaattagccttaattgtc

SEQ ID NO: 244974 - DNA, 436 bp, Glycine max
atgaacactgcactactcttcagaatcgcataccttttgagatgcagcagcatcaactatcagcttcatcatcatcacctcgcaataataataatcatcatgactcgcacgtaattaagtttgacttaaattttgtttgatcaatgattcaatatagttcattttctatatgtttaattagttaccttcgattcaaatttttatattattgcctgaaaacaaattaatctagttttacttggtcaacaacaactcaacatatatgtttagtgccagcaataatgtccggccagggaggtctctatccatgaattaaagacaaacagataatcaacgattacatatgtccaaaagaaaaataagaaaattgttatttttttgttgttattgataactatcgcgacctatatacatgtgacagaaagatagagaagta

SEQ ID NO: 244975 - DNA, 386 bp, Glycine max
gactatcaacatggagaggagtatgattgatgctgccaatggtggaactcttggtgaatacccttgctagctggaatttgatggaagagactccaactcctaacaattcagtgcaagaaatgatgctattgtccttagaggagtccatgatgtggccacagattcatcttcatctactgaaaataaaaagcttgaaggaaaacttgatgccttggtcaacctagtaactcagcttgccatgaatcagaaatctacacctgtcgcaagagtctgtggtctatgttcttctacagatcaccatacagatctatgtccttctttgtagcaatctggagtcaatgagcaacctgatgcttatgctgcatacatttatagtagaccttctc

SEQ ID NO: 244976 - DNA, 395 bp, Glycine max
  unsure (1)..(395): unsure at all n locations
cgagttccatggnggtccggaccttcgacggaaattgccgagaggtaaggggagagatctacctcccagtacagatagggcctcacacttgccgagttacattccaagtgatggatatcaacccagcttatagctgtctggtggggcatccatggatccactcagtgggagtcgtcccctccacactccaccaaaagctgaaatttgtggttgaaggacatttggtcatagtatcaagcgaggaagacgtcctggtgagttgttcttcctctacgccatatgtggaagccatagaagagtcgttggaaatggctttccaatcttatgaggtggtaagcaacgccttcatagaatcccacccaatgcagccccgcctatctggtgcggcaatgatg

SEQ ID NO: 244977 - DNA, 390 bp, Glycine max
gaacatgactatgcttgctcaaacttggagcgttctttccttttctaacctcatccccacttcccacacttctgatatcattcttgatagagccaaactcatttatggcatcatcatgaatatggacatgaatatggggtacctcatctcccactagatctccctcatagcacaacatgatacatccagactaggattccctaccattaatttggcatatattaagaagaactgttgaaatcttaatgatccgacattaactttcagaggacccaagaaggccaggggtaagagatctgaggccctttctcttagcaccagagacccagctccttcttctttcacaattcatacctcccacttagattctatgtattccttctacaccca

SEQ ID NO: 244978 - DNA, 326 bp, Glycine max
aatataggtgggtttctaccactctaggaactttaaaaacttttagagctactagcttaaaaagctggcacacttgtgtattgagaagaaaactgtgaaacacttcaaggcaactcttcctttttctcttaattcggctccccctcttctcttcttttcattctttctccttagctcctcttagttttttcaggaatctttgggggactctcttcatggtatcctatgagggctcttaacttttcttatttttgggggaacacctgcggactttgagctaaattactcataagctctacagctcatcctttataactttagaaaaa

SEQ ID NO: 244979 - DNA, 190 bp, Glycine max
ctcacttagctgcagcatcagatgtcttatgcacagctccagttcagatccaaaagagcacttgcactataaggcacccatcacatggaataatatgctagggttcattggaagcataggtcctgacccttactctggaacaagatctgcttgatcaacgctttgtcaatgaggaagtataaattatgtg

SEQ ID NO: 244980 - DNA, 383 bp, Glycine max
gatgggagggattcactatatcaaggcagacacaaccaggaagctcatcgactacgagcacctactaacgacatcaacttgggaaagagaattcgaaccgttggatctattgagaatgaaaaaggataactggccatctcttgcactcccaaaacactgttgattatgaacaggaaatactgagctgtacatgatcgagcaagggctatcaatactttctatgcttataaacagctgaactctcaagttgggctagaggagtattataaccactactttcgccctatgtccggataagaatgtgcaagatgctgagcactctactgctctgcgacaaacgattaattgccattcagataccaaaagctcttacatcatcactg

SEQ ID NO: 244981 - DNA, 325 bp, Glycine max
ctatcagactaaacgcttgaaaatcctcattcaacacagcaatgggccataaacggcacaatccttaccatccacatttcttcatcaggatacagcccaacgggatcaagttgttctgaaatacctcaaaaagcaccgcctcctgacgaacgataccataccgtgatccacgatcatgacgccccaaagcggatatgccaataccaccaaacaataatccccctcgtgaaggcccaccagcctaaacaatacttgaattagagctgactatacgctaccaattcgaccaacaacaccagccttatacctccacaatcgctaaaga

SEQ ID NO: 244982 - DNA, 426 bp, Glycine max
tgatgatatggtcttcaccgacgaaaggatcaaagtgggtctgtaattatgcatttctgatcatctcgctatgaaaaaaacaaagctggggcaaataaagagggtgaggatgaatgataagcccgtgctgtgactgccattcctatacagccaagttttccaccaacccaacaatgtcattactcagcctattaccaaccttttccttaccctccgcctcattatccacaaaggccatccctaaaacaaccacaaagtcttgctttcgcacgttcaatgacgaacatcacctttagcacaaaccaatagcaccaaccaagaaatgaattcttctacgagaaatcctgtcgaattcaccccatattcagtgtcctattgctacttgctcccatatctacttaatatttcaactgtagctctaacccc

SEQ ID NO: 244983 - DNA, 399 bp, Glycine max
acatccgatgtgggactattttaacacctatcggtgctaggattttgtggtttgagtctgtacattgtatctatgttatatttattcattgtggttcgggttatgtaactaaaatgtattattgtataacttgtgtcatttttgtaccgtaccttaaccatgctgagactcttttatttggcatgagtatgtatattatatctttgtgatgatttaaaactcttaaaccagattgttatggataagaaattctgtaccaataaccccattgattttctatattctttttgaaatatataccccttatgcctggcgtccacattcttatattcataagagtgggtgtaattacatatactcacctaattgttacctgatatcctctgatacacacattct

SEQ ID NO: 244984 - DNA, 448 bp, Glycine max
attgcggatatggtcttcgctggcgaaatgatcgaagtgggtctaacaagaggaaaatctgatcatcatgcattgataaatgcaaataaactggggcaactgaagagggtgagaatgagggagaaacccatgaagtgaatgccattcctatacaaccaagatttccaccaacccaacaatgtcattactcatccaataacaaacctttctcttacccaccacccagttatccacaacagccatccctaaatcaacccccaaagcctgtctaccgcacttccaatgacgaacaccacctttagcacaaaccaaaacaccaaccaagatatgaattttgcagcgaaaaagcctgttaaattaccccaattccgggtcctatgctacttgctccatattacttgatatcaatggagccataacccagccaagtcataacctcattttccat

SEQ ID NO: 244985 - DNA, 128 bp, Glycine max
aaacacaacgaaacccaaccggggggggttgtttttgtcacaggacagaaatagggaggatacggcccctggaaaagaaccactgcgacggaaacgacataacgcaaaaagacattaacaaaaaagca

SEQ ID NO: 244986 - DNA, 249 bp, Glycine max
ggtgctactgcccataaccaagcttgaccaatcccgacccaacccgggcatattcggtcagtgagaacctgtgatgtacctaagcatgcgagctcctggcagtcaacagataaaacgaaaacaagaccacaaagcaaggaggcttgtggtggctggccacctgtgaaacttgattgatatgtgagatatggtctctggcaatcgaataccaagggcgggtaatcgattacaaggcttaaaaatgaagac

SEQ ID NO: 244987 - DNA, 290 bp, Glycine max
gatttaatagcaaagtgcaaccctacacatttgtgtggtatcgtggagtattgtataaaaatctttccgatcatcatcaataagcaaaacatggaggttgtcgccagttaattgaacaatagtatattaaaatcaaatagatatcttgtgacacaaaaatactaaatgcgcactcaattcacgataacaaaacaatcaagcgtacaatttatacgtacgagaaacaagagatggacatacattattaatatagagagaatttaaagcacaaacaagggaatagaaaacat

SEQ ID NO: 244988 - DNA, 345 bp, Glycine max
atcatttcttgcactgaatcgttgggagtcggaagccatcttctcaatcaaactcctagcttcagcaggggtcatatcaccaagagctccaccattggcagcatcaatcatattcctaaccatgttgttaagtccctcatagaaatattgaagaacgagttgctcacaaatctggtggttaggatagctcgcacacaatttcttgaatctttcctagtactcatacaagcattctccactaagatgcccgatgcctgaaatgacttttctgatggcagaggtcctagatgcatggaagaatctctccaagaacaccctcttaaggtcatcccaactgaaaccgac

SEQ ID NO: 244989 - DNA, 293 bp, Glycine max
  unsure (1)..(293): unsure at all n locations
gtgcacgcaatcaatgcggcaaaacacaccaactgattatgacgatggatggctcaaatactcacacaggtaaactcatcactttcaaattgagcttctcaaactatcatgacatgtagaggagaataaacgattncaagccacaaaatgtcaagaactcttattttcaaaacaatcacccatttcttgaacatatcctataattcacagaaaaacatgcaacgtctgacacgcacacaagattgacccacatataaactatagacccaccaactaacaccataacaataaca

SEQ ID NO: 244990 - DNA, 433 bp, Glycine max
agcttgtgcatccaataccctgatgaggatgtcctatatgttcttaaaactggactaattcatttgcttccaaagtttcatggccttgcaggtgaagacccgcacaaacatttgaaggaatttcatattgtctgctccaccatgaaacccccagatgtccaagaggatcacatatttctgaaggcttttcctcattcattagagggagtggcaaaggactggctgtattaccttgctccaaggtccatcacgagctgggatgaccttaagagagtattctttagaaaaatttttccctgcttccaggaccacagccatcaggaaggatatctcaggtattagacaactcagtggagagagcctgtatgagtactgggagagatttaagaaactatgtgccagttgccctcaccatcagatttcagaacaactt

SEQ ID NO: 244991 - DNA, 255 bp, Glycine max
tcgggctgctcaattgctccaggttattgtatggaagggcaaaggtctgtatggtggtcagcagaggagcacaaactacagatccttgcgacaggtacatatttctggttcaaggccagctgggttaccaagttaaccaatgcatccagtttgccttcaagtttcttagtttcagatgatgcagctgagtttgtagctacctcatgcactcctctaatgactatagcatcatttctggcgctaaactgctgggag

SEQ ID NO: 244992 - DNA, 442 bp, Glycine max
gtcacctgcggcatgcgagcttctgcatgattggagagttctagagagagatttttccaagttcctgagagtttgagagaatttgttgtgtgaagatttgtagagaccagggctggtggaggaagttgtcctgagagcttgagatgagtttgtgagcgattatgaggtcctagaggtggaggagacattcctactacttgtattactacaatctgtcattctcttctctttgatagagacgaagctgcccatttatggaaagctaaatcctctgtgggatcttccttgtaagtacttgatgtaaatatctttttatctatttaatgatgttttgtgtgttcactgtgctatcaaaacttcattctaccatgctttttccttgatcacgtagatgcatgtgttttttaggatcattcaacagatggagactggtctgattctt

SEQ ID NO: 244993 - DNA, 257 bp, Glycine max
tcaactactaagctagctctaacgtactgttactaaagttacaacaagattcgtaagaattctacccatctcttctaaggttctccgatgtattagactaacagtaatgcctccaaaacatgaaggcaaacaccatggctaccaactctagatcatgcataggataaatcctttcatgagtcttgagttgtcaagaaaacataggcggcttcttggcctcttgcaaaagcattcctctaaactgaaaggttactcta

SEQ ID NO: 244994 - DNA, 431 bp, Glycine max
  unsure (1)..(431): unsure at all n locations
gagctctgncctgagatctgtcttgatggagctgaatttgaccaaacaacactattgtgacatcgtatctagaactaaaacttaatccgcagagccctcatataagactaagttccaatcctacttcattcaaattgtaaggccacagtccatttcccaatgctaaagacacctatccaggcacacaaggggttgatcagaccaagagcatacaaactttaagcactaaaagaagcgtggcacacaggaaacacaatcaattacatattagagtaatcacatcccttgttctttataaatccccaacaagggtgttgagcctgccattacacaaaaacccctaacaataatgagattacaaaacctaggtatctctacaaatgttgctcctcttgctgcctctagagctctattcccataataggcactgt

SEQ ID NO: 244995 - DNA, 210 bp, Glycine max
tgcttgtggggcttctatggaggttggatctttgagcttcaatggggtcctttaatggtgattttccaccatggagatgcagcggaagacaaaggaaaagaggtgagaggaggcgccatccattaaggaataagccatggaagaaggagcttcaccaccaagatgagccttggataagaagcttggagaggatgcttcaatggaggaaaa

SEQ ID NO: 244996 - DNA, 267 bp, Glycine max
atatttttacaatggaaaccccaggcctttattataattgctatcaactatctgtgcgttaaagaggatttcattcccgtatcttgcccgtcttttttaattgaatttgcatgggtctcatggtaagcttgtttatcttcttaaatagactcgtgtcccttttggtctcagcaaactttcctgttttgttatacaacgcgccctttcttcttaaaaagacttcacttctctgataaacttgagttataaatattatggaatgagagt

SEQ ID NO: 244997 - DNA, 206 bp, Glycine max
tcaatggcattgcaactcactgttttcttttaaccttgatccctcaagtgataaaagctaaatcacttaacctcactcttaatctcttagcaagttcagctaaatgatttgacatgagcaagagtcatttacagaccaatgaatcccactctatccctagaagagaaacctattagggaacatactcaaaacacaattttcaaagc

SEQ ID NO: 244998 - DNA, 421 bp, Glycine max
agcttgtagactgtaggtgtattatgcatttgcttgtgtaaaacccgatgaacgtttggtattggtcttttaactagattgtgcctaggaaggagatttactcaaaaaaatattcaaatattaagtatcatttacgggtaactgaaagtaagaattgagagaggcccgatcatcgaaatccgatcttagggggagagggggtacaaagtactctgttaaaccagaccatgtatgcctaagcgacaacatattcaagaaatatagtttttaaataatattaacagtgtgcctttgtttctatcagtatctaaaatcacactaaaatgttgactaacgtaattttaacaaaatatctacatgttttatattttgggtctataattaactttgagttagaataggtttatatcgtttttgtgta

SEQ ID NO: 244999 - DNA, 249 bp, Glycine max
tctcgatatgttatacgcctgaattttatttacgagtgaaaagttaagaccatttgaattgctcaagagcttccattgttcaatttcgagcgtctcgacatgtgatgcggctgaatcggacctccgagttaaaagttataaccatatgaatatgtcgagagcttacgttgttcaatttcgagcgtccctatatgtgatgcgcccaaatcgaaccttccagtgaaaagtaatgaccatttgaatttctca

SEQ ID NO: 245000 - DNA, 391 bp, Glycine max
ctctaacaaactgttgaagaacaatacttaaccttcaaaaccacacacaaggagactgctttaagccataaacagcctaaaaaagtttgcaaaataaacccaacactccttaagcaacaaaactagaaggtttcactatatagatgataaatctcctctttaagttcactgtgaagaaagacgttagtgtacctaaaataaaggctaagaatgcatggcatcatggccaggagaagatgaccaaatacaatgggagaaaaggtatcaacatagtctttagaccataaactcgactgaacctttgagttaaccaactttcaccgtgtaaatccactgacaatcaactagtggtttgcctagaatgagaggaactaactgtcgagtaacatta

SEQ ID NO: 245001 - DNA, 253 bp, Glycine max
tttcctctaggtgatccaattttttcctttccaccacggcaggagggactcttcccgccgcaaaatgcaagggttatggttttgggcaaatttgagggtcctccacagtgtttgacaggagtacgccaccaactgtttgcccctcagtggaatatttgaggcaaggatcgaagtcggctagattatggtggggtacttcatgtgtctcccccatgggttgagagacatgtgcatgatcagcctggggttgttg

SEQ ID NO: 245002 - DNA, 386 bp, Glycine max
  unsure (1)..(386): unsure at all n locations
agctnggatacttagaagatacgtattagtgttttatcagcgcctgatcaatagaaagggacccttctcgactttaaacaccaaccgttccttccagacaacaggcacgtcgtagacatactcagcagagtccttcttgctggagttgccaccatacccgccgtagtttgcggcgctggcggcggtgccagagtagactcggtacggagactcttgtgctaatgagggcgctggtgcggaggttaaaatggtggcgatggcggcggcggcagttaaggttgataatggttgtttgaagggtagaagaggtttgcatgatggggagggtggagctgaaaatgatggctttggtgtggcgggtgtaccggttgacgataaaatggctg

SEQ ID NO: 245003 - DNA, 252 bp, Glycine max
tggatctactgatcctaattgattttatttcctctttataacatggtttcctttagctttttaaactatttgtagctttcgaagtttttagccattgaaagtgattttggaaacgtgtctaaacacgtgcatactagtgcatctgatcataggttgattttatcatctttcattactgttctttcgcattatttgattggcaggcgaaggtgctaactaaagagagttaactactagtatcatttttgtttt

SEQ ID NO: 245004 - DNA, 424 bp, Glycine max
  unsure (1)..(424): unsure at all n locations
agctnngaaactatgctgatactgttgtattctgctgntagaccacttcttgtggattgtaacatgttaataaaatttactttgttggcagctaaaaaaaaaaaacaacaatactttagatttctagattgagaagccaaggacttcaattatagtagttaaaaaaatctcatcgtttaaatggattttcatcgatgatttttgtctgtattaaataaattgaatttgcatgggtctcatggtaagcttaattatctacataaagtagacacgtctccccttttaatactcaacaaatcttcctgtttttgtttatcaaagcatgccactttctccttaaaaaacgacttcactttttttgtttagttcttgaatttataatttatttatgtgaatgagtagttttaaacattataaaacttat

SEQ ID NO: 245005 - DNA, 201 bp, Glycine max
ttagcctgccttctctctgattcgtaaaaaattaccaagcagttagtgtggtccaatgaaccaagggttttagaatctcaaaacaaaacactcacgcgaacatagtaaacacgttcgtccttctatccctatagataaaaagctaaaaagatccttttcattccccaataatttcgaaattattatttttacaatacaaaa

SEQ ID NO: 245006 - DNA, 204 bp, Glycine max
ctggcggggatctggcgatggtgatcgttgacaagaaaggcgggctaagaggaaatggcgatgcatggcaaaggaatagggaatagcaataaccatgagattttgcagctgctcttctgcctccagaggccaaagccgaaaaaggaggaagcacgggtaaccaaaaacgcccaggggaggccgtctgcagaaaaacccaggccc

SEQ ID NO: 245007 - DNA, 420 bp, Glycine max
  unsure (1)..(420): unsure at all n locations
agcnttttggagtagaaacatgggttcatctcattttatttcagaaagtcgtatctagtcaagatctgagagatcatacaagtttcctagcggtttctaattatatgggccatcaagtctatcatatgctgacaatagccgagaagcccatgaatttcttcggggacggagtaggtgtccgccattgccttggccttggctaacaatcggggaagttcttgactcccgttcaaggtaagagcaaaccgatccatccacatggttgcctcttggtgtaaagagtcgatcacccttcctctagcctctttttccgcgtatacttgggcatattcgtccgcgaccctatgctcgtgggccgtggctagacttaactcttcttggtacttggcgatgatagctagcatgttggtctccgtctca

SEQ ID NO: 245008 - DNA, 249 bp, Glycine max
tgcctaattaacctgaaatttaattaaaatgattattaaacacacaaaatgaaaatactaagtatttattacctatacttaatagaaaatacttataacattacaaaataaccataaattgggagagtttgatacaatttatacaagttttatacacaaaagttagtcattttcactgactaacaactcccccaaatttacagttttgcttgtcctcaagcaaaaagagaacaactcacttgtcctcaa

SEQ ID NO: 245009 - DNA, 376 bp, Glycine max
tgtgtgataatctctcggtcagcatagataggttacatacctgttcataagcgcaatcatcttttcatgccggacacctgtttaccagaatagcttgccagataacacaggtttaccaagaggacgacacttggttcttactggtatatactacttgagcgagttgggacacttgccggccgcgaacaagtttttggcaccgttgctagggaacttctttttatttgagaggggagctcattcttaagtgtgtatacgttatttggtactgtatgattggttatgcctatatatgggctttgatttatattagccgtctttgatagaactggataaccgctgctctgttagtactgtttatgcatagatctcccac

SEQ ID NO: 245010 - DNA, 250 bp, Glycine max
tatgaaggagagttattatagggttataagtgtggcgtccctaaataatgattggtttaatagtaatgatttaaataacaaaaaaaaaaccatgggaaatttttttttctttttctttttcgtttctttctctttttcacagtaattaagttcagaaggaaaatcatcactatagagtcctgaatgaccagttcacaactctattcggagtcatttctttttgatcacgcataacctctaaaatattttg

SEQ ID NO: 245011 - DNA, 402 bp, Glycine max
agcttcttaaggaagctgtcatttagttagttccataaatagaaacaagtgtaacacttgtcataactttgatgaatgagagtcttgtgagacacacttcaaagttcaacttctgtccctctttttctccaattttgtgccccccaaatctctctctctcattcttttcctccattgaagctacctctctaagcttcttatctgttggtggtgaatcttctctttccatggcttattagtagatggtgcctcttctcacctattctcctttatcttccactgcaactccatggctgaaaatcaccattgaaggacctcatcgaagcttaaagatccagcctcatagaagcttctcaagcaagcttccatcaagtggtatcagagcacaagaacttcaagtag

SEQ ID NO: 245012 - DNA, 199 bp, Glycine max
ttgatttcctttgttccggaaacctttcttttctcatgtgcacccaaacccaatctccgggttcgaagacaaccttctttctccctttgttggcttgtttagcatagcttttatttttcctctcaatttgatctttgactctctcatgaagcttcttcacatagtccgcctttgcttgaccttctttatgcttaaaaac

SEQ ID NO: 245013 - DNA, 401 bp, Glycine max
  unsure (1)..(401): unsure at all n locations
agctnnttggaacttaacatanatgctggtcgttggtatatgattttttaggccaaatctattatgtttttgttgtgctaacatgcagttgcttcaataaggatgttatgatgcaaataagattgaacaaaatagtttttatgggtcacttatatgatgcagctacttgattgttgagatgtattttttaattntgtattgcctgaatatatactttatgaatattattatttcattactttaagtatttcttttatttgatagtggttattcaataataatttgaatacaatattttatactgtatgaatatatactacttgaattggttatgttttcaatttacaggttagagttaattaataaaacatacaacatattaatttttttaaaaaaaaata

SEQ ID NO: 245014 - DNA, 255 bp, Glycine max
tttgtgatgctaactatgctagagataaagtcaaaaggaaaagcataagtaggagctgccatttcattgttggaaacttggttacatggatatgcaagaaacaaggttcaactgcgttgttcactgttgaagcatactaaatgtcagttgtaagatgttgtgctcaattcctttggataagaaacagcttgaagactacaacatttgtgagagtaaaattcctatcttttgtgataacaaagctactattagtct

SEQ ID NO: 245015 - DNA, 388 bp, Glycine max
gatcttaagtgacctgtggcatgcaagctttcatctagaggaggaagagtatactgtgacagcaaaatctagccgtcgctaaggataggggccatcaaatctatcatgtgatgactgtgatttataagcccgtgagttaattaggtggctgtacacacgttgggacatggccttcaactttgactgatactcgagggtagactagacttccatgtatggtctaggggaacctatccatacacgtagcctctttttgatgcaaagcatcgatcagcctccctcttgcttccatttcgctgaacgcttgtgctaagtccttcactcgctcttgttcatgggataagaagtgggtaaactcttgcttgaagggcccgatcatagataccat

SEQ ID NO: 245016 - DNA, 252 bp, Glycine max
atctatatattcttataacgatttttattttttaaaacaccttgtgtaccttgagagaaaagactaaaagtgttaagtgatatattcgtctgtgagacgatcacatatttagtcactatgaaaccttacaacaaatcatgttggtttttatagattcagaattggtttggtaggacaaagaatactggatttaagacaagcttggggtagtgcctgcaagtgtaagagccctaaaagtgattgaataatatt

SEQ ID NO: 245017 - DNA, 381 bp, Glycine max
ttcaccggctcaaagacatgccgaaaaagaatgctgcctccccctgaggaggcactctataaccccctttgctttgatgagagaacatcttagtaatgcacctgtgctaactctttgtgactatgttaaaacatttcgagctacaatgttatctatatggagtgtgagatggacctgtattgatacaagctgggcaccctattgcttattatagtgaataacttcatattgtcacccttaactaccctcctatgataaagagctatatgccttaatgagagccctccgaacttgtgaacattaccttgtttccaaggaatgtgtcactccactatcatcatcgatcacttaagcacattagatagcagagcgagttatact

SEQ ID NO: 245018 - DNA, 191 bp, Glycine max
  unsure (1)..(191): unsure at all n locations
nctanccaaatggacttaccttgaattatttcctttgaaagccctttagaaccctgtatcccttatccgtgtctagaagctcactacaggccttaaatgaaaaaccgtgatatcaccatatcctcaaggaataatggagccttggaaatggatcgggaataattatgggggggccttgtttaataggacaa

SEQ ID NO: 245019 - DNA, 430 bp, Glycine max
  unsure (1)..(430): unsure at all n locations
agcttgcttgtggagcttctatggaggctggatctttgagcttccatgaggtccttcaatggtgattnttcgccatggagatgcaggggaaggcaaaggagaagagaagaggggaggcaccatccactaaggaataagccaaggaagaaggagcttcaccaccaagaattgccttggataagaagcttgaagaggatgctttaatggaggaaaagaaagagagaaggggggagcacgaaattgaaggaataaaagagggagagaagtggaactttgaagtgtatctcataagactttcattcatcaaagttacaacaagtgttacacatgtttctatttatagactaggtagcttccttgagaagctttcttgagaaaacttccttgagaagcttctttgagaaaacttccttgagaagctagagcttat

SEQ ID NO: 245020 - DNA, 203 bp, Glycine max
tttccttgaacttaaagctttagccgttaggttgttcaccatgttgttcatgttgcttccctatctctaacaagtaggtgttgtcggtatttgaggaattaagtgatagtgtttcaacccctcgaaaattggcaaacaacaattttatatatagatttctaatactaacatttgaattaaatgatttggacatgtgtatggtg

SEQ ID NO: 245021 - DNA, 417 bp, Glycine max
  unsure (1)..(417): unsure at all n locations
agcttgcttggggagcttctatggaggctatatctttgagcttcaatgaggtcctttaatggtgattttccaccatggagatgcagcggaagacaaaggagaagaggtgagaggaggcgccatccactagggaataagccatggaagaaggagcttcaccactaagataagccttggataagaagcttgaaaggatgcttcaatggaggaaaagaaagagggagagaaagagagaggggggagcacgaaattgaaggaataaaagaggtatagaagtggaactttgaagtatgtctcacaagactctcattcatcaaagttacaacaagtgctacacatgctgtctattatagactaggtagcttccttgagaagctntcttgagaaaacttccttgagaagcttctttgagaaaac

SEQ ID NO: 245022 - DNA, 257 bp, Glycine max
  unsure (1)..(257): unsure at all n locations
tttcacaattatgttatttatcattcttttttaatattgnaatcacatatttttaatgtctaaataaatgacatatggtgtaaacggttactagctagaatcatcccaatacactagtttttttccataggatccaatggtaaaatatatctcatcagatcttgtatattctgtagcatcccaagaaaataattccattaattgtttagataaagtgtttgataatcaacatttcaaaattatatttatttttacat

SEQ ID NO: 245023 - DNA, 421 bp, Glycine max
  unsure (1)..(421): unsure at all n locations
agcttcagtaaggaagaagaagaattaatggtgtaaaacaagaagcgaaacgcgggagggagggagagagacnaaaatgaaccattttttttaaataattaagctaggggtacaaatgtcttttctccttaagtgctgggtgcacctaacggcactcttgatggtggtgctttgagcccaacgtgaagattcactttgggaagcccaaattacaagtacaacttttgacattttatttataatttttgttctacttttaggctgaattntctgatgacttnttattttctcttagccttactaaatgcttcctagaagtgctccaaatcatttagtggctagtgggaataaattttcatgtttattggcatcntcctaggtagtgggcatgcaaatatgaatgcatgttagtgggaattta

SEQ ID NO: 245024 - DNA, 252 bp, Glycine max
ttgtgacaaaccagtggtttttgtggctaggttggatggtgaagttaatgtgtgggattcataatcatgaattggccaagtcattaattggacatccatacgctggacgattgactaaagctgaaaagacacttattgctgatatgaccaagtcaatggtgaaaccaataaacatcctgctaactttgaaagaccacaatgtcagtagatgtaaaaccatcaaacaaatatacaatgcaagaagtgcatacc

SEQ ID NO: 245025 - DNA, 427 bp, Glycine max
agctttcatctagccaagatcatacaaaagtgttacaacaaaacctaacggtgtctaatgatatgggccatcaaatctatcatgtgttgacagtagttgattagcccgtgaatttcctcgggggctgtacacacttcagcgatggcctttactttggctaatagtcgcgggaggtcttgacttccatttaaggtcaaggcgaacctatccattcacatagccgcttcttgatgcaatgcatcaatcaccctccctcttgcttccttctacgcgcacgcttgtgcgaagtcctccactaacttttgttcatgggtcaacgactgggttaactcttccttgtattgccctatgatagctagcatgctatgcttcgtggcttccaagtgttgggccaaactccttttggatctagagcaagcagctaact

SEQ ID NO: 245026 - DNA, 249 bp, Glycine max
ttttgaaaacaatctttgctactggttatcgattaccagagagtaaaaactctttggtaaaaggttttgagaaaaattcatgtgctactcaatgttttgaaaaacttttcagtacttatcttgatttagtcttttcttgattcttgaatcttgttcttgattattcttgattcttgattcttgaaaacttgaaacttgaaacttcttttgaatctttctcttgattcttgaattgttcttgactcaatc

SEQ ID NO: 245027 - DNA, 398 bp, Glycine max
  unsure (1)..(398): unsure at all n locations
gccggtctttaccaattncgggctgatacacatacctcaacataactcgggccaccatcaaggaggcactatatagacgcggttgcaccggaggagcatccacataagcattgttcacaatttcaagctcttgaaaagatgtttccaatgactcttccacagcttccatatatggtgtagaggatggacaactcattaatatatcttctttccttgatactatatcttcaatttctggtgcaacattgacgggtgatcgacgccatacccgaatcaaataaacattaaaaatgtagtatttaggaagtgatcctaggtcgtctcccaacgagcaatggtcaaccaacgtccataatagatagccataaaatagtaacgaattgggggggtaattcttt

SEQ ID NO: 245028 - DNA, 129 bp, Glycine max
tgcttgtggagcttctatggaggctggatctttgagcttcaataagatccttcaatggtgattttccaccatgggagatttagtggaagaacaaggaaaaaaagggaaaagaaggccccttccattagg

SEQ ID NO: 245029 - DNA, 400 bp, Glycine max
agctggcatcatagactggttgaactcaatttcatacccttggcattaccagcataaatcatatcgtctacatagatgctaacaattaatatgttatctttcgtgcctgtttcgatgaacaaagtttgttcattcggacattattgaaatcctttcttcacaaaatgagactctatacggctgaaccaggctcttggtgctagtctaaggccatacaaaggtttatgcacctcgtaaactgtgtgctctatccctatattcacatatcccttgtgttgttcaatgtacactttctctctcaactctccatgagggaatgcatatttgacatctaactgaaatatgttccatcccttgcatgctgctagagccacaatcatacttaccgtatgcatgcatg

SEQ ID NO: 245030 - DNA, 201 bp, Glycine max
tattggaatggaagcaacttttttttgaagaagagctttgctgtagatctaagttatattacatgagagagacttacttaattctgtgcatgtaatttagggacatcctttttatcctacaagatatccaaatagtaatacaacaacaatagccttatccaattacgtgaagtctactatatggatcacatgattgggaac

SEQ ID NO: 245031 - DNA, 416 bp, Glycine max
  unsure (1)..(416): unsure at all n locations
taactgacgtgtggcatcgcagcacccggtaataggagactccgtttgttttcccngtcaagcggggcacaggctgggctgtgttttctgccaccctatatatatgcttgcttgcagagctcattgttcattatcgagatgcaatggcttccaatattacggctgcccgccttcttactgctatatcctatctgatggactttgccaccaggacctngcaaccgacttcgctgatcaagagccactccgcttttcttttcttttttagaatataccatctaggtcaggccggagagcttttatttagcttgagtaaactcttactccgtctggatcaacacgtgtcacaccatttctagattgtacatctgagctctggtaggcgtatggaatgcatatttctcaccatcggaaat

SEQ ID NO: 245032 - DNA, 277 bp, Glycine max
  unsure (1)..(277): unsure at all n locations
cgtgacactacacaatacaaaacccnnccccaacatgatgcatttgaaaatttttttttttcacaaaccaaacacgttggggtcttcaccttaccttctagtatcaatcaactggtttcaaagccaacatcccctttttgtgggaatagaatctttcaaaaaaggggaggcaatgatgatttgggccgacaaatggccatactttaaggttctgagcatgacatacggtcacgtaatttgcctcatgcgtatcatgttgggatggtcagagtgcaca

SEQ ID NO: 245033 - DNA, 244 bp, Glycine max
tgatgataagcaggtgcattgatttcatttcatggcatttttagtattcttcataatactttcatttgggtattttattaattttgtctaaaatggttgtttcatggtattagactgaaaacaagtgtgcttttgtgtatcgtcaaatgaatgagccccctggtgctcgtgcccgtgttggtcttactgggcttactatggctaaacacttccgtgatgctaaagggcaagatgtgcttctttt

SEQ ID NO: 245034 - DNA, 421 bp, Glycine max
  unsure (1)..(421): unsure at all n locations
agcttcattctacacatgaaaaagaggatgttatagnngcacaaaagagaaagcttcctaacaaatattttcatgcaggtggaccttcttctagtaattctgacttaccgcaacctcctatccgtcttccattcccacctagagcaattccaaacaaaaaaatagaagaagcagaaaaggagatcttggagattgtcgcaacctacccttcggcgggagggcgacgcgtgactcgcgggatgcgtgttccacgaaaggaatacgcgcggagtcgccaccaacatttatttgaggaaaacgtcggaaaaaccggaaaagacgcgatctacgaacttttaagtgaaaggttcgggagttgtatttacgcacggngaaggtattagcaccccacacgtccgtcacaagggacggcaacctttaa

SEQ ID NO: 245035 - DNA, 171 bp, Glycine max
tgttgaaattaccatgtttggattttttagacatacccattctgttttagggttttgtgatgatgtttgggatgtttgtatgctgaaattgcccatggaaaactgttagaaatgaaatgtagagttaacctaaggttggaaagtgagaatgtggtgttaccaccggaaaaa

SEQ ID NO: 245036 - DNA, 369 bp, Glycine max
ttggggctactgaatgcgctccggtactgacattgacagaacatctggcgactaaattgcgggcattatgaagccatctcctgactttaattcctggctgctaccggggtcgtgtctcctgctgctatacctctgccagattccattctacataacttcatgtgatagaaccctttcttaaaacattgtaggaaaaactgctctgagaagctgtggctaaggcaaacgcaccattctcatttctatccctgccatcattgatatgctctctatcaagagagctgactaatgcctaacttatcctctctgacggtcctggtatcggaacccacctacttgagatgagaagctacagctttgctgctctcc

SEQ ID NO: 245037 - DNA, 250 bp, Glycine max
ttccaagcccatccatcatcatctacgttttacttggaaaaaatgatttttaatttattggatgattaccatagtttgatgaacctccaagtagcaaccctccacctgaagctgcatagacatcatgagaacgatccaccattggagatgaagatgaaattccatttctaccaccatcacttccacttgtaacatttccaccaccaccaccactcaaatgtaattcagataaattagggtacccttcttt

SEQ ID NO: 245038 - DNA, 384 bp, Glycine max
  unsure (1)..(384): unsure at all n locations
ggaagaattagcaatcattgacagctcattaaagaaatcagaaatgtcgggcctggagtattgatggatattgttttggcaacataacttatgctaggaagaattgatggttaatcttaaaccactgcaaattctttttctgattgagtgttacaaatcaaatacttagaatatgagtaaagcttgaataccctttcaggaataaagataccaaatagatgggtgttaagtgggtaactgtgttagctgtgtgactggttagtcattattgtctctctttgggttcctaacattttattaattntgttnttggcaaaattctgtttccatagattcaaatgctatcttaagcttcatcgagccatgaaatactcttttggtgac

SEQ ID NO: 245039 - DNA, 203 bp, Glycine max
aaaattttttttttctgataaaataaaaaactcgtaaagacattatatgaaatacattcttttatagtaattcttatttgtcaatttgtttaatattaaaggggaattcaataaattaacttaagaatttgggacttctaatgaaaaaatactttgtagcttataactaacttaaacaattttggccaaaaaaaaacttttta

SEQ ID NO: 245040 - DNA, 305 bp, Glycine max
agtttaaacccgcctaggggagctacctgttttgttctggattgggccccgcccccttttgataactgcgatgtgggacttgatatgtgaatgagagatcccttttgtttctttaaacgcccctattctctgaaactggcctgacaaattctctcttgggtgtctcacactgctcttcccgttgatggcagaaatgatcacacgcgactctctctttatgtttcgaaatctatctggaccagtaattcgaaagccctgtgtagtattcgtctagtgactttcggaatggggattcccaacagtga

SEQ ID NO: 245041 - DNA, 127 bp, Glycine max
ggacacaacaaactcagcttggcagccaaaggcgcgaaatttctccaggaaccccccaactctgtaaaaagtgtcctccgactttcaaaaattattgaatcataatccctggactaactttaccctt

SEQ ID NO: 245042 - DNA, 436 bp, Glycine max
  unsure (1)..(436): unsure at all n locations
gttgaactgcacgcatgcgagcttatgatnnnggcagatgattgaaggtctatctttgcnganngcancacctgtttgagaagacaagtggtggacgggctctgcgaaagaggattcacggccaacctttgcatttcaaaatggagaacagctagtaaatttccaggaggtgcgatgcacacacatgtatattcaccaacatgcctaacattatataaatgcaccaaaaattaataatggtgttgtgaaacaaagcctagctaatctcataaattataaataactacgcagtcaccaatacattgaggtgattgctaacacatcaactatgaagaagactcattttctggtggaattggagatgagggagcaccttcatattgcaaaagcaactgaaaatgaccggacactaatgtcctgtctggccaaattttat

SEQ ID NO: 245043 - DNA, 157 bp, Glycine max
tgcttagccagagcgagggcatttttttttaggcggccaggccttctagcaggtgaagatgacccaactgtactagattttccagtaaccccatgagacctggtaatactaatgcccttattatcatttgtggtacaaatcgaagataccttgatag

SEQ ID NO: 245044 - DNA, 448 bp, Glycine max
  unsure (1)..(448): unsure at all n locations
gaccctaagcacctgagctgcagcttaagaatcagaggaagagggatcgagtttcattattcaagacncaagaaaaatcaagtttcaagaatcaatattcaagaacaatcaagatcaagattcaagactcaaaattcaagaatcaagataagtactaaaaaagcttttcaaaacattgagtagcacaagaatttttcacaaaatcttttaccaaagagttttactctctcgtaatcgattaccaaaaggtagtaatcgattatcagtagccaacattgttttcaaactgattaacaaagttgtaatcgattaccatgagcatgtaatcgattaccaatgttttaaaacattagatttcaaatttctagagtcacaactagtgataaaactttttcaaatcattttaaacttgtgtaatcgattacacaatacttgtaatcgattacta

SEQ ID NO: 245045 - DNA, 259 bp, Glycine max
ttggatgtagttctttttgtgtttagcgctttggacactatgtatttataaagcattggatgaagtccattttgtagcactttgaacataggttcattcaaaacaagtttttggtgtttgaggtaagaaagattatacctataatcatattggatgcatgttttgcttgcatgactcaatagctcattagtccatcaaattgtaatatctttgttattatgatctggctagggtgggagaccttggcatgtctcacaca

SEQ ID NO: 245046 - DNA, 384 bp, Glycine max
agcttcttactctaggctgatgatatttatttcgaggctactacatgcactcctctaatgacaatagcatcacttctggcactaaattgctgggagtttgaagccatcttctcaattaaatttctggcttcagcaggggtcatgtctccaaaggctccaccactggcagcatctattatacttatctccatgtgatagagccctttcttaaaatattggaggagaaactgctcagaaatctggtggcgagggcaaacgccacatagttacttaaatctctcccattattcatataagctctctccacagagttgactaatgcctgacatatcctttctgacggtcgtggtctcggaagccaggaaaaaattatctgaaactact

SEQ ID NO: 245047 - DNA, 248 bp, Glycine max
tcacattcaattcagctggtttctttactggtttacaacccatcattttaaatttcttcaggactttagagagatatttcctttgatgcatgaaaatgcctttctcgatgtaggcaaattcaatccccagaaaataggatagaatgcccagatcagtcatctcaaattcactcttcaatccttgcttgagtgattcaatagcagtcaaactactatcagtgatgagtaaatcatcaacatacaagtat

SEQ ID NO: 245048 - DNA, 425 bp, Glycine max
  unsure (1)..(425): unsure at all n locations
agctngcggactataccttcgaccttacactgccgtttttctgtctcggcccggatttaatgcgggttgcagcaccagctccgcttccttaaccgtactggagacggttgctgtggctttgtcctctatggttttctggagttttaacatgacttacgagatggaagccatttgatcttttaagaccgatagatcggccttcatgtgttcctgcacaccctcttcattatccatttttctggattgagtgttataggggtgccttggtgttttcttagttatgatgaaattcctaaagaaataaacaacggtgagtatgccaccaaaacatgagtatgcanatggatgatcggagcacttggatccaccccaanggttttagataacgtaatgagtccagaacttctcattttataaaagacaaa

SEQ ID NO: 245049 - DNA, 249 bp, Glycine max
tgtttcttgcaattccaagatactttttatcttcctaatagaaggcatgttccacttttgggttttcctatcttaggttggacccctgtgaaaaatggaatttgaaaagacgattaaatttaaggagatacctttgggataccacaagccaacattggttgggcccttaaggaacttaatgatccttttaacagctgtcaagtgagattcattaaaattagcctgataccttgcacaatggcaaacact

SEQ ID NO: 245050 - DNA, 423 bp, Glycine max
  unsure (1)..(423): unsure at all n locations
agcttggcttcaattattctgagttgcatatgctanggaaaaaggaagaggaaaaagaagaagatgatgattgtgatgagataagtgttcccaggccttacctttctgaagcatgggaggttcaggaatgtgataggagaaaaaaagagaaccctttggtgaattggaaaatgcctgctatcaacaatgaaactgacatgaaagaaagtctcagatggtgggctcacactgttgcttccactgtcagatgatgatgaacttcttcataatccaaaaattttcttctttntctttcgtttcatatatacattttccttgttcttttttcaatttttctatgtatgtattcccttttctaaaattttttctggaatctggcattccacaaaatttgttacatgtaattttagataaaaagagagg

SEQ ID NO: 245051 - DNA, 208 bp, Glycine max
tctacagtttttctctattctgttttttttggtgctgtcaaatgattggttgtaatccttttatgtagttatgtactatgcataatgccaaaggacaagtcatactattcagttttcaaaaggaataaccttaaacgtgcatcctatattgcattggggtggggtggttaagtaggaaagagaaacataataaatacaaaaatatgat

SEQ ID NO: 245052 - DNA, 419 bp, Glycine max
agcttgtgcgaatctttgccttttgttcgagtgatttccatgggtaaaatacaattcattagtcaaggcatggttgtttggttttgtctttatcgggtacccgaattgtcgtcgagcgaggagtgggttgtagctaattccgccacgcatacccaaaagaggtacgttgggatattcaccacagctcacaataatctcttcaacatcactagctgcttggtaccaaacaatgtcagatgggtcaagagtcatgattcggcgaggccaggaaagcttgtcatcattggtcttgaaggcacgggattgaggtaagtggaaggtaaaccactgatagagtaaaggtgcacaacaagaaatggttccccggccagcctgtgtacggtcgtggatagaatggtaggtatcggcgagtagagtgg

SEQ ID NO: 245053 - DNA, 211 bp, Glycine max
tctcaatactgtgtgcaaaaacgtatcatggtttggatatggccttggataataagctcataagtctgtctagtgctgctttggaaaaaggtcttccagtatacattgaaactccaatatataatgtaaaccgtgctgtgggaactatgcttaaccatgaggtgactaaactgtaccacctagctggtcttccaaatgaccccatccatat

SEQ ID NO: 245054 - DNA, 422 bp, Glycine max
  unsure (1)..(422): unsure at all n locations
agcttatatgcaatgtggtaccatgtcagtgaaaaaccaccctgnggcacttaggagtatataacaagacacaccacacaatgagtatgtcatgtcactctcactaagtaaaatcatagggagaccagttagggtcacactgttttgcgagaatgctccaaccaagtaagatcaacacaggcttaaaggaacacgcaaatcgggtgacccccaagacctactctgcgaagagtccgtcagggcttctccctcccgattcaggtccaacccctgaaataatattttgcatgcagacactgctcatgaattatacaatacccacgacctcacactcgtgtcttaaacacanttaacacaattgaactacaatttaacactggttcctaaataggaaacctacactctctgtttaacactacgca

SEQ ID NO: 245055 - DNA, 252 bp, Glycine max
tgtaaaaaatgaattccaatcggttcaacctcaagatgttttaaaacttaatgaggagattgatactttaagtcttaatgtcattttcggtccattatattttgtagttgtttctctttggaacatttaagttttaaaagtttcattatgggtctttatgttttttgcaatgtatcatttcagttcatgtgtataataatgggagatagacgatcaatgactgtggcaatgctctcggattgggctgctttc

SEQ ID NO: 245056 - DNA, 442 bp, Glycine max
  unsure (1)..(442): unsure at all n locations
gatccttgagtcacctgcggctgcagctgaacctgggcatacggaggatcttgaagcttcaagaaaaccttgaanaagatggtaattagctttttccttcacattcagcaaattcagcatttaaatgtgatatttaatgttatgcttttttatgccatgataattggcggaatgaatattatttatttgtcaaggtttcatgatatcgaatattgatacctaaaaagggtaatatttcaagttgtgtgattagtgttattttgagatgaaacaccaactatatgtaatcttatctttgcattatcaagttggtattaaaaatttgtaatctattcgttggatatgatagtagtagggactcataaggatttacttagtaagaggcttaacctaaagtaagattgtgtttttctgagacaaaactgcagagatcatctgtttt

SEQ ID NO: 245057 - DNA, 232 bp, Glycine max
tctacatctatgcaaattttacttttccacctcacttggtaaacattttttctatctatcgtctcatgctttgttttatagttagattaatggcgttttaatgactgttaacaaccttctttctgcatttctatgtcattttaagtatttaaactgtttttaagctttgcaattgtggagcaaagattaatgaccattggtaaggatttaaacccgcttattcttttatttt

SEQ ID NO: 245058 - DNA, 419 bp, Glycine max
  unsure (1)..(419): unsure at all n locations
agcttcataatggtaagaggctnttttaactgatgctggttcatcttcatcatagtcctcgatcttcctccaatgaccccaccaatccatcccctctaatatatcaaatgaagaaggataaccaaatgatccgtacttaaagtttatggaagaagtcaatgagctagccccatatcacggccttcaaactctccttttctactcatgatttgatcattgctatcatcaaacattgctaccccactcatacttcaatcagaaatcccccttattcctaaacacccttttggctaaaatttatttcgttaattaattcaattacggtaacaaaagtatttgtggtagtataaccataactaccaccatcataactttttgtagacatcccttttttatcatgactaanaaaaattctggtg

SEQ ID NO: 245059 - DNA, 210 bp, Glycine max
tcccattggccacacaagtcacttttttctcatgcaggcacaatgcaattttctcagtttcaatacttagaggatgttctatacatacctagcttttagttcaatttgatctctatatctaaacttctttcttcaatgccttgcaagctaattttcatgaatgaataaaggtttatctaagatatgccgaaccttaagaggattggtatt

SEQ ID NO: 245060 - DNA, 424 bp, Glycine max
  unsure (1)..(424): unsure at all n locations
agcttggtttcaaaactgaatttggagactattccacacctcttgccttacaaacttcaatgacttagtgaagatggtgagatgaccttgaacaagtaagttgaagtggggttttccattgggaaatatgaagatgatgctttgtgtgatgtggtgcctatggagacttgccacaatcttcttggtaggccttggcaatttgaaaaaatggccaaccacgacggatactccaacaagttctcttttacacaaagagtgcaagtttactcttgcacatttatctccaagggaggtatgtgaggatcaagataagttgagggagaaaatagagcaagagagaaaagaattgaaagggagagaaaatgagagtgaaaataaaaaggaaagaaaaagtggaaaagagaaagacnaagagaggacaaca

SEQ ID NO: 245061 - DNA, 246 bp, Glycine max
tgaagacaagactatacgaggtatctttcttgggtatagcaatatctctaagggctatcgtgtctacaacttgcaaactaagaaactcgtcatcagtcgagatgttgaagttgatgaatatgcttcttagaattgggatgaagaaaagtggagaagaacgttcttatacccactcaactacctcaagaagaagctgaggaagaagacccaggtgaaccaccttcacctccaccacaacaacaagat

SEQ ID NO: 245062 - DNA, 420 bp, Glycine max
agcttctagggagggaagagcgggtgttatttgtagcaccaacgaccacgagatgtgctcttgcttgctctatcaaacagctcagggaattcccgatggaaccttattcttgatcttattgcacatgctgaccctctaactgaacggggataggcgcggactagagtctatccaaaaaaagagaaaaccgattaaatgctaaatctatacttgtacttgcatctgaaaggtccgaattttgaaaatctcctcttgggtcgggtatgtgcgacgctattacttctataattggaggtacacaagatccgtgatctgaacgctccatgtaatataaattgcaccatattggatttgagcaaaacacagaattaagcgtcatggattgatctagcgagatatagatcattaagagaagaaaag

SEQ ID NO: 245063 - DNA, 267 bp, Glycine max
  unsure (1)..(267): unsure at all n locations
gtgacagaatctaatactcaagctttcantttggtaggggcgcatgctttgttttgattctagtactaggtacttttatttcggttgatgttatatttagtagcatttgcgaaataagaaaaagtggtatacataagtaatttgtggaaagttatggttaacattccttctatgcattacactttctttagaaatatctcttagggatctgtgagaatagcaatcacatgaagtggagtgtgactgcagtgccacaaaaatagtgat

SEQ ID NO: 245064 - DNA, 427 bp, Glycine max
  unsure (1)..(427): unsure at all n locations
agctntgcggatnnggtcttcgccgggaaaatgatctaatcgggtctgaaatgaggcaaatttaatcatcctacttggaggaatgagaaaattggggcaaatgaagagggtgagagtgaaggggaaacccatgttgcgactgccgtttctatacagccaagtttcccaccaacccaataatgtcattactcagccaataacaacccttctccttacccaccacccaattatccacaaaggtcatccctaaatcaaccacaaaacccaccttccacacaaccgatgctaaacaccacctttagcacgaaccaaaacaccaaccaaggaaggaattttgcagcaaaaagcctgtagaattcaccccaattctggtgtcctatgctaacttgcttgatactgcaatggtagccataacctctgctgggtt

SEQ ID NO: 245065 - DNA, 217 bp, Glycine max
tgtgtaacacttgttgtaactttgttgaatgagagtcttgtgagacacaactcaaagttcaacttccctccctttttcttccttcaatttcgtgctcccccctctctctttctctccctctttattttcctccattgaagcatcctctccaagcttcttatcccaggctcatcttggtggtgaagctcctttttccatggcttattccctagtggat

SEQ ID NO: 245066 - DNA, 423 bp, Glycine max
agcttaaaccttgaatcttgattcttgaaatcaaatttcctcttgaacattgttgcaacctgcccttttgcgggcgagcgaggcgaggctcacgggtgtgtcttccaaaagaggaaaatgcacggattcgccaccaacgtttatttatggaaaacgtcggaaaaaccgaaggaaaccggtcatgaagaatattttagattcgggagttgtatttacgtttgaggaaggtattagcacctctcacgtttgtcccaaaggacaatagccttaaattagaattgtgtgaaattgcgtatctaaatttttatttcttttttatttttgaggtcgacaaaagcggggctcttgctcttacgtaccctccatcaaagaggaaatcagacctacgtagttctttctaaaggggcaaatcaagcgattctt

SEQ ID NO: 245067 - DNA, 222 bp, Glycine max
tatgctgcaaatatttacaatagacctcctcaacctcagcaacaaaatcaaccacagcagaacaattatgacctttccagcaacagatacaaccctggatggaggaatcatcctaacctcagatggtccagccctcagcaacaacaacatcagcctggtccttccttccaaaatgctgctggcccaagcagaccatacattcctccaccaatccaacaacat

SEQ ID NO: 245068 - DNA, 412 bp, Glycine max
  unsure (1)..(412): unsure at all n locations
agctgnttggagtanaaacatgggaccaactcattctatttcaaaaaggaagtcatatctagtcaaggtctgagagaccatacaagtttcctaacgatttctaattatgtgggccattaagtctatcatatgctgacaatagccgagaagcccatgaatctcttcgggggtggagtaggtgtctgccatcgccttggccttggctaataagcggggaagttcttgactcccgttcaaggtaagagcaaaccggtccatccacatggctgcctcttggtgtaaagagtcgatcacccttcctctagcctctntttccgcgtacactttaacatactcgtccgcgattctatgctcgtgggccatggctagacccaactcttttaggtacttagcgatgatagctagcatgttg

SEQ ID NO: 245069 - DNA, 257 bp, Glycine max
ttgagggtgcgcagcccaccatcttttcatagtagagtaccgataatgtgtctaccatcacgattatcgtctccctttccattattgggggtgctacttgagttgccaagtctctccatctttgggcgtattcttcgaaagattcgtgcccccctttttgcacactttttgtagttgcatcctatccggagccatatcagaattgtactgacactgcctaatgaaggcaaccattaagtccttccaagaatggactc

SEQ ID NO: 245070 - DNA, 426 bp, Glycine max
  unsure (1)..(426): unsure at all n locations
cgacattaactgagcgcgcgacgcagcnccgaagggagaaggtttaatttgnngaactaacgaccaagaagtgtgagcatacgtggatgtggaaagagctcatgtatgtacggatggaagtttatataagattttcttgcacatgctggctgaattaatgaagtggaatttacaggtactagacgctgcacttggcttgggacatgtatttggctgctttcttttttattattattgaaactgaacactctgtataaaaataagatcttaatgggttggcgatgtacaaagctatccaatttagaaatggaggaaaactagctcaatcatatgagtgctccttgctttaaaaattgaaccataattgatttgatctaaacactgaattaatgggtcatggattgacctagcgagtatatgtatcaa

SEQ ID NO: 245071 - DNA, 243 bp, Glycine max
tgcgactcttgacaatgtctttttttttagtcactcaaaaagttgggacttttgaaaaaatcttcacaaaaaagctcacttgaagaattatgacttttggaaatgtatttttcgaaatcactcgctgataatcgattaccattaaggggtaatcaactaccattaaggctttatcgattacacataaacagatgtgactcttcattcttgaattccgactatgactacgtttaaaagctctgg

SEQ ID NO: 245072 - DNA, 418 bp, Glycine max
  unsure (1)..(418): unsure at all n locations
agcttcaagggagcttacaccgtgttttatttatatcatctncatctaggggatgttcttttgcttcctctatctttttgttcggtgaattctctttaattccttgttcttcatcttattctccatgcatatcctccattttcttggggtttggcgctgtttagagtatactcaaaaaaaaaataaaccgattaaatcttagatctatacttgctcttgcatttctatggttcaaattttgtagatctactcttgaatcatgtttttgtgttgattttagttctatcatttttcattcataatattcttgtgctgaaccttagatctaaattttcttccaaaatattgattagaaaaaaaacacaaatctaagcgtaaatcacttaatccatgttgtcttagagtcatgttcagtcat

SEQ ID NO: 245073 - DNA, 240 bp, Glycine max
tctagccaaatggacttaccttgttttaattcctttgatagcccttttgagccttgtttccctttccttgttttgaagctcactacaagccttaagtgaaaaaccatgatatcaccatatccttaaggaattttggagctttggaattgttttgggaataagtgtggggggtttttgtttcattggataacatgttttgttggctatgtttcatgatgtattttggtccatacttgatgt

SEQ ID NO: 245074 - DNA, 382 bp, Glycine max
  unsure (1)..(382): unsure at all n locations
ctgagctggcactctaccggaagagtgagacgggattttattttcncngaacaccgagcacctgcccttcgcgggcgagcgggcgacgctccggctgcccttacataatatgaatatgcgggtttctccacctacgtgattcaccgagacgccggataaccgtatgaaccttattgaagaatatgcagacttatagttgatttacgatcgaagaggtatatcacctattccataggccaaggacctagcctgttggataattgtgtgacttcgcgaatgcaaaatgattttcataattttgaggcgaatagcggtctcttgtctcaccaccttataaagagaaatatacctactgtgcttctagcggctcacggcttttttt

SEQ ID NO: 245075 - DNA, 218 bp, Glycine max
gcggggggaggtgcccttcttttttttatacacagacacatacacattatcacacatagataaaagaaccctctcagaaaaagacccaaatctggttggccgaaacaaggctctacttccccgaagaaaacagtgacccgtaggcaaaggcagggggcgaccaccagcgaccagggaccacgaagaacgacggcgagagaatgggccgcatggagaaa

SEQ ID NO: 245076 - DNA, 415 bp, Glycine max
agcttccttcaccccaaaactgccccctcactcaaaaatacgctgcacctataggatttgctacttttttttgcccttaaaccaccattgtccatgtttttggttccatttggtactcctactcactctaacaagtaagtacctcatgctttggctctctagctttccattggtgtattttgatgattcatttgcccatttatgctaaaaaccgtgagttggaaggttgtgggcaatggccttaggcctaagttgtattctaaaaagtttgggcatgccgcattgcccccattcccttgctattcatgcctaaacaggcgcccaccaagtgctcgtttaaatgtctgaatggcatttgcacatgattgtgtgaggaataacctatggaacaatttggtatgcgaatgttttccat

SEQ ID NO: 245077 - DNA, 195 bp, Glycine max
  unsure (1)..(195): unsure at all n locations
tctcaaggaggtgagcttanttattataggggtgtgtgtanctaagctctagcttctcaaggaagttttctcaaagaagcttctcaaggaaggtttctcaagaaagcttctcaaggaagctacctagtctataaatagaaccatgtgtaacacttgttgtaactttgatgaatgaaagtcttgtgatacatactt

SEQ ID NO: 245078 - DNA, 216 bp, Glycine max
ctgggaaccactcacccttcacagcaaaatttctcattttctgccttccataatggaacctgcgcttgaatcaaatctcgcgagaagcactcatttaaaatttccctctaaccttaataacacatcttgaagatgaggctccctctacccctgtgaatcgccaagatacaaatcaaacaaaaagtttttcccaaagttaaacccggcatccctcca

SEQ ID NO: 245079 - DNA, 383 bp, Glycine max
gagatactctaaggcgtgctggctggccgccgacctcgaagaggcgagatcggttgtctttttaagaagcaacgggcttatgtaggaaactacaggatggctcttgtgggccagcgagagagatgctcccacatttttgagagatacacgaacactgctgtttgtgtagaatgatttttacaaactgtgagtgaagctctcgaaaaaagagcgatacttgctgtctttccgtattgacacggaaccttgaggacaacataataaagcattctcttacttacggaatgatacgggagcttaattatgtgctacgcagcttcaataagagattcgggatgctaagggaacttacagaacgagactctctacctcgttttgtaatc

SEQ ID NO: 245080 - DNA, 241 bp, Glycine max
tctcaaagaagcttctcatggatgtttgtcaaggaagattcccaaggaagcttttcaaggaagtttcttaaggaagctacctaggctataaatagaagtatgtgtaacacttgttgtaactttgatgaattagagtcttgtgagacacaactcaaagtttaacttctctcccccttttcctccttcaatttcgtgctcctcccctctctctctttctctctctctttcttttcctccattg

SEQ ID NO: 245081 - DNA, 418 bp, Glycine max
agcttgcctcagagaggtccaggaaggacatggcggccgaaggaactagttccgccccggagtacgacagtcaccgctttaggagcgttgtacaccagcagcgcttcgaagccatcaagggatggtcgtttctccgggagcgacgcgtccagctcagggacgacgagtatactgattttcaggaggaaatagggcgccggcggtgggcaccactggttactcctatggccaagtttgatccagaaatagtctttgaattttatgccaatgcttggccaacagaggagggtgtgcgtgacatgagatcctgggttaggggtcagtggatcccgttcgatgccgacgctatcagccagctcctgggatatccgatggtattggaagagggtcaggaatgcgagtatggccagaggaggaa

SEQ ID NO: 245082 - DNA, 216 bp, Glycine max
  unsure (1)..(216): unsure at all n locations
tgactttggtttanacattattgtttcatgattngggacttgtaggatttgatttgggcaagattggatgagaggaaaggtgattttcgaaatctgcacttatgcagaattttgctgtcaaaataggtgcagcagaattttggctttgtgcagaaaaatgcttgtgtgtggtgggctgtggaaagagtactacagaatgagttctggacgtttaca

SEQ ID NO: 245083 - DNA, 397 bp, Glycine max
agcttgccacccagctcgacgaggcgagcatggttgtttttacagaacaacagccttctggaggaatcttctggagggcccaagtgggcctggttgctatttgcacccacatttttactatgtacacccccctgccttttttggtgaatctttttttagtaaagctaaggaaacttacgaatttcagaacgatacttgttttctttccgcaatgatacggaaccttgtggattacataatcatgctctttttgacttacagaatgttacggaacctcactaattgtgcaacgatgcttccatatgatttccggagtgacacggaaccttacggattgtgcatcaatatttacttttgtattccggcgcattccggaatttcacaaattgactaatga

SEQ ID NO: 245084 - DNA, 201 bp, Glycine max
tgtaggattatggggtacccatcacatgttgtactaggtggcggtcgggcgatggtccacacaagtttttcacattcaccaaacgcgcctaaacccaccatcccctggtggccaacctcctatggacctaacgacctccaacgaagccaaaatcctggtttttttaacaaccgggtcccaataattcttccaaagcttccc

SEQ ID NO: 245085 - DNA, 338 bp, Glycine max
aatctttaatggagagggttaccactactggaaaacccgaatgcaaatttgtattgaggcgatacatctaaatatatgggaatccatagaaatagggccttatatacgccccacaggacaaagagtttcaatagaaggtagttcatcaagtgaaaccctgaccatagaaaaacctaaagatatatggtctgaagaggatagaaaacgaattcaaatcaacttaaaagccataaacataataacatctgccctgagaatggatgaatatttatggtttcaattgaagaacgctacgaaatgggtacactcttcgataacacatgactgactacagatgt

SEQ ID NO: 245086 - DNA, 238 bp, Glycine max
tcttgacggcctatctgccaactgttttgcgagctgtcccacttggacctccagattctttatggcagactctgtgctcttttggttagacatagaaacctgcataaattgagctagagtctcttccagcttcatggttcgatcatagagactagacccttgtggttgcagccttatggatgatccctggtctctattgaattgattcccaggatggttcctccattgtccctgttgt

SEQ ID NO: 245087 - DNA, 404 bp, Glycine max
  unsure (1)..(404): unsure at all n locations
agcttganangaggaagagaggaagggcgatactttctgcttncacncgacgaccacagagtggtacctgtagatatgtcgcgggggtcatgagaccttggggacgtcaggtggggtgctattgcccaaaaccaagcttgaccaatcccgacccaacccgggcatagtcagtcaatgagaacctgtgatgtacctaagcaggcgagcttctggcacccaacagataaaaggaacaaagaccacaaagcaaggaggcttgtatggtggctggccacctgtgaaacttgattgatatatgcgatatggcctctggtaatcgattaccacgggtgggtaatcgattacaatgcttaatatgatgacaggagactaatatggtctctggtaatcgattaccacggggt

SEQ ID NO: 245088 - DNA, 214 bp, Glycine max
tgaatgcaaactggatgcgttggtttttttttgtaacccagctggcccttgaatcacaaatatgtacctggcccaaaggtttgtgggttgtgctcctctgctgacccccatacagacctttgcccttccatgcagcaacctggagcaattgagcagcctgaaacttatgccgcaaatatttaccaatagacctccttaaccttagcagcaaaat

SEQ ID NO: 245089 - DNA, 415 bp, Glycine max
  unsure (1)..(415): unsure at all n locations
agctgaattgggagagacatgtgagattttgttttgaacgacatatcactctctatccaaaacagggatgcaatgtaacaaatggcaatcttaattgaatgtattaaacaagaaaatcatattttagagagtgatgagcaaattagagtatatacaaacaacagcgagctttcttgtaattaatagtagtagaggatgaatggaataagtagttatacagacctgaacctgagtttgaagacctttaatgtgttgaacggccaaatcgagcatgtctgcatagcttgtttgctacaatagaactaaacacaagaacatgagtgagagagtgagagagagagagacatactaaggagggagaaatagaaaaaccttatccatattgngtacaaggtcctgtaatttcttgagcttg

SEQ ID NO: 245090 - DNA, 231 bp, Glycine max
  unsure (1)..(231): unsure at all n locations
tgggtacataaatgacatgctntcttatttttctattaatgttgaacagcaaagcttattgtgtaaatattggtaaaggcagaaaccggcaagtagaagcgaaggaaacgtctaaagtaattgaatcatgagagaaggggtgcantcacactgacacaccaaactacaaatccctcctttgagacgcggtactcccaaacaccgtttttgtgaatgagttcaaagcaaaca

SEQ ID NO: 245091 - DNA, 211 bp, Glycine max
  unsure (1)..(211): unsure at all n locations
ngagctgaggtgtgtggtcgagatttttattttaatcattgngccgaacgccaggtagatcactcctgcagagtcaatcgccatagttattctaggaggcctatcacccgtgcgaaaggcccaggactcggggtgggatgaagccgtctataagggggttacctgatggtgttccgcaatgtttctgagggggaagagggcccaatgaacc

SEQ ID NO: 245092 - DNA, 113 bp, Glycine max
gctactccttcaatccaaataccttatgcttctaactgccgttctaaagactagattatttttcagtaacacatcaatatttaaccattctatacttgctgaaagataaacca

SEQ ID NO: 245093 - DNA, 238 bp, Glycine max
tgtgcattcaataccttgatttttttttcccatatgttcttaaaactggactgattcatttgcttccaaagtttcatggccttgcaggtgaagacccgcacaaacatttgaaagaatttcacattgtctgctccaccatgaaagccccagatgtccaagaggatcacatatttctgaaggcttttcctcattcattaaagggagtggcaaaggactggctgtattaccttgctccaag

SEQ ID NO: 245094 - DNA, 426 bp, Glycine max
  unsure (1)..(426): unsure at all n locations
agcttctagccaaatggacttaccttgaattatttcctttgatagcccttttgagccttgtttccctttccttgttttgaagctcactacaagccttaagtgaaaaaccatgatattaccatatccttaaggaattttggagctttggaattgttttgggaataagtgtgggtggggggtttttgtttcattggacaacttgttttgttggctatgcttcatgatgtattttgggccatacttgatgtacattgtatattggttaaatgttggacatgctgaatgaaatgttgtttctcanaggctaaaaaaaaaaaaaaaaaaaaattcggaaaaaaattcggaaaaaaaaaaagcaataaagttgagtgaataagatcttaaatggcacaagaatgatgaaactcttggttctactcttcatgt

SEQ ID NO: 245095 - DNA, 236 bp, Glycine max
tcatgatgaatcaagattgattcaattaagttttgatgatgacaaaggtgatgacaaaaaactcaaagatcaacaacaattcatgataacaaagatgatgatctcaagaatcaaagaatgagttcaagattcaattaagaacacttcaaggttcaagaggaaatttgatttcaagaatcaagaatcaagtttcaagattcaagcttccaagaattaagatcaagattcattcaaga

SEQ ID NO: 245096 - DNA, 421 bp, Glycine max
  unsure (1)..(421): unsure at all n locations
agctntacagcatatttgtagtaatgttcctttttccnagaannaaaataacttaatgccattaacctatggaattaaaaaaaaacttaatggctgagtgtaactgaaattgtggcaacaaaaagtcatccccaacagccaacaagtcagccaccatttggtctcccataaggctgatgcctaagttgccaattgggtccttattacaacttgaactaaacctaactaaagcccttttagttgattaacccccaaaacatatttttggtcagccaactttacaaggattgggccattatttaaacaaactaaacactctaaaattgaaacaaagtggtgtcatttactcctcctccatttgggccatgatacaactcacaaccttggacttttctccttgaaacttgggcttgtattcaaa

SEQ ID NO: 245097 - DNA, 199 bp, Glycine max
tgagatgaggaagtgttgattggtttaacttcctgcttttattgttgaccacagagtggtacctggagatatgtcccgggggtcaagaaaccttggggacgtcaagtggggtgctattgcccaaaacccaacttgaccaatcccgacccaacccgggctttgtcgggcaatgagaacctgtgatgtacctaaacaggcg

SEQ ID NO: 245098 - DNA, 437 bp, Glycine max
  unsure (1)..(437): unsure at all n locations
gatccttaagtcaccgcggctgcaagctatctgctaccccattaacatacgattatgagagnaagctgcagctctcaattcctatgcattaataacgctgaatgtgatgaatcttaattattttgatcgaaatgtaaataaatatatttaagtaatatatttaaaatatttatttaattttttatatttgagattctttctttcaaaaaatatttttttaggatctttcaaagtcttacaaagaataaaaaaaaattataatttaaaaaacgttgattctcataaaaagacaccgtcttattgttgtaaacttaccatgatgaaagatgtgactttcttactaaagtaccaaatatgttatcctattagcatgttgtatcaaaaaagaaggtgcatttaatacaaacattaaatattccaaaggtcttaaagatatt

SEQ ID NO: 245099 - DNA, 225 bp, Glycine max
ttaaatactaggaaaaataatattataatataaatatatatatatatatatatattaagattataaccttcaaaaaatataaaataaaataaaacacttataatactaataaaatgtaaaaaaaagtaatagggaattaagactataatcttaagaaaaatatattaaaatttattacaataataatttagtaataggctaaaatctaaaaaattataataaaaa

SEQ ID NO: 245100 - DNA, 424 bp, Glycine max
agctttgattaaacccatctaatatacctatttaaactaatgacacaaaacaaagcccaaactcccagcccaattatttaagtgcagagattctgacttctaagccaaatttgaaactcaaaatggaagaaatggcccaagcttatttgtgacaaaattgaatatactcttcttagctttccagggactactcacacgctccatttggagttatgtagagtcctataggtcctgcacaattatcaattaagctcaatcattttcctaagaccaaaactaagataaagtgagaaaatgaggatcatcgacatgtcaatccgcctcataagaatagaaaaatactaaactacatgagcttaatcagctattggaggaagatgcagaggaaatggtaaaaggtagctggaataattttggtgaggtt

SEQ ID NO: 245101 - DNA, 255 bp, Glycine max
  unsure (1)..(255): unsure at all n locations
tctagtatttataacctttatctttctgtgtgngggctcacaacgagtagatttctttacttgttcttcatctgaatgcacatcctttcttcatgcaaagagtccactctggttggctttcatgttgagcacttcaatagaaaatcacttctcatttgtcaaagcaagtttacacaacaaaatgcttcttttgatgaagctcggtacttttagatcttgaacttcatttattcttcataggatttcaacaaatcc

SEQ ID NO: 245102 - DNA, 319 bp, Glycine max
atatctcacattccagatgttatatttgaaatctcaacgcgcaaaatgcggaaatctatcctacgaacctccaaaaatttttttaagatgatccaacggctaacgaatccaggacagtgattttaccaaaataggtttgagaagcttccttgaaaggcttttttgagaatcttccttgagaggcttctttgagaagcttccttgagaaacttctttgagaagctagagttcacctactcatacccctctaataattaaggtcacctccttgagatgctatcttgaccttaaacatggctgaaataacacaatcaataaa

SEQ ID NO: 245103 - DNA, 232 bp, Glycine max
ttacaaacgaataacacttggacttttacagacttaccagctaataagaaagctattgggtgtcgttgggtttataagattaagtatcatgctgatggctccgttgaacgatataaggctcgacttgaatccaaggggtgtactcaaagggaaggattggatttccttgatactttttctccagttgcgaagctcacaacagtcggattattgttagcattggctgctattc

SEQ ID NO: 245104 - DNA, 415 bp, Glycine max
  unsure (1)..(415): unsure at all n locations
agcttctcccncaattttctataaattgggggagaagtgaagtagaaaagggttcagccccttaggcacttctctctctctcgaaatagctgaggaaaattagttccgtgaagaaaatccaagccgaggcgcttccgtaacgtttccgtgagtaattacgcgaagattctcgaccgttcttcaagattcatcgttcgttcttcgttttctttagtcttcaacgggtaagtacctcaaaccaagcttttcaattcattctatgtacctgtggtggtccacattttgtttcatgtatttttattcttgttttcatttactttttatacccccttttgacatgcttaagccatttatttaagtcatttctcgcttaatctaaaaataaaataaatttccaccgatcgtttgaattgta

SEQ ID NO: 245105 - DNA, 223 bp, Glycine max
tgaaggaaaattagtaatttatgtttgtaaagttagaaattaagttgggataattaaggttgattaatggtgatctagatttcacagaattagaaaaaagggcaattaagtcataagagtttaaggtggaaggtcttttcataaatgactatataactagtttaaaaatatattttagtttaactagtttgtgactaattaaagtgtttaattatatgatgta

SEQ ID NO: 245106 - DNA, 233 bp, Glycine max
tcaacattcaatttcgtgcgtctttatattttacgggactcaatcagacatccgagtaaaaagttatggtcgtttgtattggctcagagcttcaactttcaatttcaagcgtctcgatatgttacgggactcaatcagacatccgagtaaaaagttatggccgtttgaattggctgagagcttcaactttcaatttcaagcgtctcgatatgttacgggactcaatcagacat

SEQ ID NO: 245107 - DNA, 231 bp, Glycine max
tgaagaggatgctttaatggaggtattattattgagagaaggggggagcacaaaattgaaggaataaaagagggaaagaagtggaactttgaagtgtatctcataagactttcattcatcaaagttacaacaagtgttacacatgcttctatttatagactaggtagcttccttgagaagctttcttaaaaaaacttccttgagaagctttcttaagaaaacttccttgag

SEQ ID NO: 245108 - DNA, 425 bp, Glycine max
  unsure (1)..(425): unsure at all n locations
gagctcccgcagacaaggccgaggtaggcgtattctttgcaagcaagcangcgaagacggaggcttcgtcaacatgccttccaaagcttacgtgctgacactgaggctgccaatcaccgcctatgattgtgagcttgtatggatcacaatgtgtcctaagtcaacttagcaaggcatcattgaccttggtgaactatatctacgtcggtaggaaaaacattgagttataatacaggatggccggagactaccattttcaaaacaatggcccattgcttggagatactctattcttaaagaacaccatgcatagctgtacatgcaaacataattgagcctttttattagcctaagagcctaactaagctaaacactttgtctaattcacacacctaacataatttacgatacgcgctaaactagct

SEQ ID NO: 245109 - DNA, 167 bp, Glycine max
  unsure (1)..(167): unsure at all n locations
tttcaattcactatatgcacccgttttggtttacataatgnctcatgtatttggattctcgtatgcatttacttggtataccccattttgacgtgcttaagccattgatttaattcatttttagcctaaactaaaaaataaataaatttacaccgatcgtttgaatt

SEQ ID NO: 245110 - DNA, 426 bp, Glycine max
  unsure (1)..(426): unsure at all n locations
agctngtataattccacaatttatggttaatgttgtctctagaacatttccattggatttaatgatgaaatctgtgcatttccaggagaaaaagacgctatgttttgaattgcaaaatgtagcagtggggctaagctcaacagttgggctaagcgcatatccaccactaagtgcagcttcagcgcgcttagcgcaaaggagaatctggcagagcatcagcatctaagtcgtgcactaagtgcgagatcaatgcgctaagcgtagcaggtgccttcagctaggctaagctcgagactggtgctaagcccaatttcacttactcgcgctaagcgcgagggtggcactaagcccagcgtcacgattttagagcgcatttaaagcctgtgcagaattatggtataactttctacagatcttacacacctt

SEQ ID NO: 245111 - DNA, 237 bp, Glycine max
tctcccctaattttctataaatagggggagaagtgaagtggaaaagggttcagccccttaggcacttctctctctttcgaatttgcttagaaaaattgtttccgtgaagaagatccaagccgaggcgcttccgtaacgtttccgtgagtgatttcccgaaagttttcgaccgttcttcggtgttcttcattccgtctacatcgttcttcagtcctcaacgggtaagtacctcaaacc

SEQ ID NO: 245112 - DNA, 414 bp, Glycine max
  unsure (1)..(414): unsure at all n locations
agcttagcacctggtatccggacactccgtcgaccaacctgtcgatgctgggcagagggtatgcgtctttggggcacaccctgttcagatgagtgtagtcggtgcacattctccatttcccatttgccttttttaccatgacgacgttggcaagccaggtagaaaacctgacctctctgatgaagttggcaagaaggagcttgtcaacttcttctttgacgactttacgccactcttctcccatcttctttttcttctgcgatataggtttggcctgagggcagatagttagtttgtggtaaattatgccgagatagatccccgacatgtcagatggttgtcaggaaaataaatctgcattttgcgtancatgtcggtgatgcggtggtgctcatgattggtgaggtctctact

SEQ ID NO: 245113 - DNA, 258 bp, Glycine max
ttctcaagaggcttctttgagaagttatatccttatctacccacacccttctattaactaaattaacctccttgaaaataattacggataaaaataacacaacaaataatcaaacatcaaacataattactaataatatatagatatatatcagggtgttacagtagcctttaatcaagtgtgcaaatatgacttcaatttgttttattttcccttttacgtttattatggcttttttatgccttttgtatttttttt

SEQ ID NO: 245114 - DNA, 422 bp, Glycine max
agcttaaacattcaattgcgagcgtctagattattacgggactcaatcaaacatacgagaaaaatgttattgtcgtttgaacttgctctgagctttaacattcaatttctagcgtctcgatatattacgggactcaatcatacatccgagtaaaaagttattgtcgtttgagttggctcagaggttcaacattcaatttcgagcgtcccgatatattacggcactgaatcggacatccgagtaaaacgttattgttgtttgaataggcttagagctttaacattcaatttcgagcgtgtcgatatattacgagactcaatcggacatccgagtaaaaagttattgtcgttagaattggctcaaagcttaaacattcaatttcgagcgtttcgttatattacgggactcaatcagacatccga

SEQ ID NO: 245115 - DNA, 231 bp, Glycine max
ttgagcaaattcaaacgactttttttttttactcgcatgtctggttgagtcccgtattatattgagacgctcgaaattgaatgttgaagctttgagcaaattcaaacgacaataaccttttactcggatgtctgattgagtcccgtaatatatcgagacgctcgaaattgaatgttgaagctcagagcaaattcaaacgacaataacttttttctcggatgtttgattgac

SEQ ID NO: 245116 - DNA, 425 bp, Glycine max
agcttgagatgaggaagtgttgaagggtgatactttctgcttttattgctgaccacagagtggtacctggagatatgtcgcgggggtcaggagaccttggggacgtcaggtggggtgctattgcccaaaaccaagcttgaccaatcccgacccaacccgggcatagtcggtcagtgagaacctgtgatgtacctaagcaggcgagctcctggcagtcaacagataaaaggaaaacaagaccacaaagcaaggaggcttgtggtggctggccagctgtgaattttgtgtaatatgtgagatatggcctctggtaatcgattaccaagggtgggtaatcgattacaaggcttaaaaatgaagacaggaggctaagatggtctctggtaatcgattaccaggggatgtaatcgattaccaggcttgaa

SEQ ID NO: 245117 - DNA, 229 bp, Glycine max
cgttcgcacatagtccgcgtgtattatatccactcgacaaagtttgaagtataggagaccttcaatcctataacacaacgtggcggacaaaaatgggcagttaacttgaatggccattattgtcaatgcggaaggtattctgcgcttcactatccatgttcacacattattgcagcttgtggtaacgtgagcatgaactactaccaatatatatatgttgattacacca

SEQ ID NO: 245118 - DNA, 419 bp, Glycine max
agcttataagaacaaaattgcctcaatcatttccaaatatgcatgtgaattaggaagcatcaacaagaatcaagccaaggctattgtgcaagcaatcaatggggccaaacacaccaaatgattatgatgatgtatggctcaaattctcacaaaagtaaacttatcacttcataattgagctttcaaaactataatgacatgtagaggaaaaacaaggacttcaaatcacaaaatgtcaagagacttttattttcaaaacaattacccatttcttgaacatatcctataattcaaagaaaaacatgcaaagttgtacatgcaaacaaaattgacctaaaatattaaactaggaacccaacaaaactaacaaaattaacaaattaacacaactaacaaaattaacaaaaccaacaaaacta

SEQ ID NO: 245119 - DNA, 232 bp, Glycine max
tgtgcaaatcaaatcactcctacattttatctatagcatgcattgtatgttggtctcgtcctttgtcaccggaaacccggaaggccatatcaccttcttaattggacacatgggggactgggcccccaaatggcccaattaaaagaaaatatttttccggcttttggggcccgaaaaagccttcataatatgccttggataaacctttcttcataacatcataatggacata

SEQ ID NO: 245120 - DNA, 422 bp, Glycine max
agcttcatgatgaatcaagattgattcaattagttttgatgataacaaagatgacgacaaaaagctcaaaagtcaagaacacttaatgataacaaagatgatgatctcaagaataaaagaatgagttcaagattgaatcacatacacttcaaggatcaagaggaaagttgaattcaagaatcaagtttcaagattcaagttccaagaatcaagatcaagattcaagaatcaagagaagactcaatcaagataagtattaaaaagtttttttaaaaattgagtagcacatgaattttttctcaaaaccttttaccaaagagtttttactctctggtaatcgattaccagattattgtaatcgattaccagtagcaaaatggttttcaaaaaaaaaaaaaaactttcaaactgaatttataacg

SEQ ID NO: 245121 - DNA, 235 bp, Glycine max
ttgaacggtcatcgcttcattcttttggcgatagattatttcaccaaatgggtcgaagcggcttcttataccaatgtcacgaggagtgtggtggtcagattcataaagaaggaactgatttgtcgatacgaactccccaggaagatcattactgacaatggcaccaatctgaaaaacaaaatgatgcaggaaatgtgcggggatttcaagatccagcatcataactccaccccct

SEQ ID NO: 245122 - DNA, 424 bp, Glycine max
agcttcaaccaaacctaacatgtgctaagcgaagtgaaaaggtgaagcaagaagaatgaagtaaaaatataaagcataaaacccaagaaaatttgaaagataaaaaaaaggcggctactgtgttagaagtagtaaacaacgctcagtgcatcacataaaaatgatgtcatacatagttacattttattctttcagtaacagacccttgggatgcagatcagtaattagtttaaatttagggttttaagcaacgagaaattatggaaatacccctacaccctaaaccgtctatgggataaagaggttgttcgagaggacagaaatccaatacgatcacaattcaatcatacgctgtagaaacaccagaagagatatactacataatacatatacttcaccaaattctcaatctgttgaaattaca

SEQ ID NO: 245123 - DNA, 256 bp, Glycine max
ttgaaatagcttctggcctgaaaatcaattttgctaagagccaacttggagcaattggccagtctgaacagtggactagatgtgctgctgatttcttgaactgtggaccattgcagcttcctttctgctacctagggtttcctataggtgttaatccgagaaagagggtggtgtgggaacctattatcaataaattcgaggctagattgaacaaatggaggcagagaagcatatcaatggctggtagaatcaccct

SEQ ID NO: 245124 - DNA, 341 bp, Glycine max
  unsure (1)..(341): unsure at all n locations
acctgcngcatgccagctgaatagtggtggccgataattctttttcttnacgcatccttcccctatacccctgaagttttctcagataaactgtaagtatgaatctcactatgtctggctaattcttgtgaaagcaccctctaggggccttagttatcttcattaggaaaatgcgaatgtgatttacaacccaactgcttggaaatagtatttttttttcttttcttttgcttgatttccaaaacctgggattggtcagcctgcaaaggtgtgcccttgataactgtttttgaaaaactatgaaagttctttttgtgtangctggcgcttggaggaaaatt

SEQ ID NO: 245125 - DNA, 221 bp, Glycine max
tttgaaataatggacaagcttatttatgtttatgataggttttctttaaggattcatggtaattgagatttatctcattttgttctgattctgattcttcatatgttgtataagccatcaaacacaatttagcttcctcttctccttcttcgtcaaatgtggagtcatccaaattctcccaagtgctcatgaggcctttcttgtccttggacatgtaatgc

SEQ ID NO: 245126 - DNA, 416 bp, Glycine max
agcttgcggactataccttcgaccgaactctgtcgtgtttctggctaggcccggattcaaggcgggctgcagcaccggctccgcttccctaactgtactggaggcggttgcagtggctttatcctctatggttttctggagttttaacatgacctccgagatggaagccatttgatcttttaaggccgatagatcggccttcatctgttcctgcatgccctcttcattatccatttttctggatcgagtgttataggggtgccttggtgttttcttagttatgatgaaattcctaaagaaataaacaacagtgagtatgccaccaaaacatgagtatgcaaatggatgatcggagcacttggatccaccccaagatttttagataatgtaatgagtccagaatttgtcattttata

SEQ ID NO: 245127 - DNA, 234 bp, Glycine max
  unsure (1)..(234): unsure at all n locations
ttagaggggtggtctaacggaatttatttttgnggaggaatttttgttttctttgaggtattcttatattggtgaaggttttgttgggttgtgcatggtatggaatctcgatggcaacaattgtgatctagtcactatatactcatcttgctctttgaatgagaaaagaaaattgttggcagatttggtgatgtcaagatgaagatttggagacgattgaaaaatatttgttta

SEQ ID NO: 245128 - DNA, 434 bp, Glycine max
  unsure (1)..(434): unsure at all n locations
agcttctgcaagtgccaaatacgatgcctcaagcattttatcaagcttccacaacttatgatccaacttggatgttggaagccattctcggatgtcacaaacttcaatacagtcagcatctccacaggcacaaacagaaacattaaaagatgatggtctatcacgattttcattgaattgatccatcacctccggttcagtgctctgaagctgacgcatccatctcagagacttaatggcctgtgaaacatgatgtacggcagctaacttggatgagattggatcagcaactgtctgaaccacaggtgtggaaactggacatacttcacaagccaaagagctatcatcaggatacaagcttggtgcatccncttcttggttgctcaattctgtgctactgacagctataagttccccagatgtgggtttgtatg

SEQ ID NO: 245129 - DNA, 229 bp, Glycine max
tagcccaataatattgctaacaataatggtaatatcaatatttctaactccctcccctaaactatagttcacttagcatcacacttgttacaaagtattagaatgtcgcaacatctttaatgtatctcagaatattgttaggatcatattgcaaggtatgaaagttgagtctcacattgaaagtttggcatttaatgtagggttttttaggcctccaccttcatttttc

SEQ ID NO: 245130 - DNA, 227 bp, Glycine max
ttaactgtatagggagatcacaaattctttattccaagaaaatacagtagcaataatagtacagaaaatgaacagtgagattatcattaagagaaacagtcctgctgatcagcaactaccaacctaagggacaaactacccatctacaaaataaaaggcacttgaattaccggggaatggccaaccttaaaaggtccagcctaatctctattaggtaagggattgaa

SEQ ID NO: 245131 - DNA, 462 bp, Glycine max
  unsure (1)..(462): unsure at all n locations
acctgcaggcgtagcaagcttgctcngggacggacggagtatagaaggtatctattctttttcacggngaangtcgttttccagattttagagaatctcttctcgcgctagcctctcgctttacgggattgaacatttagtgaaaaagaataaacacttgtaacaaacattgctgttcattgagaaacacagtgtctcctctagagatgacacacattatcaataacatgcagtgccttgacaccatcgtctctttaaggtcgaaccatgtgtcactcgaaattataacctatatgatattcctgcagatgtgttaagaatgaatagcttactctgatcttagaaactatgagcagaatattatattgactattgtatctaaagttaaccctgaaattcttttattgagattcatncgaccctaatcatataactcatatcttagcatcttcttgattatta

SEQ ID NO: 245132 - DNA, 236 bp, Glycine max
tctggaattatattaatttgtaatgtgttttttaaggtagggtataaatttttttaatacatactaagtcatgcaagttaattaatgatttactggttccataattgaccaaatatgatttgagtgaattcatcactggtttgatttttaaaattatgaattgaaacattaaagttaaattaaattttggacaagttggctttgttcagagggccaagtatgggcctttttatgct

SEQ ID NO: 245133 - DNA, 425 bp, Glycine max
  unsure (1)..(425): unsure at all n locations
agctcgaaggctctgtcgtgtgctctgttataagattaatatncaagggcccacaactatagaagtgcaaggcaaatgtgagacatactctcattaacatatgaaggtttgacacagataaaacataacaagctcaacttgttaacacataagtatgaactcttcactctggaagaaaaggaagatatacaaaccatgtttggacacttcaaaccatattagatgaattacgttgtattgataaaacatttgataattatgataatattgacaaaatactaagaattttatccagaaagtggagactataggtaaccaccttatgagcagtgaagaacctagactccatgtccattgaagaactaataggaacattaaaggttcatgaacaagggaatcaaaaagagaaaggcactgactctaac

SEQ ID NO: 245134 - DNA, 243 bp, Glycine max
ttgaaggcttctaccaacactcattccatatgtagaggaatgggtaaaggtagaggcagaggaaggggtcaaggccgaagcagaagcaactatagaggaaatcagcagcaacaacaagaaaaagaaagaggaagttggagccatcagacaactaactacaagttagcaaacaagtctaacattgaatgttttaaatgtcatcggttgggccattacaaatcagagtgcaggaccaatttgtcc

SEQ ID NO: 245135 - DNA, 418 bp, Glycine max
gatctccgcggaaggaatgagcagcagcagataagtttcttccggagagggggcggctttttataattttttattaaagggcaaaattgtccattcataaaagctgctgggtgcaccaacaatattgctgggtgcacctagcatctgccttataattatagtaataatagatcactagccttaacatgaaaaatatatgataaattgggttgcctacaagacccacatctaaaggttaaaaaatatatcaaaaaataaaataaaataaaaatttactaagtaatcatgtggatcaaatccacttatatttatactacgatacccgagattcgatctcactcattaaattgtatttttcaatccatttcaacaaatgatctgaaccaatctggattttccgacttgattcacccctaat

SEQ ID NO: 245136 - DNA, 259 bp, Glycine max
tccctgtgagacctgatattccagggaatcctatagtcaatagattaaacaaatttgttttactcattcaacaattattataaaaaatgaccactaacaaatgagagttacttacaatcctatctgcaatttcctttgttgccttatatgtcatttgacttaattttttcgtgcagaccatcttccacttcatgtgtcgtttaatgggagatggaggatcaatgattgtgtcaatgctctcggattgggctgcttactt

SEQ ID NO: 245137 - DNA, 423 bp, Glycine max
  unsure (1)..(423): unsure at all n locations
agcttataagaacaaaattgcctcaatcattttctaatatgcatgggaattaggaagcatcaacaagaatcaagccaagactattgtgcaagcaatcaatggggcaaaacacaccaaatgattatgatgatggatggctcanattctcacaaaggtaaactcatcactttcaaattgagctttcaaaactatcatgacatgtagaggagaatcaaggatttcaagtcacaaaatgtcaagaacttttattttcaaaacaattacccatttcttgaacatatcctataattcaaagaaaaacatgcaaagtcgtacatgcacacaaaattgacccaaaatattaaactaaaaatccgacgaaactaacaacattaacaaattaacacaactaacaaattaacaaaaccaacaaaactagcaaaa

SEQ ID NO: 245138 - DNA, 221 bp, Glycine max
tgtacgcacatcgttcgcgtgtatgatatccactccacaagggttgaagtaaaggagagcttcaaccctataacgcaacgtggcggacaaaagtgggcaataaacttgaatgatcgtcattgtcaatgcggaaggtattctgcgcttcactatccatgttcacacattattgcagcttgtggttacgtgagcatgaactactaccaatatatagatgttgt

SEQ ID NO: 245139 - DNA, 425 bp, Glycine max
agcttcattcttgtataaagtgtagaagcttcaattattatggcctcatcaaactacttgtttcccgagggaaattctataaatagacctcttatctttaatggagtgggttaccactactggaaaacctgcatgcaaatctttatagaggcaatagatttaaatatttgggaagccatagaacaaggaccttatgttccctctataatagccggaagtgcaacaatagaaaaacctatagcagactggactgaggaagaaagaacattagtacaatataatttaaaggccaaaaatattattacatctgcccttggaatagatgaatactttagggtttcaaattgtaaaagtgctaaggatatgtgggatacactacaagtaacacatgaaggcacaacagatgttaaaagatctaggataaa

SEQ ID NO: 245140 - DNA, 222 bp, Glycine max
tgtaggattatggggtacccatcacatgtggtactaggtggcggtcgggcgatggtgcacaacaagttttccacatccacaaatcgcgcataaacccaccatcccctgttgcccacctccaactgagctcacgtactcctacgtagcccatatcctcgtttctctcaacaccgggtccccatcaatcctcccaagcttccccaacatccaagtaactcaaca

SEQ ID NO: 245141 - DNA, 418 bp, Glycine max
  unsure (1)..(418): unsure at all n locations
agctngatatcaagttcactgattgcaacctgttttcccttggcctttgagtaaaaggctttattgtttgtgaagaaacgagcctgtctgagtagaaaagctcaatgttcaaggactcaaacctcaccccaattctcctgttaggattggaaaaatttgcaaggagagtgaattcaccattgaggtactgtggtgagtcaaagtacaccacattgaggcttgcattgggaatgtcaaacgtggggtttcgcggcttcatggaaaggtagagaatcagtgttgcaattccaaagaagataagcactaggctgaatatgaagcacattattgcagcacaccatataattggttttgtcctttgaagtcgaggttgcccgaaaatggctctggtgttggcaagggaatctggtgctcctga

SEQ ID NO: 245142 - DNA, 240 bp, Glycine max
tgaaagcgctcactgaactttttttatagcattccacagataaggatatgctgctatggcctcttgccaatcccacattggaaaacgtttattgagatcgttcaaacgatggataaagtggaggtggttcttgaaaatgagcacatgatcgatgtggtggttctcattattgcttcaccccgtgccagaacagaagaacatacagtatttaactgaatggcaatagttgatgagtagcaa

SEQ ID NO: 245143 - DNA, 398 bp, Glycine max
  unsure (1)..(398): unsure at all n locations
agcttatcagcagagggaagagacctgcctttatgctcgnanaagacatcaatctgcttgccagtaatctgctcccaaactccaaccccatactcattactcgtccctccgcgactagacaatatcttgtaagcctaactaaacctcagagccgcagcggtgctactcttgagctgattgtgatgacaaacgtgaaacttgtacctaagctctccggagtgggagctgagcagccccatcccggcgtcaccccgatcagggcgctcgctgactccgatgactatgttgtcggagttcacccgatctacatcgttgaccctctggtaatcaaggctaagaggtgggtgctcatccaacatccaatcataaacatgaaccgtgctgccatgcgcaacgca

SEQ ID NO: 245144 - DNA, 243 bp, Glycine max
tgagacgactcagagctatctcttttttattgaagcatggggaccacgaagacagcttctgataaacaacacctgagggtttgggccactgagacgcaaagacaagttcacacagagaagctaaatgctccaatgctatgttttattcacaatggaaggcacaaaccccgaatttgacacacaaattaacatgttggaatttgagaatcaaagtcctaatatacaagaaaaatcatagcatgc

SEQ ID NO: 245145 - DNA, 420 bp, Glycine max
agctggaaacgcaagtcgaccgctattttttatcaactatcttaaaagatgcaagtatctagaattaaggggaatgacgattcacctgaaaatgcggagagatgacgaggagaagggagaatatagcgcaagtttgcattttgattgagattgaaaaaaggggctgaagaggaagaagcaaaggcaagtaccctccttacagttacagccatagtcatagtcatcggcacttggttctagttgtacacaagaccaaaagtagtcactgcctagatcggggctccgaccaactttggtctatatatacggcagatctaatgggccactgccattgtcttgtcttggcccatacatttttggtgttcgcccacttttttcaagacccctctccacattcactcaaaatactataaaaacaac

SEQ ID NO: 245146 - DNA, 250 bp, Glycine max
ttgttatgaatgacaaatgaaatttaaaatgaaagatagagagtcacagaagggggaagagagtgaaagagggagagagctggaacactaccttcatgcaattttcattttgcttcatatgtactgcttgatcaatctgcagagcatcattaaattcctttagcttaagacaatctgaggtgagctcctctaccctgtgattgcaagtaaaatcaaaaaaagttttcccaggtaaaccgtatcctccatg

SEQ ID NO: 245147 - DNA, 330 bp, Glycine max
  unsure (1)..(330): unsure at all n locations
agcttgagcttgtaggtattgatctctntttatctacaacatctcctttgatttcttagctctggttctttgtgttaggccgcctaccacaattaggttcttcctctctgaagctctttgtttttccattaaaggttttccttgatctctatcatttcctccttctttgaggaaattttccctcgtatttaatcctctaatacctacattaaaagaaattaagttagtctcttcaaattttccaggaagctcatatgtgccttgtaggctttatattcgatgatgcaatcctaccccccaagggcatcttgtaaaagactactacattat

SEQ ID NO: 245148 - DNA, 217 bp, Glycine max
tctgcatttttagagatttctatttagagagagctccaagttccagggagtttgggcttttccttgagcttctacatttttagagatttctagagagaggtccaagttccagggagtttgggcatttctcgaagcttctgcatgtttagagatttctagagacagaaaggtccaagttccaaagagttttgagagcttttgctgtgcgaaaactgca

SEQ ID NO: 245149 - DNA, 414 bp, Glycine max
agctaggctctagaccttgttattgtcccttttaactcaagaagcgtttctaggtccttatgctctttgaatagccctctatcactcttcgactcctcctctagggtttccaaaatggaactgctgctccagccaccaccacgtccacccagcgatgacagtggcgaacagcaccagctagtgcctcctcaagtacatcctctcacggtctcattcctccatgccaagaaccccgacgagacttctccccaaaccaccgccacggacaccaagctccgcggcaagggagcgccacaggaggagtttagtgtcgaccacgtgctgaccaagcgccaccgtcgtgagaagctgaatcataaacaaggtgctttagatttttccctcccttttctccaaaaatgaggtgcttcaaat

SEQ ID NO: 245150 - DNA, 240 bp, Glycine max
tatccttatggcttgccttcggttttcactccccgtgccactccggaagatttaagccaagcccctacttttgaggggcaactcctgccttatgacgactatcccgggcaagacgatgaggaaggagatacccatctcggccccctcctccacctcaaagatccgtccccacatgaactaccccaaccaaacatagttcgccatatcccggccttacccacaccccgtaaagaatctgtt

SEQ ID NO: 245151 - DNA, 432 bp, Glycine max
  unsure (1)..(432): unsure at all n locations
gagcttttatataaagcctactttgaacaacttntatatcttttagcataaagaggagtgagagtgaggtcctctttttaacatatctttttagtggaaaaaaaatattaaaatttataaaattataaggtatgaatatacgatgcgttcacctcaaaaaacacctacatatatatgaacgcttataaagaactatcatacgatcatcttattcttaagtcattaccccgaccattcctaaaatataaataagtaatttcaatgtgaatggattttgcgtttgacaattaatttgctgcataaagtaaatttattaactattataaagtaaaattcaatatattaattatttttgttaagttgtattattattttacttcattaaaggaaagcaatcaacctatagccatttctctctggttctaatctttc

SEQ ID NO: 245152 - DNA, 220 bp, Glycine max
tgtagttgctgggaatccttctgtgagattagtggagagctctgatgggtggaacacagcttctgttgtgggaacattctcagggccaaagcatcgcttggcctcagcagcaactgtgaaggaagggaaggtgtatttgaaccatatggttggaattggataccccaaaaagaagcatgcaattgttgaagcagttttttaactcatactttttctaaaa

SEQ ID NO: 245153 - DNA, 431 bp, Glycine max
gagcttaaatggcctaactctctaagaactctccctattggagtcaccaactgtcgcaacctacccttcgcgggagggcgacgcgtgactcgcgggagcgtgttccaagaaaggaatacgcgcggagtcgccatgaacgtttatttgaggaaaacgtcggaaaaacttgaaaagactgatctacgaacttttagtgaaaggttcgggagttgtatttacgtacggggaaggtattagcaccccacacgttcgtcacaagggacgacaacctttaatgaaatgtgaaaatatgacttcaatttatattcttttccctttttatgttcttatatcttttttatgcctttttatatttttatctttttgtggtcgaaaaggatctagaaggtgtacttcaggatataccccaaggagagaaagtttcctaggag

SEQ ID NO: 245154 - DNA, 217 bp, Glycine max
tcttattcccttgacattcatgggaggttgtagtttctcaattacatcaatctttgccttgtccacctctatccaccttactgaaatcttatgccccagcactattccttcttgaatcataaaatggcatttctcccagttgaggactagattggactcttcacatctttataatactctttcaaggttagataagcagccttcaaaagatggccca

SEQ ID NO: 245155 - DNA, 422 bp, Glycine max
agcttcattaagaggcttcctccataagcttcctcgtggcttctttgagaagctttctcaagaggcttctttgagaagctaaatacttatctatccacacccctcttttaacttaattaacctccttaaaaataattacaaatgaaaataaagcaacaaataatcaaacatcaaacataattactaataatatatatatatatatatatatatatatatatatatatatatatatcagggtgtgacaccttccacttcagcatcagaggcaccaataccttcttctttttcagtaccttcctcttcatccactcagattttagttattcctctagtacctctacagatgccacttctagctcctctctctgcaggtccatcagattttatttttacaccagagatgttgcactccatgctct

SEQ ID NO: 245156 - DNA, 234 bp, Glycine max
tcgcggatttcaacttagccggccataatgatctaaatgggtattaaaagaagcacatctgaccaatagagatttgataaatgccaaaaaaaatgataactggggcaagagaaaaggatgaaatggaaggataaaacttatgtgtgactgccatttttaaacgaccaaatgttccatcatcccaacaatgtcattactcaaccaataacaacccttatcatttcccagcaccca

SEQ ID NO: 245157 - DNA, 429 bp, Glycine max
agcttataagaacaaaattgcctcaatcatttccttatatgcatgtgaattaggacgcatcaacaagaatcaagccaaggctattgtgcaagcaatcaatggggcaaaacacaccaaatgattatgatgatggatggctcaaattctcacaaaggtaaactcatcactttcaaattgagctttcaaaactatcatgacatgtagagaagaatcaaggatttcaagtcacaaaatgtcaagaacttttattttcaaaacaattacccatttcttgaacatatcctataattcaaagaaaaacatgcaaattcgtacgtgcacacaaaattgacccaaaatattaaactgaaaatccgacgaaactaacaacattaacaaattaacacaactaacaaattaacaaaaccaacaaaactagcaaaaccaaag

SEQ ID NO: 245158 - DNA, 249 bp, Glycine max
tcttagtctcacctggtgaattcgtggctacttcatgcactcctctaatgacaatagcatcacttctggcactaaattgctgggagtttgaagtcatcttcttaattaaatttctggcttcagcaagggtcatgtctccaaaggctccaccactggcagcatctatcatacttctctccatgttgctgagtctttcataaaaatattggagaagaagctgctctgaaatctggtggtgaaggcaactgg

SEQ ID NO: 245159 - DNA, 414 bp, Glycine max
agcttgaaattgaaaaacggaagccctctagaaattcaaatggtcataacttgtcacacggaagtccgattaacgcgcagactatatcgagacgctcgaaattgagcaacgaatgctctcgagaaattcatatggccataacttttgaaacggaagtctgattcaggcgcataatatatctcgaagcttgaaattgaaaaacggaagccctcgagaaattcaaatggtcataacttgtcacacggaagtccgattcaagcgcataatatatcgagacgctcgaaattgaacaacgaatgctatcgagaaattaaaatggtcatcacttgtcacacggaatacagtggagaaattcatatgttcataacttttgaaacggaagtctgattcaggcgcataatatatcgagaagct

SEQ ID NO: 245160 - DNA, 256 bp, Glycine max
ttcgagaaatttgcatggtcatatcatttcactcggaggtccgattcagccgcatcacatattgagacgctcgaaattgaacaccggaaggtctcgagaaactctattggtcataacttttcacacggaggtccgaatcaggagcctaatttatcgacgcgctctgaatatgacaacggaagcgcaccataaataccaagggccgtcacagtccacagaagggcacgattccgtaatataatatatcgagaccctc

SEQ ID NO: 245161 - DNA, 422 bp, Glycine max
agcttctcccctattttgctataaatagggttagaagtgaaaaaaaaaagggttcagcccctttggcacttctctctctctcgaaattgctcacgaaaattatttccgtgaagaaaatccaagccgaggcgcttccgtaacgttgccatgagtaattacgtgaagattctcgaccgttcttcaagatacagtcggggttcttcgttgtcttcacgcttcgacgggtaagtacctcaaaccaaacttttcaatttattctatgtacccgtggagggccacattatgtgacgtgtatttttattcttgttttcatttgctttttatacacccttttgacgtgcttaagccatttatttaattcatttctcgctgaatctaaaaataaaataaattcccaccgatcatttaaattgtatcatccg

SEQ ID NO: 245162 - DNA, 218 bp, Glycine max
ttcaacaagagtcttcacaaataactaccatgaagcagaaaactaacaaaactacccatcatatctcccaaaaccccatacccacgaaatttaagagagaaagaagtccacccaaacctgaaatttcgaagtcccactcgtagccacgcacttcacgactccaaaaatgctctcctttcgcgatttggagcaaaaataatggccaaagggtggagctt

SEQ ID NO: 245163 - DNA, 425 bp, Glycine max
agcttacagcctctatttggtttgaaaaaacattgtctgttctcatttcttgctttcactaattacaaaataacccccctgttttcattttctttccaattttcaaaagtttgcacacgaaatgttgattggtgaaaaaggcattatcttttcacttttcaccatttttttgtacaatcttcaatgtggcatttttataattattaatgaaaacaaaaaaaacaatttctcaaacccaataggcccttagattgcattacaaagccaatggacgcaaataggtaaatatttctaatagtctcagtttcctatgtaatggtacaactgtaactagaaagctcaaataagttattcaatcttaacaaataacctttaatttcaataaacaataaataaatatattgaaaaggcattcatggaaatgt

SEQ ID NO: 245164 - DNA, 248 bp, Glycine max
tgatcctcgcaacatttagtgacactataaaactcaacttgaaaattcagaaactcttattatgtcgctattactggcagaatatccatgtgagcccgcttagatttaagggatgagtgtatcgaaatttgagttaaaatgaacatgtgtaggggttcttaaaggatcaaattggggtttatgttgggatgtttattggattgaaattcttcttgtatgattatgtgaaattgtttgagggattttac

SEQ ID NO: 245165 - DNA, 392 bp, Glycine max
agcataggtaggggttgtttttttcatgaccttcatcatttccaaaattcatgcattcattcagtattcagagattcatgcaaaaatcgatacccaattctagtcgtgactctcaccaggttgtggctaatgattaccttcacaatttacctgtcaaaccaactaatattttccgtcatgtccctaattcatgtgctttctcttctaattaccacatacttattcaaagcaagtgatctaagcattgcaatccactcaatccatgcaatcgatcaattcaaatcatacactaacacaaaattgttaaatcaaagcatatcactgcataatcaatcaaaactgtaaactgttcaacaagctttagaatttgctaactaaataaactgaaatat

SEQ ID NO: 245166 - DNA, 244 bp, Glycine max
tgttgcgtattactcattcttggttcatcaaattggtgtaatgagcgtggatcttgagttatgggttcggccatgtattaagggttgagaaattcactaatcaaaatgactttggactctggaggttgaagatgagcccttctggtataacagggtttggtggaagctcttgaaggagtggtcaagcttgataaatcaatgtcaagtacaatcaccattatagatgacaatgggtagagtctta

SEQ ID NO: 245167 - DNA, 420 bp, Glycine max
agcttctagccaaatggacttaccttgaattaattcctttgatagcccttttgagccttgtttccctttccttgttttgaagctcactacaagccttaagtgaaaaaccatgatatcaccatatccttaaggaattttggagctttggaattgttttgggaataagtatggggggtttttgtttcattggacaacttgttttgttggctatgcttcatgatgtattttgggccatacttgatgtacattgtatattggttaaatgttggacatgctgaatgaaatgttgtttctcaaaggctatagagtaaaaaaaaaaaaattcgaaaaaaagaaaaagaaaagcaataaagttgagtgaataagatcttaaatggcacaagaatgatgaaactcttggttctactcttcatgtttaat

SEQ ID NO: 245168 - DNA, 245 bp, Glycine max
  unsure (1)..(245): unsure at all n locations
tgatgtgagaaagcgtggttctttctactttngnnngntgaccacagagtggtacctggagatatgtcgcaggggtcaggagaccttggggacgtcaggtggggtgctactgcccaaaagcaagcttggccaatcccgacccaacccaggcatagtcagtcagtgagaacctgtgacgtacctaagcaggcgagctcctgggagtcaaccaataaaagaacaaagtccacgaatcaaggaggctt

SEQ ID NO: 245169 - DNA, 429 bp, Glycine max
  unsure (1)..(429): unsure at all n locations
cttaagncactgagctgcaacactaccaaaagataaccttgtatttttcccncganagccccttcgagccttgtttccctttccttgttttgaagctcactacaagccttaactgaaaaaccatgatatcaccatatccttaacgaattctggagctctggaattgttttgggaataactatggggggtttcctgtttcattggacaacttgccttgttggctatgctacatgatgcattctgggccatacttgatgtacattgcatattggttaactgctggacatgctgaatgaaatgttgcttctcaaaggctatagagtcaaaaaaaaaagattccaaacaaagaacaagaacagcaataaagtcgagtgaataagatccttaatggcacaagaatgatgaaactcttggttctactctctatgt

SEQ ID NO: 245170 - DNA, 401 bp, Glycine max
  unsure (1)..(401): unsure at all n locations
aaaacccaagtgctangcctagcctcgcgctaagcctaacttgaagttgtaaagtcccataagcacctgtggcttagtgcggcaggttgcacttagcactttctgcaacacaaaaaatctttctgcaatatgcgcttagcctgagatgtgaggcttagcgtaacatcaaacttcaacttacagagattagtttaagcttagcacaacaagtgcgctaagcgaacttccaagaattcaaaacccgtaagagattggcgctancacctcctgcgccgctancccagcttaaaactcaagtacataatgatcaagggctagcgcaagatacacgcttacactgtacataaaattttcccgaaagagtggcgctacacatcatcacctangccactgggtaagtc

SEQ ID NO: 245171 - DNA, 363 bp, Glycine max
gcaaaacaattcttcacatccacaaatcacatataaacccaccatcccctggtgcccaccttcaactgggctcacgtactcccacgtagcccttattctcgtttctctcaacaccaagtccccatcaatcctcccatgcttcaacaacatccaagtaatgcaacattaaatcatcacaaactaacacagccaagaaaacagggcataggcagaaaactctgcccaaaacacataccaatatcacagctgtgcacattcaaataccccagtaacattctcttcgttccaggtctttaaccgctggatcgactcgaaaatttattggatgctctagtacataagtatacattttgaaccgtggga

SEQ ID NO: 245172 - DNA, 222 bp, Glycine max
gatccaagtgctctcatcattcattccatattcatgttgtggcggcatactcaccattggttatttctttaggaagtctatcatatctaagagaacaccaaggcacccctaaacactcgatccagaaaatgtatatgaatagggcctgcaggaacacatgaaagcccatctatcgggcttacaagatccaatgcgttccatcttggaggtcatgtcaaactc

SEQ ID NO: 245173 - DNA, 377 bp, Glycine max
  unsure (1)..(377): unsure at all n locations
attgaatgaagcccatttgtgtgataaattcagcgcttccctatgaagatatcaaccttgctaagttgcatagacatcatgaaagccttacatagaagatttatcaaatgctacaatgagcatacaacatcataatgtagttgtactagagtcaacattagaatggtataattgaggactctgagaatgagaacatcataatgatactttgattagataccaaaatcaagacaagagatgatgtagtcctaccccgcaagggcattggatagaagactccaagtagattgcgctagagatccaagggaaggccctanggttctcatgagccttagggtagattttgagcccatggactaagtatgagcccgcttatc

SEQ ID NO: 245174 - DNA, 290 bp, Glycine max
atatcatagataagaagtgttgatgttcgaaggacactttaaatcctctcttaatcaattgacctacacttagaaatttctggtcaatgtcaagtgcataaagaacatctgatattatcttggacctgaacatgttgaaattgcaatggttccttttcgttttgcacaaatatagcctccattcccaattatgactcttgacacattagttggcttcaatccttgaagagagtttatcatatgtcatgtggttcgacaacattcagaactactcctcatcgaatagcatg

SEQ ID NO: 245175 - DNA, 458 bp, Glycine max
  unsure (1)..(458): unsure at all n locations
ttgactaacaatgcgcataaatcacaggcaaacccttcaaaacaaagtaaaatcaaatagcaattttagctgaaaatagaacaagaagataaaaaagggataagaaactaaagttacaactaaatgtaagaacaaaatcaaaacccttgaaatttaaggtgtgtgagagagagctgaaccgaacgaattgtgacttttgaaaaacaaatcacagtgaaaataaatagaagagagtgactattgtgaactaagaaatatatacttcgtggcatgtgctttgcacaaccatatcataatcgtcctttgagaccattgagaaatcgagattcattggcgattntataagatcaaagctaatattttgaggaaaccacatatcgagtcatcttgtggatntgaatacctcaagccacatcacttctgtcaataacacgtgctattagcaaacaaacaatgga

SEQ ID NO: 245176 - DNA, 423 bp, Glycine max
  unsure (1)..(423): unsure at all n locations
gttggttcttccttgaagtacttgatgtaaatacttgtatatctatttaatgatgttttatgtgttctctgtgctatcagtacttcatttcagagtgcttttgccttgatcacataaatgcatgctttgttaggactattcaatagtggaaactagtctgattgctacaacttgacaggacagggctagtttatcgtattatcacgagggatcagggtacacgaacctagttgtttgatatttgcttaatgtggtttggcgagttagtccacaggaggaatctgaggaccatgcttgatcgggataggctnactatcataggaatanggttacatttcagaacacataaacacatgacttgtaagagataatatcttttactcatcaatactngaaacaacgtgtgctacttgcttaccatat

SEQ ID NO: 245177 - DNA, 363 bp, Glycine max
  unsure (1)..(363): unsure at all n locations
gctcctctcgcgaggaacacnnacttgatggtgatgaactttagctcgaaacggaatcaaacaatgcgnaaaatgatgaccctatgactgcaaactcgcaaatcccgtgggtatggcttttgataggtggaaaggaagctttttgaatgaaaaaacgtccccccctttcgacatttttatatattggtgcagaggtggctcgcccagacgagcccagctcgcccaggcgagctaacctgcacttttttttttttgttttttttgagggaacataaacatgaccctccctttgatggataccaattgcctacctgaattattaggtaaatcagctcgatactaaccatatactcttgcctttaa

SEQ ID NO: 245178 - DNA, 385 bp, Glycine max
ttacctcagagctgcactgctcactaagggaagaattttgtgttagtcctggacttcctgcaacgtggcttgctgccatgtgcctcgttcaatttctggtcgcaaggccctatcatattgctggaatagcaaagccttgtgtggctctggaggagattttcattgcttaccttcactgaaacttcatcatccttgacacaattgtgagctgcactttctacaaaagccttaatacaggatcatggatcagtctagaggacaaacattcgtttacgattgaatctccagaggaaggcaagtacggttacatggtcaccaaggatctaccttaattaacataagggcggaaatcattaactctggcaaagctcttctcatattcata

SEQ ID NO: 245179 - DNA, 373 bp, Glycine max
tttgtttcccgaaacctctcgtaaactcaataattagcgataccttgatttcatgatgagaacctcaatctttgcggctcaataatctcaaacttggttcctccaaatttgcggactcttattgtttgattctaatgatcataaaatgcgacgaagatcatgttatagttcagaactacaaattgacacaatatatatagattatttatcaacagttaaaaatggcacaagttaaattaacatgttattcaagatctcctcatccagaaatactttataatattaactgcgtattgagcacgagtattagacttgatcttttaagaaaagcttaatcttgtttgaccttgaaattgaaaacatgatggaaaat

SEQ ID NO: 245180 - DNA, 419 bp, Glycine max
  unsure (1)..(419): unsure at all n locations
atgatgaacacaagaagaaaaagaatcctatgatttcatatgaagaggaaagtcaaagaactacaaacaaccttaactgtcaaattaagtcgttggagtaggtagtttagctttcttgtgactttatgacttgaactaacatttctgcagttaattcttagaaacacatttgcttgccaaccagaaacaaatgtaagcttccttcctgattntttcctacacgaaattgtaactaccagaatttctacattgattagaatgaatgagttaagaacccaacattcgttcacataccacatttaatgtattaagaaggtcaaagttgttcgacaactaaactttcatcaaatcatctttcataagataaaaacaaaacaccccagtagttgcaatcattaagaggcagcacttcacattaa

SEQ ID NO: 245181 - DNA, 187 bp, Glycine max
  unsure (1)..(187): unsure at all n locations
agacacagtcatgcatgaactgaaacctaccctcatggcattggtggaatagcttaacctgcaccaataccgcaaatggcattggcggaaccagcctgcaccaataccgccactttgacggcgaanataaacacatgaatgatggatgaatgcatggaggtgggatggcatggggtcttcctttcca

SEQ ID NO: 245182 - DNA, 297 bp, Glycine max
tcctagactcttgaccttgacttgatgaacctcttttaagcgaaggcgtgtgactcaatcccatgttttactaaagtgaaacaaaacccagtgcgaatcaagactccaacatttatcatgggtggaatggatgaatgcatgaagaaatgtgtatggcacagatgcattttatgaatatgggagctcgggagattgtcctcttcttagatacaacattccggcagcatggtgcccgatgtatgcatttaagaaggcgacacggacccttcatcagttcgtgacaaagtgatgggatca

SEQ ID NO: 245183 - DNA, 398 bp, Glycine max
  unsure (1)..(398): unsure at all n locations
gtgcctactatgacttgagaaacaaagggtgatcaaataacaagcagaaatttaaagggtaataggttgcctcctagtagcgcttctttaacgtcttgagctggacgccttatgacttgttggtcacagacctagtactttgcttacctttggctttggacttggtcatctattggtcggccatgtgtcataggcaacactctaacctttttgtggatgagcttaggtgaactctacaggtggtggcggtgcgtctattgcccactgccggccatccccaggctgctgtggtgtttcgccctgcgcctgcctcggggcatagtacttcttgatgaaagctcgattattanggggcctgatgaccttgctaggggcgacaagcactccgtagaactgac

SEQ ID NO: 245184 - DNA, 366 bp, Glycine max
aagctccctatcctcggcactgaagacgatgcaaacatgataaatccttttcaagagtttgaatataagaaatctactctgcattctcacattcatgctgccgtacatttacctgtgacaacaataaacagttagtgcccctcattgtgtgtagcacatattcaccaatatcgcagataggatggaaacatatcaacaatcaaggccaccatcaaagaatgttgggaatctgtaatctagtttgactgctgaaatgctttgaaatcagcaattggtgtcatataatctgtgccaatattaaccactagacattctagaatattcacatagaaagaacttactttcatctcagctcaatatatttct

SEQ ID NO: 245185 - DNA, 281 bp, Glycine max
aaaaaaacagcgggggatattggccttctttacttgcacactctgaatgagttagacaaaccgcccccgacatgaacagcaacaccaccatcacccttcataaagacctcgcaaacacgatgatatctggcacctgctctgccatattctgcatgagctgatcctgcccaggaaatcaacgcaacatccattccaagcccactcaatattcttaaaacaattctcataggaataaacaattcacatgacaatcataatcccatcacctgtagcaggaaaaa

SEQ ID NO: 245186 - DNA, 344 bp, Glycine max
gaggacagcgtgcagaacgggcagagcacagaattcgagagcagtcacaggcctatttgggaaaagagccctacaagcagaaaagaggagtagcttgtgcattgaagcctaagttttgtcatttgagagattattgagtagacagtgagtgtgagatgctgagaagaggaagaggaatcccccttcttgtgtaacgaactatcattctctactcttaatctcatttattgtcagggtttctttgtaatggctggctaaacaccctagttggggattctaatggcaactgatgtaatacctaatatcaattgatatgtgtccgtgtcatgcttcctcaatgctaa

SEQ ID NO: 245187 - DNA, 356 bp, Glycine max
  unsure (1)..(356): unsure at all n locations
gtgaatgtatgtatacatgattttgatgatgtcaaagaagaatctaacaaggctgcttcaaatgataagcatttgcttcaagaataattcaagattgcttcaacaaacaaagccttgtttcaagattcactatagaccaaaccttgccttataacaaagtgctttcaagacatgcaaggctttggtaatcgattaccaggaagtgtaatcgattaccagaagacaaggttgagaaatagctgttgaaaaggaatttgaatttgaattntcaacatgtaatcgattaccatatgtctgtaatcgattaccagcaacaaaacttctgagattcaattcaaagtcatgacctcaaatat

SEQ ID NO: 245188 - DNA, 342 bp, Glycine max
ctcaaggaagcttcctcacagaagctcctcaaggaagctttctcaacagagcttctcaaggaagctgcctactctataaatagaagcatgtgtaacacttgctgcaacttggatgaatgagagtcttgtgagacatacttcaaagatccacttctctccctcttttattccttcaattgcgtgctcccacatctctctatctttccgtcgttattctcctccattgaagcatccttccaagcttcttattcaaggctcatcttggaggtgaactccttcttcatggttattccctatggatggcgcctcttcacctctttctctagtctccgcgtgatctca

SEQ ID NO: 245189 - DNA, 446 bp, Glycine max
  unsure (1)..(446): unsure at all n locations
tgcctcgangaagtcatgaatcttacctagtttgtctttcnactaccttgcaaaaagaagaaacctttttttgcaacccaacaaaataacttatcttcgactttgaatggagcaattcttgccattgcttgatcacctttacttgcaaagctagcatagattccataggatgactaattagcttctaccatttcaagttttccatcttcattccaaatgaaaagcttctgatgaaatgctgatggaactgctcctactccatgtatccattctcttcccagtaacatgttgaagttagcttgcaaggaaatcactacaagagttgtaagtcttgatggaatgttgcttgtgcggcatctatggaggctggatctttgacttcaatgatgctctttatggtgatttccaccattgagatgtaccggaaacaaatgagagaggtgagt

SEQ ID NO: 245190 - DNA, 265 bp, Glycine max
  unsure (1)..(265): unsure at all n locations
catcttgccaaacaaagtcaggttaacgataactcgcatgtgctntttcttccattctatatgtagcaaagtcattgatccagtcatgtttgatgagttggaaaatgaggccgcaattatactgtgccagttggagatgtattttccccctgctttctttgacatcatgattcacttgattgtgcatctggtcaaagaaatcaaatgttgtggtcctgtttatctacggtggatgtactcggtngagcgatacatgaagatctta

SEQ ID NO: 245191 - DNA, 428 bp, Glycine max
  unsure (1)..(428): unsure at all n locations
gaagaacgttgaagaacggttcaaacctttgcgagattcctcacggaaaacattacggaaatgtttcggaagcgcctcggcttaaattttcttcacggaaacaattattccaagcaaattcgaaagagagagaagtgcctaaggggctggaccccttccttcttcatttcctcccctatttatagcacaataggggaggtggttgccgcccagctcgcccaggcgagctcagctcgcccaggcgagcagggttgcttcctccagaagtaaccgccttctggaggaatcttctggagggcccaagtgggcctgggtgctatttgcacccccanttttactaagtacacccccctctgctgtttttggtaatcttttttcgagagtacggaaactacgaattcgtacgaacttgtttctttccgaatgta

SEQ ID NO: 245192 - DNA, 365 bp, Glycine max
tatatttgaagcacgctccaagcggctggatcattctgattgcgtatatgcatgcggaacacgataacccaattgcgtgaaaagcgggaaattgtatatgacgtttaagtcctcgtgcatgacagaaaataaattcgttttgatttgacaaaattacaagatctctgacatctgacaactatatttggttctgtcttcacgaggccaaatctaggcaagttatttagttatatgggcataaaaagtcattctcttttctaaataacaaaaaacaacgcaaatgggtcatgaatatctaatcctccttgaatgatcttgctcttccgcttaatcaaaaattttggcgacacaagcacttttatgtg

SEQ ID NO: 245193 - DNA, 390 bp, Glycine max
  unsure (1)..(390): unsure at all n locations
gaatgaatgaattaattgaaaagcaaatcaaagccttgcttttatagactcttcatgtctggccaagaggaccatttataagagttacaacttttacaaaaacttaaaaccaatttgaaaaagtcaaaacctttttgaagagttacatctttcgatttattcagaaacaatcactggtaatcgattaccaaatcagtgtaatcgattacacaaggctgttatgtgaaaggatgtgactcttcacatttgaatgtgaatttcaacattcaaagggactgcgaatcgattaccacaacattgtaatcgattacagcttttcgaaattaattggaacgctgtaaattcaatttgaaactttcntcacaacaatttgtactggaatcgatacac

SEQ ID NO: 245194 - DNA, 382 bp, Glycine max
  unsure (1)..(382): unsure at all n locations
tgcttaagccttcatgttaggaaccacttaaaaatcaacatgcaactttgaaaatgtataatacagtcttttcctggcttccataggggtccaaaactcaataaacttcatatatagccaacatttgagactcaaagttgaaaaccaatcgtttcaaaccataaaactcattacaattcaaagaattagctttctttaacgattcatacacaaaagatgactttgcaaagaacgaaaggaaagatngggagctttatgtcaagagagagcttccttcactctacacaacccactactgatgcataaccaacccaaagcaccaaaattaataccccccctccccaaaaaggttcataacttcatggtgctaagaaaaatgaaa

SEQ ID NO: 245195 - DNA, 346 bp, Glycine max
gcattggggctgtttcgatacaaaacaaaaggcctatagcttatttctcggagaaattgggaggagccagattgaactattgcacctatgacaaagagttctatgccattgagagagctcttgatcattggaatcattatttgcgttctaatcactatatattgcattcagatcatgagtcattgaagtatatcaatgggcagcagaagttgagtccaaggcatgctaaatgggttgaatttcttcaatcttgtaatttctcttcaaaatacaaggatggtaagagtaatgtggtggctgatgcactttcaaggaggtatgctctaatttcacttcttgaaactcg

SEQ ID NO: 245196 - DNA, 267 bp, Glycine max
  unsure (1)..(267): unsure at all n locations
atcaattacatttgcttcttacggctgcaaacttttctcgtagtcaaattgatgtcattcctagaggttagtctaatgactattgcttttcctctgtatttataagataaactagcttagcttgctctacacttgagaaagtaatatctaaatataatattgactatgaaattgcactttctgtntttcataatgctgctcatttgcccatttcttttgctttcgcacgtaaagtatttgtacatgcacatgtcttattggctctga

SEQ ID NO: 245197 - DNA, 395 bp, Glycine max
  unsure (1)..(395): unsure at all n locations
ttcattcgnngcatctcttctccctatgccaaaaagaattcgccaaggactaaccgcctgaattctttttgcgtctctcttctcccttttcctaaagaacaaaggactaaccgcctgaattcttttgtgtctcccttctcccttgtcaaagaattcaaaacgacacagtctgagaattcttttgattcttccctgtccctaatacaaaagtgatcaaaggactaaccgtctgagaattcttttgtatccccattcataaagcatcaaagggttaaccgcctgagatctttgtcttagcacattggagggtacatcctttgtggacacagagagggtacatctacttgggctagactgagaacaagagagggacatctcttgtggatcagtctagt

SEQ ID NO: 245198 - DNA, 325 bp, Glycine max
  unsure (1)..(325): unsure at all n locations
cactatttaacgttttaagggccaacgccttanacgatcctctntgctgttatcggttaacatggaccgttcaaaagcataaaatcaacacatcactntactgccttttacgagaactatgtaggtctgatttcctcttcgatggaggatacgtaagagcaaaagccccgcttttgtcgacctcgtgagatggctagaggtccaacgccttatctttctcaccaagtaaaatggatcattttaagggccaacgccttaaatgaccaccttccaagtaaaaagaatcacttgatttgccccttctgaaagaactacgtaggtctga

SEQ ID NO: 245199 - DNA, 394 bp, Glycine max
cctataggttggacctcccacaagagtatggagtcagcaccacttttaacatttctgatttaattccttttgcaggtggagctgatattgaggaggaggaactaacagatttgaggtcaaatccttttcaaggagaaggggatgatgcaatcctccctatgaagggaccagtcactatagccatgagcaagaagctccaacaggattgggctagagctgttgaagaacgccctacggttctcatgaacctcatggtagatttctgagcccgtgggccaagtttgggtccaattctctttgtcatattagactaggatgtcattatatttgatccttgtatttatggctccatattgaggtagggtaccctcaaatataagattttcacccttga

SEQ ID NO: 245200 - DNA, 430 bp, Glycine max
  unsure (1)..(430): unsure at all n locations
tgcctcccgggtccttcacaattgtcttatgctataattacaaacaagttaatacaaatggtgatattgatcatatatataaaaccttgcggagcacgctcataagaaagcagggaatctatggataccaacaaccactctagtatgtattattgtaacagacaaataataatgttgcatgtggcttcctactagagaacagacattagtcagttatctcaacgcacagcaaggcagtatttccatttggctctacagtagcatagaccactatgctacaagtatagaattaatggggaaacttcatcagtgtttgatcccgcagttgcttgaacttggctcttcttataatgaacacgattccttcactctctgctagtacacncaaagggaaataattcacatggatgcaataacaccacgaaatgaa

SEQ ID NO: 245201 - DNA, 349 bp, Glycine max
  unsure (1)..(349): unsure at all n locations
atatttatatatanaacccccaacataaaaaatttacaaacttataatctgtgtaattcaatacatacatgcacaaatggcacaacataaagtttcctttgtcaaactgagttatatattgtgtcaaggagttacatgcttcattctactaagtcatggtttatgaaggccattactactaagtgcttaaaacctgcaattgtaagagacttaacaaaatgaatgtcataactttttaaccaaagttgggaccacacgttaatggagctttcatttccaatccttcatctcatgccatggcttaccattacttgtgaagtgtgatactatgccaaaacaactttgatta

SEQ ID NO: 245202 - DNA, 400 bp, Glycine max
cccatcctcgttcacaaccatcacattctatgactatatagtcggaatctagaggtagcgatacatatggccaattatcaaccatttcttttattttcggcactaatattatatcatctgtattaaatcttctttggcctgttaaagaggctttgttgtaaagaggagctgtgcattttcccatgtgcttaataaaaattcttacactaataaggaggcctacaaaagctcttagaagttgtatgtctttcatgttatctggaaacccaaagattttctgggagaataaggctaaagtcttattttccatcttctatatctattccaagaaacgatatgggtctacacatctcattttgatttgaataataagcaatcttcaacaatgagaacatgtgaa

SEQ ID NO: 245203 - DNA, 403 bp, Glycine max
  unsure (1)..(403): unsure at all n locations
cttcgattctcactcaattcttcaccaaatcacgtcccgtaaagcccaatcttcctctttntcactcctctgtcacttccactgatcaaaatccagaaaaacttcatcaaatggcagagccatcaaagaagagaaagggatcatcctccaccgctaccgctgctgcccatcgccgtcacggcccatccggagcacccacaacacctattcctccttctttgtcatctccaagatcatcaacactgttttcatctgatgatcaacgtctacggtacctttctgagttttcttctagaataatcttagatcctaagtacctagacgtagagttctttaatgatgaaacgttcgattgctatcaagtgtttcacaactctggtctttgtgattcatgtcattaaaa

SEQ ID NO: 245204 - DNA, 401 bp, Glycine max
  unsure (1)..(401): unsure at all n locations
aggatatcaccttttttgtttgtttacgaaaaaagtatnttctttcttatttaattacccacaatttaaaaatgcttcataataaataaataaaatttaaaatcatgattaacaattcctatttatcccaataaaaaatgattattccatgatgactacccatgaagctgaaggtcccatcctatcagttgccattacttgatgaaaaaaattaattcatcgctaacaagactaagcaacttaaaagtacaattaagctagtgatattttaacccatttaaaactactcatcctatcacatatatgacatgccaaaacatttntttattactgattagaagtccattcaatataactaacagtcaatctcaccttatgtacgcaaaccaaaaaaaaaaaac

SEQ ID NO: 245205 - DNA, 404 bp, Glycine max
ggaaaagaaccatcttagcgcaccaaactatgatgccacacgagtacaaaggtagaagaatccatacgccaagtactgaccatgaatgttgacctgcttgcatggctagcctcaaacatgccacaaatagatcccgaggtctactattactggctagctatttgtctgaaggctagaccaattatgcaaataaagaagaaagtcgacacttataaaggaacgctctggatgaagaaacaaagatactcctgaatgcatgattcatcaaagaggtaatacaccacatggtgagctacacatacctaaacaaatcctaccctaaatacctatacttgctcttgagtatagatagcctagttgatggagcatctgggatttccatcctacggtatttaaatgcatat

SEQ ID NO: 245206 - DNA, 295 bp, Glycine max
cctgaaaccctctatgtaaatatgacagcctcatgtctgccttcctgataacccactaaaaactgtctaacccccctgctgttactccataatttattctacaataactacttaaggcagctacatatggtcctaaatcactacacattcacttacgaataaccctctgtgcctaattaaggtttcgaaacatcacaacagagacagaccattgaacaatggattgtatcatatcatacaaccagacatacctttatggaacgcagaccgaacccacaaacgcaacttacaatgt

SEQ ID NO: 245207 - DNA, 299 bp, Glycine max
  unsure (1)..(299): unsure at all n locations
atatggacttgttggggcccacgccagatgaaagcctcggaggatagaggtatgcctatgttgatgtggatgattactccagatatacctcggccaactctatcagagagaaatcatacactctttgaagtattcaaagagtggagtctaagactcccaagagaaaaagactgcgtcatctagagaattacgagtgaccatggcagagagtttgaaaacagcangctcactgaattctgcacatctgaaggcatcactcatgagttctctgcagccattacaccacaaaccaatggcat

SEQ ID NO: 245208 - DNA, 327 bp, Glycine max
  unsure (1)..(327): unsure at all n locations
ccccccggccctcttcctgctccggagagtgacggaagttatatgacctgctcttcttccctncacccctcctctccacccctattaagtgaaacacgcttattcaaggttatgggacatataccgaagcactacggcggtaccggaagccccgaaagcctcatttttaacaaaacgggggaggaggttgccaccttaagcaagataacgccccgaaacctggcccacattcgaacatactatctgccacccccattttacaaaatacactctctttgccccttatttccataacattacggaacctcacgaattacgtaacgatac

SEQ ID NO: 245209 - DNA, 363 bp, Glycine max
  unsure (1)..(363): unsure at all n locations
tcatgcatacgcacgtacatgcatatctgtcatcttgtgacagggacaagattgttctaagcaatggtcaaataccgcgccaaatccaagacagagatgggtcgaggtaagtggtaacgtgaccaagatttgctgcgcaatgtcattttctgctttcaagtacttggggacggngacgaatggatgctatgcccatgatcaacagatcgctatcctacgttcaacttcggacaatcgagaagcgctacagggaggcagcctagtatcctntatattcctacatattattatagttgtttctttaagatgataatctgatgcctaancttacccagggttttgagtaagcgaacaccaacctat

SEQ ID NO: 245210 - DNA, 167 bp, Glycine max
cccgggaactgtcggattatggaattagccacacatagctatggtcgtagtagaaaggttagatcaacaacacatggcgacgggtctccgtgatatagctgataataaacgcttactcttaacggataacacctgtccactatcaatactctaataactcccaacac

SEQ ID NO: 245211 - DNA, 230 bp, Glycine max
caatgtcattattctaatattctcttcatctgctactttctaccctgagcggatggacctttagatattatagcctgctggccaaacacccaaatgaccactttcattcataaccacttaagattgacttacctcacgaaagataactatttgcatgaccctgacctttacactttacatcaccagttatatttgtaatcccgtcctgtccaagaaatatatctcacctt

SEQ ID NO: 245212 - DNA, 400 bp, Glycine max
  unsure (1)..(400): unsure at all n locations
tttactcggaagnctgactaagacccgtaatatattgagacgctcaaaattgaatgttgaagctctgagccaattcaaacgacattaactttctactcggatgaatgattgagtcccgtaatatatcgagacgctcaaaattgaatgttgaagctctgagccaattcaaacgacaataactgtctactcggatgattgattgagtcccgtaatatatcgagacgctcaaaattgaatgttgaacctctgagccaattcacacgacaataactctttactcggatgtctgatcgagtcccgtaatagatcgagacgctcagaattgaatgttgaagctctgagctcaatcaaacgacaataactctgtactcggatgattgactgagtgccgtaatatatc

SEQ ID NO: 245213 - DNA, 426 bp, Glycine max
aagttatcgtcgtttgaatttgctcagagcttcaacattcaatttcgagcgtctcactatatgacgggactcaatcagacatccgagtaaaaagatattgacgtattaattggctcagagcttctacattcaattatgagcgtctcgatatatgacgggactcaatccggcatccgagtaaaaagttattgtcctttgaattggctgagagcttcaacattcaatgtcgagcgtctcgatatgttacgggactcaatcacacatccgagtaaaaagttattgtcgttcgaattggctcacagcgtcaacattcaatttcgaacgtctcgatatatgacaggactcaatcagacatcccgagtaaaaaggtattgtcgttagaattgcttagagctacacattcaattccaacgtctcgatatatta

SEQ ID NO: 245214 - DNA, 261 bp, Glycine max
acatggatttgatggcgcctatgcatgttgaaagccttggaggaaagacgtatgcctatgttgttgtggatgatttctccaaatctacctgggtcaactctatcagagagaaatcacaaacctttgaagtattcaaagagttgagtctaagacttcaaagagaaacagactgtgtcatcaacagaatcaggagtgaccatggtcgacaatctgagaacagcaggttcactgaattctgcacatctgaaagcatatctcatg

SEQ ID NO: 245215 - DNA, 284 bp, Glycine max
tgatacgcaccaattcatcaaacatgcattaattaaacaagcatctgattgagccgtacccaatcaaaaacattaaaaacatattagaagtgacctagcgctctataacaatataacaaacatctaaaatgtaacaaacagaacaaaggggagttgttgtttgtaattaatacgcaactgatagaaatacaaataacatgtgcccctgataaaacagctctatctagaacaaattatctaaagttaccctatcacccaatatgacaaaaataacacccgcatat

SEQ ID NO: 245216 - DNA, 305 bp, Glycine max
  unsure (1)..(305): unsure at all n locations
ccaaatgaaatttcagtttggtatnatgagccaaattcctactacttgtgaacaaaaaactaagaacttatgcctattggccacttattttgcgaacagcgtctcttattatgaaaacagcttggatagaagattacaaagttgggtatgaaggatctccctgatcaataacaagaaaggaggaaaaaacttaaaagtgatattcataattcgtggatgacattttagcatggaaatacaagcttaaatatattgagatagagtctatttgtttgggacgtgcttatgttatatatgttctatac

SEQ ID NO: 245217 - DNA, 406 bp, Glycine max
  unsure (1)..(406): unsure at all n locations
aggaagncctatctacgcaaggtcttacagaccatacaagtttcctaacgatctctaattatgtgggccattaagtctatcatatgctgacaatagccgagaagcccatgaatttcttcggaggcggagtaggtgtctgccatcgccttggccttggctaacaatcggggaagttcttgactcccgtncaaggtaagagcaaaccgatccatccacatggttgcctctcggtgaaagagtcgacactcttcctctagcctcttttccgtgatacttgggcatatcgccgcaatcatgccgtgggccgggtaacctactcttttggtctgggatgaactacatgttgttccgctcgataacgctaacaactctttcgacctgacagcaataactctttaaaacatgt

SEQ ID NO: 245218 - DNA, 410 bp, Glycine max
  unsure (1)..(410): unsure at all n locations
tcttctattnccagaccgtgaatgcctctaacagcacctttgtcaatgattctcttcatgcctcttaagtgcagatgtccaaatctttgatgccatattttgacttcatcttctttggaggatagacatgtggaggagtaactgtgttcttgaggtgtccataggtaacagttgtccttagatctgctagccttcattagaacttcactcttctcatttgacaccaagcattctgactttgtgaagtctacattgaatccttcatcacacaactgactgatgctgatcaagtttgcagtcagtcccttcacaccagtactttgtctagactaggaaagaccatatggactagtttcccattccagtgatctttcctttagagccatcttccaatgtcacatatctattgg

SEQ ID NO: 245219 - DNA, 306 bp, Glycine max
  unsure (1)..(306): unsure at all n locations
aaacanctttatcttgggaataacatgtagaatagttgttccatataaagtagtagtaagagaaacgtgtccaaaacaggcggcatatcaggagcgagaagggacaaagtaggattgttcctgacataaactttacctgtttagcaaggaagatgcagacaagtcagttcaagcacgcagcanaaatgcacaaatgctcaaggttagaanaggcagaggctaatgatttttatgtaatgatgcaatccttcctaggaagggaccaatcactataaccatgagcaagaggctccaagaagattggac

SEQ ID NO: 245220 - DNA, 303 bp, Glycine max
gtacggagattgaagtactgtgtagagggtgaatgcaatgaatgggagaaaatgctcagaggaagtaaaatggtaactgcctaaggtagttgccttatttgttggcagtttcaaatgactcgcttaacgcatggactcgctaagcaagtcaacatgacgtttgagttttaatgctcatacacttagcggatatgctcgctaagcccaatacaaaattatgaaattccagagaagttttgggcttatcgctaaagtacgcgctgggcgagttctgcagctgattggtttacaactctcgcttag

SEQ ID NO: 245221 - DNA, 361 bp, Glycine max
ctataccttagaccgaacactgtcgtgtttctgtctaagcccgggttcaaggcgggctgcagcaccggctccgcttccctaactgtactggacgccggtgcggcggctatatcctctatggctctctgaagctctaacacgaccttcgagatggaagtcatttgatcttttaaggccgatagatcggtctttatctgttcctgcacgccctcttcattatccatttttctggatcgagcgtataggggtgccttgatgttctcttagttatgatgaaatctctaaagaaacaaacaacggcgagtatgctaccataacatgagtatgcacatggatgatcggagcacttgtatccacccca

SEQ ID NO: 245222 - DNA, 350 bp, Glycine max
aacattctcttatcagtgatttcgaaacaaaaaatataatgatctaagcaaaccattcagataatatcagaagcaacaccacactcgatcaagcatgatctgaatcaacgaattcaaggacaaacccctgaataacacaaatcggaacacgatcacgaattctaaaccctaatcgcacgccatcaatcgacaattcacacacgacatgttcatacacaaacaacgcgcgcgagacttcaagattatcgactcacatgcaatcatttacagaaccagagaaagattaacggatgacaaatgcagatcatacgaagccagaaatgccacagatctgtgaatctgcaaattct

SEQ ID NO: 245223 - DNA, 364 bp, Glycine max
gtcacactgtttactccatctgaagaagactgtggttcattctttccagacctgtgctaaattagaagatgtaatgtaaacaattcctagataatattgatctcaagcagaaaataacatacgcgaggttaaattgacaagtgaaatactagtaaaggaaggttaaattgacaacgtaaaggagaaacataatcgaacacaagttaaaaattgtctgtcagcaacctcaacttacgagttagataaaaagcaagaggcactttactgtcgcatagactattgagccaatggccctttatagtaaacaacaacaacaatgaagtcttatcccactaagtgaagttaacttcatggatcacacaac

SEQ ID NO: 245224 - DNA, 433 bp, Glycine max
  unsure (1)..(433): unsure at all n locations
ctaccatttgggtcttttatatgcgaaaacacttcatcattcaagacacaatcttattccacttatcacatatacgtcaaaaaaagcaatctcatcgttttcaaatttatttctaatttctcagatctttcatatgtgccacttcgatatgttatacgatatacactattatgtctctcctttgataacggtacatgggaggaaataataattcatgccaaaaacacagataaatacaactaatttttttcttgcaaagtgacatataacaggatatggacgcaatactctgttttttatctggacactgacagatacgctcatngatttacatctaatgtcaccccacttccacttcccatgacaaaaanatgcgatcatctatccatactttcttgctcattgagattacctgggcacttcagtcaacctc

SEQ ID NO: 245225 - DNA, 363 bp, Glycine max
  unsure (1)..(363): unsure at all n locations
gtaaaagggatgccccacattattnccatgacacacatgcaaaaatgatgatttggaaactttatgcaaaactggtcatgcatgcacctatgtggacactcaagcgtcaaacttttatgctcatgtgatgctagggctcacgattcattccctctattatactcaacccaatgtttccaaaatatgttcttttatccatttgtgcattcatccgagtccatcttgggcgttcggagaaaattcactgcgttcacccttcgggtgtacacacatntttttcaaacaccagctatgatcggcgaatttncaaagaagagttggtagtcatccctttcacaacatgtcggctttcagctaaacaac

SEQ ID NO: 245226 - DNA, 208 bp, Glycine max
gctccttagacccatggctacccccctaataacacaaaataagtagttagataactcagccatcttcctacaacgtcactgccataattctctaactaaaaagcccccgccaataagcactcgaactaatattatatgactccacgtgattgccctacatacagtcttctggtaattaaatcacctactcagcttttagtccaaatcc

SEQ ID NO: 245227 - DNA, 422 bp, Glycine max
tttttcagatccatgctatgagctcgcgactggaccctttcttcccttcgcaacttgagttcattattgctaccccatagagctccgcgaaatttggtccagccatactctctcttgcgagccctcttggtctcttgttcaagggctcttgcggtaattgcattctcttcccgtaacccggcacactccttccgaacgtgtgtagcagccaacttgaacttcttcttggcgagttttgcctttcctaactcgcttatgagagcttggacttcttcgtcctcttcctgtgcttcagaattctcttcgctgacgaactttcactctggcgagccaatctaaacctcgtatgcgaactttcagacattcgcggtcccaccaatgatgccattacgaatgcctctaagctcttgatctttccttaa

SEQ ID NO: 245228 - DNA, 368 bp, Glycine max
  unsure (1)..(368): unsure at all n locations
aagaagcatgcgtaaaacttggtgttactctgatgaatgagagtcttgagagacacacttcaaagttcaatttctctccctctattcctncttcaatttcgagctcccccctctctctctttcttttcctccattgaagcttcctctctaagcttcttttccaaagcactctctaggtggtaaagctccttcttccatggcttattccctagtggatgacgcctcctctcacctcttctcctttatcttccgctgcatctccatggtggaaaatcaccattgaaggaccttattgaagctcanagatccagcctacatagaagcttcacaagcaagcttacaccattatatgtcgttgcttatacatt

SEQ ID NO: 245229 - DNA, 376 bp, Glycine max
  unsure (1)..(376): unsure at all n locations
cttccttcctgcgatgcttcttttcatgtccgcctgagtgggattatagcctaaaccatacttcccacgatttccttgggtttttatcaagctagttatgccgccattgtctttgcctaaacccatcccgggttcataaccgttccccaacataactcgggccatcattaccgccgcatcggacagacaaggttgcccaaagagggagtccacggaggaaatgctgaccacctcaaaagactgganagcggtttctaacgattcttctgcggcttccacataacgcatggaggatggtgcagctaccaagatatcttcctcgcctgacacgatgaccaagtgctcctccactacgaaattcaagcttttggtggag

SEQ ID NO: 245230 - DNA, 393 bp, Glycine max
taatatatatatatatatatatatataatatcctaatatttataccagatcatgcaaattaattagtgatccactaattcgatcattgatccagcgatctaataatgtcttaattgagtcaatcactgatttaatttttaaaactatggttgttggttccttatcttcacactaaaaaattctttgatacatcatctatagaaagtgtgagagtttgaaagaacaaaaactataattcatcacaataatcttgatatagtttattaacataattatgacatgtaaacttttatacataacagatgatgatgatataactataattagatagtatatatattatatcttgtactactctacacaataattagctctggttagtaggtctacttg

SEQ ID NO: 245231 - DNA, 345 bp, Glycine max
  unsure (1)..(345): unsure at all n locations
ccctataatgcaacgtggcggacaatagtgggcagttaactcgaatggtcatcattgtcaatgccaaagggattctgcgcttcattatccatgttcacacattattgcagcttgtggttacgtgagcatgaactactaccaatatatagatgtatgttacacaaatgagcacatcttaaaagcatactccacacagtggtggcctcttgggaatgacacggnaattccttcttctaatgatgcatggacacttattcctgacccaactacaattcgtgcgataggtctgccacaactaacaaagataccgaatgagatggattggctcgaccatctaccaccgac

SEQ ID NO: 245232 - DNA, 323 bp, Glycine max
acaacagggagtgaagattgctgaagaccctagccttgcaacaagttctatggaagtagacacggagatggacaagataatccgcagtattgtgagtagcattttaaaagacgcctctgttcctgaagctgatgaagatgttccaacatcttccaccccgaatgtctctgtgcctgatgttgagaaagatgttccaacatcttccggcccaaatgctgaagtactctgtctccccagctcagagagatcaacagaggaagatgatcaagcgacaaaggagacctcctgcaccatggcaccagaacctgctccacgtgacctca

SEQ ID NO: 245233 - DNA, 321 bp, Glycine max
cacgctgacggccggaaatacccgagtgagtatccgtataaactctatgcattctgtaagacgaaaagcctgataacacgcagagactaacatcgtcttctgcgaccttcgtcaatcgcggccgacaagcccgttgacacgtggagatttaccgcatcttccgcgctcacaagaactgtcatactgacttttgagtcacgctgacgggcggaaatacccgagtggttatccgtataaactatatgttgtctgtaagacgaaaagcctgatatcacgcagagactaacgtcgtctctgcgccctttgtcaatcgcggccgac

SEQ ID NO: 245234 - DNA, 412 bp, Glycine max
  unsure (1)..(412): unsure at all n locations
ccggactcatccggacatccgtgtataaagttattttcatttcaatttgctcagagcttctagtctcaattttgagcgtctcgatatattacccgattcaatcggacatccgagtaaaaagttattgtcgtttgaatttgatacgagctctcattttcaatttggatcatctctcgataaattacgacactctgttgggcatccgagtaaaaagatattgtcgtttgactcttctaagagtttccattttcaatctggagcgtctccatatattacgggactcaaccacacatccgtgtataatgttattgtcatctcaattctctcagagctcctagtctcaatttggagcgtctcgatatattacccgactcaatcagacatccgagtnnaaaagtattgtccgttgatt

SEQ ID NO: 245235 - DNA, 373 bp, Glycine max
atatatatcaagacgctcgaaattgaggaaagaagctctgagcaaattcaaatgacaataactttttactcggatgtcagattgaattccgtaatatatcgagacactcgaaattgtgatccgaggcgctgagaaacttcaaacgacattaactatatacacggatgtccaattgagtcccgtaatatatctagatgctcccaattgaaaacggaagctcatagaaaattcaaacaacaataaaattatcaaatgatgtccaactgagtcccgtaatatatcgagccgcaacgaatcgaaaacggaagatcgtaccaaattcaaacgacaataactttttactccgatgtttgattgagtctcgtaatatatc

SEQ ID NO: 245236 - DNA, 397 bp, Glycine max
  unsure (1)..(397): unsure at all n locations
agctcccttagggagcaagtcttacacgcctctcatagttaagctgacctncacgggaacacacacccctgcaattgtagagctacacccccagccaaaatacatgataatacaaaagaaaaagttcttattacaaagactactcaaaattccctgaaatacaaagctaaaaccttatactactaggagacctttaactcgtacggtaggctcgtcttaacttaaatggccaaaatacaaggcctaaaagaaggaatacctatactaatatttacaaagaaaagtggacccaaccttggctcgtgggctcacaaatctaccctgaggttcatgagaaccctatggccttcttcacanctctagcctaatcctcttggagcttctatccaatataccc

SEQ ID NO: 245237 - DNA, 259 bp, Glycine max
  unsure (1)..(259): unsure at all n locations
gccagacgctcatcactgaagacggaagctctgagcaaattctaacgacaataagtntttactcggatgaccgaccgagccccgaaatatatcgagacgctcgcaatataaaacagaacttcgtagaaaattcaaaccataataacctgtaactcagatgtctgatcgagtcctataatataccgagacgctctaaattgaatgcagcagctctgagacaaatcaaacgacaataacgcttcactcggaggtctgaatg

SEQ ID NO: 245238 - DNA, 341 bp, Glycine max
  unsure (1)..(341): unsure at all n locations
acatttctggatcattattattattagcattataataaaaacagctattctgctaaatgctctgatgtagaattntgataataaggttttctaaatgtagaataagtcgaacctaatgcaaataaccattctattttattctgtctaggttctcctcttacaccgctcacctttatttgtatatcttttattctctttgtagcttgtacatgtttacatcttaaaaaaattatacaaagaatgaagacaatcttcatgaatttggcatgcaatgatgtcattgaactcaanatgaatgaaatctcagcataatatgctgttcatctgcccataatatgtca

SEQ ID NO: 245239 - DNA, 490 bp, Glycine max
  unsure (1)..(490): unsure at all n locations
acactaataccatgtccaggcccacatgttacatttatgatatttacttctttgctcccatcacccagtgatatgcaatcatcaccagtgccgatttgtgagttagtaatcttcacttgagttgattttccaatgtgaattccatcagtattggaactaatatgcaggtgagctaactctgaagtttgtaaatgtaatgttcttgcacccaaaaatattcacatgaaaatatttgttatcctttgaagatatgtccataattattgaattattgacaaagcccaaaccaaaattatgcggaaaatattaccaaaagtacataatagttaattgttaggaaatgtaatcaaaatgcattagtacatactaattncaatatatattaagtaaatacttgattatattnaccatggcaagtttcttgcaattcttgtaatttgctgaacacatatttgttccaagccattttttctcgaccatgaaaaagtca

SEQ ID NO: 245240 - DNA, 391 bp, Glycine max
  unsure (1)..(391): unsure at all n locations
caaccctctgggagatcgggcaacctccaagccaagaanaatattgaagtgcacctaaatctttgattctaaactcttgacccaagcatcccttttagggatggaagggataacttacctttaaaataattatttcaaaataataaatagttgtaagtcggaatttttgtcactatattctaacaaaactaaaaattaacttctggcgataagaataatacataaataaatantatattatctatgcgtagtattgtcatatgtaaccaanagcaacccatcattaatatcatctacatcacaatcatacttaaagcgttaaaaactttaacccttgataattaaataagtcacatttatctttaaatcttttgagtattaaattctattt

SEQ ID NO: 245241 - DNA, 409 bp, Glycine max
  unsure (1)..(409): unsure at all n locations
ggtcgataatgcaatggtagccataaccccagccaaggttcctcaacctccattttttcgaggatacaactcgaacacaacatgtgcttatcatggaggagtcccggggcattccattgagcattgtataaccttgaaacataaggtgcaaaacctgattgatgcgggctggctaaaatttgaggaggataatcgctcgtgaattttgacgttggcaagcaacgctatgcatggngtaatgtgaaggttgttgttagatgtctccaatgactcattangattttcaaagttatgtcattactgtaaacaacagtcacaatgctaataatatggataaatttgatgtctttcattctctcacagntacanttttgcttattaacttccactagaatgtgagtgtagctat

SEQ ID NO: 245242 - DNA, 348 bp, Glycine max
  unsure (1)..(348): unsure at all n locations
cacctctcaatgagctngtgaagaagaatgtggcattacctgtggttaaaacaagagcaagccttcgctttgctcaaaggaaagcttactaaggcacttgttctagctcttcctgacttttctaaaacttttgagctaaaatgtgatgcctctggagtgggagtcggagttgtattgttacaaagtgggcaccctattgcttattntagtgaanaacttcacaatgccacccttaactacctcaccttgataaaaagctctatgccttaataagagccctccaaactcgngaacattaccttgtttccaagaaaattgcattcatagtgatcatcaatcacttaatta

SEQ ID NO: 245243 - DNA, 456 bp, Glycine max
  unsure (1)..(456): unsure at all n locations
agcaggtgtgcaagtgataatatgctatttacaagnaataacattactacaacagtactaatgaaaaataaacaaatcacaacattgctaataacaagtaataacattaatgattccttatttacgtgttatatactagtatttacaataattttacaggtgttatatacttattctaattaccttatttacgtcgtatatacttattctaattatcttaattactatatttatataaaaaatgttatctctattcttttacatctaacaaaaatattcattattcaaactcttattctcttctgtatctcttggattaatgtaacaatgaataaaaaattaaattgctgtaatatgtatccatacgtgacattatgttcttacttgtgtcttatttgactaacatttcgttatattaatacaaattaagagagacatcttgtgctctatcttatt

SEQ ID NO: 245244 - DNA, 352 bp, Glycine max
aatttgattatcctgctctgatgaataggaagcctgcggaaaatggagagaatgagatggagggaggaacccatgctgtgactatcgttcctacatggccaaatttcccaccagctcaacaatatcaatacttagccaatattagcccttctcattacccaccacactatcaaccaataacattcaattatccacaaaggccacctctaaatcatccaataccaaacaacaaccttaacacataccaaaacaccaaccagtgaaggaattctccagcaaagaagcctgtagaattcactccaattctagtgtcgtatgctaacttactcctatatctactcaataatgcaat

SEQ ID NO: 245245 - DNA, 333 bp, Glycine max
  unsure (1)..(333): unsure at all n locations
gctaccagtgggacttcgaaaatncaggtttgggtggacttctatctctcttaaatttcgtgggtatgggggtttgggagatatggcgggtagtcttgctagttttctacttcatgatggttaattgtgaagactcttgttgaaagcttgctgaaattgccatgttggatgagttaaacatacccattatgttttaaggttgttgcgacgatgttcgtgatgtttatatgctgaaattgctgatggaacattgttagacatgaacggtataactaacctacggttacaaagtgagaatgtgatgttatgagtggaaaaagagtgaagctttga

SEQ ID NO: 245246 - DNA, 360 bp, Glycine max
  unsure (1)..(360): unsure at all n locations
acacatgtccaaccatctgaatgcttatctcanaagatgctataatctgggtgtgttgaagtgtcatcatgttgttcattgctacccaaacactgcataggtcaccaagggagttttgtaggagtctctttaatgaccaatgagcactctcaaccctacaaatgaaatatacaacaatgtataaacaactacaacattttcatttaagtcaacacttaaacaaatcaacacaaacaaaaaacaatattcatacctgttagtggttgtgtttcctagatgcatcactntgttggtccatgctttcacaagttattctttgtgtgaaatcactcgtgtntgacacacatagttcacaaacat

SEQ ID NO: 245247 - DNA, 455 bp, Glycine max
  unsure (1)..(455): unsure at all n locations
tacccctcagccaaatttaatttttctgtggccttttcccacaactctcataaatgggagagaaatgttcatctaaagcatacaagtccctaatattatcaaatcctaaaatttgagctcctatggagcaaaacaatgtctgtctcctagagagggcattagctaccacatttgtttttccctttttgtatttgataacatatggaaattgctctaggtactctacccattttgcatgcctcttgtttaacttgctttgccctctaatgtacttaagtgattgatgatcactatgaatgacaaattccttggaaacaaggtaatgttcccaagtttggagggctcttattaaggcataaagctctttatcatatgtggngtagttgacggtggcactatgaagtttttcactacaataagcaatatggtgcccaccttgtaacaatacagcttca

SEQ ID NO: 245248 - DNA, 334 bp, Glycine max
aggtctgtgtggtggtaggcagaggagcataaaccatagagtctgtcgacaggtgcagatttttgattcacggccagttgggttaccaggttaaccaaggcatttagtttaccttcaagtttcttagtctcggctgatgaagatgaatttgtggttacttcatgcactcctctaatgacaataacatcacttttggcactaaattgctgggagttggaagccatcttctcaattaaatttctggcttcagcaggagtcatgtctcctaaggctccaccactggcagcatttgtcatacttctctccatgttactgagtccttttataaaatatt

SEQ ID NO: 245249 - DNA, 331 bp, Glycine max
gtggtacctggagatatgtcgcgggggtcaggagaccttgtggacgtcaagtggggtgctattgcccaaaaccaagcttgaccaatcccgacccaacccgggcatagtcagtcagtgagaacctgtgatgtacctaaacaagcgagctcctggcagtcaacagataaaaggaacaaagaccacaaagctaggaggcttgtgtggtggctggccacctatgaatcttgtgtgatatatgggttatggcctctggtaatcgattaccaagggtgggtaattgaatacaaggcttaataatgaagacaggagactaagatggtctctggtaatc

SEQ ID NO: 245250 - DNA, 416 bp, Glycine max
  unsure (1)..(416): unsure at all n locations
gtgaaacttataatgaggtaaatttgaagcaaactctcacctcacacaagtccataacatcaatctaaacttgcccaaactggatttacacctaaaattccaccaaatcaaaatttgactcttcaacacccaattttgccctagaaatggctcttggnnnactttggtcatttgtttntctctctagctcagcctaacctttctcacatgttctaaatgaaatttcaagctagtattaactcactctaacctccatttaccacagaattcagacttagcctctcaactctcaaagtctcactctttttccactcataacatcacattctcactttctaaccttgggttagttctacccttcatctctaacagaattccatcagcaatttcagcatatagacatcacaaacatcatc

SEQ ID NO: 245251 - DNA, 349 bp, Glycine max
  unsure (1)..(349): unsure at all n locations
ctacgtgggggtgcgtgagctcanttgaaggtgggcaactctggatggtgggttcatgcttgatttgtggatgtgggagagttgatttgtaccatctgccgatcgccacctattaccacatatgacgggtaccccataatcctacaagcttgaagtgagaaagcgtggaagagtcaatcttcctacttttatttgttgaccacagagtggtacctggagatatgtcgcggaggtcacgagaccttcgggacgtcaggtggggtgctattgcccaaaaccaagctagaccaatctcgactcaacctgagcatattcagtcagcgagaacctgtgacgtacctaaacaggc

SEQ ID NO: 245252 - DNA, 312 bp, Glycine max
  unsure (1)..(312): unsure at all n locations
agtcaccgctgtatgagcgttgtacaccagcagcgtttctaagccatctagggatggtcgtttctccgagagcgacgcgtccagctcagggaggacgagtatactgatttccacgatgaaatatggcgccggcggtgggcaccactggttactcccatggccaagtttgatccagaaatagtccttgagttntacgccaatgcttggccaacagaggaaggcgtgcgtgacatgagatcctgngttaggggtcagtggatcccgttcgatgccgacgctatcagccagctcctgcgatatccgatggtattg

SEQ ID NO: 245253 - DNA, 428 bp, Glycine max
  unsure (1)..(428): unsure at all n locations
gcggattatagttatgttttattcgagagacgggacattngggttagtatggtttaactaagcattttcctatctatattgccaattataattaatttcacgacttgtaagagcaaaatgtgttattagttattattactctcaaacttatgagactcactcattggttntctccctttctctttctgcagttatgttgcaccaaagtatgcgtgcactggaatgctgactgaaaagagtgatgtgtatagtttctggatacttatcatggaattaattactggaagaagtcctgtggattatagtaaaccacaaggagaggttagaaatcatcacctacacactcaacaagtttgagatagtcattttatactattatgcagtcttctctcgtctcctactgtaaagtggaatattcacgtatctat

SEQ ID NO: 245254 - DNA, 443 bp, Glycine max
  unsure (1)..(443): unsure at all n locations
gcttccttcaagcatgccacgaatggatgcaagccattgcacttcattggaaacttcccaattcaattcattttagccgtgcagtctcttcgcatcacctacaaaatgacatttactaggaaaattggaggccttcttgaggtttgtacccttggtttccccacactctcaagattgtctgtgtataacaatcatctanttttgttgctcattcaacattacattatgtgtgtattgttacaacatacaggaactccgtcttcccaaagcaagaattgacatggagtgaaattccatcatggtctgtccctccaaaatatgtagtcccacctgagatgcacccacatgaagttgaatgctgttcgttagacctaatggaanggtgttatcagctccaggatttacctaccatggagccatgttatatatatatatatattctc

SEQ ID NO: 245255 - DNA, 285 bp, Glycine max
ataggacacacatccgattcagaggacactaaatatccttccattatcagtatttattgtcacgaccactatataatagagcatcccgtgagtactctgacactacactttcagtcaatcatccctttatcatttctcattatacaagatctaaagaaaaacttgtccctttcatatgaactttgaacacttttaagttgttgtatgttaatccacaaatctgtatccataacaccttatacctttctccaatactgacaacacttaccaacaatttgataatct

SEQ ID NO: 245256 - DNA, 367 bp, Glycine max
ggagcacacactgaaagaataaaagggagagaagtcgaactttgtgctgggtctcacaagactctcattcactaaagttaccacatgcgtacacaagcttctatctatagactatgtagcttcctcgagaagatatcctttgagaaaacttgcttgagaagctcccttgagaaaacatccctgagaagctagagcttacctacacacacccgtcctataactaagctaaccgacttgagaagctttcttgagaagcttgagctgagctacacacacccctctaaaactaagctcacctccttgtacagagaagctagaacttaactacacacccctatgatagctaaactcaccccaccgcagaata

SEQ ID NO: 245257 - DNA, 326 bp, Glycine max
  unsure (1)..(326): unsure at all n locations
ccttcttttgtgggggataatgaaatgtttacagcccatgcacctcaacaacatgagctagaaccagaaaacgatcacttatctgaagccatcatccctggagctcgtgatgtttcaacaagaaaagtagagacgagatccatataggctgctcatcctgnaccagtgctagtactagctgatgtaccatctctagggatggatccatctttacctcagcatgcagccgactcttccactcgtatcttagagatacctgaaggccagatcacaccaggcttggctctggacacttctctctactactccagattgctctgacagat

SEQ ID NO: 245258 - DNA, 346 bp, Glycine max
gtaacactcgcggggactttgatgaatgagaatcttgcgagacacaactcaaagttcaacttctctcccccttttcctccttcaatattgagctcccctctctatctttctctctctctttcttttcctccattgaagcatcctctccaagcttcttatccaaggcacattcttggtggcgaagctccttcttccatggcttattccctaatggatggtgcctcctctcacctcttctcctttatcattcgctgcatctccatggtggaaaataagcaatgaaggacctcattgaagctcaaagatccagccctcatagaagctccacaagcaagcttccatcatt

SEQ ID NO: 245259 - DNA, 262 bp, Glycine max
acacccctcttatgactaagctcacctccttgagaagcttccttaagaagaattctaaagaagctagagcttacctacacatacctctcttatagctaagctcacctcctagagatgagaagctagaacttagctacacatcctctataatagctaagctcacccccatgacagaaaacatgacaatacaaagaaaaagtccttactacaaagactactcaaaatgccctgaaatataaggctaaaatcctatactactaga

SEQ ID NO: 245260 - DNA, 336 bp, Glycine max
aagagagagggaagagtcctgggtgaacaaaacgctccctctccacccctttatattttcgtacaagggttgctcgcccaagtgagctcagctcgcccaggcgagctaacctgtacttttttttttttttagaaacattaaccatgccttccccgcttacgggttagcgtttgcctactcgaacctacttaagtaagaatcacgcgtcgattactctatttaaaacaaataatagtaataaaatactgagaattctaaggatactggacttgcatgcagcgactctctttacttgtctagcggcgggaatggacaacggtcgagcatgaccctatc

SEQ ID NO: 245261 - DNA, 400 bp, Glycine max
ggtccctcaacggggaagttccaccatggagatgcatcggaagacaaacgagaggaggtgagaggaggcgccatccgttaaggaataagccatggaagaaggagcttcaccaccaaaatgagccttggataagaagcttggagaagatgcttcaatggaggaaataacagagggagagaaagagggaggggggagcacgaacatgaatgaagaataagggagagaagttgaactgtgagttgtgtctcacaagactcttattcatctaagttacaacaagtgttacacatgcttctatttatagactaggcagcttccttgagaagatttcttgagaaaacttccttgagaagcttctgtgagaaaactctctcgagaagctagagcttagctacacaca

SEQ ID NO: 245262 - DNA, 292 bp, Glycine max
gtgtgtgcgttttcttgacttgggtttgaaggagagaaattttgggaaaaactcccctccaccttattttcgacagggtgctcccaatgactcactcgccagcgactacctgtcttttttttttagaactaacatgctcccccctagggtacgttgctctcacctctaagtaaatagggtcatacttattaaacaatatagaataaaactggaatcaaagatctggactgcatgactacgtttctcttgttacgccgagggacacgtcgcatacctatctcattgctcatct

SEQ ID NO: 245263 - DNA, 228 bp, Glycine max
cagcggaagacaaaggaaaggaggcgacaggaggcgccatccgctaaggaataagccatggaagaaggagcctcaccaccaagatgagccttggataagaaagctggagaagatgcctcaatggaggaatagaaagagggagagaaagagggaggggggagcacgacatcgaacgaagaaaaagggagagaaggcgaactctgagaagtgtctcacaagaccctcatt

SEQ ID NO: 245264 - DNA, 420 bp, Glycine max
  unsure (1)..(420): unsure at all n locations
caaagagagaggcgggagcactatattgaacgaagataaatggagagaagttgaactttgagttgtgtctcacaagactctcattcatcaaagttacaacaagtgttacacatgctcttatttatagactaggtagctctcttgagaagctttcttgagaaaacttccttgagaagcttctttgagaaaacttccttgagaagctagagcttagctacacacacccctctcataactaagctcaccttcttgagaatcttccttaagaattctaaagaagctagagcttagctacacatacctctctaatagctaagctcacctcctngagatgagaagctagacttagctacacaccccctatatanctaagctcaccctcatgacanaaaaacatgacaatacaaaaaaaagtcctac

SEQ ID NO: 245265 - DNA, 366 bp, Glycine max
cacttgttataactttgatgaatgagagtcttgtgagacacacttcaaaagtcaacttttctctctcttttccttcttcaatttcatgctccccacttctctttctctctctctgtctttgtctccattgaagcttcctttctaagtttcttatccaaggcactctcttggtggtgaagctccttcttccatggcttataccctagtggatggcgcctcttctcacctcttctactttatcttccactgcatctccttggtggcaaataccattgaagcttcatagaagccctcatataagcttcacaagcaagcttccattataggatgacaaagcatttcatcccaatttgatattgaacctta

SEQ ID NO: 245266 - DNA, 251 bp, Glycine max
ctctacaaaatttcttaattcttaatacatttactaatgctaacgcaagcaacagagcactaaattagttctttccaaatgcttatgcaatgcaagcaaatatgcaattcatacgcagctcatctccgccttcgggcataacaacggcaaagagtttaaacttatgcacatacaagaacacacaaatcgaaggaaatacaccatagcacttcattaatcatgaaacattgcagacaattaatcattaatca

SEQ ID NO: 245267 - DNA, 351 bp, Glycine max
  unsure (1)..(351): unsure at all n locations
ctcattaatgtatcatcttgtggactctnacatcatcaatctctcagggaggttctccaaaatcgttttccccttacagaaacgggacaacgtgtccatttgaacaatgggaggaacttcttcttcatgctacccaacaatcaaatttgtgctatttgggttgcctttgatcatcataaaacgcttcgccttttcacaacaatatntgctctacgagcgtgcttcaatttcaatgccgagcgtttactcctctgcccttctcatccaatagagaggaggttcttagaagtttttgatattcataattgggatcgtgtggtgaagaataatggaacatattcaaatcatgta

SEQ ID NO: 245268 - DNA, 208 bp, Glycine max
tgcgttcaaattgaggatttttgagagtgaatggtacttaattcttacactctacttgggaaattctcatacctttatctgaaattttcttaataagatttatatatttatgctctttgctaaatactgtataatacaacgctattatcttattacatcatccctcctgactctattgactccttgcttacctcaataaacacaaatt

SEQ ID NO: 245269 - DNA, 368 bp, Glycine max
gaaaccatgaaacagattgcattgtattacctgtatcaatgaacgtgggtaagttaagttttgtgcctgaacctctggccacgcaacacttgagaaatattgcggtttcgaagatcttgagtaatcttccaagttcactcgtcgaggttgctcttcaaccatgacttcggattcaaattctgctgcttgagattccccgaatgtaggtgaatcagaagatgatgactcacaaaagtaagcctcttccatgattggtgctaatattctgtccagcaaaagctcatcttttctttctacgtaggttcttctaaaagtggcttcaatttataaatcccatggaaccaattcacctgctgaggatctacaca

SEQ ID NO: 245270 - DNA, 244 bp, Glycine max
cgccctaggctcctgacgtacactcgattgaacctcttcttaacgcgaacgcatcttactagatcccatgttctactatagcgaaacacaatctatcgcgaatcaaactctgaatttatcatgggtggaatggatgaatgcatgcaaaaatgcatatgacatcaaatgctatcttatgaacactgtgagcctgggagattgtctcattcctatacacaacatcttggggtaccaaagtgcccga

SEQ ID NO: 245271 - DNA, 245 bp, Glycine max
  unsure (1)..(245): unsure at all n locations
acctacgtgtgaaagaattattgaaggagtttgaggatgtgcaagaattattgaaggagtttggggatgtcttccccaaacacacccctcattgtttacctcctttgaaaggaataaagcaccaaattgatctcattctaagatcttccttaccaaataagctagcatatagaagcaatcctcaagagacaaaagagatccaacgacaactggagagctngatggaaaaaagatgggtgagagaa

SEQ ID NO: 245272 - DNA, 326 bp, Glycine max
gactttttttgttctacccttattgggctgggtcctaacatgcattgcacatttattttaaaattaaggtaaaatatataaaaaataaattaagatagaaaaagtatgagagatctggtttttgaaacgagatatgcataattaatttaagtagaattttaaaataatagattaaagaggggtgggggggggggatatgcataaatatatgaagatatgcataatttatgcaaaagaatttaaatttataatttagaaacaaagaagttaacgtgacacttggtttgagtatttttcgttttcatctcaaagaaaacatcaaataa

SEQ ID NO: 245273 - DNA, 260 bp, Glycine max
  unsure (1)..(260): unsure at all n locations
ccacaccaagctcanacccaccacgatacatctcaccggcgagcctttgagcttcatcgagcttcccatcaacgcaccaccctttgatcaacatatcacacgtggcttcgtcggagaaaaacaccttcgccaaatccttaaccgatttttccgcgtaactagcgaaacccttcgaacacagcttctccacgaccatctttaaggaagcacgatcgcgcttcagcccgtagtctctctccattcgctcgaagaactgaacc

SEQ ID NO: 245274 - DNA, 330 bp, Glycine max
  unsure (1)..(330): unsure at all n locations
agtgctgacacatgaagttctatataggctntcctagcttcatatctgcgtacgtcctttcgaattctcctagcagcagcctcccttctcaagtgctcatagagattacatgcaagtcttcctacagatntgagaacattattcaaccacggaaggcatacaatatgaaaaattgactgcatgtatcccaacaaatgaatcgggatatttcacttttgaaacactttacctctccaccgagactgcacatatatgctcttcttcgcaatgcaagatactgtttacgaacttgatgagttcgtatacgccgctggataactttgctgcata

SEQ ID NO: 245275 - DNA, 242 bp, Glycine max
  unsure (1)..(242): unsure at all n locations
gaccaaaanaatctatctcatggtctacccaatgaagacccttatgctcacttggccacctatatagagatatgcaatactatcaggctggcaagtgtgcctgcagatgcaatcaggttgagtttattctcattttccttagctggagaagctaagagatggcttcattcttttacaggaaacagcttgaagtcttgggatgaagtagtggaaaagttcttgaagaagtactttctctgaat

SEQ ID NO: 245276 - DNA, 360 bp, Glycine max
  unsure (1)..(360): unsure at all n locations
ccatattatccacgtccgttgcctcaatcggctttcatatgctactcatagtcaatcaatagctattgctccaacggctaactcttatgggttaacgtaactgcccctctttttctgagttgtgtgaaaattgaattctatgtccttganagacgatacgagaataaccaaatgatgaagaatgtctgaatctagcaaccatattttggtttaaaaatcattccgctgcatctcctattctcttactttgcaccgacttgacctttcctataatattacaacttctttcttccgcgccatgtaaaaatccaccaactatggacgctcgagaactatttgagtcatcttagcaactagcct

SEQ ID NO: 245277 - DNA, 313 bp, Glycine max
tctctgcggctgacatgaacctgtatgactctctatctcttatggctcttctattctctctatgctttaaattgacctaaggttcaaatttgattttgtttgacaacatgatctgtttacaaaaatagtttttattgtctaatgttgttattgcgaaaatctgttatctgattttcaaacgtactttacatgatcaccttgtgttcgcaaaggctttaacatttctatagcacaattcactttctttttgtgaatctgctttcatgaacatacttcacataaaccatgtgtttgtcacagaggctatcacaca

SEQ ID NO: 245278 - DNA, 371 bp, Glycine max
ttggacgatggcaagatggatttcaaaaatctgcactttatgcagaatctcgctgtcacatatgtgcatcagaatcttggactgtgcagaaaacgctcgtgtatggctggtggtggaaatggtaatacatatggggttctggacatttgctagcacatcccaacggtcaaaatgtagacctatgtactacggactcccacgatactgttcgagtcgatctcacggctaacgaattggtacgaacgaaacgttactggcgtctctaagtaacgaaagttgtgatatcggtttgtgtttgagcacagatatctgcctttgcctgtttcctggctgtgtaaatcatgatcttgatgctgaataccttgatgttg

SEQ ID NO: 245279 - DNA, 413 bp, Glycine max
cccataaaatgaagtcattatgatgtatgcatggcaaagaggaggagactgctccagcaacaaaagcaaacaaagcattcccgtcaccatagatccatatagatatatctgccaaagataatatgtatttaattgatggaaactaaagtataagaaaattgattttcatatgaaatcaataagaatcaattatcttcagctaagaatattaatcaaccgactttccatataattcataaatattctttcgtataatatgtacatgcttctccataaaatatcttggtcctcttgatgtaatacgcagctcacaagaaataaagaaataacaatttggaaaagctaagcttacacaaacattatctttccacggctatttttctgaactgttgctccattccaaagcatttctg

SEQ ID NO: 245280 - DNA, 301 bp, Glycine max
tgcatttccttctcataactcggcacactctttccggatgtctgttgcgaataacttggaattttctttggcaagtcttgcctttcctagttctgcttttagagcttggacttcttcatcctcttctggagcttcgaagttctcctcgttgataattctcaacttggagagccaatctaacccccgtgtacgaactttcagccattcgtgataaccaccgatgatgccattacagatgcccctaagttctttatcttttctgaacgggcttgcccacgccttgtagactctttatacaatc

SEQ ID NO: 245281 - DNA, 365 bp, Glycine max
  unsure (1)..(365): unsure at all n locations
gcttcactaatagagacatgaatagattttctgatgtcaactactagatttctactcatgctatgcacaaatgatcatgtattccttttatgtgttaagggtacatataacataataattaagttaaaaataaacacatgctttttgatcaaattattaagagtagaagcattggtgaaattttaattagaataagacttcatactaaagcaataaaggaaggtaaatatttcatcaaacacattgtaagcaacttaatttcacataactaaccatggcatatatctcgcacattntcaccaagattggttctctgataaaggctctagttcattgtagccataaatnntaaagctttcgttata

SEQ ID NO: 245282 - DNA, 339 bp, Glycine max
tgacccgaacacaaacgagggcaggatttgataatattgaagtctgagaattgtatcgtatgtaacacagaaatgatgtgacacaggcagcatgaatgaattgtcgcgaaccacagtatgagtatgagaggaatgttcctcggatgatacgataatgatgacacaagggcgaagtgtgtatagagcgttagagtgatactgctggggattgcacacaactctaaggcgttggttcctgctgcggcgtcgggtgtgttcatatgagcaagcttcgtcctcacatagaaagggcttaagcacgctgcacccaccgcactcgtgcatgagttggcggttttc

SEQ ID NO: 245283 - DNA, 423 bp, Glycine max
  unsure (1)..(423): unsure at all n locations
tctggcttcaanncatcagcgggctctccttctgtgtccagcatcttgggatgatcccagcctttgatgacagctttccaggttctgctatccagcgatttgaggaaggccaccatccttgctttccagtattcatagctggttccatccagaataggtggactgttcactgggcctccttctttctccatgttcatcagaatttatcttcctagatctcactcagagatttcgagtgcccgctctgataccaattgaaattctgaaactggggacagatgtcgtacatgatgtcacgacatcgcgctttagaacatgcagattgtatatgactcgatgaacagatcaaacacgtaaataacacaagtgaattggtaacccagttcggggcaacgtcacctacatctgggggctaccaagcca

SEQ ID NO: 245284 - DNA, 215 bp, Glycine max
  unsure (1)..(215): unsure at all n locations
gcgaggacaacagtggtgagaattttgcactgctgcactacataaagtgccccagataagttctcaaagctatttgttgacacagacagaattcaaacggaagtgaggtttgcataactctccgngatntggccacttaattcatttttagcaaggcttaacattgtccattcatggcaataggacaaggaatctggaacggatccattaaaatg

SEQ ID NO: 245285 - DNA, 333 bp, Glycine max
aaaacactatatatgtattatgggagacaatccatctggctaatgaatccaaaagaaaccttaattatgcttttaattatcggctttaatctataatatgttacatcacttacatgcattccttgttcaagacttctcttaaggtatggttgaaagtcagaattcatcgataaacaagtgtgcgactagatcaatgttcataaattaatatcaaatgagaaataataaatcagatctttgtttacacgtatgaaaatctatttgatgattctttaataacgtgctatttagtctaacacaacgtattaaataacaatagccggatacttaagc

SEQ ID NO: 245286 - DNA, 420 bp, Glycine max
aaagagacaatgagtctctcatattatctgtgcctaatcctagtgtctcaaacgtctagttctgacatctgcaaatgaactaacttttcaaatagaaacacttgaaatacgtgtctgcacaaaagaatgataaaatgtctgttgatctccagaatggttgaagtaatcacttataaagccactgttaaagacaaagacatcttggggataaaattgaaaacaagtggatgtcatttctgtctggcccaaactaattaataggtattgaattagagggacaatactaccttgctatacagaacagctatgtaacagcgtttatatcataccaactaggtgcacagtgcactgcagagctaataaatcttatggaatcctgaaataaactactttcacatatattcagtgtcatgaagcttg

SEQ ID NO: 245287 - DNA, 267 bp, Glycine max
ataattcaccattatccgacggaggggaacacgcaacttgtatgactgtgcaatcattcaaaaatctggacatgtgtgtacactttcctttctaatggtatcgctgcaatgctacaaaagaagctctcaagaagagaaaactatccaacgacgccacttattattttatagaagctcacagatcaagtcagtctgtatatttatcaaatcacaggctctcactgaatgatggcataacatcaattcgcacgctatgacgaacgaccc

SEQ ID NO: 245288 - DNA, 337 bp, Glycine max
acaacaatgggagggcaagaatgctctagcatcttggacaacactctcaaaacaagatccaatcgtttgtctttaaacagactattaaataaagagctcgaggtatacaaatttggactgtatgcacgctctgacatctatacaaacacctcttgtgcattttcaagttgtccggtcttgcagaacccatctataagagcatcatagactatttggttaggctcacaaccctgaattgacgtggtatccaataatacacgggcctctgtaaccctggttgctttgcataaaccatccaccatagccccatatgtaataatatctggagtggcacaat

SEQ ID NO: 245289 - DNA, 265 bp, Glycine max
  unsure (1)..(265): unsure at all n locations
accacggagcataaatctaatattacaacaaacattagattaacacgaacaagctgcacatgcgaatacatgacttggaaacttatgagttagaattgtacctcaagcagaacatcctttgactcatccaagacaatttcatcaaagttattaccaacaactattntcacatcaccatcattctgtcatcaagtaagaaaacatgtcagacatgaaaattttggccaatggaacacggactgataacaaaataacttacgctttc

SEQ ID NO: 245290 - DNA, 267 bp, Glycine max
  unsure (1)..(267): unsure at all n locations
ataactatacacataggttttatttgatcatgctcgaacaagctctggtcaatatacttacgaatcatagctacaaccttccgattaaggagctcacattcgttgtccttcttcccctctgacttattctcatgagtgattgactcgtgtcaatcantgcagtacatatggtcttccatcatcgacttccaataagaatacatctctgccgttagcttgaacatatccccataatgagatgacaactcctccatcttgaatcacaca

SEQ ID NO: 245291 - DNA, 351 bp, Glycine max
aacatatgtgtttaagtggagggtgcttacaaacaacattggtgccttacaaacgcacatctaacttaaatacaatcgccgttttatctcaaaagatataacactattgtgagaattctgtacaactcaaattttcttactggatcaagcttaaaggtaaaagagaatacaaaattaaatatgagtaagttgttctaacttcaactattcaaagctcttagatttatagaggtcatcaacaagtagctattatatctaaaagggattcggtgtgctattaatactgagcttgaaaacagatttataacgttataaatgcacattactctctgttgaacaccactctactta

SEQ ID NO: 245292 - DNA, 401 bp, Glycine max
  unsure (1)..(401): unsure at all n locations
tccagccaagcacacagggcaaaggcagaaaactctggccaatacaccaaccaaaatcacagctcttctcacttaaagaccccagtaacaattccttcattccagatcggtaacccgtggatcgactcgcaaaatttactggaagactctagtacataaacctacattttgaccgctgggatctgctagcaaacatccagaactcattctgcactaccctttccacaaccaaccacacacaagcatttttctgcacaaagccaaaatcctgctgcacctatttgacagcananncctgcactagtgcagacttcgatatatcacacttcnctnatnnaannnngnccaatcaantcctacaagtcccaaatcatgtatcaatcatgtctaacaccaagtca

SEQ ID NO: 245293 - DNA, 320 bp, Glycine max
  unsure (1)..(320): unsure at all n locations
tccaccccctnccgcccgcgcgaactcagagtgcctttttttcttgacacgacactttgtgaaaaatatctctccttagtggacacaaataataataaaaatctgtaacctcaatcatctttaattacctttatatgctgcaaataagaaaccgctctatgctaccaccaacttaaacactgcttctaaccaccagaaaatgatcatattataacttcaaattcaccattacatttaaactgcgacattaccctacactgacccattaaatgatgagaatatacctgttaccggatccactcagggttaaagacttgatt

SEQ ID NO: 245294 - DNA, 336 bp, Glycine max
taaaacaaacttaatggctgagtgtaacatgaaattgtggcaaccaaaagttacccccatcagcctaacaagttagccaccatgtggtctcccataaagctgatgcctaagttgccaattgggcccttattacaacttgaactaaagccctcttagttgattaacccaaaacatatttttggtcagccaactctacaaggattgggccattatttatacaaactaaacactttatattgaatataacggtgcatttatttcttctcatttggccatgaacaactaacaacttggactttctcttgaaacttggcttgattcaatatatggacacac

SEQ ID NO: 245295 - DNA, 266 bp, Glycine max
gaggactacacgtcctcgccaacagagggctgcacgccctcaccttcagaggaccacacgtcctcgccttcagaggactacacgtactcgccttcaaagggtcatggacctccacctttatagggctacacgccgacaccttcaaaggactacacgtcctcacctttagaggactacacgtcctcggcatcagaggactacatgtcccccattttcaaggaggacatgccctcacctttagaggatagcatgtcctcgacatcata

SEQ ID NO: 245296 - DNA, 452 bp, Glycine max
tgcaagcttctagacaaggcatcaacagagatattttctttactctggttatactggatggtaaaatcataaccaaggaattttggtaaccattgttgttgttctagagtctgcaatgtttgctccaacaattctttaaggcttttctgatcagtttctaataatgaacttatggcctaacaaataatgcctgaatttggccatggcttcaatcatagcatagaattccctagtataagtagattgcttctgcattctaggggacaacttcttagagaaataagcaataggatgttgagattgactcagtattgctctaatacccgaaccagaagcatcagtctcaagtacaaatggttctctaaaattaggaattgctaacactggaaatgaagtcataactttcttgagctgcacaaatgcttgagaacaaaatcacacactgaaagagt

SEQ ID NO: 245297 - DNA, 290 bp, Glycine max
  unsure (1)..(290): unsure at all n locations
aaccnancacacggacgtccgatccaggcgcataacatatcgagacgctcgaaacagaacaacgtacggcgtcgagaaattcaaatggtcataacttgtcacgcgaatgcccaattcaggcacacaacacatcgagaagctcaaattcaaacatcggaagctctcgagaaactccaacggccacaactctccacacggaangccgactcgggcacatccctcatcgagacgctccgaatcgaaaaccggaagctctcgagaaatgcaaaggggcataacttcgcacacga

SEQ ID NO: 245298 - DNA, 461 bp, Glycine max
  unsure (1)..(461): unsure at all n locations
cttgggaaagactgggttcaccttctcattattcctatctgctggcttagcgagaatccgctaagcgcaacactcctgcgctaagcgcgaggaagaatccagaagaagatgagctgtacaggttcactaagcgcaccacttcatctctctaagcgcaccgcttcagttcatccgctaagcgagaaaggcgcgctaagccaaaaatcactaacgtgcgctaagtggtacatacatgcgctaagcgcacgagcacgaacaaggccacctatttaagcctgaaatcagattttgtgaagggagtttggactgggattcanagctctgcatgtctagggtttctagagagagaaaggtccaagttccacagagntttgagagaatttgctgtgtgaagatctgcacagagcaaagcttgagatgagtttgtgagtgactgtgagatcctagaggtgaaggagaca

SEQ ID NO: 245299 - DNA, 444 bp, Glycine max
  unsure (1)..(444): unsure at all n locations
gctcgtttatctggaagaaattntagctttttcaacctattctatccttctaatgtgtgattcctctctttaggcttcccaaaataatttttttttcctaattagtttatatgaaagttttatttttgggtcttcattctttgaaatcatttttttttctaattcttcggctgcttgatcatttttgaggaaattagttgccatttacggaaagatactgaaccaaaacattataaataaaaaaattgaggtttaaatggttttttttctgtctcaaaaagatattttttatcttgtttttaaaaaccaaaattttcattccatataagacggacaataatatataaaaaaaagtgtagggtgcatatagaatgacttctcctacatttatacctaataacatcacctatnttaataaatattcttttaccaacccattctgat

SEQ ID NO: 245300 - DNA, 378 bp, Glycine max
  unsure (1)..(378): unsure at all n locations
catgcaagctnngaagcccgaagaagcgcgttttttatgtgcccacctctctgagcggcatgtgtattgattattgcatcttaatctctatctatctatatgtacatcatgcatcatcatgtaaaggtacgaagattgtttctaaagctagaaaattcttcagcgcataatactctctatgttaatcgattaccaggctgttcgtaatcgattacaagagctgcttgtaccttagagagagatcatagtttcgattcaatcaatcactagttatctataatcgaatacatagtccaggtgataccatgtctggcttttcatgagtctctgctttaattgatcaccacgtgattgtaatcaattactttggtcttaaaa

SEQ ID NO: 245301 - DNA, 239 bp, Glycine max
aacaagagggagccgaggatgaagcctactttaagctagcccaaacctaggagggcggtctaaattaagcccagtccaacaaaagggatacgaggaccaagctcggattgattcagtctgaccagggagcgaggcgtacgaacttaggccacaacatacaacacaaaagcatgattgagtacacaaatacccttacatacatcaaccggcgcattagaaagacccaacatttctaccca

SEQ ID NO: 245302 - DNA, 343 bp, Glycine max
  unsure (1)..(343): unsure at all n locations
gcttcacccccctctttttaaaactctcgtcagacacgctcgcctaggcgagctaattttaattttttttttttttgcaaaagcatttgcaaaagggaggttgttccttggtatgtatatattttttctaaaatcttatagttgcatataaacttaggtgaattcaagatataattcaagaaaacaaacaagtaaaaagcaggaactttaaaaagcaaaattagagatactgtagaagcaaaagcaaagactntgactctgatgttttgatgatgccatgtgatcatgcgatcatgcgcttctcaagttaatttaagaaaaaatccaagaaaacaagatacat

SEQ ID NO: 245303 - DNA, 340 bp, Glycine max
ttctggaggaatcttctggagggcccaagtgggctggtttctatttgcacccccatttttactaaatacacccccctttctatttttttgtcattctttttccgtgacgttacgaaactttaccaatttcgtaacgatacttattttccttccgtaaggttacgaatccttacagattatgtatttactccttttttacctttcgaagaagttacgaaaactcacggattgcgcaaaaacacctcttttcgacttccgccacataacggaatttcacggatcacgcaagcctgcttccttttgatttctgagacgtctcgggacttcatttattgtgcac

SEQ ID NO: 245304 - DNA, 430 bp, Glycine max
  unsure (1)..(430): unsure at all n locations
gactcaatcacacatccgagtaaaaggttattgtcgtttgaattggctcataggttgaacattcaatttcgagcgtctagatatattacgggactcaattagacatccgagtaaaaagtcattgtcctttgaattggatcagaggttcaacattcaatttcgagcgtctcgatatattacgggactcaaccagacatccgagtaaaacgttattgtcgtttgaatttgctcagaggttcaaaattcaatttcgagcgtcccgatatattacgtcacggaatcggacatccgagtagaaagttattgtcgtttgaattggctcacaggttcaacattcaatttcgagcgtctcgatatattaagggactcaatcagacatccgagtaacaagttattgtcattcgaatntgctcaaagcttaaacattcaa

SEQ ID NO: 245305 - DNA, 316 bp, Glycine max
tttcactcggatgtacgatccaggcacataatatatcaagacgcatgaaattgaacacgattgccctggaccaattcagccggccataactttcaacagggatgcacgattgaggcccatgatatatcggcacactccaaattgaaaagtggaagctctcaagaacattaaatgcgcataactcttcactcggatgtccgaatcaggcacataatttatcgaaacgctcgaaattgaacacaaaagctctggacgaattcagacgaccataactctcgacatgggtgtacgattgaggcccctgataaatcgggac

SEQ ID NO: 245306 - DNA, 329 bp, Glycine max
  unsure (1)..(329): unsure at all n locations
cgcagcnaaacaccaaggcgagcgggcgatttttattggacncaancaaacatacgagaaagaagctatcggcgtttgaatctgctctgagcttcaacattcaatatctagcgtctcgatatatgacgagactcaatcagacatccgagtaaaaagctattgccgctcgaattggcccataaggtcaacattcaattccgagcacctcgatatatcaggggactcaatcagacatccgacgaaaaagctattgccgtttgaattggatcagaggttcaacattcaatttcgagcgtctcgatatatgacgggactcaatcacacctccg

SEQ ID NO: 245307 - DNA, 431 bp, Glycine max
aacagcaggagacttctctttcaatatagcaagatcaagatccaaaacatcaagatgaaattggacttgctcattctagttagagaagttaagcccattaaaaattgacacatatgatacataagatttcaatgaatagggaacaggtactgcatattaaaattcacataagcactttgagacataaaacacatgtcatacatataattcattcaaataacaatcaatgtatattgatgttctcctttgggtgatacactaacacacaacatacaaacatgatgatgctaataaaactcttaacattatttggcaattaaatatgcaccaattagtagtatccatttcctttgggtatatagctaacactaatgatacacataaatcacctacaattatattcattaattataagaataactaatcaatct

SEQ ID NO: 245308 - DNA, 350 bp, Glycine max
catacgaagcacggggcacatggagagaataacaaggacggacgaacccatgtcgtgactaccgttcccacatggcccaatttcccaccagctcaacaatatcaatactcagccaatatcagcccttctcattacccaccaccttatcagcccagaacaccccatcatccaccaaggccacccctaacatagccacacaacccgcctgctgcacatctgataccaaacaccacccttaacatgaaccaaaaccccaactatggaaggaatgttccagaaaagaagcatgtagaattcaaccccattcctgcgacgtatgtgaacatactcccatatctactcaataatac

SEQ ID NO: 245309 - DNA, 347 bp, Glycine max
  unsure (1)..(347): unsure at all n locations
ggcatggggtcagggcacaatagaccatgcacaattattgacataaaataatgtgaactctctgttaccagaatataataacaataatgtgaaggctgaaaaaaaaatgaactaaaagcagacagagagtaattatggtgtatattttaggaacattctaccagattntatatgatgcattgctncacaagcaactatttaattagattcactaggtgtattctatatataaccttagtggagctntctttattataagcaagttgtaactaataaaaatgaagcaacaattaaagtttcctaataacatgcataatgatcaatagataagagcatgctttccttta

SEQ ID NO: 245310 - DNA, 446 bp, Glycine max
  unsure (1)..(446): unsure at all n locations
cgctgcaagcttgccattctggagtgaggtgnnatccaattctgncagagactaacaaaattcactaacaactaactaacagaatacagtcaataaatggtattttatttctccattctctctcaattctcttagtcgagaaactctatgatggtatgtagagcttagttgatcatcaatggtgacaaactgtatcgcatcttctttcgcttccgctttttcaaattcaatctcaaagaagcttgataaactaaattttcttctttggcgacaataaattgaacctgtcatcaagtcatacaaacttcaaaggtttgtcgcgaatcacaaattcccttaccatttcttactgaagcacatcacgatgtaggaattgagaatcctgcatacgaggcatgggaacaaccagactacgttcttctgctagttgcaatcgactatgtcaa

SEQ ID NO: 245311 - DNA, 314 bp, Glycine max
accaaaataaattcagcatcatttaaatctcatcctctagagcggttggaagcaagtggatactcatgccatatgaagggattgcctaattaaaacttccttattactaactttggtaagatactttctctagtagtgattgatgcatttcaaaattcgatcctttagacaactgaaaattgctttatttcatttgcctatgatagaagggaggtccaaatattttctataccctatgattgtagaggcacccaaaagaaacatgattggttgcatcaaatattgtggtggcgctgaaaaatttttatgacttc

SEQ ID NO: 245312 - DNA, 374 bp, Glycine max
  unsure (1)..(374): unsure at all n locations
aacacaccaatngcaaaaccttcatactcaataattgaatcatctggccttttattagccctgtcttcaaaatccattgtgtatgacataccagagcaccctccctgtttgacacctattcttaaacataaatcttgatttcgttcagacctcatcttattcaagtgcttcagcgcattatccgtaagtgaaactgcaggggccagagaaccagatgctggtgcagctgaaagatattgaggtgggggtgagtgaaagcaaagattaaaaaagtgctgagtgtggcagacaaagtatttcacataacaaacaagtatataacaaaattcaaaatatactgcttagctgttgcaatctggttaatgatattaaaa

SEQ ID NO: 245313 - DNA, 306 bp, Glycine max
attaacgagctccagggtgatgtaagataatgcaacaccaccgtgttgtatttaaccgtggaaattaacgagggtcgctaattttgaattgaaaaacaaaaagcggaaagattatattggccgcctctcaagtggaaaaagaaaactcgccattggtattatttttattaacgttattttacccgtaagggacgggatttaatttcattacttgataaaaactcgtgtgggaagaatagaaaaattatgaccccattacttgaaatataaacaccacttctagaactcattctctgcacattttta

SEQ ID NO: 245314 - DNA, 296 bp, Glycine max
agaagagatgcactcttcttatgttctgtttggcgtgcattctttttatttaacattagatcactggtatttacgactgagtttatggattatcgttttgacgcgttttggtgtgtttcgtgtcgagatggcactctgctggaacctttgacaagggcacaaacactggtggacccttcggacattggtattaggcttttggagccactcaaggcggagttccctattttgagctacgccgatttctacctggtgatgagtttttgtctttggtgtttatgcacctaatgttgtgt

SEQ ID NO: 245315 - DNA, 284 bp, Glycine max
tggcacgcctccactccccgaggagagagattccaaattggagccatcgttgtctaaagatcattgaagtctactttgtatcataagggacaaagcgtatctacccattctttcagacaaaacaaaatgaataggttaaagttaaaccgggtgtcatccaccccacgctaaaaaatagcttgtgtaatattcgattggccggctgctgaaacacaaatgaatttttaagaatggctgtattatgtaaacctcctgccagctgtgtatccctaatacgaaaatct

SEQ ID NO: 245316 - DNA, 381 bp, Glycine max
tcaattattttttaaccaaaacgaacaaaaaataaaaaaaatgtatgaaaagttaaaaattgaaccaaaattatgattttccattattatagtccgcacccatatggtatttaaccttataaaaatgtgtaaattattttagctcttctattgtttataattcataattttgcgcactctactttaaaataaaaacatttagtctctctattttttaaaatccgtaactcttgttttactatctttaaatagacattcaaccccctaatttgattaacaaataaaaatcaagtcttctaattttaaatagacattcaacccctatctatgttgtaaaaatatctgcttaatgtacatcgtaatcaacacttttactctaca

SEQ ID NO: 245317 - DNA, 382 bp, Glycine max
taaacttggccttctcttaatcgtctttgggcttggcgaccatgatcaacaaagtactttcggcacctactatatgttgacttgaccaacgctgttattggaatgttgcgacaatctttcaacactttattcacacattctgataggttggatgtcatgtgaccatatcgtcatccacatgtctcgtaagtcatgctccattttcctttgaaatgcgatcaatccatcttgttatggctggactcaattgacgaaattattctaagttttgatcaaacacatgcttgcaaggagtgtacgctgcatcaaattcgttatcatcaaaagttgtacgtagacatgacactcaaattaaattaatgtataaataaaccttacccat

SEQ ID NO: 245318 - DNA, 266 bp, Glycine max
tgaaagaaaaggaccaacaatttctcgtccgcagaatacgcccccatctttcggcaatacatccgaagatgccccttcgaacatgtgcgacctcggcttatcaaagaccggtactttgaacatgggagggatgacgatgttgggcaccaaacataaatccgctaaatccaagaatgggtaattgtcgaggccctcgactgctctcaacctctcttcaagcgcctcaatcttttccttatcttccgcaaagggaacagattctttta

SEQ ID NO: 245319 - DNA, 438 bp, Glycine max
  unsure (1)..(438): unsure at all n locations
tgcaagctntatcttttaaatctttaagtgcagattttttganaatgatagatctcatccagcgcaagttgttgcagcccagatacgcacactgctatataaacatgaaggctgcacgagttttcaaccaagtccgggattgaagagttattttgtgagttttgggacttgagtgttttgtgagccaccttgatgctaccctaacatcaagtgttggacctgagtgtgtagagttgatctcttttgttcagagagcaatctctggtgtatatttgatttatttgtaaacaccggagagtgattgatagggagtgagaggggttctcatatctaagagtggctcttacgtagaggttgcacgggtagtggttatgtgagaaggtgtaaacagtggctgtagatcttcanctaacactatttagtggattcctccctgct

SEQ ID NO: 245320 - DNA, 264 bp, Glycine max
gggcaagactggatgagaggaagtgtgattttcgaaatctgcacttatgcacaatatttgctgcgaaattgtgcagcagaattttgcacaggtgcagacaaaatgcttgtgtgtggttggctgcggaaagcctactgcacaatgagtcctggatgtttgccactacatcccaacggtcgaaatgtaggcttatgcactatagacttccagtaaaatcttggagtcgatccaacggttaacgaattggatcgaacgaattgctac

SEQ ID NO: 245321 - DNA, 384 bp, Glycine max
  unsure (1)..(384): unsure at all n locations
gtatggaagtaaccatcttgcaaaaattgtggcaaaagatggatcgagttacatcgctgcttcgtctactgccaaacacatttaggactgtcgatgtccctgttacttccagtttcaccttgacgaagatgtcatggaccatgttgaaaatctaaaattgagtcaaccccatgtcttgcataaaaaatcacaatacttcaaactgtgcatcattcacatacatccatccttttcattggttgcattgctcattgcattctttccttgaaaaaatgaacttaatcattattatcaaaaagaanaaaacacgctgtacggcgcccttaccgaacctgtgctaaagctagagtaatgggtgaagtagaggaggtgcaagagcaaatg

SEQ ID NO: 245322 - DNA, 474 bp, Glycine max
tactaagcttttacttatgtggcagggcgggtttccttcactttcttgtttttctttttagctcagaccactgttcttctttcccgcgatgcttcttttcatgtccgcctgagtgggcttatatcctaaaccatacttcccacgattcccttgcgtttttatcagactagttatgccgccattgtctttgcctaaacccatcccgggttcataaccgttccccaacataactcgggccatcattaccgccgcctcggacagacaaggttgcccaaagagggagtccacggaggaaatgctgaccacctcaaaagactggaaagcggtttctaacgattcttctgcggcttccacataaggcatggaggatgggcagcttaccaagatatcttcctcgcctgacacgatgaccaagtgcccctccactacgaatttcagcttttggtggagtgtagaacgcacaacacccactga

SEQ ID NO: 245323 - DNA, 372 bp, Glycine max
ctgcagctttgaacctaagaacctgaattgtgtctgtctaaccccattacaagcctagaaagtccttcggattcatttttgcgtgttcattactatatgatatgagatgaaatgcaaaggttggaacttatgttggttgtttatgatggacaagtgaattgttctttctttgtttggccactgtctttgtcactagaggacaagtgaattgttctttctttgtttaaggacaagcaaaactgtaaatttgggggagtttgtttgtcgctttatatgactaacttttgtatagaaatcattttccaaagcttgtataattccccaatttatggttaatgttgtctctagaacatttccattggatctaatgat

SEQ ID NO: 245324 - DNA, 463 bp, Glycine max
  unsure (1)..(463): unsure at all n locations
catgcaagctggcaaagtaggggctgaatatatgggttggatcatttgaagatcacgaaagtatgtgaagagcatggaggagtcttaattacagtctaaaagcaaccctcggtagcatggttttgccacttggttcactgaccattggattggctcggcatcgtgcattgttattcaaggtatttttccctacattctcttttctggtttacatttcaatgaagaatggtctggttgatgtaagcctcaagtaacattaattatggttagatttaaatcaaaacagaataacattatattaagagaatgagtagttggggccactatgctatgagatttttctcatactcttttaaaaacttccatgattcatngtaataaaatatattgctctgtattaaatgtaggttttagctgacactttgggcatcccgtgtcgataggtgaaaggactgcagtatat

SEQ ID NO: 245325 - DNA, 435 bp, Glycine max
  unsure (1)..(435): unsure at all n locations
gcaagctntactatgcagagaatattcaggaatttctcttttctgacttagcatcaaattttcctaagttatcttttccattattcaatacaaaacatttacaaccaaagatatgaagatgtgagatgtttggttttctgccattgaacaattcatatggagttttctttaaagtgggccttattaaagtcctatttaaaatgtagcatgcagtgttaacggcttcagcccaaaagtattttggaagaggagtatcatttaataaagttctagcaatctcttccaagatctatttttccttttaacaacgccattttgttgaggggttcttggtgcagaaaagttatgctcaatcccatgcttatcacanaataattcatattctgtattttcaaactcacccccatgatcacctctaatagatataatcttgag

SEQ ID NO: 245326 - DNA, 239 bp, Glycine max
gaagggggggttgaattaagatattacaacttatttccccaattaaaaattctatttaactctctattcaagttataaatccccttaataatgaatttcttaaataatgattcaaaagaacaatttgaatatgaatataaaacaataataaataaaggagtttaagggaagacaaatccctactcagattatactcattcggcccaccctttgcctacctccctcccatcctcggtcat

SEQ ID NO: 245327 - DNA, 327 bp, Glycine max
acaacaaccctctacactatgggggcgtatccgaattgatctaattttattctacataatctcatcctctgcattctgcttcagctatttcatgacacctgcaagtttggattggaccttcttaaggatatttattaggccctgcagtagggccataaagcaccccaacatgcacctacatcttccgattcccatgaaaccccaccttcacagtatttgatctctagcactacgactgagagagtaataaaagccttattaatgctcaatgcagcccctgagcgcttctacaaactctctatacgattccaacccagttttatcatc

SEQ ID NO: 245328 - DNA, 361 bp, Glycine max
  unsure (1)..(361): unsure at all n locations
gattaaccgaggtcacgacatgaatgatcggttgaattttactttaaaggcgattaaatgagattacaacacacatgatcagttgaaattcatttacacattgattaagtgaaattatggcttanacgtttggtcgaaactcgcttaaaacgaagaaagagaataccgagagtagaagaatgaagatgaagacatataaagcaagagtggacacctgagggtgcatagaatgaatccaaggcttcaaaataaaaaactaaccaattgaagatcgatgaacgatgaaggacgaatgaagaacagtgaagaacggcgaagaacgtccacagaattgatcatataaacgtcatggaagcattac

SEQ ID NO: 245329 - DNA, 314 bp, Glycine max
gcaaaaatatgatcttcaagcaacgatcaatccagttggaaaatatccaaattgaatggcaagtctcaaacaacaacaacctgtcctctttccgaagctgtagtcaagcagccatatgtcctcttcatacagacatgaacagttgcagtcacaacaagacacaacaactgagctctcctagcattcttaaaagttataggcaatgaccatcaaaatgcatttagcagagacagacctcattcgagctacaatcaatgggaaaggtactatcccaaattgacaatgtttacaactggcaaatcaaaatggaggct

SEQ ID NO: 245330 - DNA, 279 bp, Glycine max
gaacaaaaattggggaagaatcagttcaattacaattagttcctctctctttctttctctctgtgctatatggatagggactgaaatctacagctgaattatctcatctttgctctttctttttcttttgcttgccatcacactgaaactactgatcacttttgtgtaagctcataaaccggatcaaggcatattaccaaattatggctgactactacttcaagaatgtagattagcccggatctgtcctcaggaacagacagtctaaggtatattttg

SEQ ID NO: 245331 - DNA, 429 bp, Glycine max
gcaacaatgggtagccggggctatatgatacatcttgccaaacaaagtcaagttagcgataactcgcctgtgctttttcttccatgctatatgtagcaaagtcattgatcctatcaagtttgatgagttggaaaatgaggccgcaattatactgtgccaattggagatgtattttccccctgctttctttgacatcatgattcacttgattgtgcatctggtcagagaaatcaaatgttgtggtcctgtctatctacggtggatgtacccgatagagcgatacatgcagatcttaaaaggctatacaaagaatctatatcatccagaagcatctattgttgagaggtacattgcaaaagaagccattgaatctttgttcagaatacttagagaaggctaaacctcgttggcttcttgagtctcggcatg

SEQ ID NO: 245332 - DNA, 353 bp, Glycine max
aaacacccccccataaagaaaagttccatagttatctacgggtcatagcgcgagaaaaaattgttattgtccattccaattggaaagctctcccacaatctctatatgacctaatatgggccgacattttggtcagtgcatttaactaaccatttgtatttcattttcgttaattaacttgaaaacgtcatcattgacaataaatatttatattctgaacgtcaacataaacatgatccttctactaagtatggtctggatcctaaaacttgggaggaatttcccaaatgcccgccaactcctaattgggacgtttgatgtaacaagattcttcttttaatttgatttcaaat

SEQ ID NO: 245333 - DNA, 206 bp, Glycine max
  unsure (1)..(206): unsure at all n locations
ccgagggaaaccaaaacgnggaggcataanccgacaaaacangaanncgncaacancggcnctctaaaaaatggacgntaatgagaattngctaacaccagttctctagaaactgacgtcaacgtgagtcggctagcaccgggtctacaaaaatcgatgataaccaatgctcattaacaccagattttggaaaaaaaaaaaacgac

SEQ ID NO: 245334 - DNA, 210 bp, Glycine max
ccaaaacacagcaaaaacaggccccaaacccaacacacaacacccgcaacaaacaccgaaaaaagaggaacacccccacctcaagaaagcggccgacacccccagaaccaccaagcagaggaccgctattcccccgacacaccacaaacggaaaatgagaagacccccgcccaacgaacaccacaaaacgcggaacgaggagggacaaaa

SEQ ID NO: 245335 - DNA, 451 bp, Glycine max
agctatgcgcatacttcttacgaacgttttcttgcacatgacattcttataactaagaaaaatgcacccatatacaatcaaggcaccttcgttacctagattatttacatgtacttccaaggtgtatttgttacctacatcacacacatttcctttgctaaattcacatacatgcatactctaagcactttgtctatcaaaaattgcatacgtgcacatcttggtatttctaatacctatacatacacaaacttcatgatgaatcttgactatctacacaataaggtgctacatttcatgctttttgcctttttttttttcaagtgtttttttttactacctagagtcgcatgcaaattcaagaatattttcttttgctcactaaaattgtattcaaattagaaggtatttttgaatgtattttctttacataacatgcaacatatttata

SEQ ID NO: 245336 - DNA, 340 bp, Glycine max
  unsure (1)..(340): unsure at all n locations
gcttcacctacttttaagaattgaagaacactgtgcaagacatgacagaatctgtgggaacagatattagctcattagggaacttcaagacattcaatggataactaactaattacaactgtattccgtaaatgacaacattgaaaaggacttgcagcacgcatggcatattttcaacttcaaaatatgaacctgactttacattactcttttaagcaagtggcttacagcagtatcatataataacttgtgcatataactcatctaagaaggatgctcatggctttcttttcacagtttcttacgagagtacattnttaataacctgatagctgatgga

SEQ ID NO: 245337 - DNA, 454 bp, Glycine max
  unsure (1)..(454): unsure at all n locations
tgcagcttgaggacctgtgagagagttcnattttataaaaaactgatagattatggcatctagttacactaaccattacatggaacaaaaggacaaaagttaaacgtcattcatttcttcacatggacgtttttttctctatatattacatatataattcacatgagacaattttattgaggtgatttaagattattatggatagcaaaattttcttcacaaatatttcactttttagaactcatccattttaattttgattttaaaactgaaactgattcgatacaaaaattgaaattgatctttaggtaaatttgaaaataattcttttaaaatttgtaagacaaaaaagaatatgagaaaatcaaaagaaaaaaaactttaataggaaaaaaattaaaaagacaaaaatatgcggaatagaaaatgcaaagctaacatactataacctttc

SEQ ID NO: 245338 - DNA, 256 bp, Glycine max
aagaggcataagctcaaagacacgaccatacgagggatctcccctgggtatagcaatatctctaaaggctaccgcgttcacaacttgccaactaagaaacccgccatcagtccagatgccgaacccgatgaacatgcctcatggaactcggacgaagaaaaagtggagaagaatgcccttatacccgtccaactaccttaagaagaagatgaggaagaagacccaggtgaaccaccttcacctctatcacaacaac

SEQ ID NO: 245339 - DNA, 385 bp, Glycine max
  unsure (1)..(385): unsure at all n locations
tgatgatattgtttgtgcaacgacctacggtaaccatttggtggattggaaggcttttcctgcattaaattttgtatgacgccttctctatctatgggggaaagacttactggatgtttctgaggtattttctgatgttcggtacctcacagttaaatgattatggaatgatgatttacaatctatttttattgtcaatgtttacttttcatgcaactttgaagaanaaaggtttttgtgggataaatcgaggaaggtgagatagtatatggcttgtaagctatggtgtgtggacgacaatttcaatgtgatcagaaatctaatggaaagacatggtgctagcataccttctttgctagatcattacaggtaacggaattaatca

SEQ ID NO: 245340 - DNA, 275 bp, Glycine max
  unsure (1)..(275): unsure at all n locations
ggggtaagagaccttggggacgtcaggtggggtgctattgcccaaaaccaagcttgaccaatcccgacccaacccgggcatattcagtcagtgagaacctgtgatgtacctaaacaggcgagctcctagcagtcaaccgattaaagaacaaagaccacaaagcacggaggcttgtatggtggctggccanctgtgaatcttgagtgatatatgggatagggcctctggtaatcgattaccgagggtgggtagtcgattaccaggcttaaaagtga

SEQ ID NO: 245341 - DNA, 287 bp, Glycine max
ccggagagaaacagatttgcacccgaaaccgagtcagcggagggcaaaagggagggcggcaagcccatgggagcggaaattggggcacgcgccgacgcaccagaccaaaggagggacccaaagacacagccggagaagaagcgaagggaaccccgccgtaagcgacccgagggaccgagaaagcgggggcagaacagggacccagggggcacgccaaaccacagacaaccacaaccgcaaccgcagaaacggagccaacagcacccgcggaaccaaagaaacaacca

SEQ ID NO: 245342 - DNA, 414 bp, Glycine max
  unsure (1)..(414): unsure at all n locations
ctgcagctgccgctatagtgcacacttcctagattttagcatattttggaattgtctttattgcatccagcacaggtatgtttacttctacttttctaaatgtttccaagatctccttctctgcctcttccattnttttgttggaaatacctcttggagggaatggaaaagggatatgctgcttctctttagagtcacctgcatagaaattgttaggcaacttactctttacattatcgtttttggtatcatctttttctggagtacagagaggttgggcaggttcatttgctggttgaggttcttgacactgctttcccgaactcaatgtaatgacactcacattcttgggattctggacagattgagaaggtactctgttagaattatgggactgtcgctgatataactgtg

SEQ ID NO: 245343 - DNA, 323 bp, Glycine max
cacagcaagccaaaaatggctttcaatgatggtttggtcaacagggttatcagtgatcctagaccaccacacttgattgcaggcaaaggaatcatgaggcatatgagaggaacactcagatatggccttttgttttctcatcacactaaaggagatgatagcctacaccttgtagcccactctgatttcgactggtgaggtgatctacttgacagaaagagcaccatgggacaagttttcctgctcgcaggagcctccatatcctggagttctaagaagcagacaatagtagcattgtccacttgtgaagccgaatacattgc

SEQ ID NO: 245344 - DNA, 354 bp, Glycine max
  unsure (1)..(354): unsure at all n locations
ctgcagctcctattatagggaggagcttttttttntnaattcgcaaacactaaatatgctgccatactattttccattccattggagcattttagccattgttgatcatgtggcattgttgtttcaaataaaagtggtttgcggcattgttggaaagtcaattatgttgaacctcaaactaggtattattttttgattagaaaacactttaaattgttttgtatgcatactggatcctgacaactgctgattaatgcaccacttgtgctgagacggataatccatgcctgaagtgttttatgatttttgaagtaatacaatatatttgcagccacacatcttgtcaaaatggga

SEQ ID NO: 245345 - DNA, 362 bp, Glycine max
cccactccaaaaggcctccggatcattctttcctttaaagaaaggaatgtcgagtttaataccatcaatttggttttgtctatcaacaccatcattccctcttctcctcctttcttcatcattatgagcactattctccatttgatccaacctctcatggagcgcatcatctcattggttcattaacctctccaaatgttgcatcaaagcttacattcggaattgcgaaagccccactccatcattattaggattatgaccctccatctcaaacaaacacaataaacgtaacaagacaattattgttgctgtttgaatacctcacccactcaagtgtatcacacaactatgattttcctcta

SEQ ID NO: 245346 - DNA, 349 bp, Glycine max
gaaagtatgactggaaatgttagtgtgtcacattgattgtgaaggaatgcattgaccgtatctcggtgagagtgtgatccttaaattttgagagaaaatactatcatttagtactaatttttgcatgaatctctgaagtatggaatgaatgcatgaaattgaggatgatgaaggccatgtttgattgtgatagccaattaaccaaaaagctgaccatgtgcttgaatgagttatcccttgcacccagtttgagctgaatgaattactgattgattgaaccctgagcctatatagtgttatctcctgctacctcgtcttaggttgtaagagagcatcatccacaagaagc

SEQ ID NO: 245347 - DNA, 378 bp, Glycine max
acccacccgggtgttgaagagacggcatgggcatctccttccttcctttttgcccctgttgccccgattcttatggcattcgcgttggtggaggaaacgtaatcaaactttcctcttttcaatccaacctcgattctttccccggcaaacaccagatccgcaaagctggacggcatgtaacccactagcttctcatagtagaacactggcagagtgtctaccatcatggtgatcatctctctctcaaccatgggaggagctacttgtgccgccaaatccctccatcgctgcgcatattctttaaaggtttcaccctctttcttgaacatattctgcagttgagtacggtcaggagccatatcacaattgactgatact

SEQ ID NO: 245348 - DNA, 413 bp, Glycine max
  unsure (1)..(413): unsure at all n locations
agcttcaacatgtcaagagcgattgtctctatacgtnacgggacttaatcagacatccgagtaaaaagttattgtcgtttgagttggctcacagcttcaacattcaatttcaagcgtctcgatatatgacgggactcaatcagacatccgagtaaaaagatattgtcgtttgaattgactaagagcttcaacattcaatttcgagcgtctcgatatgttacgggactcaatcagacatccgagtaaaatgttattgtcgtttgaatttgctcagagcttcaacattcaacttcgagcgtctcgatatatgacgggactctatcacacatccgagtaaaaagctattggtcgttgaatgtgctcagagcttcaacatctcaattccagcgtgtcgatatattaccggactcaat

SEQ ID NO: 245349 - DNA, 390 bp, Glycine max
  unsure (1)..(390): unsure at all n locations
acacgctcgaaattgaatgtcgaagctctgaggaaattccaacgacaataaatttttactcggatgtctgatataatcccgtaacatatcgaggcgctcgaaattgaatgttgaagctctcacccaattcaaacgataataactttttacacggatgcctgattgagtcccgtcatatttcgagacgctcgaaattgaatgttgaagctctgagacaattcaaacgacaataacattttactcggatgtctgattgagtcccgtcatatatcgacacgctcgaaattgaatgttgaagctctgagcaaattcaaacgacaataactttntactcggatgtgtgatcgagtcccgtaacatatcgagacgctcgaaattgaatgttgaagc

SEQ ID NO: 245350 - DNA, 352 bp, Glycine max
  unsure (1)..(352): unsure at all n locations
aaaaactgtttattctgcaaaacacgaaattatttatttcaaaaataattattattgaacaagtaattaattgacatcgcgaaaatatttagcatatttatttttttaatttttaattaaaaacccattttatcaattttctacgtactaaattatggtattactgtatctattgtgaacttccctataaaactacaacagacaaaagattctataggaatagagtgtaagccactaaaatntcaaataaaatgataaatgattaaaactttggccaaggttttctctcaggcgtactgattttgtggaaactcgcgggtgcaagtatgaaactattatacaagtaacgata

SEQ ID NO: 245351 - DNA, 412 bp, Glycine max
  unsure (1)..(412): unsure at all n locations
gctcataactttncacatggatatccgattcggagacataatatatcaagacactgaaaattgaacaacggaacctctcgagaaattcaaatggtcataaccttttacacggatgtccgattcgggcgcataatatatcgtgatgctcgaaattgaacaacgaatgctctcgagaaattccaatggtcataagttttcacatggacgtccggttaaggtgcataatatatcgagacactgaaaattgaacaacaaaacctctcgagaaattcaaatggtcataacttttcacacggatgtccgattcgggtacataatatatcgagacgctaaaaattgaacaacggaagctctcgagaaattgaatggcatacctttcacacgggtgtctgattccgcacatatatatcga

SEQ ID NO: 245352 - DNA, 475 bp, Glycine max
  unsure (1)..(475): unsure at all n locations
gcaagctttgcacttctagggtttctagagagattattttcttttgttccagagagttttgagagattntgctgtgtgaagatctgcagagaccatagcttgaagcaggagccggtttgaaagcttgagatgagtttgtgagtgattgtgagatcctagaggtgaagaagacatcctcaccacttgtatttttgcaatctttcatcttgttattctccttattgtaaagaaggcttcctggaatggaaagctaaatcctctgttggatcttccctgtaggtacctaatgtaaatatatttctatctatttaatgatgttctgtgtgttctctattctatctgcttttcattccagtatgcctttatcttgatcacatagatgcatgctttgttagggtcattcaacagtggaaacttgtctgactctaaagtccttcatagtacagggctaagttgttgtattatcacgaggaat

SEQ ID NO: 245353 - DNA, 329 bp, Glycine max
aaaatgatgaccctagggctgcaaactcgtaaatcccgtgggtatggcttttgaaaggggggaaaagaggtttttgaatgcaataacgtcccccctttcgtcattcttatattttgatgcaaggatggctcgcccaggcgagctaacctgcattttttttttgagaggaacattaaccatgtcccctccttccttatggcttagcgtcttgcttaacttgaacttacttaaattagagttaggcgttgattactctattttaaaacaaaccaacagtaagacaactgcgaatacaaaggatacggggctgccttgcaccgacgttctct

SEQ ID NO: 245354 - DNA, 480 bp, Glycine max
  unsure (1)..(480): unsure at all n locations
gcggctgcagcttaaccgttattaagccggatcnctttattaaatgataaaatgaatttcaaccgatcatttatgttgtaatcttgtttaatcattgttaaaataaaatccaaccgatcattcatgctgtaacctcagttaaatcaaaaatagcaaaataataacaaaataatcaaaatatctttgaaaataataataataaaataatcaaaaaaatcaatcggacgttttttctttgaaagtttctttgaatgaattgattaataaccaaagtgaaactaaggctaaaatcaactcacaaaccaagctttgtccgcaaaaagtcacttaaaattgttttaaggtccaatgccctaaacagtcctctttgcttttatcggataacatggaccattcaaaagcataaaatcaacacacaactttaccgctntgcaagaactatgtaggtctgagttcctcaccacaaatagaggatacgta

SEQ ID NO: 245355 - DNA, 446 bp, Glycine max
  unsure (1)..(446): unsure at all n locations
agctntgacgatatggtcttcaccaacgaaatgatcatagtgagtctaaaaagagacaaatctgattatcatacttggataaatgccaaaaaactagggcaagtgaagaggatgagaagaagggagaaacctatgttgtgactgccattcttatacgaccaagtttcccaccaacccaacaatgttattactcagccaataacaaaccttctccttacccaccgcccagttatccacaaagcccatccctaaaatcaaccacaaagcctacctaccgcacttccaatgacaaaaccacctttagcgtaaaccaaaacaccaaccaagaaatgaattttgcagcgagaaagccttataattcaccccaattccagtgtcctatgctaacttgctcccatatctacttgataattcaatggtagccataaccccagccaaggttcgtc

SEQ ID NO: 245356 - DNA, 398 bp, Glycine max
tggagatagtaaagcacataagtgataactatgagggaaaaaaaaagaagctaagaaagagtactactcatttatggaaacaagaaaataataatcataatcaatattcaaagatgttattgaacatcaccatatatggaagtgacttgtttcctatagctctgaaattcaaaaacaattgatgtaagctccattgcagcttgtaggcctaggatcttcttcatcaatggattcctttgcttcttggaagatgaatggagaaaggaagagagagaggagatgccacttcaaggagaagatgagtctagaagaagctcaccaccatatgaggccatggataagagcttggaggaagaatgagatgaatgaatggagagggagagaagagcaccaaattt

SEQ ID NO: 245357 - DNA, 423 bp, Glycine max
  unsure (1)..(423): unsure at all n locations
gtatggaaatgtttatattttttttattagggttaaggaattaatggattttaattattgtatttgtttattgctttttgtgtattttaaatgtagggctgaatatgctcattgggctttaaaaagactattacagaatagccttggagacttatgtagtgtttgggatgccatgaacaacatgatcacactacaacacactgaaattaatgcatcctttgagacaagtacacatgtggttggtcatgttttttaaagttaccttatacaagaagctacttggcatggcatcaaggtatgctttaaatcagattgctgctgagtttgagcgtgtacattatgctgaanaaaacccttctcattgtgtatgtgtcatgagaacctactatggcttccatgtgaatgtgagttatncaaatatgt

SEQ ID NO: 245358 - DNA, 330 bp, Glycine max
gcttcctccatccttctgctcggcgaattctctataattccttgtccctcatcttattccccatgtatatcctccattatcttgtggtttggtgcgtgcttacagcagattcaaaaaaataaaccgattaaatcttagatctacacttgctcttgcatttctatggttcaaattttgtagatccactcttgaatcctgtcttcgtgttgattttacgttctatccattctcattcataatattcttgctctgaacctttagatctaaattttcttccaaaatatcgattagaaaaaaacacaccaaaatctaagtgtgaatcacttaatc

SEQ ID NO: 245359 - DNA, 372 bp, Glycine max
tcttaatacgctgacaatacgatattctttggagaagcatctatggcaaatgtcaaaactgagaacgttactcttatgagtcttgagctggtttctagattgagaattaattttgctaagagcaaatttggagctgttggtcaatctgaggagtggtgtctttatgctgcaaactacctcaattgtgctttgctccaatttcctttctgctatttaggtatttcgattggtgtcaatcccaaaagaaaggtggtgtgggatcctataattaggaaatttgaggataggctgaacacgtggaagatgggtagggctgaccaaatcctgttctcggaagatgcttgggctgaagatgggattcccctgaaagac

SEQ ID NO: 245360 - DNA, 391 bp, Glycine max
ttttatatttgggagccaatccaatccttgtgtgcggactctcagccacttatgatagccgccgatgctcccattactgcttcccctaagctctctgtcctttcttcacaccgcatcacatgccttgtgaactccttagagtaccctcgcattggggtcactgaaaccccgtgcgatgaaaggcgtgatgctttcttctgatggcactcctctcatggggtagccaagctgtcttatggcgaggaggggattatagttaatacaaccccttgttcccatcatgggaacatttggacatccttcgcatgaagatagaatcctgattcttccttccttctagcgagggaagtaattaacagacgcccctccatgctatccaagagttggtccc

SEQ ID NO: 245361 - DNA, 352 bp, Glycine max
tttttttttgcgctgccacatgtccctattcgattggagcaaaaagggcccactttctctttttgactgtgacctatactcagtcacaaaagtggggaaaatctgacctctgaaacgctaaaatactgcctcgggttgcgtgtcgtttctctggttccagattctcgcgtatctctgcgtccgccggggccacttttctaaagctagcattatatatatcaaaacactcagaataaaaccccgagcgtggttcacaggtgtggttccttaaatattaagtcgcacgcccaacgatgatttttaactaattaattaggaattaacccataaccttccacctatggatttctct

SEQ ID NO: 245362 - DNA, 367 bp, Glycine max
  unsure (1)..(367): unsure at all n locations
aaagagttttctcccacaaaattttaccaaaaacaaagctcaagttagattntagaaagctaaaactcaagcttgattcaaccttagctaagaagagaaatgatggaagaagagggagttggaaagataaggaacttgttatatctgaatgacccaatatgttacatctagacgatccaaaattaccatagttttgatgataacaaagatataaattattgatgaactaatagtttatatgaagtgaaatggtacatacttgatataagctcatatgggaaaaattactatccttattcttttgggaagtatcatccaatggctaatggaacttgttttttataactgagttaaagctgattttagc

SEQ ID NO: 245363 - DNA, 388 bp, Glycine max
taaaaaaaacaaacaaaaatatcatttaaattgcgtctaactacattaaatcgtattaaatcgaatttaggcttaattactcattcgattcttatagattcatatttgcaccttttagttcatatagttttaaaataatttttttagtccttataattcacattttaattctcttttagttcttgtagtttgaaattgatatttttagtccttataatttatattttaattctctttcaggccatataatttgaaagtgattttttaaatccttatattttatatgttaattcccctgtagtctttaccatcaaaatatgagtaatattatcaattacaattaactacaaaaatattaataacgaactcataactaatctaatataac

SEQ ID NO: 245364 - DNA, 461 bp, Glycine max
  unsure (1)..(461): unsure at all n locations
ctcaagcaagggattccaccaagattcttatgctctaagctgatgttgagaagacatcttttcagacacaccaagggcactacgaatacctcgttatgccctttggtttgtgcaatgcgccttccacgttccaggcaacaatgaaccttctcctcgcgccgttcctgtgtcgtttcgcggcagtgttcttcgacaatatactcgtctacagcgattctttatctgctcacattcaacacttggagttaatcttccaagctctccttcacggccagtattttttgaagaagacgaagtgcttgttttcctagaatcaattagaatatcttggacacatagttntcggcaagggtgtaacccctgaaccctcaaactccaagctatcaccgaatggccaattccgacgaccgccaaggagcttcgggcattccttggtctaccggttttaccggaagttattc

SEQ ID NO: 245365 - DNA, 413 bp, Glycine max
aagtactaagtatttattacctatatttaacagaacatacttataacactacaaaataactgtaaattggaagagtttgatacaatttacacaagttctatacacaaaagttagtcgtattcaccgactaacaaatcccccaaatttatacgtttgcttgtcctgaagcaaaaagagaacaactcacttgtcctcaagtgacaataacatgcagtgactatgtacaaaggtgtatgcaacaaaagttactgattacatgataagagaatgaagtaaaatgccctcatcacttgtctttcacaaggtatgaacttatccaaagagaagaataaaatgtaacctggacaattagatggagttaatcataagacagatattaaggaaagtagcttaaaccacaggctcatggctat

SEQ ID NO: 245366 - DNA, 438 bp, Glycine max
aaaggaatctacggggatttgttattcacctcaaagactggaaagtggtttctaatgactcctctgcggcctccacataaggcatagaggatgggcaactcaccaagatgtcttcctcgcctgatacgatgaccagatgcccttccactacgaatttcaacttttggtggagtgtagagggaacaactcccactgagtggatccacggacgccccgacagacagctgtagggggggttaatatccattatttggaaggtaacttggcatgtgtgagggcatatctgtactgcgaggttgatctctcctctaacctctcggcgggtgccgtcgaaggcacgaaccaccattgaactctgctttaggtgggaggcattgaatggtaatttctccacagtgctcttaggcatcacgtctaaactagaaccattatcgatga

SEQ ID NO: 245367 - DNA, 303 bp, Glycine max
aaaaaatgctatattgtcagacaacaactcttgtgagacgaatcactatttggttggcgctgcttggccaaggttttaatttcgcgtgctgacagtgaagaatataacccgcaactatatataaactccctcacaatatatgctttgctttactcacatggggaagagggcatctcaatttttcccttgaggggagggccaactcgcaatattagaatcacttggattagggacatcttaacttcttaaaaaaaacattgcatcctgttggaaggggtgctattcaaactacacaaaatattt

SEQ ID NO: 245368 - DNA, 424 bp, Glycine max
  unsure (1)..(424): unsure at all n locations
tgcaagcttgctaacccatggaagctcctaaatttcctcactntttggggngggccattcttggatggccttgattttctcagggtccacttggaccccatttctaccaactacaaaacctaagaaaactatattatctacacaaaaggtacacttctctatatttgcatagagggtgtttttcctaaggactgaaagaacttgtctgagatgtcctaagtgaaaatctaggctcctactatacactaaaatatcatcaaaataaacaactacaaatctacctatgaaatcccttaagacatgatgcataagcctcataaaggtgcttggtgcattagtgagcccaaaaggcatcactagccattcatacaaaccaaacttggtcttgaaagcacgtttccactcatcaccctctttcatcctg

SEQ ID NO: 245369 - DNA, 341 bp, Glycine max
tgcgagacagaaaccaacatgcgagctatcattttctagtaccaagaagagtggggtctagccacggcccacgagcatagaatcgcggatgagtatgcccaagtatatgcggaaaaagaggctagaggaagggtgatcgactctttacaccaagaggcaaccatgtggatggatcgggttgctcttacctcgaacgggagtcaagaacttccccgattggtagccaaagccaaggcgatggcagacacctactccgcccccgaagagattcatgggcttctcggctattgtcagcatatgatagacttaatggcccacataattagaaatcggtaggaaac

SEQ ID NO: 245370 - DNA, 353 bp, Glycine max
gagagggaagagttttgggtgaagaaaacttcccacctccacccctttatattttcgtacaggggttgctcgcccaagtgagctcagctcgcccaggcgagctaacctgtactttgttttttttttagaaacattaaccatgcctcccccccttacgggttagcgtttgcctactcgaacctacttaagtgaaaatcaggcgtcgattactctatttaaaacaaataatagtaataaaatactgtgaattcaaaggatactggactgccatgcagcgacgttctctacttgtctaacgccgggaagggacaacggtcggccatgaccctatcctccatatgcctccatcccta

SEQ ID NO: 245371 - DNA, 196 bp, Glycine max
  unsure (1)..(196): unsure at all n locations
ctacgggacacaancggacatcccacgaaaaaggcatcgccgcncagaaactcgcgctagctcccgccttcaactatgagcgccacgagatattcgggacacacccggaccacccacgaaaaagtcagcgtcgccagaacacgctcagagctcccgttttaacatcccgacacattaagggagtcactcggacatc

SEQ ID NO: 245372 - DNA, 297 bp, Glycine max
tgtttttaagcccacaagaccttctgcgattagctcaaagatacaatctttgcagacgagaatgctccagaaacattaagaaagctagcaaatgggcccaaatgaaatgttataacctggcaaggatacgacataaacaagtattcattttacacaaaagcacaagatgacaaaagtacaatgcagaatagcggggtcaccctaagggctaaatctcaacactctgcaagtgtcaatgacgccaatccctgtgtagcttccatcccatactctgggttcattgatgaaacttgggag

SEQ ID NO: 245373 - DNA, 468 bp, Glycine max
  unsure (1)..(468): unsure at all n locations
ctgcagcttctaaggaggtgagcttagttatatttgtttgtgtgtanctaagctctagcttctcaagaagttttctcaaagaagcttctcaaggaagttttctcaagaaagcttctcaaggaagctacctattctataaatagaagcatgtgtaacacttgttgtaactttgatgaatgaaagtcttatgagatacacttcaaagttccacttctttccttcttttattccttcaatttcgtgctccccccttctctctttcttttcctccattaaagcatcctcttcaagcttcttatccaaggcaattcttggtggtgaagctccttcttccttggcttattccctagtggatggtgcctcccctatcctcttctcctttgcctttcgctgcatctccatggtgaaaaatcaccattgaaggacctcattgaagctcacagatccagcctccatataactccacaa

SEQ ID NO: 245374 - DNA, 400 bp, Glycine max
gaaagttagttttacccagaaatgctacccttaaaacaaaaacggcatacaacctcctccaataaatacaaacatcaatgtaaatttagagcaagcttatgcgcatacttctttacgagcgttcacttgcacaagacattcttataactaagaaaaatgcacccatatacaatcaaggcacctttgttacctagattatttatatgtacttccaaggtgtatttgttacctacatcacacgcatttcctttgctaaatttacatacatgcatactcaaagcactctggctatcaaaaattgcatacgtgcacattctggtgtttctaatacctatacatacacacacttcatgatgaatcttgactatctacacaataaggggctacatttcatgctttt

SEQ ID NO: 245375 - DNA, 249 bp, Glycine max
gcctttgttaaccgttggatcttatgaaatgtggtctgcagcttcacaagacacttgtacacgatcctaccgttgggatctttgagaagatgtctagagtgtgcgcgaagcttccgttcccaagagcatttcttatttaagcatttcagcctttgctttcgtgtagcttaggaaaaatgccatttctgatgcaatcctaccatccaagggcattggatagaagactaccagaatattgggccccagatg

SEQ ID NO: 245376 - DNA, 422 bp, Glycine max
  unsure (1)..(422): unsure at all n locations
ttccgtcttcccttgtaactatatctagcatgagctcatgttgtccattcaatggtccaatgccaaaaccaccaactttaacaggcttgcaaagcttatcccatgatattgttaccaatttcttctgagtaatgtccccattccatataaaattatgaattcctctctccaaagattgaagcaaatttatcggccatgagtaaatgtgaaaggaatataataacattacttgaataacagattgcacaagttgaactcaaaccattatggagaaaaatgcacctttccacgaaaccaagtttggcataatnttatccactattggacgtagaaaacttcttttaggacgaccttgaaagataggaacctccaaatacctaaaggggacagagcccattgggaaacccataacttcccttata

SEQ ID NO: 245377 - DNA, 410 bp, Glycine max
  unsure (1)..(410): unsure at all n locations
tggtgattttccaccacggagatgcagcggaagacacacgacaagaggtgagaggaggtgccatccactaaggaataagccatggaagaaggaacttcaccaccgagatgagccttacataagaagctnggagatgatgcttcaatggaggaaaagaaagaacgagagaaagagagagggaggagcaagaaattgaacgaagaaaaagggcgagaagttgaactttgagttgtgtctcacaagactctcattcatcaaagctacaataagtgttacacatgtttctatttatagactaggcagcttccttgagaagctctcttgagaaaactcccttaagaagcttctctgagaaaatntcctggcgaagctagagcttagctacacacacgcctctcataactaagctc

SEQ ID NO: 245378 - DNA, 332 bp, Glycine max
  unsure (1)..(332): unsure at all n locations
actaagaaaaaggcacccatatacaatcaaggcaccttcgttacctagattacttacatgcactaccaaggagtatttggtacctacatcacacacatttccttggctgaactcacatacacgcatactctaaacactctggctatcaaaaatggcatacgtgcacatcgtgggatacctaatacctatacatacacaaacttcatgatgaatctggactatcgacacaataaggtgctacatcgcatgctctccttcttatcaagtgtntttttactacctacagccgcatgcaaattcaagcatattttcttgtgctcactagaatcgca

SEQ ID NO: 245379 - DNA, 388 bp, Glycine max
agcttccttaagaagattcctaaagaagcttgtgcttatctacacatacctctctaatagctaagctcacctccttgagatgagaagctagagcttagctacacaccccctataataactaagctcacccccatgacaaaaaaaaaacatgaaaataacaaaaaaagtccttattacaaagaaaactcaaaatgccccgaaatacaaggctaaaaccctatactactagaatggccaaaatacaaggcctagacgaaggaaaaacctattctaatatttacaaagataagtgggctcatacttagcccatgggctcgaaatctactctaaggctcatgagaaccctagggcctcttcttggatctctaacccaatctacttggagtct

SEQ ID NO: 245380 - DNA, 323 bp, Glycine max
ccttggggatgtcaggtggggtgctattgcccaaaaccaagcttgaccaatctcaacccaacccgggcatagtcagtcagtgagaacctgtgatgtacctcaacaggcgagctcctggcagtcaacagataaaaggaacaaagaccataaagcaaggaggcttgtgtggtggctggccagctgtgaactctgattgatatatgggatatggcctctggtaatcgattaccaagggtgggtaatctattacaaggcttaaaaatgaagacaggaggctaagatggtctctggtaatcgattaccaatggagtgtatcgattacc

SEQ ID NO: 245381 - DNA, 383 bp, Glycine max
  unsure (1)..(383): unsure at all n locations
gagagagggaagagttctgggtgaaaaaaacgttccccctccacccctttatattttcgtacaggggttgctcgcccaagtgagctcagctcgcccaggcgagctaacctgtacttttttttttttttagaaacattaaccatgcctcccccccttacgggttagcgttggcctactcgaacctacttaagttagaatcaggcgtcgattactttatttaaaacaaataatagtaataaaatactgtgaattaaaggatactggactgccatgcagcgacgttctctacttgtctatcgccgggaagggacaacggtcggccatgaccctatcctncatttgcctccatccctaagaacctgcaagaaggagacaaacaatac

SEQ ID NO: 245382 - DNA, 304 bp, Glycine max
  unsure (1)..(304): unsure at all n locations
gcttatccgacctatcattaacagcgtctatatattatattattgcatgccaaggcaagcacaacagcatggtcaggcacaaccgcanatgcaccattggcacctctacgacaaccaccatctctagagtccatctctgctcacatgcggaggatggagctccagatgcacgcatatatgcagcatgtgatcgactagcaggcagccaatcataagggtcaggtgcagctaaataagagcttttaccgatacaccttgcatcaacagagccaagatatcatgcctttgccgtggcctaccccca

SEQ ID NO: 245383 - DNA, 306 bp, Glycine max
ccttggatcttcatcgtagatggagtcctttgcttctgtttgtctgatcgcaccggaatggagaacgagatagatgaatgaacacaccactctaatgtaaatatgagtctagaagaaactcatcaccatccgaagtgctggattagagcttgagggtataagaagatgactgacggaacatgacgacaagagaatgaaatttactgcttgaagtctgaactctgaagtttgatccccatatgatcaaagttgaaaaaaatgcacacacgtgacctctatatatagcctaagtgtcacacataattg

SEQ ID NO: 245384 - DNA, 219 bp, Glycine max
gcctgctactataagcgcccgctcgaacatcgcgggtttctctgtcgatatgcacatcgccagaactttccacactgatgtccgagcctggcgcattatatgtcgagaggctcggacttgaccgacgcaagctcttgccatattagactggccagagctttcgcacggaagctctcagggaatccaaatgggattcactccacacacagcatgccgtga

SEQ ID NO: 245385 - DNA, 370 bp, Glycine max
gcaacacgtgattatcaatctgagtttaatttaaggcttctcctctctttgggatgtattagtgcgttttgggcacacaattcgagccattggagacattctggtccagatgcacctgattgagggcgacggtgccaaagtcaaatgtacaatatgtaacccaaaacctgcctaattttccaaattacatgaagatcgtttcttccttacgaatcaaattatgaaggtattcaatattcatgttttggtgagttcctgaccaaaacaactatcaaggtattagtgagtagtacgacaattgaatctcaaacgagagaaaatatagcattgaaatatatccgcgcggtgacttataaagatataataaata

SEQ ID NO: 245386 - DNA, 284 bp, Glycine max
ccaagctcggctccaacccaactcgctcggcggaatgcccactttggcaccggttcaacgtgataggaactttccccgaggaaacatttaccctgatcccaatgacatatgatgacctcttggcatctctcattgccaaccagatggttgtgatatctcccggaaagatctactaaccttctttccaaagtggtcaatcctgacgcaacctgcttttccttgcgaaaaccccgggccactacaccaaacagtgcctggtctttaaacataaagccaaagcttga

SEQ ID NO: 245387 - DNA, 286 bp, Glycine max
ccttaggcacttctctctctctcgaatatgctgaggaaaattatttccgtgaagaaaatccaagccgaggcgcttcctgaacgtgtccgtgagtaactacgcgaagattctcgaccgttcttcaagatacatcgttcgctcttcgttttcttcagtctttaacgggtaagtgcctcaaaccaagcttttcaattgattctatgtacccgcggtggccacattttgttgcatgtatttttattcttgctttcgcctactttttataccccgttctgacgtgcttaag

SEQ ID NO: 245388 - DNA, 393 bp, Glycine max
tcccacatcacatccctatatatccactactatatttttgaattcttattacctccgaattaaatatgtcaactacggaccgatttgagcaacttagcacgtagcatttgaacttgttttatattattctgttctctttttgttggatgttggtttttcctatgttttgtcacaaaatttctgacggtaaattaacatattgcagttgagttctcatcagtgatgatttgtttgctttgtcgttgctataaaagatccaagatcaagactggtagcagtttaaacacatttctgactctcattatggatataattctgagtaatatggaaaaagaaaagccaatgaggtatactggtgagcagctcaggattggcactgataactacactaca

SEQ ID NO: 245389 - DNA, 335 bp, Glycine max
  unsure (1)..(335): unsure at all n locations
cacaatcaaataagggtttattggaagtactcactaccatttgaatattttacataaaaagtttcttatagtatattagttgcgctctttagttcccaaaaatgaagtttttgaaacataactttgtataagtgcgaacatttttgttcacagaaaacatacaataatatttgttttgtgtagtgtgtngcaaagatcctttaagcttttgatgtcttggtcattgacantttttcacatacattcttaatttggccctaataacttattagtaccattattggtttgatttgcaaccatattcactagcatatgaatggtacataagaaaaatg

SEQ ID NO: 245390 - DNA, 281 bp, Glycine max
  unsure (1)..(281): unsure at all n locations
ggccgaaaaagacaactgaacgcttctcacacccttgggctgatgttttgagccgngacacggacatgggaatcacaatccatggctaaaggagtttaggacaagaaaccacagccagaaaatggggagagggattaaacacaataataatattgaaagggatggtgattattatggtgactgtgacccacaataaggagtgaactgttgaaaaggtgcctgaatctgtctgcagcatatttncgcattgtgagggttatatatcaagagagactttatga

SEQ ID NO: 245391 - DNA, 437 bp, Glycine max
tgcaagcttcgcctcgatccctctggtgaacttgttcattttagacagccctcctaggtttagactaacttaaactaagcttcatcctcagatccttcttgttggactagacttagcttaaatagcttactaaagtttaaattaatttagcctaagctttgtcctcagatccctcttgttggactagaattagaccaaacaacattattgtaatagcatacttaaaaccaaaacttaatccgtagatccctcttgtaagactaagcttcaattctgcttcattcaagttctaaggcaacaatacatttcctaatgctaaagtcacctaactaggcacacaaatggttgatcagaccaagagcatacaaaatgtaagcactaaaagaagcattgaacacaagaaacacaatcaattagatattaaaataattacatca

SEQ ID NO: 245392 - DNA, 392 bp, Glycine max
  unsure (1)..(392): unsure at all n locations
tggagagggttaccactactggaaaacccgaatgcaaatttttatcgaggcaatagatctaaatatctgggaagccattgaaatagggccttatatacccaccacagtagaaagagtttcaatagatggtagttcatcaagtgaaagcataaccatagaaaaacctagagatagatggtctgaagaggatagaaaacgtgtacaatacaacctaaaagccaaaaacataataacatctgccctaggaatggatgaatatttcagagtttcaaattgcaagagtgctaacgaaatgtgggnacactcttcattaacacatgaaggaactacagatgttaaaagatctacgataaatgcactaactcatgagtatgaattatctagaatgaata

SEQ ID NO: 245393 - DNA, 466 bp, Glycine max
  unsure (1)..(466): unsure at all n locations
agctnctttnacctttctggagagaacaggttcttattattattcaaataagaacttcaaaaaccataataaaaatttaaatccattggcctggagttttatactaaataaattccaacatgccatccaccaaatttactcagagaggagtccaagcaggttgatgattcaagtcaacatgtgcaataactctcacctaagtatagtcttaaatcctggtcgtccatacttatcatcaggggggaagtaagctccacccattaaaggtttcaagtcaggtgaaagaaacacactcaggggccaacctcctccaccatacaaagcctgcacatacgacatgtacacctaaagaaggaaaaanaaatcctctactaaaccttgttaccggtagaaaacctcaatttttctataagcatctcttaaccattcaaaattcaaaggaactttggataacttataaacacca

SEQ ID NO: 245394 - DNA, 401 bp, Glycine max
  unsure (1)..(401): unsure at all n locations
caatataatgntatgtttgaattataatttataagtaaaatggagaaaaacagaagaaggataaatttaacataattagagtaaaaaaaaaaatacattatttaaatagataaaaataagaagaaaagaggtatattttttgcagtacttgtgtgtatgcgtggaaaaagagaataaaaataaattgtatatataaaaactattttttcactaattaaaaaattaagttaaacctaaaaggtaaatctttttatttcattattgtttctttgtaaaaaaaaattatttattattgtaatgttatataaatatttaatatttaagtaaacggaaataaaaaatgaaaaaggagatttattctctctatttcaagtcaacttgagagtgttttttatatatat

SEQ ID NO: 245395 - DNA, 386 bp, Glycine max
  unsure (1)..(386): unsure at all n locations
atataactacgcaataaattattacattatcaattatcacctaagcgacgatcataaatataaaaagttaaacgtttgcaaatatcggactctaaaatcaaaaaatattcattaacaataaattgaaaaaatatatcgtatatataaaaaacatatttaaacgaatcaaatatcaccatttttntattcaagtatgagtcacagttcaaccactttttttttttaagaaaagacaacatgagtagtatttattccatttggagatagagtatgcgtaaaaataagacaagttgacccgcgcatgtacccgccccgccacccaccgtgggcccgatcaaatagtgtatccggccaatccaacttctcaagcgggaacccagttcact

SEQ ID NO: 245396 - DNA, 347 bp, Glycine max
ttttaccaagggcgcagcttcgcaaaaaccccgacacccttcggcagctaaacctgtccctttcccataccaaaatagccacacaatcccatggaagtacacaccttcgaacaaaaaggaagaagaagccaccgacatcagttcattgtcggccaaggtaaccaatatcacggggctgagcggtgtgacccacagcggtcgcgtgttcgtgccccccgacctaccaattcagcccacgaacgtcaagggtaaggcaaaggtaatggaagaacaagatgataaaacgcccctcactccgaatgaggatattccggtgaaaagtcttctggagaaaagggatggttatg

SEQ ID NO: 245397 - DNA, 189 bp, Glycine max
  unsure (1)..(189): unsure at all n locations
gtcaccncaacggatcataccatgcggacgtccaattcttctagaaagagcccctcttctttcttgcatactccaggattcctcctcccactacgggactctcgttataactcgtgacggaagtcccagatcaatgtagcttcttttcgtgtgaaaaaaaacacctgagcctggttcactggcgaattc

SEQ ID NO: 245398 - DNA, 411 bp, Glycine max
  unsure (1)..(411): unsure at all n locations
gacgcgcgtaagggctaggaggcggctttctcggcggcagattgcggagtttgcctccggcgcctctctccgggggcgccaacgcggtgatttgatcggtggccatgagagtggccgagtgggcaacggctgaaaagttaaaaataaaaaccaaaaaacgaggtaaaggcaaaaatactgtaagacgtaagtccaaacattgcgctctctcactcaggtacagtacgagtagccgcggatgtacatatactgtagttttgaagactagtcaacgtgtgtcttttgtggtccacctctcattctctcagaacgtcaattgttataagaataaggagaataanattgggggtggtgggtttacgtactgcatcttcatcccaatccgactcttattattctctttccacctca

SEQ ID NO: 245399 - DNA, 390 bp, Glycine max
  unsure (1)..(390): unsure at all n locations
aatcatctttttcaacatctctttcaacaatcaagaaatctatctttcaatcttctttctcaacatcattcaactctttcaacagattttctctgattctttttctcttcatctttctaaaagtttttgttcaaaactttttcttccaagtaaagttctttgttcaaaaacttgcgctattcatctttntcattctcttctccctttgccaaaagaacaaaggactaactgcctgaattcttttgtgtctctgttctccctttgcaagagaattcanaggaccccgcctgagaattcttttgattcttcccttccctttaaacaacagatctcanaggactaaccgcctgagatatcttttggttcccctttacaaagattcaaaggact

SEQ ID NO: 245400 - DNA, 410 bp, Glycine max
gcgtagatcgccctttctttgtttcaatctagcgagcttttttctcaagcacaaaacttcttcactacattagaattcactagatatgagagctctttaccatcaatgtttatgaggatcaaagctcctcttgagaatgttttcttgaccacatagggtcccttataaaatgtgtccatttgccaagcctgtcttttttttttttgtttggaaaaatcttcttcaaaactaaatctcccacttgaaattccctgggatgtaccttcctctcaaatttctttaatctcttttggataactagccacggaaaaattgcattcaaccttttctcctcaatgagatttaattgctcaaaatgactttggacctactctgcttcttttgactctacttccatcaacactcttaaa

SEQ ID NO: 245401 - DNA, 454 bp, Glycine max
  unsure (1)..(454): unsure at all n locations
cttctatataagctgaaccattntatcaataaacacttgttgtgttttattcagaaaattagagtttatctcttttatcttagtgagagtgattctcctaaattcttgagtgattcaagaacaccctggttgtatcaaaggaatttcacaacctttgtgtgttgccctagccggaaagagtgattcttttcttcatttcatcttcaaccatgttctttcaaaccacaattccaaaaaatccacttctgcccagaattatctcgtggctataactcccatttcacgcactcaaattaagtgattcttgagccaaaattgaatttcaaaatgaggtctttcacctcgttttggaatcacctcatttggagccctgtagcttgagttattgccatttctatatttctgtccaaccaccacttaacctacattntaccatcccattcaaccattttat

SEQ ID NO: 245402 - DNA, 381 bp, Glycine max
tgtatgtaataatgtgtgttcatttctagccaatgagtttaaacaacaaaaaaaaaaaaatcattgttttcatcaaaaacaaaactgaaatgaggtttatctatgtaccgaggtttccagcaattctttgttgttaatgatgagcaaaagggtctttttatttttcattttctatgaataattaatctatgttttgacgtaagcatttatctttgcatgtgcagtatgaacaagacggaaagccactacctaagttcggggaatgggatgtgaatgatcctgcctcagctgaaggattcactgttatattcaaaccatcgttgcagagccttctcaaaccatcgttgtagctttcagttattaacacgttttcccttctac

SEQ ID NO: 245403 - DNA, 400 bp, Glycine max
  unsure (1)..(400): unsure at all n locations
acctccacaaaagactactgtctatttatgaaaggnggtgaacttaaggattaattgagacaaatcgaaattgggatgcctatgtacacacacaaaaaaaaaaagatttattttacgaaattattagaacgaaattaaagttatagatatttatttgtaaaagaataaagtgtgagcatcttttttaacaagtacactttcgtatactgctccttagacaaatcaatacataaggataataattatgagtcatttccgaaaactgtgagtattttcgcttatttatattggattaaagggatacacatggtacaaatcatatacgtagtctcttgaaaaacaccacaagttttcctgtcatctaatatgcatacactgtgtattatcgtattgtttacat

SEQ ID NO: 245404 - DNA, 396 bp, Glycine max
ctggtgaagaagaatgtggcatttacctgcggtgaaaaacaagagcaagcctttgctttgctcaaagaaaagcttactaaggcacctgttctagctcttcctgacttttctaaaacttttgagctagaatgtgatgcctctggagtgggagttggagctgtattgttacaacgtgggcaccctattgcttattttagtgaaaaacttcatagtgccaccctcaactaccccacctatgataaagagctttatgccttaataagagccctccaaacttgggaacattacctttgttccaaggaatttgtcattcatagtgatcatcaatcacttaagtacattagagggcaaagcaagtaaacaagaggatgcacaatggtagagaccttagcaatt

SEQ ID NO: 245405 - DNA, 406 bp, Glycine max
  unsure (1)..(406): unsure at all n locations
ttttttttcttacccactcctcacgtttggtttttatggaaaaacaccataactaaacgcgccgcaagggatccctatcgcaccagatccaaatctagaacgatgggtgatcaagaggagacgtatgaacagatgaaagccgacatgtcggctctgaaagaacaaatggcctccatgatggaggccatgttaagtatgaagcacctcatagagaagaacgcggccaccgccgccgctctcagttcggctgccgaagcagacctgactctcttggcaactacgcaccatcctccctcaaacatagtaggacagggaagggacacactggggcacgatggcagccctcacctgngatacaaccgagcggcttacccttatggatttgcgcccaactattcaccacccg

SEQ ID NO: 245406 - DNA, 384 bp, Glycine max
gtcgttcaattctattcttagaaatatgacctaagcgtttgtgccataatgctcctgagtttgtattatcaattctacgcttagtaccacacaattctgcattaaaggatttaccataggaagctacagtatcaagtaaatatagattatcattaaccacgagtgaaccagttccaacaatatatgaattaaaagacatcttgaacacgttgtttccaaatgaacacaaataacccaatttgtccaaataagaaactgaaaccaaatttcatctaaatgacggtacaacaaaagtgtctttcaaatccaaataaaaatcagtacataataataatctaaagtgccatatagcttccacttctaaccaattaccatctccaacat

SEQ ID NO: 245407 - DNA, 343 bp, Glycine max
ctcctacgatgtttcattaaaggtgatttgaaaacttggaaagattggttaccccatgtggaatttgcatacaatagggtaaccaactataccacttatcattttccttttgaagttgtttatggttttaactctctgtctccttgatttgattcatttgcctaatgttaattttatgttgaatagagatagactttctaaagcaaagcttcttttattaggaactttcatgagaagctgaagacttcaattgaaaggaatatggaacactatgctaaacaagccacaaggggaggaataacatataatgtttaagcccagtgattgcgtgtgggtgcatttg

SEQ ID NO: 245408 - DNA, 377 bp, Glycine max
gcacaaggattgtgaattggatctttttgggttaaacatacaaggtaaaatgagatttacgttttggtattactgccctttgattcttttcttttctgattttcccttctctgaatttttttaaactccactcccctcactaccaaaaaaactacaagcaaaagtttgcaagagttatctagtttctagcacttttgttctctccaagatccaaagagtcccattatcttcatgaacatgagaaaaaaatgaaataaaataaaatttatataattaaaaatatatgctccaggaaagaaagctgaatacctgtcttcgttcaaaaccttgacaactgcagagccttggcctccaaaactaaaaccaaacagtattta

SEQ ID NO: 245409 - DNA, 405 bp, Glycine max
tactcaagcttctatagaaggttcattcctaatttctctacaattgcattttctctcaatgagctagtgaagaagaatgtggcatttacctgtggtgaaaaaaaagagcaagccttttcttttctcaaagaaaagcttactaaggcacttgttctagctcttcttgacttttctaaaacttttgagctagaatgtgatgcctctggagtgggagttagagctgtattgttacaaggtgggtaccctattgcttattttagtgaaaaacttcatagtgccaccctcaactaccccacctatgataaagaactttatgccttaataagatccctccaaacttgggaacattaccttgtttccaaggaatttgtcattcatagtgatcatcaatcacttaagtacatt

SEQ ID NO: 245410 - DNA, 253 bp, Glycine max
atttttttgtaattcaaacactaactagatgagggaaaaaaacactcaaaaaaatgtaatatgaagttcttgcgagtttaaaacccctattattaaacacatttttacctattgcgagttgaacccgcgtaaaatatttcccctttccttaaaaaaaaacagttttctgcaaaaaattctctcaaaatacaaacccaattcttctatcctgaaccattttcaaataataaagctttaaaataaaaaaaacaaa

SEQ ID NO: 245411 - DNA, 360 bp, Glycine max
tatgacctttataattatccctttcatattcaggctttctcttatcacacccacccccttagcacaacatatagcccatttgatcaagcctaaactcattaaaattcactaaacatgaaaacataagcaccacatccccacataaataattaatttacttgaatcacttaatttaaatgtaattatacttgataattaattaaaattacttaatcaatcattatgaaaacacacgatgttacatgtgctatgagtggaggtgggggtcatgagctaataaggcggcatgaggaggaggggtggtggctcctgatctgtgggtttgaatatggggttagtgagagaagatatatgaacatg

SEQ ID NO: 245412 - DNA, 446 bp, Glycine max
  unsure (1)..(446): unsure at all n locations
ttcaccccctcttaaattattgatgccacttgtccaacacacaattcattagatacttttccagtaaaaaaacaaaactaaagtgtaggaatagtcttttatcctttgttttaattggtccctaacatttataagttcgtaaaatagtttcttatttatttaatgtatgacatgtatcttttaaaaatggtcattttttttattattgaaacaattgtgaatttttatttatttattcaagacatgaaacgttctctgttagattcacctacatgacaactataagagtcaactaatatttaacanaaaagtcaataactcagtgaaaattggaaaagatattagattttaagtttttattactcatgagagcacgtttatgtatttgtaccctattatgtcttgttttattaaaattagtgatttcatagttctatcataataaa

SEQ ID NO: 245413 - DNA, 401 bp, Glycine max
  unsure (1)..(401): unsure at all n locations
cctcattgcttcagggcatgcatgcaaccagctgctggctatataacacacacgccatatgccattaatgttgcatttccaacattctgattatatccaccctacaaaaataaagaggaagtccaatatatgtgacaacaaatagccaaatacacacatcaaccacttgaaacacaaataacacacaatgtctttcacaaaatcatttatacggaaaccaatggtttgagaatattgcctcggtccctatatttttntttcaatggtaccaatatcgaatctacattgtcaatcatttatggctttgttatgtatatgtaataaatgtagaaaacatgtataacataactaacaattcacctcaagtataataccgtacatattagcatagtcactccctc

SEQ ID NO: 245414 - DNA, 266 bp, Glycine max
  unsure (1)..(266): unsure at all n locations
acaatctttcacaagcctttctaaagacaattatttggcagtggatagagggaattggtgctagtttggggagatggagctactatgtgctgacaactactacaacattcaaatatggatgagtgtttggtgtgtggcatgcgcaaattaaacacttggtatggatctgcaaaatttatgttttttttntttaacaaatgaactgaatcagtgantaaaatgtatgttctttgtgcataataatttactcttaaaattggttcttc

SEQ ID NO: 245415 - DNA, 369 bp, Glycine max
  unsure (1)..(369): unsure at all n locations
gtctctatatggataagattcttttctttagacttcattntttcttcttgaaacattgtcctctaatcctgcttattctaagtttatctaaatctatggtagagctagagcctangaaggttctccatgtttgacaatccccaagatgaaaatagccgacatcttgttgccaaaccttcccgttgatgtgagttcttggggaagatcaacctattatccctaaagtgatgatccttccactcggcaccattggatcattaaggttgagttttctgaagaatgtggcanatggagcatntaatgctaatgcaagcatttcttcatgttaataaacactcctcttggctattatgttaaacaatcaaacat

SEQ ID NO: 245416 - DNA, 383 bp, Glycine max
ctaaacagattctaatggatcaactttctttgatatctatcaagtagcagtataaaagaatgacatatcttcctttatgaatttggtgaagttatatgtcatgacattcacatgaattaaccgaactaaggttgtttcttttaattaataattctgaagttaaggatatgcaattatattaaatattaaagaaagaatgttgttgttcacattatttttatttgaatagagcgaaattatctttaacaaaagattcatgtagtctatatcataaaaattaataaattaagagaaaaagtttaagttacaaatagaagatgttttatctttaattcttttaaaaaaaatgtacttcttctctttctgaccaatgcttgattcca

SEQ ID NO: 245417 - DNA, 381 bp, Glycine max
  unsure (1)..(381): unsure at all n locations
atttgaatttctcgagagctctctatgtcttatttcgagcgtgtcgatatattattcgcctgaatcggacctcaacgtaaaaaggtatgaccatttgaatttctttagagcatccgctggtcatgttcgagcgtctgtatatgtgatgaacctgaatcggacctgcgcgtgaaaaggtatgaccatttgaatttctcgagagcttccgctgttcaatttcgagcgtctcgacatatgatgcgcccgaatcggacatccacggganaagctatgaccatgtgaatttctcgagagcttcacgtgctcaatttcaagcgtctgcacatatgatgcgcccgaatcggacatgcatgggaaaagctatgaccatttgattttctc

SEQ ID NO: 245418 - DNA, 430 bp, Glycine max
  unsure (1)..(430): unsure at all n locations
accactccttgcttgtattgacatagtttaataatatattatatatcacatagatgtgtgacaacatatatgaatgatatttggcccacccatagttttgttaattttctccaaacttataagagtttggttcaatctatctagttgtgtgtgactcgaacagcccaagaacatcaagggtctaattgggtcttctgattggaggctcaaccttttattgtagtagtgtataaatgttatattataagataggggcaaccaagattatggcaatatagatttggcattgttgaaaattgaaatagtatcccctcctanataaagctagagtatagaatgttgaaggctacctagtacctacaatgtgttatctttgaccatagatctagtggnggtggcctcatataagaattgtagaagaatatcacac

SEQ ID NO: 245419 - DNA, 277 bp, Glycine max
  unsure (1)..(277): unsure at all n locations
gctgtctatgtattcctgaacaataataacaataataataaaagtgagcaacaccaatgcaacttatatntcactactgcagtttaactggagaaaacaacatacagcaattgctggacaaacaccgcataattgtaagagctcattataaatatgggcatggactcataaagtaaaaaaaaaaaaaaagtttatagataataaaaaaaggttgaacttggaaaggtcaaattagttcggtaaatttgagtttgagcaagttatatcccatagatgt

SEQ ID NO: 245420 - DNA, 266 bp, Glycine max
catccacatattgcgcatatacccaccatcccctggttgccaacctcaactgagctcacgtactcccacgtagcccatatcttcgtttctctcaacaccgggtccccatcaatcctcccaagctttgcccaacatccatgtaattcaacatccaaatcatcacaaactaacaaaccaagcaaaacatggcaaatgcagaaaactctgcccaaaacacaactcaaaatcacagcttttcacatacaaataccccagtgacatttcct

SEQ ID NO: 245421 - DNA, 250 bp, Glycine max
aatcttaactctcttggtcttggtttaaagatgagagtctagcttattggtacctatttatatatagtggaggcgtgtgaacacatattattaaatgttgcaccagaaaagcctatgagccgcgtctgattggatatcaagaatgtgatatagaaattctatgaatttattaagaagttaatatatttcttaatgatagcttttaatgttcctctctaatgcatcgtgttgattgattatatattatgaa

SEQ ID NO: 245422 - DNA, 425 bp, Glycine max
gacaaccttcatgtcgttttttccttttcttgggaatgttcatggggggatatatttcgcaattaataccaagatgcttgcatcaagatccgctgatgtgttgtctgtttgctatgcccatttgaaaagaacagctgcaaaagtcacttaatatgcgtagagaactatgcaagaagaaatccggatgtgctattaaattcatgctatacggttctatttccacaagttgcattgttttcaaccttattcatgcacataaatatttgtatgaatattgtattgcatcatgccacctgctgtgatatcactaaaaacgttacatcggagagtgacagaaataataatccattttcaattaacgtattctgtagtatgtgtcctccgtcgcgcaaatactatacaagaaaagagtgtactttatattc

SEQ ID NO: 245423 - DNA, 392 bp, Glycine max
aaagatttaggatagcgtactcagcaaatatgaagaattaaatacgaacttgctcattaatctactcattgtttatctttgcaaaactgcctttcgagttgtagaacaattgggaataatgttatattgttgctacttgtgtggcataatattaaaagttaattataaagcgcgtgattgaacattatttcctggcatatatatgctatcaatcttgtttggtacacacttacaccaattctcgtttagtttctagtaccacaaacaccaaattcaaaacaaaaatgtctcgtatctttgttgagtttggtggtgaagagagaaatatactggatagatattatagagagattattatgtaatatatgttaatatgtttgttatctctaaaa

SEQ ID NO: 245424 - DNA, 269 bp, Glycine max
atttccaccatggagatgcagcggaatgcaaatgagaagtaaagatgggagacaccatccattatggaataagccatggaagaatgagtttcaccaccaagaatgtgcctaggataagaagcttgagatgatgctttaatggaggaaaagaaagaaagatagggggagcacgatattgaaggaataaaagagggagagaagtggaactctgaagtgtgtcttataagactctcattcatcaaagttacaacaagtgttacagatgcttc

SEQ ID NO: 245425 - DNA, 340 bp, Glycine max
atgatggctgtcgaagtgatgtgttaataatttgaacgcacgaaaatttacaccttgctatttcttcattacaccattcacagaatatgttaccactattcatccaatgttgcgatgatctgattagcaaatgggaggaaatgctgtcttcatatggatcaagtgaaattgacgtatggccttttgttaagaatttgactgctgatgttatttctcgaacaacatttggaagtagttatttataatggagaagaatatttcaacttctaaaagagaaaatcgaacctacactgaatatgagaggacagaggtatgactaatatgtatatttgattatctg

SEQ ID NO: 245426 - DNA, 362 bp, Glycine max
  unsure (1)..(362): unsure at all n locations
cttccgtactcacaatatctgtcatactcacatttgagtcacgctgaccggcggaaatacccgagtggttatccgtataaacattcttcttgctatctgtaagacgaanagcctgatatcatgcgaagactgacatcgtcttctgcgcccttcgtctatctcggacgacaatgccattgacacgcggagatttacgtcatcttcggcgctcacaagatctgtcatactgacatttgagtcacgctgacgggcggagatacccgagtggttatccgtataaacattctntgttgctgtctgtaagacgaanagcctgattgcatgcgaagactgacatcgtcttctgcgcacttcgtcaatcg

SEQ ID NO: 245427 - DNA, 381 bp, Glycine max
cttcacatacacctgcgctgatacagttgcattcaccatataaaatttatccatcatttgcacacattatctacaataaaaaccgtctgttttttaaaaataaaggtagattgtttgcacctttcaacttatatgcctatgcatatcacacaccttaaagttcaagagtatataatcagcttacgaaacttttgataaattcgttaaaatttcatagaattattacgcgacttgcattcataccaaaagtcaagtggtaaaaacatattcttgaatatatatgtttcttctgcatgcgtaccaattaagttaacaatgtacttagataacgggaagctaccaataaactaacttgtcattaagtatgtgacatcgttgggg

SEQ ID NO: 245428 - DNA, 361 bp, Glycine max
ttcttatggtccacttggacccatttctaccaactacaaaccctaataacactatattatctacacaaaaagtacacttctctatatttgcatagagggtgtttttcctaatgactgaaagaaactgcctgagatgttctaagtgatcatctatgctcctactgtacactaaaatatcatcaatataaacaactacaaaaatctacttatgaaatcccttaagacatgatgcataagcctcatataggtgcttggtgcattattgagcccaatatgcatcactagccattcatacaaatcgaacttggtcttgaaagcggtgtccactcatcacccttttcatcttgatttgtgataccac

SEQ ID NO: 245429 - DNA, 285 bp, Glycine max
  unsure (1)..(285): unsure at all n locations
ttacttcacatataaatgataaggaatatatctgaatggatacatcattganacatgtttagaagaattaataagatattttcactgctggatcagcagacctaactaatgacatgattttctcgttacttgtttcacgctgaatatgaagttgtatcaaagtcatgacttattagtcagtataatgctatataatctgcaataaattaaaactattatggcttataactatttgaggctttctctcatcatccaatcttgttgaacctaataggatgactatgc

SEQ ID NO: 245430 - DNA, 367 bp, Glycine max
  unsure (1)..(367): unsure at all n locations
caatcccaaacaatgtcatattacatcaactcctttggtcatttaatgcatccatcgatgcatttgcatcttgttaacccattgttcaaatcaatggaacatggctatatggaagatacatatggacattgttatttgcaattgcacaagatggcgctaacaacatatttccattggcattngccattgtcgagggtgagataacaaatgggtggcactttttttngctaaacttgagaacgcatgtgacaccacaacatggtatatgcttaatctttgacagacatgagtcaatcaatagtgcatacaaatgacctgataatgggcgggcagctgaaaactcgtcacatgtgttctgtattaacac

SEQ ID NO: 245431 - DNA, 203 bp, Glycine max
ttcagcctctcgatatattacaggaactcaatcatcatccgataaaaacgttattgtcgtttgaatttgcacagaggttcaacattcaatttcgagcgtctcgatatattacgggactcaatcaaacatccgaataaaaagttattgtccgttgaattggctcagaggttcaacattcaatttcgagcgtctcgttatattac

SEQ ID NO: 245432 - DNA, 346 bp, Glycine max
atatgcactttcttgcattgtaatttgctttatcgtggtgtaaccgtccgcattgtgttccttcaacgttagcaagatgttgttccgtgtcaccatcgactttgtcattataacaataatatttttgtcttgctcagtcaatcgcccaacgtgtggatgtccaactatgacttcgccacttcatgattatgaataccacatatcaacttcaccatacaacctatccttcacgcactggtttcccacgaagcctatatggacatccacattgtctactccagtgtcttttcaacaaattctgtatttcttcactcgtacgtaccacctctttcacacccaattaaca

SEQ ID NO: 245433 - DNA, 404 bp, Glycine max
tttatactcaagctgttgattatggggatccatcacatgtggtactatgtggctggtatgcgatggtgcataacacgttctacacatccactaatcacgtattaacccaccatcccctattgcccacctccaactgagctcacgtactcccacgtaacccttatcctcattcctctcaatgtccggtccccatcaatcctctcaagctcccactacatccaagaaattcaacttcccatcatcacaaactaacataaccaagcaatcatggcaaaggcagaataactctgccaaaacacataccataatcacagcttttcacatacaaatatcccagttacactttctgttgtccaagtcgttaaccggtggatcgactcagatatcttactggaagtctctat

SEQ ID NO: 245434 - DNA, 411 bp, Glycine max
  unsure (1)..(411): unsure at all n locations
ttccgctctgattgaaaggttcctctcggtgtgtgatttcaacagagtttctctgcggctcatggtggctactggtggctgtgggtgatggagataaagctcgggacgtatgaaatgtgtttggaagaaagaatgagaagagaatggctgttttccatggctacacggataaaataaggcctcaagtggttctgctatcgggaaaagaagcgtttctcacacaccataagacatatcacagatcgtaactgtttgatcgtggacatttgtcctatgaactgtagaagcaaatgactgtgatgntgtgatgatgatcatgatgattngatgcanatgatgcaaatgcgcttttcaagattaaattcaagacattgattgcagaatacaagacacaaacatttagatgatcac

SEQ ID NO: 245435 - DNA, 76 bp, Glycine max
cgagatacgtcaaagagaagttttagaaaaagacctaaaaaacagcacgcaaagagaataaaagagaatcgcgcca

SEQ ID NO: 245436 - DNA, 336 bp, Glycine max
  unsure (1)..(336): unsure at all n locations
caataacaatgcctatatgttggacctcccacaatattatggagtcagccacttttaacatttctgatntaattccttctgtaggtggagctgatattgaggaggatgaactaacaaaattgatgtcaaatccctttcaaggggaatgggatgatgcaatcctccttatgaanggaccatccactatagccatgagcaagatgctccaagaggattgggctatagctgttgaagaangccctatggttctcattaaccttaatgtagatttctgagcccatgggccaagtttgggtccaattctctttgtacatattagactangatgtcattata

SEQ ID NO: 245437 - DNA, 365 bp, Glycine max
  unsure (1)..(365): unsure at all n locations
ttacaccttcttcgcaacacagtattgaaatgaatcaaagtgtttntctaatttctccaacaagaaaattgaaaatatatattaactcatggattaatggtgttgttgttgtcacaaatgagaaattgtaggcatatgatatggatttgtgctataataaagcctaacttaatttagagaatgtaatgtgaggtctcgaaataaaatttgttaaacattaaaatgaaattaattgtatgttacacggaaagaaagaanaatgttaaaaccaagttatattctaattgctgcatgtaattagaataattttaatttagtgaaatgaatagctccaattttcaattgtatatatgatttttcatatt

SEQ ID NO: 245438 - DNA, 303 bp, Glycine max
  unsure (1)..(303): unsure at all n locations
tagtatgatngaaaattgcaagaatctattattccgaaaattaataatataaatggttacttgtcccttttttcttggctatgtttgaatctgttctcagcactttggaagatgcggttaatgatgcccncatagcaccataagtttcttggccgcatttttgccaaagctataacagagcatgtagtctctttgaaagagattgggcggntaatacatgagggtggagaggaaccggggagcctcttataagctggacttgcagctgatgttcttggaagcaccttggaggtaataaaaatg

SEQ ID NO: 245439 - DNA, 217 bp, Glycine max
  unsure (1)..(217): unsure at all n locations
tatttaagaattgcaccaacagtaccacatgtactgtgtctgaacacattntaagaaacatgctaatgatattaattgtttcaaggcggtcaattagcacggtgaagttctaactttattttcaatgcatatttatgggatccaaccgagaatgtccatttcaattgggtgtacaagaagcgtgagtgaatgtatacctcctaatatccgtcttcca

SEQ ID NO: 245440 - DNA, 376 bp, Glycine max
  unsure (1)..(376): unsure at all n locations
atgattaanaatatgaaataanatgacatcatgcaatactttaataattaaaaattaaaatgaaaaataattgtgtgcattattaaatttctgattactattattttatcatctattgtataaattattaaggaatacaataaaataagatttttatcctattgtacttgggtggtggcattaaatttggtcaatacataatgagttatactgattctttctttgacttgaggtgttatataatcacatgttaatctaatataaaaagttaatacatgctgagtatattattctctcttttacttgaaatgtcatgtaagaacatattagtctaatataaattttgtaaaanattataaatctataataatatata

SEQ ID NO: 245441 - DNA, 247 bp, Glycine max
  unsure (1)..(247): unsure at all n locations
acatcattaccagttgcctgcatccgaggaaggagatgaaaagtggatgtgtgaataaccaagtggacgaccgatgaccatggggagagtgttngctcttattggtgctgatgccgcacaatccgatgatctcatcctaggtatgtgtttcataaatcaagttcccttgattgtgttgtatgattcaagtgtgacacaattgtgtatttctcatgtatgtgttgaaaaacttgttttgcctatgtct

SEQ ID NO: 245442 - DNA, 326 bp, Glycine max
  unsure (1)..(326): unsure at all n locations
atttcatatcatctntntgaaacatctctttcaacaatcaagaaatctatctttcaatcttctctctcaacatcattcaactttttctatagaattttctgattctttgtctcttcatctttctaaaagattgtgtcaaaaatttctcttctaagaaaagttctttgttcataaacttgtgctattcatctttttcagtctcttctccctttgccaaaagaatgaaggactaaccgcctgagaattcttttatggtacaagttgaaggtacatctactcggggattgttatactaagaacaagagagggtacatctcttgtggatc

SEQ ID NO: 245443 - DNA, 468 bp, Glycine max
  unsure (1)..(468): unsure at all n locations
acgcacctaccttccatctttattttcatatatgttgaaatttaaagtattttagtaataatgttattgattcaaaatatacacactttatcgatcactaatccgtctctcggaatctgtctaactacctttaatagaatctttcattttaattttttttatttatgatacttgaacttgaaactacttattattcatgtgtgtgaagtttattttatatgaatgttggttttgatgggtaatgaacaaggattctgacatgcggaagacggtgatggacttgttcttcgggcaagcaatggaaggtgaggtgcataagaagatgatggagacaggagagtggctctccaccaatgctgagcctataatacttcttcagtgagtactacgctatangtgatgttgatattataaaaaaaaatatctacctattattttggtatgtaattatcatcaatcatatattaa

SEQ ID NO: 245444 - DNA, 363 bp, Glycine max
tgttcggttgagtcccgtatgatatcgagacgctcaaaatttatatccgaagctctgagaaaattgaattgacaataactttatacacggatgtccggctgagtcctgtaatatatcgagacgctgctaaatgaaaacgaaagctcgtatgatattcaaacgacaataactttgtacttggatgtccgactgaatcgggttatatatcgagacgctcataattgagactagaagctttgagcaaattgaaatgacaataactttatacacggatgtccggctgagtcccgtatgatatcgagacgctcaatattatatccgaagctctgaaaaattgaattgacaataacttatacacggatg

SEQ ID NO: 245445 - DNA, 436 bp, Glycine max
  unsure (1)..(436): unsure at all n locations
aacacaaaatgtgatttgcaagtcaataccatgtgtgaggcattcaataatgtaataatggagtacagagaaaagccaattattactctactggatggaatccgattgtacataaattccagatatgtgaagttgaggactatcctcatgaggtatgagggttccatttgtcccaaagttcagcaaatcattgaaaaanatattaaaaagcatgtgaagcatggcgaccacattggtctggtgatgctgatttgtctttgtttgaggcttcaaagggcatggaaaaattttgtgtcaatcttaaacaacatacatgttcttgtataaagcatgagtatactgaattcatgcactcatcaattcatgcatgggataattgtgtcaacctaactantgcattcttattacatgcgtgttctgaattgtatattgtaat

SEQ ID NO: 245446 - DNA, 508 bp, Glycine max
  unsure (1)..(508): unsure at all n locations
ctgcgtgtccaagctagaagacattttttatctcatctcttctccagtagtggactttattttccaaaggattcctttttttttttctctgtttcggtgccacattccacatacagggatggtgggatcagtaattgagagattactaataagagctgaatttgagagacatgggcaaggaaaaagatggagaatgaaaaagaataacggatagaaaccatataaagaanaaagtctaaaaaatttcaaaagtttgaatgtgattgtctaatgggtatgataaaaatctcaaaagtttgaatgtgattgtctaatgggtatgatatttatattttctactaaaaaatctcataaaatgtatcataattcatttanaaacaacattanaatgtgaaaactgtcgaatatcacgagactttgtatanactataaaaaatcttaattaaatatcaacagaatttattataattagataaatatcataagacttatgtgtatcatttaaaag

SEQ ID NO: 245447 - DNA, 300 bp, Glycine max
tgacaaacaattagacatggtaacggttacctgtgataattcctccatctttacatcatgcattttcttctgtgcgagcatatcttcttcttttctctaagatataaaaatgagcttataaaaaagaatacacaagataacatgggccggtgccggggcaggagggaaattatggtaataatatggaacctttagagcttccattcggtcacctaaagcatgcaacccctccaaaagctttttgctataatatcactggagcgagcctgcttaaagaaggaatgcttcaacaacttgctt

SEQ ID NO: 245448 - DNA, 209 bp, Glycine max
aataagccatggaagaatgagcttcaccaccaagatgagccttggataagaagctcggagaggatgcttcaatggatgaaaagaaagagggagagaaagagggagggggagcacgatattgaaggaagaaaaagggagagaagttgaactttgagttgtgtctcacaagactctcattcatcaaagttacaacaagtgttacacatgct

SEQ ID NO: 245449 - DNA, 261 bp, Glycine max
  unsure (1)..(261): unsure at all n locations
aacaagtggtatcaatacaggtatcttgtataaagtttcacaactacaagattcatggcctccttaaattntctgtttctggaaagaaattccatccatatgccacccatatttaatggtgatggttaccactattggaatatccgaatacaaatctttattgaatccatatatttaaacatttgtgaagcaatataaataggaccttacatacccaccatattatatgtatgcactatcaccacaacacataaacctata

SEQ ID NO: 245450 - DNA, 428 bp, Glycine max
cacatgttacatgtatgatagtttcttctttgtctccatcacccagtgatatgcaatcatcaccagtgccgatttgtgagttagtaatcttcacttgagttgattttccaatgtgaattccatcaatattggaactaatatgcaggtgagctaactctgaagtttggtaatgtaatgttctcgcacccaaaaatattcacatgaaaatatttgttatcactttgaagttatgtccataattattgaattattgacaaagccaaaaccaaaattatgcggtaaatattaccaaaagtacataatagttaattggtatgaaatgtaatcaaaatgcattagtacatactaatttaatatatattagtaaatacttgttatattaacatggcaagttcttgcaattcttgtatttgctgaacaattatttg

SEQ ID NO: 245451 - DNA, 397 bp, Glycine max
  unsure (1)..(397): unsure at all n locations
tcattgacatcttntgtcttgaatggaatcgccatgacacggttattggtactgtctttgatgtttggtagttgatattgtgttgcgggaggtaattccgattggattaactcaccatccttcacttgccaattngttatgacatttgttgttggatcacctatgatgtcttgtttccaagggtaatcttgttgccatcagaaagggtaatcttgttagatcacaaaggatatagattgccatcagaaagggtaatcttgttggatcacctatgatggcttaagaaattaatgtaccatatctgaaactttcatatggaatatctccattggcagattgactacggattttatctctaaccttgtctgctaattgtcataccctaatntcgtctggg

SEQ ID NO: 245452 - DNA, 294 bp, Glycine max
  unsure (1)..(294): unsure at all n locations
gaaaataattggaacggtggtaattcaatttgaaaactttttcataaacaatttgctactggttatcgattacaacaatttggtatatgattaccagagaataaaaactctttggtaaaagttttgtcataaactcatgtgctattcaaagttttgaaaaacttcttaatacttatcttgattgagtcttctcttcattcttgaatcttgatcttgattcttgagatcttgaaccctgaatctngattcttgtctctaaactttcttcttgagtcttgaaatcttcttgattct

SEQ ID NO: 245453 - DNA, 192 bp, Glycine max
  unsure (1)..(192): unsure at all n locations
gcttcaccaccaatatgagccttggataagaagcttggagaagatgcttcaatggaggaaaagaaagagggagagaaagagggaggggggagcacgatattgaaggaagaaaaagggagagaagttgaactttgagttgtgtctcacaagactctcattcatcatagntacaacaagtgttacacatgcttc

SEQ ID NO: 245454 - DNA, 371 bp, Glycine max
taactatgacctctccagcaataggtacaatcccgaatggaggaatcatcccaaccttatatggtcgaatgcttcacaacaacagcaacaacaacagtcttattttcaaaatgttgttggcccatgcagaccatacgttcctccaccaatctatctacaacaacaacaacaacagccccataaacaactaacagttgaagcccctccgctaccttcccttgaagaacttgtgaggcacatgactatgctaaacatgcagtttcagcaagagaccatagcctccattcacagcttaactaatcagatgggacagttgctacacagttaatcaaaacagtccagaaatttgtatataccctctaatctgtcta

SEQ ID NO: 245455 - DNA, 397 bp, Glycine max
  unsure (1)..(397): unsure at all n locations
acgattccatacattccctggataatcgttgatctctatatatctccttcaaattcatatattgattgattcgcttgcttcgattggagattntgttccaacaactgagcatgttgataacattcttgatggactacccgatgagtttgagtctctggtcacgctcatcagttgtagatttgagtctctcacaaatgatgaagtcgaaactctccttgctcgtgagactcgcattgtatagtcttgcgagaaatcaattgcttttgtcaatctcactgagacatccacacctaattgtaccccaattcctcgcagtagatgtcttccaccaccactatatatcctcaatgctatgttggtcaagctaacactgattctacctactacaactacaatg

SEQ ID NO: 245456 - DNA, 299 bp, Glycine max
actattcgtatagacattactcattctcttttatattttacatcttactacctactttacttgtcaagatatgccgccacttgttaaaatatgcattcaatgttattttcttttaaaatctatactttgaaaatagatgtgtttaaaatataatctatcaattttaatataattgtaatttagattttctttgtaatatgacaagtcagcctgttggctcgccatccacccatatacaggatgggccatggtgtttgacccatcctaactaatcgggtcattctgccccgacccatttt

SEQ ID NO: 245457 - DNA, 509 bp, Glycine max
  unsure (1)..(509): unsure at all n locations
tactaagcctgtaatgcgtngatgaaaatggaagtgcaattgtaccctcttctcttgtgcatttngcaaatctttaaagtgtggagatttcagatagtcagagnatggagtcatttccaaaagagagaatgccttcctagatttccatgctgaccatcaaaccatgtgttttgtaaaggcaagtttcaagagcaatggagggagagtggaataaaatcgctcacattccatgcatgattgtcaataacanagtgatgattatatagtgttcaggtcaatgttctcgtcaagctaacatttctacataagagaatatntgctacggtcttccaactgcttatagaattcattacatcaatatcannaatatcatttatcacgttgaaatctttgttttttctttcttaattcatacacccatgaatagaatgganaaatcaatttcgttgtgacacacacacttcactttgtattcatggaatggtagtcatttacattacctctacctc

SEQ ID NO: 245458 - DNA, 427 bp, Glycine max
  unsure (1)..(427): unsure at all n locations
tgtctcatcgtttatgcgagacggagaccaacatgctatctatcatcgctaagtaccaagaagatgtgggtctatccatggcccacgagcatataatcgcggacgagtatgctcaagtgtacgcggaanaagaagctagagggaaggtgatcgactctttacaccaagaggcaaccatgtggatggaccggtttgctcttaccttgaacgggagtcaagaacttccccgcttattatccaaggccaatgcgatggcagacacctactccacccncaaagagattcatgggcttctcggctattgtcagcatatgatagacttaatggcccacataattagaaatcgttaggaaacttgtatggtctctcagaccttgattagatatgacttcctttntgaaataaatgagttggcccatgtttctac

SEQ ID NO: 245459 - DNA, 269 bp, Glycine max
aaaaaaggaaattatctgacacatgaactgtaaacactaaggagaaatacaacatgagctcttttgcgagttcgtcacgacaaatgccaccccataaaagggtaaacacagcggccaggcaaaaaaaatgcacgtacacgaaccaagttggcgagaaaataaggcgtgaatcgtaaccaaccgacatggtagatggacaaacactgacaagatgaaaggaagaaagaccgtgtctaaacaatgagggacggacgagggccttggtcaag

SEQ ID NO: 245460 - DNA, 249 bp, Glycine max
  unsure (1)..(249): unsure at all n locations
gaatgaagagaaaaggagaaagtgacttgattggtctacaaactctcattcatcaagttcaacagcgttccatgctttatttagacaggtgcttcttgaaagtttctntgagataacttccttgagaagcttctttgagaaaacttccttgagaagctagagcttagctacacacacccctcttataactaagctaacctccttgagaagcttccttgagaagctagagcttatctacacacacccctc

SEQ ID NO: 245461 - DNA, 403 bp, Glycine max
  unsure (1)..(403): unsure at all n locations
ctagtggatggtgcctnctctcacctcttctactttgtcttctgctgcatctccatggtggaaaatcaccattaaaggacctcattgtagctcaaagatctagcctccatagaagccccacatgcatagctccatcatctccaatgtagacgtcgcgtgtttgaactctgcatacaactcttcatgtaactttctgattcaaattgtgattgtccagatacttgaatggactgtggctcanagaatccatacacatcagaattccccgctcacatacttgtctcaattagatgcctattgttgttaagacaaaattaattatgtatgaatgtaaaacaataacttaggtaattaacaataatctaaattgacttacataatccacaactgtataacagatatg

SEQ ID NO: 245462 - DNA, 404 bp, Glycine max
  unsure (1)..(404): unsure at all n locations
tagccctcgtaggtttagactaacttaaactattctttgtcctcagatccctcttggtggactaggctcagcttaaatagcttatgaaagtttagactaatttaacctaagctttgtccatagatccctctttgtggactagacttagatcaaacaacattattgtaacagcttatttaataccaaaacttaatccacagatccctcatttaagactaagtttcaatcctacttcaatcaagttctaaggcaacagtacatttcccaatgcttaagtcacctatactatgcacacaaatgggtgataagaccaagagcatacatgatntaagcactgatagaagcattgaacacaatatacacaaccaattagatattaaagggaatacatcagttggtcttta

SEQ ID NO: 245463 - DNA, 457 bp, Glycine max
gctacttctatagagttcaagagaaggacatcttctccctgcatgtgggttttttatcatctaatgtgtaatctctctagtctcttcatcaagactgttttgtggtgtttcctgggtctatacaattcaaagattatctttcttgtgcatcctactacatttataccaatctttatgtcatataccttggccaatatgttttatatatgaaataacccttagatatgcactgtattatcttgatatgtctatgggattatgtaaaaactgatcttggagtcttaacagatgtgggagtgaaccctaatgggaccctgtgaaaagtattctggcttggtgaacaataaagcaatgacgtgaaatttgttatatgacctcttcttaatgatgggatgatgcaattattgagttatcttgtttttccttaattttagtaccatgtgcaaatgtccgttat

SEQ ID NO: 245464 - DNA, 180 bp, Glycine max
ggataataagcttggataagatgcttcaatggaggaatagacagatggagagaaagatggaggggggagcacgatattgaatgaagataaagggagagaagttgaactctgagttgtgtctcacaagactctcattcatcaaagttacaacaagtgttacacatgcttctattttagact

SEQ ID NO: 245465 - DNA, 451 bp, Glycine max
  unsure (1)..(451): unsure at all n locations
taaatctcaatgtgcttcagaatggagactgcatgttgtaagcttccaaataagatattgtctatccatgaatatacaatcaagttacaaaattcatacttgtgaaccaaccccaatgccaaatatgcacaaagggagagtaatagaccagatcaatccacaaattngaaatgatccctctgcaactagtcatccataatatcaaataaatcatttcctgttttttttttaattgatcaagagttatagtcatatagattatcctattcggctatttcaaccatgttccaacccctcatatagcatgtatatggatgggatggatcctcaaagctttttatcatttatctatccatatagagagagaatattttctagtgcactttccttggtttcaataaaaattattatggatcattaaatttacatgaaaaatgaaaatatataatta

SEQ ID NO: 245466 - DNA, 411 bp, Glycine max
  unsure (1)..(411): unsure at all n locations
tactcaactttcgtcacatcaatctgctactgataacaattctatttgcagttacattcttgtctttctttgtttgacatgcacanttgctcaaattcatgatatgaaactcaaattccatcaaaatcatgcattcaatttaaaacaaagtcatacacccatgtttcacaaatagataaaagtgtttcactgccatgtcatctataataagttaaactgttcaaaatgcttcatgataagcatactaactattcatatataaaactaacaggaagtaaataatgtactataaccataattatactattagatcaaaaagcacaaaaaataatcaataggaatntaaagatcctgtgattggtcctgtgtgtcctgtgtctgatcactcctctcgtcagtcaaatgcagtac

SEQ ID NO: 245467 - DNA, 301 bp, Glycine max
ttgattccactcgagacccttttatatatgttaacttcaacttcttctattgatattgggtcatgacatctacactaacgattgtgtctggctttcagcttatccacttaagctcatttaacctaagcgtactcccactcatattgctaactttatctatcagaagggtaaattaatccatgttggttttacagtgatcagttctcttttagaatatcactcacattaatctgttatcaatgaaagtactaagactagtggtgaacattcacacattgagcttaagtcacacatatatcac

SEQ ID NO: 245468 - DNA, 323 bp, Glycine max
  unsure (1)..(323): unsure at all n locations
acacttgatactcagcttaattaaagaataaaatagagaanatataatacttgattctatgttatataatgtttagtcctgcatttntttagttctcctacattaattttatagctcaacaaaacagaatgaaaatgttaataacatgagttcattcggaaaaaataaaaagtctcgaaattcagatacacaaagctaagtggatgaggatttttttttttttgtgttaaatgctcgaagaaattgcaataaaatgatatgtttggaggttataaagttaaccatggtctatcaataaaatgataagtttggaggctttaaag

SEQ ID NO: 245469 - DNA, 431 bp, Glycine max
  unsure (1)..(431): unsure at all n locations
gcattttattggctacacactctccaatctcttccttctttgacccacctatattagtcagactgcacactcactcactataatgaaccatccttgctcaacttctcatctctgcaaactctccatctttccttcactagttattcccctgccatttcttttgtccccaagtggatattcaaatcgaagatacattgttctcttcaattactggataatggcatccaaggtccgattcctggtggtatccgaaacctcacacttcttcataatcttgacttgtctttcaattcattctcatcttctatacctgattgcttatacggtcttcatcgcctcaagtatctggacctatattacaacaacttgcatgggactatntctgatgccctgtgaaattngacttctcttgtcgaactgatntgcacata

SEQ ID NO: 245470 - DNA, 331 bp, Glycine max
  unsure (1)..(331): unsure at all n locations
acacattgtgtgaaaaatctcccatatcactctcttatttaanatacaaaatatgtctcttatttttcttacattcctttctcctctatttacgttattttccagtcctcttctttatgagtattggtggattcacttactttagatactattgattgtgattacataaattatggatcaatttcttagtttctacactgtactctgtttcacaaactcttattccgtatagttctttgatggtaaagaattaaagaaataacccgtgacactcattatttaccaatgccattntacaaagatgtgagcaatcttggtgttattcataata

SEQ ID NO: 245471 - DNA, 415 bp, Glycine max
ttctctgccgtatgcgcaacatcaatcatgacaatgacaagcttcatccttcatgtatgtttcatgaatcaaacggtagtctggcacctccccagcccataatatcaatactttgaagccactaactattaactaagctatgctttcagtttcatttacctttccactcttatatttggtcagaaataaataaacctgaaagaaagttgaaacgaattatctgaggtggggtggggggatgatgcatacctctctcaccgcgtgtgtacttcgacatcttgtagatgacagtgtcttcattcacacacactttgcacgtcaaaatatcaagataatgcagatgcaacaaatattatgtgttgcgtcgagttagatatatgtggatccaatgaaaagtaaacgataaactaaacac

SEQ ID NO: 245472 - DNA, 321 bp, Glycine max
  unsure (1)..(321): unsure at all n locations
tctgagattcacttaaaattagtgagggaaaatggttctctgaagaanatcctaaccaaggcacttccgtaatgctttcgtgacgtttccgtgggtgatttcgcaaagattttcaaccgttcttcgtcattcttcgtcgttcttcagtcttcaaccggtaagttcccgaaatcaaactttttaattcattctatgtacccttagtggtcctcatttgtttcgcgtgcttttattttcatttcatttacttttcgtacccccttttgacgtgctttagtcatttatttaagtcattgtctcgcctaatcacaaattaaataa

SEQ ID NO: 245473 - DNA, 404 bp, Glycine max
tctcatagatagcgatggatgtataagttttgcaaacatgcattagaaaaatgatacaaaaggaaagagaatgatagacctcgaatgtcagcatgttatggtcatatgaagcacaaatcattcgtagagagcaaacatatcttttggaaacaagatactgacgctaagagtttattttccaaataaccgagataagaatggatgggattcgtgaaccaatgaaagaacataatttggaaacattgggtctacttgcataaatcccgagccttattatcacaatgccataaactggatgcttgagtacccacctatctgtatgcatgactatatttgcacgtttgttccaaaatatcattgttacgcgtgcctcgtggaataatatgggagtgaaacccgaaatg

SEQ ID NO: 245474 - DNA, 255 bp, Glycine max
ctctaatttgggtgggcctaaacgcgcttttttacgagtcaacagtggtcaaaccctttagtattcaaagtggaatcaagttgccacatatgcccgatggggatgcctgtctgaagcaagaatttattatacaccagagataaaacttgaccctaagactatgactacgtatttcattggatatgctgaaacgtctaaagggtatatggtctattggccatcccgatacaccaagattgtggaaccaaggaatgc

SEQ ID NO: 245475 - DNA, 317 bp, Glycine max
  unsure (1)..(317): unsure at all n locations
ttgtaatgtgggaagaccatgtgttacaaaaaggtcagtgggagtgcaattattttcttagtgttatatgtagatgacatattactaattggaaatgacatactaacattgcaaggcccgaagaattggctatcagaacaattctccatgatagatttgggaggagcagtctatattctaggtataaagatttatagagatagatctaaaaggttgcttggactttcccaatctatgtacattgatactatcttaaagagatataacatggataattccatatgatgctatntgcctataggttgtggaattactct

SEQ ID NO: 245476 - DNA, 437 bp, Glycine max
  unsure (1)..(437): unsure at all n locations
ttctgtgttgataatattactacttgtaaatgttagatatataaaatcatggatcggcctacacttaacatcttatagcttttataagaaatgatccttaagagtaattagtagcatgtcttgcttggagtcccaaatgtgttactagcactaatggcatcttacaatattgcagactgtggccctttanttgatgttgttgcgttgtgtttcttgagccttgcatcaaagtatcaaccccgcgaagatttgtccatgtcgattcaagaacgaccacctctatattaaaacattaattcgactggatttatacatttctaaactacctgtcaagtaattggacataagtaattaatagtaatataagaataatagattccatctctgtatggatacctgacgatttgccaataaataatagtatataagattctact

SEQ ID NO: 245477 - DNA, 404 bp, Glycine max
  unsure (1)..(404): unsure at all n locations
cctttatctcagctggttatgtgaacaggacatactggttttttgacttattgggagaaactttacttttgtagaaaatacttaatgtgagttgaatgaacattcctcttaaaaagctgttttacaccgtcaaattaagtcggtctcgaaacctatgtaaaaatatccggttacatttttgaaattaagtataacttaatttttaaatacgataacaacgatgttcggaaaatcatatttgatttggaggttactagaacggggctttatctaaccgtctgtaattgtaagttgaaaataaattcagatctcgtaaactctgtcattttgcttctcgtgcctctggntggatatccgaggcaaccgacgatgataacaaaatgatgttggcanacgtattccta

SEQ ID NO: 245478 - DNA, 333 bp, Glycine max
  unsure (1)..(333): unsure at all n locations
tgtgagtaataatctttgcatgaatctcttgaatttagaatgaaatgtataaatgaggacatgatgaatgccatgattgtacatacacaatccttttgaccaaaaagcttaccttgaatgataattgcatcttttgctcccttgtataaagcttattgatttgtcatgaattgaaccttgaactttaaatgattatctcctaataccttgtttagattctangagagcatatggttcaagacaaatttactctaaattgnggggagaaaatgtgaaaagaaatataagaaagaaggtaagcatcagcacacacaacaaataagttgtatgtaa

SEQ ID NO: 245479 - DNA, 385 bp, Glycine max
  unsure (1)..(385): unsure at all n locations
cagctaaggactactttccttatcacccttatgttcaatatgatggatntgccctgaattntctcctttgaaaactattttatttggaaatccttcccaagacaccattgaaccactgatggaggctttggaggaagattataaagatggaaataagataaatgaatcaaggtagtttattgaaggagtattggatcttgaaaagagaatcaatagactagatacatcgacttagaaattaaatataacaaattgtgtcattgttgaacaaattattagcttataaaccaaatctttaccatgtgttaatatgttttccttatttctgatacgagcataataaaatgacatgaatgttcaaaaaatcaaactacaacatgatctt

SEQ ID NO: 245480 - DNA, 352 bp, Glycine max
  unsure (1)..(352): unsure at all n locations
ccacatgtgttgggtaccccataatcctacaagcctgagatgaggaagtgtngaagggtgaaacttcctgcttttattgttgaccacagagtggtacctggagatatgtcgcgggggtcaagagaccttgtggacgtcaggtggtgtgctatttcccaaaaccaatcttgacctatcccgacccaacccgggcatagtctgtcattgagaacctgtgatgtacctaaacatgcgagctcctggcagtctacatatttatggataacatgaccactattcaaggaggcttgtggtggctggccagctgtgaatnttgtgtaatatgtggatggtggcctctggtaatcgatta

SEQ ID NO: 245481 - DNA, 410 bp, Glycine max
gaagctcaacatattatgcaccaaaatcaaattcaaaattcctcacccctagatgactagattgatgacaattatcacaagtattgcaattaaccacaatatattacttccatatcaaactaaacattaaattctttatgaggagttctcatcttcacttttctttaatggattatcagtacaaaacaacaattgcataagaagttccttggacaatagaaatgacgttgtcgttagtcacgttgcacaacatttatgcacgacaagctctatcgcgagccttcaaggagcccaattcatgttgataataagtattaataacaataagggtttcatgtgagcccttcaaaactaccatcacaactccagatctatcactacaactccaaattcaagatctaccatttcat

SEQ ID NO: 245482 - DNA, 323 bp, Glycine max
  unsure (1)..(323): unsure at all n locations
catgtcacattcattatgtggcttatccaagcaataaatgaagcatatccaatctactttaacacaatgaaatttgaagacaaaacaaccaacctcatttctaaacacatcttgtatcgactaattagctattttcttccaaataaaaaagtcaatattgtattagaagaatatgcaccaaatngatctctactctgtcgctccattttgcttttccaattttgtctttggtgacttgatggataccttactctccacattgtgagtagaagagccaacatgcccaaccttgttaccaaccatggtgatctangcacctcttg

SEQ ID NO: 245483 - DNA, 388 bp, Glycine max
  unsure (1)..(388): unsure at all n locations
cactcaatgtcacagatcatatttcaaaatactgcaataacagaagtgaaaatggtggacttacttgggaaaataattgttttgagagaaaaagcagtcctgccccaatgcataaatacttccactgttatctgcatcaacactgcatggnggaaataaaatgtaacactaattaacaccttattatattagcaacagacaattgaacaataaaaactatcaaacgaaaaaatgtggacaactttcacaataaacaacactgaatactaatactaactgatatccatctcaccacaacagatactgaanactaaataggatgagatactaaaacataatactaattgataaagacatatganatctatctaagttgaaaatgatcacc

SEQ ID NO: 245484 - DNA, 393 bp, Glycine max
  unsure (1)..(393): unsure at all n locations
tttgctaaaatgctttaaaatcctgagcgtgacctttatagtaaacaagccaagcgatattgagccttaaatatgccgatccaaatgcccttgacaagctgctcagctcatttccatccttaccgacaatcacatcgataggggttataccttcgataaggtccttcttctcactcttcctcacgctcgatatgttataatctccaaacttgagtttacaaaaatggacacaaatagtgggatgttaagttagttttaaggggatttcaatttgaaatctcaaatgtgttcattttaatttgtgaaggtttttggtccttctacacaacaaatggatctttatgaacacagngttattccaatagttaatgaagttctagatgggattttatg

SEQ ID NO: 245485 - DNA, 367 bp, Glycine max
tcatccgtctttccaactttacagagaccatcaatcatgtctgtgtatataacaacattgggagtgcaagaattctctatcatcttggacaacactttcaatacaagatccaatcagttttctttaaacagactattaattaaagagctgtatgtatacaaaattggactgtatgcacgctctgacatctttacaaacacctcttgtgcattttcaagttttccggtcttgcaaaacccatctataatagcatcatatactatttggttatgctcacaaccctgaattgacatggtatccaataattcacgggcttctttaaccctgttgctttgcataaccatccccatagcccctatgtataata

SEQ ID NO: 245486 - DNA, 292 bp, Glycine max
  unsure (1)..(292): unsure at all n locations
aacaatgtnaagtaactgtgagtaacgtgattttagtgcatatatgatntacctaatcagttcacaataacatgcatcatgaagttttgaaatgaactataactagcacatagtaattcaaactgataggtttgacaaacattgatgcattacttattgatgcctcttgaatatgttacagctcgaaaacgagcaatgactaatctaatggcttactccatcttttatggttgttgctgttattcttgttgcataagatagaaactgcgtaacccattttgttttggtaggg

SEQ ID NO: 245487 - DNA, 301 bp, Glycine max
  unsure (1)..(301): unsure at all n locations
atgtgctgaatgcactctccacaatgtttcctaaactttaaaacaagaacacaatgtactgtgaaggcccattgaagttgctccttgttcaaactttagagagtacatttgactctatttagtgtaatttgtggaaggaagagtgcgagtgtctcaaatggttggagtcacaagaacttaatttggttctctatgtgaattntggcagtgttatagtcatgagacaccaacaactatttgtattgacctgtggcctatcatatagcaacaaaaagttcatgtgagtgattangcctgcttt

SEQ ID NO: 245488 - DNA, 363 bp, Glycine max
  unsure (1)..(363): unsure at all n locations
atcgattaccagagagtaaaaactctggtaactttcaaatatttgagaataattctttcgaaaaacaaaattgtgctatgatttgtttttttaaataacatttcaatacttcccttgtgaagtattcatgatgtcttctcttgaatcgtgaattaatcttctcttgaatcgtgaaatcaaacttctcttgattcttgaaatntatcttgatcttgaacttgtngactgaatcttgaaatcattctttgggctgtttgtcatcatcattgtcatcatcaaaactacttgaatcaacttgattcatcatcatgaagcttgcttctacaagaaattctagaagatgattagtcagagatatgctcg

SEQ ID NO: 245489 - DNA, 331 bp, Glycine max
  unsure (1)..(331): unsure at all n locations
cacacatatgacatgctcctgagattcactagttgatctcgcaagcaattaacttagactatcggttgtttaccaaattccatcgttaactaattgtcacgcccggtgtgaccggtcaattgtgtgttttggttttaaattaattaaagttttgtttgtgtagttgggttattgcattcttaattgttttgattnntgtatgcattaagaagtgggaaatctgttccacacttaacagaattcaaaactcgtacaatgatggctataccacccccaagttatcgatacaatgatcttccaaatatggatgggcaaccaacgcagacatctg

SEQ ID NO: 245490 - DNA, 421 bp, Glycine max
  unsure (1)..(421): unsure at all n locations
tcaatggtccaccctatatgttgttcttcccattattcatctccctttgtatagttgaacaagcaatgcattcatctgaatcacaagtagaagtggaaacagatagattattttcttcctaaaaaagatagatattttacgtttataagatctaaatttaatttatttctcacatatattgcttaaatcctcttatatgttcacaatattctaattgttaatgtttaaaagactaaaaatatgtttttgatctagtgaaatcgacatataattgatgtaaaataaaatagcagatgtaggtgcatatatgtaaaccttactctgccangaaaattattatctataatcttatgagatgaaaaaactataggatataattcgaactttgtcaaattataataatgaataatatattttagtc

SEQ ID NO: 245491 - DNA, 375 bp, Glycine max
tttcacactggatggtcatgaatggacacatattgtttcctttgcttttgaaagcttttcaacgaacagtgttttgtctttatataaaaatggttagaatgagatcattgagatgtctcatgattatatgacaagagaaccaacgatgggcaacaacaacacataagatatttttggaccactaaaaggattatgttctgtttaatcagtaaatattaattattcgttttcgtttacagagtttttcttttttctccttattataagacaaatctttatctcttaaggatattgtggatattcttaaatgtttcttcacaaaagatgaatggggcttatgttaggactctttcaataaaaatgactaaagtggtt

SEQ ID NO: 245492 - DNA, 416 bp, Glycine max
  unsure (1)..(416): unsure at all n locations
tgctacttatagatcaagtatagcctatgacttattaggatgccattattgagcctaaatctgagaagtggcttaagaccataggatctaagattgaatccatgtacactaacttggtttggaccttgttaagtcaaaagacatatgtgtcttaagatgaatcaggatccttaattatgttgattaaatgctaacagatacaaaggttaaaattgtgtcttatgtgatctgagaacatgcttcatgaatnttgataagatgtttcacatgatagcaagctaaagtcgtgatctgataaaatattaaaggatgacatgtaagacttcattaatactcaatttgagatttgttttganatacattttccctaaaatggcaccaaaagatcactctgntttcatacctactctgatgta

SEQ ID NO: 245493 - DNA, 154 bp, Glycine max
cgagaacaaagagacgcagaggcatataatgggggagaaaaaagcagcgcgcggacccaaaagctaacagacaggagacaagatttactcctcggagtaagcaaccagctcaatctcaagaccaaggaccaaacgtggcactacgactcccgaa

SEQ ID NO: 245494 - DNA, 209 bp, Glycine max
gcattttaaggttccagagcccaccaggtctcttagacaggcaacagtaacattgttaaatcttttctatccaatgaccaaatgtacccagtcatccagctacatttcttgcaacacaccatgttgttcaaaactctctggacaatcgtggatttataaacgcacgtaaactacttgaacttgtataatctgcgaccttatgtaatcta

SEQ ID NO: 245495 - DNA, 327 bp, Glycine max
tgaaatttgccttaagctctttgaatggtgctgttaactaatggcattatggagcttttgagattatttgaaagggttggttcatcgaatttcatcaatgtctttcggaatagctctcaagcctttatccccctcttacccaaagaacaaagagcatatatgatggtgctcgtcctaacaaggtcactgaaacattgaccaagtatggtattccatttcactccataaatatagaccatctcttgtccatttggctataacaatagcatccgataattatgttacttctttgatgaaaaagtcattcacatgaggagatccacttac

SEQ ID NO: 245496 - DNA, 507 bp, Glycine max
  unsure (1)..(507): unsure at all n locations
tcttggatggtctngattttctcatggtccacatggaccccatttctaccaactacaaatcctaataaaactatattatctatgcanaaggtacgcttctctatattggcatagagaagggttttccaaagaactgaaagaacttgccttagatgtcctaagtggtcatttaggctcctactagacattaaaatatcatcaaaataaacaactaccaatctacctatgaaatcccttaagacatgatgcataagcctcataaaggtgcttggtgcattagtgagcccaaaaggcatcactagccattcatatanaccanacttggtcttgaaagcggntntccactcatcaccctctttcatctntatttggtgataacccattttaagatcaattntagaaaagatattggcactatgcaactcataaagcanatcatgaagtctaggaatggggtgtcaatactttacagtnnatgtgtaatgggcctgcatctatacatatctc

SEQ ID NO: 245497 - DNA, 445 bp, Glycine max
  unsure (1)..(445): unsure at all n locations
atcttcagtgcttcacagataactaaatgatatataatgtgatcattataccagtgcattaaaggccccttccaatttatcactctgcactacttgttacctgtgttaggatttcgtttaatgaaagtactatatgcaaaggtgccgaaaggcgtgccaaagccactgaggcatggtgcacgaagctntntttgcttttttttttaatcattntatgcctgctatcttttcaatgagtgtgtctatcaagttaatagtgtggtgaacttatcntattatgcttggtagtgtcgtgcattacagccttcagacattattttcttactctcanngtttgtctgtgacattggatgaatggcaagtgatgaaatagatgcaatgatcgaagttagaggaaattcttctgctaattcaatntatgagaacttatttcccaaggatatac

SEQ ID NO: 245498 - DNA, 497 bp, Glycine max
  unsure (1)..(497): unsure at all n locations
atgaagcttctatgtaagctggatctttgagcttcaattttgttcttcaatggcggattttcaccatggagttgtagtagaagataaaggagaagaggtgagaggaggcgtcatccactatggaataagccatggaagaaggagcttcaccaccaagagagtgtcttggataagaagcttatagaggaaacttcaatggagaaaaagaaagagagagaggggagcacgaaattgaggaggaagagagggagagaagttaaactttgaagtgtgtctcacaagactctcatttatcanagttacagcaagtgttacacatatttctatttataacctaggtagcttccttgagaagcttctttgagaagctntgttgagaaacttccttaagaagctagaacttagctacacactaataactaagctcatctccttgagaagcttnctagagaagctagagcttagctacacacatcccctctatagctaagctcacc

SEQ ID NO: 245499 - DNA, 254 bp, Glycine max
aataaacctgaatgttttatttgctaaatattcttgcatgcttaatttatcaaagagtcgggttcactgaaatctgaatgagatttatttttccacttggttcatcgagaaacatttcctgaaatgaaacaaatcaaccaaccatttaatcctttatattccatgaaacaaacaaaacaccaaccaaccccctaatttaacttcaattactacagaataatagggtgtattaactcttaagaaattttatcaat

SEQ ID NO: 245500 - DNA, 439 bp, Glycine max
  unsure (1)..(439): unsure at all n locations
tctttcacgtagtaaagatctaatacacactcttctattctctctctgctataagcacatatgagtgtctccaggatcaaatctggtaattctaatacatttctattacatgttagagaactatcactttatattattatctcatagataaccaaaccacccactcatttattcattatcccatttccgtaattcgactgaacaatanataaatactaatctcagaatatttccctcaaaagagtaaactcaaaactatttgaacaagtatcctttacttcatatataaccactatattaatgattggtaaaatgcctatatttcttgttcatttatcctacacaaatatatttattgttctcgtaaagcttttaatataactcttccacattcaaacatctttactgttaaaatctaaatacttaagacaaaataaac

SEQ ID NO: 245501 - DNA, 319 bp, Glycine max
caatactgagtcgatgaggagagtcatccattcctaattttgtcccaaacacttccaagttgctccagaaggcccagaactgcccaaagccgaagacaggcgcgaagacaatcccccgagacacataccgttagacgtgcacacaccttgaccaaagaggcgttctcgacaccgccaccagacacagatacgttcagagaagagcccgcgggcccacggacccaggaagtaccaaaagccgagtacccatgctgccaagaagcgcggaagaaccggtaggcaggaccgtcaccgacttcacctctgaatcaggtgaaag

SEQ ID NO: 245502 - DNA, 298 bp, Glycine max
  unsure (1)..(298): unsure at all n locations
atacgagacatcttgccgaacaaagncaagttagcgataactcgcctggtgcttttcttccatgctatatgtagcaaagtcattgatccagtcatgttngatgacttggagaatgaggccgcnattatactgtgccagttggagatgtattttctccctgctctctttgacatcatgattcacttgattgtgcatctagtcagagaaatcaaatgttgtggtcctgttatctacggcggatgtacccgcgtgagcgatacatgaagatcttataagggtatacatagaatctatatcg

SEQ ID NO: 245503 - DNA, 404 bp, Glycine max
  unsure (1)..(404): unsure at all n locations
atagtagacacagatctgttattcactacttggaaaccaaacatcagctgaagccagtccaaaatatatcttcatttaatatgttgccatgttccttaatttggccaagggcccctggtattacgaagtgcagaaacaacagcttgaatctgtaaagcaaatgagtacaagcaacctaatcaacaaattgaacaaaattctagcagagcttattcataagctaanagtaataataataagttggtggcagacaggaaaaaagatgagaaaattattaaccatacattggttcatcataacttctgcctgtgtttgtaacactggtaatgcctaaaccactaaaagacttgatttttctatgaaatatcagtttttgattcagtgactctacaacccttgatctt

SEQ ID NO: 245504 - DNA, 385 bp, Glycine max
  unsure (1)..(385): unsure at all n locations
tcaagtttcaagaatcaagattctagaacaatgaagatcaagattcaagaatcaagagaagactccatcaagataagtactaaaaaagtgtttcaaaacattgagtagcacaagagattttcaaaaagaagaatcttntaccaaagagttttactctctggtnatcgattaccagaaggtagtaatcgattaccagtagccaacattggttttcaaccagatntacaaagttgtaatcgnataccatgagcatgtaatcgattaccaatgttttaaaacgttaaatntcaagagtcacaactagtgataaaacggtttcaaatcattntanacttgtgtaaatcgatacataatacttggtatcgattaccatagtttctaaaca

SEQ ID NO: 245505 - DNA, 484 bp, Glycine max
  unsure (1)..(484): unsure at all n locations
actgtctaacaaattatagtatataagaattttatgctcatttttaggaaaaaataaaagtcatgttgactgataggataaagcaagtttgatcctattctctaggcatgatttgttagtggtgttatctttctgttagtgatgttatctttttgttagcagttactatcttttccatgttnttaaatacgttgcttcatatcagaataaagtaagcctttgcagtctcaatttctttctttatgctcccttntattgggttaatattttgcctacttttattaaanaaaaanaacaacaattatccacaatgtaagaattttaggttcgttgcatgcaacgcaatcataattgcaatttaaaatcatgtctaaagccatgcaacattgatgcggcatcactaaccagcccccaccatcgtgtacataaacatgggttgcatttgggatgattccactcgaagagcagctactaccgaatcaag

SEQ ID NO: 245506 - DNA, 474 bp, Glycine max
  unsure (1)..(474): unsure at all n locations
tatatttactttagttatacatatcttcgtatataaataaattagnnggcttgaaccatttcatcatcaaatttgtcaccagtattatattatagatctagttacagttggtattagagtcaaggtcgcaagagaggcttagatattgatcttactagtgttcacaacttcttatatcaatattntatttttattttgtctatctattntaatacttttgtgttgagtgtagcaccggaaggtgcttanngtgtggtaagcttctctatctagtggtcctgttggtaaactctacaaggatgataaatttattgcttagctagattaggagtaaagatagtcgatcttgtcgtataaatatagcaaaagattanaatgcatagaatttattcatcttatatttaataataataataataataatttattttatttattagaaccacatatngttttacgaataataatttatgt

SEQ ID NO: 245507 - DNA, 502 bp, Glycine max
  unsure (1)..(502): unsure at all n locations
tggatctttgagcttcaatgatgtccttcaatgtgtgatttacaccatggttatgcatcgggaggcacaggagaagacgagaggggaggcaccatccactanggaataagccaaggaagaaggagcttcaccaccaagaattgccttggataagaagctcgacaaggatgctntaatggatgaacagaaagagagaatggtggagcacgatattgaagcaataaaagagggagagaagtggaactttgaagtgtatctcataagactttcattcatcacagttgcaacaagtgttacacatgagtttatntatagactangtagcttccttgagaagctttcttgagaaaacttccttgagaagcttctttgagaaaacttccttggcaagctagagcttagctacacacacccctcttataactaagctcaccttcttgagaagcttccttgagaagattcctaaagaagctagagcttagctacacacaccattctaata

SEQ ID NO: 245508 - DNA, 351 bp, Glycine max
  unsure (1)..(351): unsure at all n locations
gctcttgtgctctaattaccacttgattgaagcttgcttgtgggacttctatggaagatggatctttgagcttcaatgagttcctttaatggtgattntccaccatggagatgctgtggaagacaaaggagaagaggttagaagaggtgccatccactaaggaataaaccatggaagaaggagcgttaccaccaagatgagccttggatatatacttgaaagaatgcttgatggcgaaaataaattggagataaagagagaggggggacacgacatgaaagaaaaaaatgggagaagtgaacttgattgttctacaaactctattcataaagtacaacagtgtacacatgc

SEQ ID NO: 245509 - DNA, 393 bp, Glycine max
  unsure (1)..(393): unsure at all n locations
atcatctatcatctatctttcaatctatcgttcaatatctcctttgatctctttctacagaatattctgagtcatttctcttcttctttctaaaagttgtatatcaacactctttctttcaagaagagttctntgttccaaaacgtgtgctattcatcttatttcattctcttctcccctctggcaaaagaacgaaggactagccggctgaattcttttgtggctctcttcttccttagcanaagaacgaaggactaaccggcggaattcttttgtgtctctcttcntccttaccaaagagtccaaggactaaccaccctagaattctttaattcttccttcccctaagcaaagattcaaggactaccgctgaatatcttgttccctacaaga

SEQ ID NO: 245510 - DNA, 382 bp, Glycine max
  unsure (1)..(382): unsure at all n locations
aagcacaacgacaaaaaattaataagggcgacccaacaagctatctcttgctttgataagtcattaatcgtaatgaacaataacaattaaacaacaattaataaaagagaagtcaagcttattgaaaagctagtaaatacttggaaaatatccatttgcaacatggtggtattaaaaagtcacaacgataataaaattaattaatgcgtacgcaacaagctttctcttgctntgaaaagtcattattcgttatgaacaataacaattaaacaacaattaataaaagagaagtctagcttattgaacagctagtaaatacttggaagatatccatttgccacatgttggtataaaaaagtaacaacgataattaaattaatta

SEQ ID NO: 245511 - DNA, 335 bp, Glycine max
ttaagctcttctctctctttcgaatatgcttaggagaattgtttccgtgaagaaaatccaagccgaggtgcttccgtaacgcttccgagatgtttccgtaagcatatccgtgaagggttttgaccgttcttcaccgctcttcatccgttctttcgtcttcaacgggttagttctcgaatccgagactgtcaattcatttcttgttgttttaagctttcatctttatttcggtcattctcgatgtcttatcttctggctctaaacgcgcctttacctgttatttaaagccgtcttctcacctaataaatgatacaatgaatttcaatcgatcattt

SEQ ID NO: 245512 - DNA, 408 bp, Glycine max
  unsure (1)..(408): unsure at all n locations
tgtgagtgatgatcttcgcatgaatctctgaatnttagaatacaatgtataaatgaggacgtgatgaatgccacgatgtataagcaaagcttcatggtgaatcaagagtaattcaaagatgttttgatgataacaaagatgataacaaaagatgatgacaaaggtgatgacaaaaagctcaaaggtcaatcatagaatgagttcaagatgttcaagatagaatcaagaacacttcangattcaagagagaagttgaattcaagaatcaaggatcaaggttcaagactcaagattcaagaatcaagaaaaggctattcaagaatcaagaaanagcttaatcaagataagtatgaanagggtntttcaaaaactgagtagcacatggagttttctcataacatgtttacc

SEQ ID NO: 245513 - DNA, 420 bp, Glycine max
  unsure (1)..(420): unsure at all n locations
tgcgggtctgtgagacgaacgtcacgtggtcgcgatatgtgaatatgatgctccaatatctctgtgatttggccgaccatgccctcctgatntccagctgggaaattggcgggtggaggaacgccccggcatntacacaacaagcataatgtatactcttacggttctaaaagctctatagttgggcctaggctttagagtattcattttgttaaggctatgagtctcttgtctttgagtttataatacaaagaatcttcttcatctgatcctgggctctacccattctcattcattagcatgtttacttctttatctgagacggcagatccgatgacgagtcccncgaaggtactaatacctgggacccgtctatcatatctgagcaagagatgaaccaaacggaagatgaaggagatg

SEQ ID NO: 245514 - DNA, 373 bp, Glycine max
  unsure (1)..(373): unsure at all n locations
acacatgattgagtaaataattacaaaaaaattaaggacggttgacgtccatgttttatttccagttntgctttgacaatatgtgacgaacaatgttgttttaatgaanatctgaatagattcaaccctatgttctactgaatgttgtgtgtaaaatttgtaatactttaacaatgcatcattcacatgcatccatgcttatnnnttctttcacattggtggcattgctcatcgcattctttccttgatatcggaactgtaatcattgtaatcaaaaggatagaacatgctttacgacctccttaccaagcgcgtgctagaactatagtaatgagtgagatagaggaaagttaggagctaatgaaggcaacat

SEQ ID NO: 245515 - DNA, 379 bp, Glycine max
  unsure (1)..(379): unsure at all n locations
tcgtgtgacattcactattagaacaattccgcatgacaattccttcgaattacaaaataaatgaattaaaccccacacgattccttaaatataacaatcaaaaaggaaaaaaattagtaaaacaagtttgcctctcttgttaatctnttttcatccttaagggatntgaagctccaaatgtcactcaccagccaccactgtaggatgtaacaaaagttntgttggagaacaagtccaacattgatgggttagaaacaagttgaggggtatataagcaagagtgtcatgagtccaaagtgtctaatgcatttggacaaacagatcactcaagctaagtctaccaacacacactctcattcttggacaanggcccacacac

SEQ ID NO: 245516 - DNA, 295 bp, Glycine max
  unsure (1)..(295): unsure at all n locations
ggaggcaccatccactatggaataagccaaggaagaaggagcttcaccaccaagaattgccttggataagaagcttgaagaggatgctttaatggaggaaaagaaagagagaaggggggagcacgaaattgaaggaataaaagagggagagaagtggaactttgaagtatgtctcacaagactctcattcatcaaagttacaacaagtgttacacatgcttctatttatagactangtagcttccttgagaagctttcttgagaaaacttccttgagaagcttctttgagaaaac

SEQ ID NO: 245517 - DNA, 448 bp, Glycine max
  unsure (1)..(448): unsure at all n locations
tgttagtgaaactttgtgatttatcaagaactagacataatctcgatagttgagaagaactagtataaattctttatgttttattatatntattatctccttcgtttttaaactaacctaggatttcaatttgatctttgctgttgaaaaattntctttgttttaaaaagatttgtaactatcttctaatctttcctgtaaaaatctattgtatgtttttcttaagtttcatcatattataacttcgttggtttagaaaaaaggttntaaatttaataaaaatcaaaatttaatttcccttcttgtgagtatttttctttacaatntattattggtaagttaaattcactctctaaccaaaactaatattataaaataaattnttaaatatgcacttanatacagacttagtggctttaatcaaattcagaggttcaacanatgatac

SEQ ID NO: 245518 - DNA, 397 bp, Glycine max
  unsure (1)..(397): unsure at all n locations
tgatgcttcacgttatttcgctgagtnctgttatcaataccgctaagctgatgctataacataatcgccagcaatgactcaccttacgagtaagctctccttggaagccaccagcaacaagaagatttgaacgaaagagggctacggtctggtgctgctgagtcgagctactgaaactcagataaacgaacggagaaaatatagagatctagacagggtcgatngctacaagaggggtttggtcgatatgcatgaaagagaacaagccacaaaaaggggtatgactgatgctctacttaacccgggcgctatagacttcgacacggcaccaatttttcccatacacggctcactaaaccgtgaatattttgatatacatctagcgtttataccgcta

SEQ ID NO: 245519 - DNA, 219 bp, Glycine max
tcaaccatacatgttctctcaacaatgcttcatttctgaacttaattcaagctaacattagttccctgtgatcggtactcgaattcatttgttgtaatttttaaatacttgacgatccggtgtgctttccggcaaaccggatttcccttgaatatatttgaacgaagaaaaagtggaacaaaaagtaactacaggggaaatccaccaagatttatggcg

SEQ ID NO: 245520 - DNA, 236 bp, Glycine max
cattattcttctgcgtctattcgaaaattcttcaagggatgtacaaattcctagttagaccaaacgagttatctaaaaggcctaatttcgaaaatcaatcaatccctaaaatcttgtaaagatcaataagaagttgcaaattacaagctttaaatatttgtcatcaaggatatcctgcaagattcactaaatgatcattctgtacatcctgtgttatcactctattgtattaacga

SEQ ID NO: 245521 - DNA, 469 bp, Glycine max
  unsure (1)..(469): unsure at all n locations
agaganttctcgagagagacnagtccaacctccttatagtgttgagagcctttgctattctaagactgacagagaacagaagaggaagccatcctgatagcatgagatgattctgtgagtgatttcgaggttctagaggtagaagagacatccccactacttgcatgtattcaatccttcatttttatcttctcttcgttgaaaggaagtttcccatatattgagagctaaatcctttgttggtgctttcctcgtagtacttgatgtcaatacttgtatatctaattaatgatgtcttatgtgttctctgcgctatcagtacgtcatttcagtgaggttcttccttgatcatgtagatgcatgcttngtaggatcatcatcagtgaaactggctgttctataactgatgaatgtgctagtattgttatcataggaccggatggaccaattgtgatgatgttatgcgtct

SEQ ID NO: 245522 - DNA, 421 bp, Glycine max
  unsure (1)..(421): unsure at all n locations
ttacccacatcgatagaaccaagcgtttggacatcatcatcggcnatatcataaccgatgtcggtattagaaacaacatcggctgttagtaaagactaatgttgttggctgactagcaacatctgggcttaataaataaaccgattgtaatatatacatacaacatcgattctagtatatatgactctgtatataagcttcactatataacatctgatcttgtgacaaactgatagcactctttatgttaacatcggatttacaaaactgatgctaacggtattactttacacgccggtactcttaatatcgataaataaccgatgttgaaagtccttatttccctatagtaaaaccttattctctaatagtgttactatccacaagttgaatgatgttattttttatagattaatttata

SEQ ID NO: 245523 - DNA, 427 bp, Glycine max
  unsure (1)..(427): unsure at all n locations
gagcccactaatactaacgatgaaagaaaacacctaccattataatagcccagtctctatagacccaagagagagcatntcaattccctgttagtgataaatatgtaatcatcggtgttaaatactgtctagtaatcataaatgattcacagtattacacaaacattcatagcatatatgatagaattatttaatttatatttaaattaatgttctaagcaataagcttaattctaaaattttattgcttcgaaccatgagaatggatacccaaaagttagtataaaagatataatcaatctggtggcgcaactgaccaaataatcagactttnatatatagataatgcaacacacctgaatacagaacgcaagacccaatatattatgtgctagccaatgcttccgcacagcataccatgcacaat

SEQ ID NO: 245524 - DNA, 318 bp, Glycine max
  unsure (1)..(318): unsure at all n locations
tatgataactcatacttttatgctgcaaagngtgcctaatgctttgcctacccacaactactgcatcagtgtacaaatacataatcattatgaatggtggtaacattggcaagcatgcagggatcacatccgtgcaaccttgtaaaagttctcatacatttccattatgcagagcccaaaaggtgttggaattatgcatagcccaacagtattcaacgtgcatataaatagaacatattcttctcttcatttctctatctttagaaagaagaccaagtgctaattttgtggctctggatgaaaaaaatgtactgactg

SEQ ID NO: 245525 - DNA, 320 bp, Glycine max
cggactctcagacacttatgatagccgccgatgatcccattactgcgttccctacactctctgtcctttcttcacgccgcatcccatgccgagcggtgaccttgtatcggatagacgggcctaccttcttggagaagaaaaggtgtgataccagctacacatagagagccagtgcacaacaaacaattcttgcgctgctcttttcacatacccggtcgaacgtgtcatacatggccaaaatggcgacgaccgagctttccttgccatgatgaaacgcgaggaaagcgtcaatcgctgctaggtccactaaccctctcata

SEQ ID NO: 245526 - DNA, 399 bp, Glycine max
  unsure (1)..(399): unsure at all n locations
tctttgaaatttgtacattcttgctacttatagcctngagctactgataaacatcaaatttaccgtattttcatatgcattttctgaagttntggcattntagttaaatttaagccttgttttcaatcaaattagctntaaattcagtttttactttgtcttaggtacaattttatgttntagttatttttaatggaattttgatagtttttcagcaaaatcaacaaaaagttttggaaggagaaattgaagataaaattaggaaaatcaagagcaatatacttttcaataataaatcagttaaagaagaagataattacttaaattaattagagatattatnntgttggaatttcttgtgaatatctccttaattaaactaagaaaccaatttataac

SEQ ID NO: 245527 - DNA, 483 bp, Glycine max
  unsure (1)..(483): unsure at all n locations
tcacctctctatgagctgttgtataagaatgtggcatttacctcgggtgaagaacaagagcaagcctttgctttgctcaaagaaaagcttactaaggcacactgtctagctcttcctgacttttctaacacttttgagctagaatgtgatgcctctggagtgcgagatggagctgtaattgtacaaggtgggcaccctatagcttattgtagtgaaaaacttcatagtgccaccctcaactaccccacctatgataaagagctgtatgccttaataagagccctccanacttgggaacattaccttcgttccaaggaatntgtcattcatagtgatcatcaatcacttaagtacattagagggcaaagcatgttaaacatgacgcatgcacaatgtgtagagtacctagagccaatttcatatgttatcacatacanaaagggagtaacaaatgtggtagctgatgccctctctatgagacac

SEQ ID NO: 245528 - DNA, 400 bp, Glycine max
  unsure (1)..(400): unsure at all n locations
ctctacttccattccttgtgcggctggacgtatgacaccatcttttttatatataggngagtgatcattatatattctaaagtgtccacttgataactaatactgcctcanatattattttacccttttatcaggttcgaattcaaactccatatgcatctgagaaatcgacaaaattatggctgttgtcncacaacatgtgtcattanacacttatcttggtggcttggtggctgacatgagaggattgggttgtctctgagttttgatgtgaaactaattattaacaaatgtgatttagtntggataagttatataattcagatttacacaacaataatatgattctttttcgattagaattggaatggtatttcagtctcaattcaatacatgaatt

SEQ ID NO: 245529 - DNA, 275 bp, Glycine max
  unsure (1)..(275): unsure at all n locations
catcttggtgtgaagctcttnttccatggcttattccttaatggatggcgcttcctctcacctcttctcctttgtcttccgctgcatctccatggtgaaaaatcaccattgaaggacctcattgaagctcaaagatccagcctccatagaagctccacaagcaagcttccatcanattcactccaacaagtaagtattccatccttggtgtttntgctttccattgatgcgttttcttcatcttttggtgccttaatttgtgagaatatgcttat

SEQ ID NO: 245530 - DNA, 311 bp, Glycine max
ctactttgctgaccaccatacagacctttgtccgttcatgcagcaacctggagcgaatgagcaggctgaagcttatgctgcaaatatttacaatagacctcctcaacctcagcagcaaaatcaaccacagcagaacaattatgacctctcagccacagatcaaccctgatggaagatcaccctaactaaatgggccagcctcagcacaacacagcagctgctctccttcaaaagtgtggccagcaaccatacatctcaccatcaacacagacaacccaaacacaaagtgagccctcaaccttcctaagact

SEQ ID NO: 245531 - DNA, 387 bp, Glycine max
tagctgaacatgaacataacaacaatagttacttcgagcatcgataagtacatattgttattataaatgtgagcatggacctggtgtatggacatacacaaatgggaagtgttaacagttcataccagcatcgttgcgaattgtcatctatacaatggaaccaacaccttgctctccttatctgattatcggtatgaagaagattatctctgaagtgtattcctgtctctgcctttctatccatagtcgtacgaacagtctgacatttgaccaacataacctacatgagagacacaatagtaacctaccacaatactattctacatttattgctgttcatggaagaactacctttcacaaaaaaaaacagacccattcttcatgagt

SEQ ID NO: 245532 - DNA, 380 bp, Glycine max
  unsure (1)..(380): unsure at all n locations
ctctatacacggatgtccgtgttatttccgtaagatatctatactctcaanatntagaaccgaagctctgagataattgaattgacaataactctatacacggatgtccggtngagtcctgtaatatatcgagacgctgcataatgaaaacgagagctcgtatgaaattcaaacgacaataactttttactcggatgtccgactgaatcgggtaatatatcgagacgctcacaattgagactagaagctctgagcaaattgaaatgacactaactgtatacacggatgtccggttgaagtccgtgatatatctagacgctcacaattacatccgaagctctgagaaaattgaatcgacaataactctatacacggatgtc

SEQ ID NO: 245533 - DNA, 332 bp, Glycine max
  unsure (1)..(332): unsure at all n locations
aatcaaagagtgggagaaagcaaaataaaagaatagaaggaaagttcccaatcaaagagtgggagaatgcaaaacagaacagaaggacaattcccaaatcaaagagtaggatgaagaatagaaaggaaagaaaattcccgatcaatgatcgaaagaaaacagaagatatatgcattaaggtcttttagaccagaccacatctgaacaaatacagagntactaccaagtagacacaaaagaagggggggaaaaccatgacctgaagtggtcctcttcctttgattgccaaccanaatcctgtgcgtcggtgacgttgtcacctcactctaaac

SEQ ID NO: 245534 - DNA, 326 bp, Glycine max
  unsure (1)..(326): unsure at all n locations
tctgatgatgttcgatgaacaannanggatcaacttgacacttatgtgcttcaagtgagaagaaatgcttcttcttccacttgtgaagatgttcaaagtttggctatgaagatggttcaaactgagaaacatatggtatttccatcggtttataaacttattgagctagctttgatattgcccggcgtcgacagcatccgttgatagagctttttcagcaatgaagatctataagtctaaattgcgcaatacgatcaacgatgtgtggttcaatgacttgattggatgttacaccgagcgggagatattccagtcacttgatgata

SEQ ID NO: 245535 - DNA, 395 bp, Glycine max
cgagagtacgagggttaagggtagatccatggaagacaaacgcacacgtaataagaacggtttggtttggttagaggaatatggagcatgcaaatggcattggagaaggttgaagatgataatgagtagaagtataagtagaagtagaaggagcatgaaagcgaagcattgctatgaaatgaagaagttggtacgagagagagaggaggtacagtgtccatacgaacagaggttatttgcagagggcagcacgcatagcacgtgacttcgacatttcttccctaacgccaaatattactttgctattcaaggtaacgtcccaacagggtataaatttacacctcacacacatgggagaatagagtgtgctctttttgcataactttttttaaacg

SEQ ID NO: 245536 - DNA, 323 bp, Glycine max
  unsure (1)..(323): unsure at all n locations
gagtacgacagtcaccgctttaggagcgttgtacaccagcagcgtttcgaagccatcaagggatggtcgtttctccgggagcgacgcgtccagctcanggacgacgagtatactgatttccaggaggaaatanggcgccggcggtgggcaccactggttactcccatggccaagtttgatccagaaatagtccttgagttttacgccaatgcttggccaacagaggaaggcgtgcgtgacatgagatcctgngttatgggtcagtggatcccgttcgatgccgacgctatcagccagctcctgggatatccgatggtattgga

SEQ ID NO: 245537 - DNA, 424 bp, Glycine max
  unsure (1)..(424): unsure at all n locations
cttcatagtcatccacctagaacataaagtcaagatcatcacaggatccaaacacagcaacacatagggagtgagttatcacattcctagctaatagagaaacaagataatcaattatacatattatataaatgagataccacttgcttaaacataactctcgtaacttcaccacgttgtcattcaaaattcactttcaatcatcaatcatattacacaagaatcccacactccaatcaagatataataacacatcaatttcataataaacaattaacaagcgtatgcaacagttatgctaagactcaatcctatatgcaatgtggtaccatgttagtgaanaaccaccctatggcgcttatgagtacataacaagacacaccacacaatggggttgcaggtcactctcactaagtaagatcat

SEQ ID NO: 245538 - DNA, 482 bp, Glycine max
  unsure (1)..(482): unsure at all n locations
tcatggtatccacacactatagcccatattgttgggcgtgaaaggtgtgtattggaaaacactcaagtctcacattgtctaaacataaggccaagatacagtatatcagtgagggacaaccctcatcccattgagtagctcttgaggttgagttagacctaaatccacattctaataggctngttctgtctaacaggcatttgtggaggtgggtgttaagaaagtcctcattgccctgtctaactctntgggtgcagcttatttgttggacaacttcaatgcccattgtgtttaagatgaaatctaagatgggatcaaaacttatccttagatccattcattaagagggtcatntaccatattatccatacaccaagctcacaagtgtccgatgtgagggagtgtattggaaaatcaagtctcacatcgggtaaaaatagcgttaagatagaagatataagtggatggaaaccctcactcta

SEQ ID NO: 245539 - DNA, 433 bp, Glycine max
  unsure (1)..(433): unsure at all n locations
ctcctctgctgaccaccatacagacctttgcccttccatgcagcaacctgaagcaattgagcagcctgaagcttatgctgcacatatttacaatagacctcctcaacctcaacagcaaaatcaaccacagcagaacaattatgacctctccagcaacagatacaaccctggatggaggaatcaccctaacctcagatggtccagccctcagcaacaacagcagcctgctccttccttccaaaatgtngctggcccaagcagaccatacattcctccaccaatccaacaacaacaacaaccccataaacagccaatagttgaggcccctccacaaccttcccttgaagaacttgtgaggcagatgactatgcagaacatgcatgttcagcaagagaccagagctncattcagagcttaaccaatcagatgggac

SEQ ID NO: 245540 - DNA, 175 bp, Glycine max
ggtaactgtaatcaaggcggctttccaacactaactatcctaactaactccaccttacccacaatgctaagaatactgccccttctataagtcaaccttgtcttcaaggttgaaagcagccaactgatagcagagaattcaggttactatttccccaaaatctacttgtgcagca

SEQ ID NO: 245541 - DNA, 380 bp, Glycine max
  unsure (1)..(380): unsure at all n locations
ctttatttcaatggaactatttgaatttaaagggatatcaagtgtgctaatatacgagttgatgtaagtgggcaagtcaagcttgcaggttttgggttggcaaaggtagcctntaatagcactgaatttatcttttcagaanattgtcatacacaatcctaatgctggctgcttataattcatatcttntntatgtattttaccttctcangcaacgaaatttaatgatgttaaatcaagcanaggatctccatactagatgtcccctaaggtgtgtcatgctcttgtatcatttgcttggagtaattcctacaaaggaatgaaatcatctttttatatttaaataaaattatatttaaggaatatggaacaataaatta

SEQ ID NO: 245542 - DNA, 448 bp, Glycine max
  unsure (1)..(448): unsure at all n locations
tctctctatatataacactaatgagacacaagttttctaccatgtgatgtgatcctaactaggagcggatcgcttgatacagactactgagatgtggatgatgccacttccgatgaaggaagataagtcagggtagacgccacaaggattaccttgataagtctgacattggttcaataaagaacccagagagaagctctcaccatattttatcaaatgccaaaagtccttntattgaanacaaaaaccaatacttatagtgtatctgaacaaaaagatataaatagatatgggccttctaaacagtttgggccaaaattacaataaataataattattgataaaaatagaacatatttattatgggccttcatattaatctgggccttcagcaacaattaatagtctagatagtgtctctgcctctaggccttcatacttctncact

SEQ ID NO: 245543 - DNA, 492 bp, Glycine max
  unsure (1)..(492): unsure at all n locations
gaacagcgctatgcaatgacattcatggtgctccaaacaatagtggagtatggaggattgccttgagggtccgcaattatgcaatcatgacactcatctccaaactcgaaagtggagaacacatgaacagccctaagcaataacattcacgtggctacgaaatatgatgagaatggaggatcgccttgagggtcctctcttattcaatcatggaacacagctccaaactcataagtggagaacacatgaacagccctaagtcataacattcatgtggctccgganaaggacgagaatggaggattgccttgagggcctctcttatgcaatcatggaatacagctcccaactcgaanatggagaacatgtgaatgacaacgcaattcactcacgtggctccagaaaaagatgagaatggaggattgccttgagggtccactcttatgcaatcatggaacacagctccagactcataagtggagaacacatgaa

SEQ ID NO: 245544 - DNA, 417 bp, Glycine max
  unsure (1)..(417): unsure at all n locations
gacaataacttttcactcggaagtccgattgagttctgtaatgtatcgagacgctcgaatttaaaaccgaagctcgtagcaaattcgaacgacaataacatttcactcggaagtccgatggagtcccgtaatatatcgagacgctcgaaattgacaaccgaagctcgtagcaaattcgaacgacaataacatttcactcggaagtccgatggagtcccgtaatatatcgagacgctcgaatttanaaccgaagctcgtagcaaattcgaacgacaataacatttcactcggaagtccgattgagtcccgtaatatatcgagacgctcgaaattataaccgaagctcgtagcaaattcgaacgacaataactattcactcggaagtccgatggagtcccgtaatatatcgagacgctc

SEQ ID NO: 245545 - DNA, 401 bp, Glycine max
  unsure (1)..(401): unsure at all n locations
taaacgccaacacaacgcgtttgaatgatatgtaccggttaactacgctggttcaacatgagaagatcaaattcaatgaaaaacaaaacccttacctctactggaaagcaccgattgtgtcaatcaacactagagggtgacgatgatcgatgttgaacacacaanaacactgattgcgtcaatgaacaatgaatggtgacgaagaacggaaccaccaccactgggagagcaatgatcaacgtggacctagcacaagaatggtatccttcaatcatangaggaagagnatggtgagagagaattcatcacgttttcaattagaccgaaaactatangaattaatttgcactatataaaaaaaatgactcttattttccatatacatttaaattatgcatatt

SEQ ID NO: 245546 - DNA, 468 bp, Glycine max
  unsure (1)..(468): unsure at all n locations
gctgagcattatcttcttttttntntttatgcaagtaaagacagagtcttaagtggtcaactctanctcatttcaaatacttaagcagcttgattcgtgcaattcatttacaagtactcctccatgtcatttgtgtttgcttgttcaaactctagcctatgtgacantaacaatatattgataggaagtatcctgtatgtcatgttntaaatgtatttacttgcaagcagcaactaaggatcattcaatgataactttgtcatgtttaagcattgaaggcagagttaatacgatgtttcctacatcananacctataccaactgcaatgcanaaacttcagttgtttgttacatgagatgataaccataaacctaaaattgcagaataaactgcccaagcatcaacatcgatactaggttagtaaccactcaaagataaaacagaaacaaataccatctgtgatataa

SEQ ID NO: 245547 - DNA, 347 bp, Glycine max
  unsure (1)..(347): unsure at all n locations
cactaatatgccacttctctacaaggcatgctccttggccttaaaaatgcaggcactacatactatagatggatcgaccgaattatcaagcagcatgttagatgaaacatngaggtctattttgatgacatggtcatcaagtctcatagcatagcccaacacgtggcaaacttgggagaaactttggagagctctgtatatcaacatgtgccttaactctgaaaatgcacttcaatgtcacggatgcagttctggcttatgatcacacatcgggaatagaaccaactcacaaatgctgctatctggaatgcaagcctacaatgtcagaagtcaaagctaatggacac

SEQ ID NO: 245548 - DNA, 477 bp, Glycine max
  unsure (1)..(477): unsure at all n locations
tatatcatgaccatagaccattagttacattttcttatagtangggatgcccttcccaccacatcacatgggacactccaccatgcctcaatgtgaaccttataaaaagcctcaagagtaaagatacacactctaattctattagtttatgatctcttacccatatatatattaacttagagtgatgaactcttataagtgatctcactataattgacaatactctggagatgatgataccctacgtgactaagttaacaacctnttattctgaaataactacgatacgaacaaatgttttaagtatctataccatctatggaaaaataccaatcattttaaaaaaaccaaggtaactcaaaagaaaaagataatttatactaattggtatattaaaaaagataatatggtaggatttcttatacacgcccctcccatgcgttcgaacattctaaaaccgcgctgctatattcatct

SEQ ID NO: 245549 - DNA, 278 bp, Glycine max
  unsure (1)..(278): unsure at all n locations
ccaacaacgagccgagggccatggagataccccacacgagggccccaacacaaagaaaggggcgaaaggagcagacagccgaaccgcaggaagcaccgagccaccagcaagagcgaacagccctaaagacaaccaaaggcggaaggagcaccaaaagaaaggaaagccccacanacggacactgaccgacaataaatgagcccccacaagacaaagaactaacgcgggccagcaacctgacaagcataaacaacaccaacctgcagagagaacacaga

SEQ ID NO: 245550 - DNA, 319 bp, Glycine max
aacacagattaacatagagtgaaagatataatatcacagtataaaacacaagaagccaaactcacaaagaagagataatctaaccagaattccaataacttataatgtcaacaaccacaaaacatccaagactgatatgtaaaaaccaccagataaataagcagaggacttagcactataatgtaaattctaagagactaaaagccacaatacacggcttataagaagacatatagtcagaaactatatatctaataagacggaggtggttgtggaagatcgatactctgacgaatgtatccgacattctctccaagct

SEQ ID NO: 245551 - DNA, 443 bp, Glycine max
  unsure (1)..(443): unsure at all n locations
aaccgagatagggacacacacaaggactacgtggtgtctgcgatgggcacattatttttccacatgcacaatgcgcgcataaacccaccatcctctgtngcccacctccaactgagctcacgtactaccacgtatcccatatgctcagggctctcaacaccgggtgggcatgaatcctctaaagcttccacaacatccaagagaagcaacatgcaaacagcacaagctatcacagccaagcgacatagggcaaatgcagaatactttgctcaacacaccaaccaaaatcacagctgttctcacttatagaccccagnaaccatttcttcgagccaattcggtaaccgctggaacgactccaaacatttactggaagtctatagtacataagcctacattgtgagcggtgggatctacaagcaaacatccaatactcattctga

SEQ ID NO: 245552 - DNA, 374 bp, Glycine max
  unsure (1)..(374): unsure at all n locations
gctcgcgactggtccctttcttccctctcgcactngagttcactatggctaccccatagagctccgcgaaatttgntccggccatactcttncttgcgagccctcttggtctcttgtcaaggctctgcngaattgcattctttccgtacccgcacactcttcaacgtggtacggcaacttgacttctccttggcagttntgctttctaactcgcttttgagagcttggacttctntgtcttcttccggtgcttcanaattctcttcgccgacgaactttaacttggcgagccaatctaaacctcgtatatgaactnttagccattcgtggtacccaccaatgatgccattacgaatgcctctaagctcttgatc

SEQ ID NO: 245553 - DNA, 470 bp, Glycine max
  unsure (1)..(470): unsure at all n locations
acattagaaattttgaattatgtatgagatgagagaagtacccttcgtgtaattntttttcttcagaaactcaaaattgtcttcaataaaataagatccgactaggtttagtcatgtattattctgtaggaaggaacgcatccccaatcgcaccaaataactaatgtgctctncaattttaaagtgtaattatttntaaaataataaattaaaaaagtgacannatttctgttatattccagaattccgttaaccgtgaatgctctctaaccacacacgtccacactagtttacttaatgatcaaatagtatcanacaactagttcgacttcgagattgtttaactgtcttttgagtttgagttgaatntaaaatgaatatgcaattctctaattcgtaaataaattaaattaaatctttggtaagtagaaaatttatatcaatatatgctaatgattaagacaaatttc

SEQ ID NO: 245554 - DNA, 446 bp, Glycine max
  unsure (1)..(446): unsure at all n locations
tgtgaantcttatatagcacacacatccatcttgcangccccanaactatgtatatctccatgctgctgaagtgcctgatattgctcttctgcaggtgccaattattgttattattcttacgaacaactaaacttatacaatattcagattaccatgtcagacattnttntaaagttatgactgagatttctaacaattaaattattcctttctaaaaattaacaacaactaattttaatagattcatgagaactaaaccacatnttgtcacaccatctaaccttatcaaatgtcaataaatattaatgaatgttttacatctgcagtaatgcttcattcaagcaaacaagatagaagtntcgacaagattcctttatagacattttaaatntaatcaatgaatcaatcatgcttcattcaatctgcaagtcctcgtctactaatg

SEQ ID NO: 245555 - DNA, 58 bp, Glycine max
tcttatcgagagcttttagtgttatctgccggcaattttttcgggtgaaaaaaagcac

SEQ ID NO: 245556 - DNA, 308 bp, Glycine max
  unsure (1)..(308): unsure at all n locations
gtttgattcaagatgtgtatgtgactagttgaaacagtatcttctaaatatgacatttgaatgttgtgcaatgcaataataattagagcaaaanagtcttattagttgaagttcaaaggttgtttaatgacatatcattatttagttcttgcaagttgttactccctgcatacgtgagcaanatacttatctattcttttttaaataatagttataaaagcattcttttnttttgtatatagatcctntcaagntcgatgttcctacccagatgatgtggtttatactggcctacattcttccaaaat

SEQ ID NO: 245557 - DNA, 430 bp, Glycine max
  unsure (1)..(430): unsure at all n locations
agttactactgactctcgctgttataaatgattcctacaacaatataaataaggtgtaactaacttcagaaaggaataacanacagaatatccagaaacttcttctcttccctctcaaactctctttctctaatctctctcgaactcgcgtcttcgtcctcacgggtccttgaagcttgcgcaggtcttgtgaatgtggaggttccctaaccctcgaaagctanggatcagtgtgcttcaatcttgatttgcaaatgtatgtggtctatggcatggcttgtacanggatacaatngagcatataatggtagcatgcatcatcttacataacatgagtggttaagatgaatgacatgcataattaaagtagaaatttagattatgatcatataaacaatgacatctcaacatgtgaagtggctaatagtct

SEQ ID NO: 245558 - DNA, 420 bp, Glycine max
  unsure (1)..(420): unsure at all n locations
acatatcngccacaatgagcaaaatgttaagaagataatatctttgataatacactactcaactccccttctcttatgattgttgatattatagttggtatttgagcttggccttaacgatgtaatatctgacaatactaaggaaaagatatagaatctcacagatatagaagaaggattcttgaccaacaaaccatcaatgttcacaggcctaacaatttgattaatggaacgagcgaatgatagctcactttgattcattcatctatgtctatgggacgtggcgggataatgcgaaatatattccatatgatgatcagctgaatgaaatcttacaggccgaggatggaaagcaaaactgcgattctgctaacatcatggctcaaatgtgatgtgtgtgtctactaaaaagagacacat

SEQ ID NO: 245559 - DNA, 398 bp, Glycine max
  unsure (1)..(398): unsure at all n locations
atcagaagcattcaatcatgttantttaggccaaatttattatgttttttttatatgttgcatttgcttcaataagaatgttatgatgcanatgaaattgaacaaaatagtttttatgggccacttatatgctgcagctgcttgattgttgccatttatttttaaatntatgttgctaatagatcagttgcattctcgcttgtgcaggtccagaagctgcaaaggggttgtttaaggaatcccgtgaaggacatctgtaatagttacatatatgtntattgnngtaaatacactccactntcccttgagaaataacattntcacttcagtctattntaacataaacaagcttcctaagcacaaattntctctcttctattttagtattagtgatagct

SEQ ID NO: 245560 - DNA, 414 bp, Glycine max
  unsure (1)..(414): unsure at all n locations
gtcatcatgttgctcatgttgctcccctatctcttcattctctccccttttggctatgatgatgccaaactcgaatacaacattgagtgcaatnggagagtcttgagattggagctgtgatcacttagtcttatcctgagaaattcttaacacttaagaagagattaattcatcatcatcatatatgtgaattcatctatctatctatctatctatctatctatataataacgcagtgctcatgctatgaaatgcaatcaatatgcacatatgcatatgcaccagtgtaaaacacacaagtaatatgagaaataacaccatatttctttaaattaaagcattacatgatcattaattangaaacaaacaaacttatatcattaaactaagacaaaccagacttaacataacaga

SEQ ID NO: 245561 - DNA, 444 bp, Glycine max
gctcgctgcctctacatcctctgccctatgctacatctgttctttctactcttgttgcagaagaatctgcctccatgaatggtagcttaaactctactgaggttacttcacggttacctgttttccgtccagagaaaagacaacaacttgaagaacagatgcgtgcttctgagcttaacagtactgatatggcgagctcttcttttctgggcactttacaacaaccattacttgcaaatgtgccactgactcacttctatcatcttgcacgccatatactagtccaaccaatcacaactgcattagctcatgtcctcacctcctcattccccgtgaaccaccacctatcaagttgttaatctactggattaatggttggggaagtccttatggtatggatgtacaacctaccatctccccttcagcttcttacttcacatgtgg

SEQ ID NO: 245562 - DNA, 389 bp, Glycine max
  unsure (1)..(389): unsure at all n locations
acgatgtgggactaagaccacacaactctaacaattctcccacttggggtctaagatccaaactctaacagctccatgtaagcaatgagttcatccactctttaccaagtgtagcgccttcatcttcaattatccttgaaggccaactgaggcaatgcaaagcctcagcttgtcagttgtaacaaatatagtcaacatatctgctggattctctaatcctaagatctttaacaaagataagtctccattatttatcaactccctgataaaatgacatcttaattgaatatgctngcatctagaatggaagactgcgatcttaacaagacttatagcactctgactgtcactgaacaatgaagcattaatcttgtctttcccttattcat

SEQ ID NO: 245563 - DNA, 365 bp, Glycine max
  unsure (1)..(365): unsure at all n locations
aagagctaccaagagaccagcctctctattttcttgntcatcttctgcccatcggtttttttctttccaattcctcacttttcaatccaaattccaagacttattatattctctgctcatgatttttcattttttctttgctcctagacttgaggcatttggaattggagaaagagaaagaaaatatagcatcaccaagaggagtcttggaagcctgcatgaaagactntgactctcacgaccaatcacatgaatcgaaagccacttgttcaaccacgagggcacgctctcactggtccaaattcttcannaattggaggagaaaatcttttaagcgcctangctccctcccntctcttattagt

SEQ ID NO: 245564 - DNA, 482 bp, Glycine max
  unsure (1)..(482): unsure at all n locations
cagcttgtctcagcgttatgctagactgtatccaacatgttagctatcatctncaagtaccaagaagagttaggtctagccacggcccacgagcatagaatcgcggatgagtatgcccaagtatacgcggaaaaagaggctagaggaagggtgatcgactctttacaccaagaggcaaccatgtggatggatcggtttgctcttaccttgaacgggagtcaagaacttccccgattgttagccaaggccaaggcgatggcagacacctacttccgccccgaagagatcatgggcttctcggctattgtcagcatatgatagacttaatggcccacataattagaaatccgtaggaaacttgtatggtctctcagaccttgactagatacgactttctttttgaaaataaaatgagtggtccatgttttactccaaaagcttgtgcaatcaagcactcccgcattatctctacatgcattgat

SEQ ID NO: 245565 - DNA, 475 bp, Glycine max
  unsure (1)..(475): unsure at all n locations
atgtccgcatanaaatatcaatgactaacattgaccgaaaacctagcctatntgaacaaaaaaatatccataaaatggctttggcaaaaaccctagcttgatgtcgacccaaaaacctagcatatgtcagccaaaaaatggccttggcatcaaccaaaaatagccttgaccattgtcgactaaaaaacatcatcaactgataagttctatcctattntattgtgtacctttttactcttaatgtatnntgtgcccagtccaaccatttgaatgatgtgagaaaagactgtgactggaaagtcatgaatttatttggaattgaaattggatgggtgatgtgttatgacctannggattgttntatattaatttataagagctngcttatatgatcaagatntatgattatcttttatggatatgtggaagtgtaaatcaaatatntttccaaaaatgggcaaaaaaatatgctctt

SEQ ID NO: 245566 - DNA, 333 bp, Glycine max
  unsure (1)..(333): unsure at all n locations
ttgagaatcaaacatcaaccctgagtgacccctccgccttgcgctgcaaccagtgccaaacactgtaattcgattagcaacgatcaaaacatcatatgtgaatgatanaagtattatacccggatgaaattanggtctgacagttgcccctttntattcatcttttattaaaaataaaagataagtaaagataatgacactaatttcatttgagcgatccgactattcaaaactggatgccagagaanacaagagaagtgaaaactgaaaaaactaanagaacattgaagtcctgtaacaccaaacagaggatcttgaagtcctacaaaacat

SEQ ID NO: 245567 - DNA, 321 bp, Glycine max
  unsure (1)..(321): unsure at all n locations
tggtgtcttcatgctgcanactaccttctattgtgcttgctccaatntcctttctggtatttaggaatntctgatggtgtcaatcccaaaagaaaggtggtgtgggatcctataattatggaaattgaggataggctgaatangtggaagatgggtaggggtgaccaaatcctgttctcgaaagatgagtgggctgaggatgggattcccctgaaagaccaatttccagaaaggcagaaattgatggtttctgggtggaaaatcctaanttggttaaggcagaaattctgcagcatttgcagagcagattcaaatcaattc

SEQ ID NO: 245568 - DNA, 326 bp, Glycine max
  unsure (1)..(326): unsure at all n locations
agatatgtcgcgggggtcangagaccttggggacgtctggtggggtgctattgcccaanaccaaacttgaccaatcccgacccaacccgggcatagtcagtcagtgagaacctgtgatgtacctaaacatgcgagctcctggcagtcaacagataaaaggaacacagaccacatagcaaggaggcttgtgtggtggctggccagctgtgaactttgattgatatatgggttatggcctctggtaatcgattaccaagggtgggtaatcgattacaaggcttaanaatgaagacaggaggctaagatggtctctagtaatcgattac

SEQ ID NO: 245569 - DNA, 406 bp, Glycine max
  unsure (1)..(406): unsure at all n locations
tctacaacgttntagaatactggttgtaggagcctatgaagactttatganaganagaataccacaattgggtgcatgatcctactggagaaacctattagtgaggacatgtcactcacttgcttaaggaaaacaanttttgacgcgcatggaaactggcacaatttaataaatgggtttttaccatcaaccaaactacgtaggtgatgattgtgttgcataaaactgaatagagctcanacatgatgatgatgttggaaaaatgtttttcaactattcagagtataataccaaaggtctgattgagttgaatgccaattttgtgtgttcttcagagggaaatctagcccagctatgcacactanaaatagttgatgatataattgctcttatgtgtgataaatct

SEQ ID NO: 245570 - DNA, 397 bp, Glycine max
  unsure (1)..(397): unsure at all n locations
cacatgcattaagtgaatatttgatgtgtgtgttcgaaaataaatttaattgaattgtgagaagcccaatccaattaacatttagagggggaggtgagcatttgcttgctacaccctattgccacatcatattgtcacactttgtgcatgtccttcatgctttacatgcctcatgacccctaagtacacttagtggagaatcttggacttgatcttggattagtgggctgaaccatagctaaaattctctaatcataattaatgaacatgtggctccacaaattcaaattcaaattcaagtgaaaattgaatagagattcaaatttacctccacatttgtgagacacttatgctattaatagaggccatgtgtgtgcatnntttttaactttgatca

SEQ ID NO: 245571 - DNA, 299 bp, Glycine max
  unsure (1)..(299): unsure at all n locations
caccataactcgcctatgctatttcttccatgctatatgtagcaaagtgattgatctagtaatgtttgatgagttggaaaatgaggccgcaattatactgtgccagttggagatgtatattccccctgctttctttgacatcatgattcactcgattgtgcatctggtcagagaaatcaaatgctgtggcctatttatctacngtggatgtacccggttgagcgatacatgaagatcttaaaagggtatacacagaatctatatcgtctggaagcatctattgtggtgaggtacattgc

SEQ ID NO: 245572 - DNA, 324 bp, Glycine max
  unsure (1)..(324): unsure at all n locations
ttgtattttttatgggtggaatgtgttttacatggagttctaagaagcaaggcattgtgacactttctacttgtgaagccgagtatgtagttgcaacttcttgtacatgtcatgccatttggctaagaagattgttggaggaacttcagttgttgcaaaaggaaagcacaaagatctatgttgataatagatctgcacaagagcttgccaagaatccggtgttccatgaacgaagtaagcatatagatacaaggtatcatttcattagagagtgcattaccaagaaagaagtagaattgactcatgtganaactcaagatcaag

SEQ ID NO: 245573 - DNA, 234 bp, Glycine max
  unsure (1)..(234): unsure at all n locations
tcaccgtcatgtggacgttgatgtgcttgttgggctcggngaggtcgagaagcgccgttgtaaggatgacaaaggcctcctcgagatcgctgaagatggagaagagcgagtggaggccatcagtggtggtgtcctanccaaggccgtggaggaagagcttgcgctgggagacattgtggtccgtgacgatgcgcacaacaacaaggacgtcgaggtggcccaccaccgcgtcct

SEQ ID NO: 245574 - DNA, 298 bp, Glycine max
  unsure (1)..(298): unsure at all n locations
cacttcctctntcaactcaccattaaagaaagctatnttcacatccatttgccatatctcataatcatagtatgctgctatggcaagtagaatttgaattgattcgagcattttcgcaagagaaaatgttatttcataatctataccttcatgttgaagatatcctttagcaacaaggcgagccttataagtcttgacctttgtatctgctccaatctttttcttgtaaacccattcacaactaattggttttatatcctttgaagataaactaaagccatactctgttgagcttcat

SEQ ID NO: 245575 - DNA, 376 bp, Glycine max
  unsure (1)..(376): unsure at all n locations
gtctcatacctccattacacttcagttgtacctcagcttgcttccctatnntttattaatttgttcatgtttatatgtgagttgaatctttcccgcgaggaccaaaagataaaaaaaattgtnaatataagaaccaaaatgaatgtcttaaactatagggactaaaaaaaattatcacaactataaagactaaaaggatagttaaatcaaaataaaataaactagtgcaaaataatggtggtatggttagacactnttaatcccaaatgtctcgttgtagacatatatacctctacatnatgtgtgcatttgcaaccaccaccattagtgagaataaaatttaaatgctaacccttgtacggtatatatcctacat

SEQ ID NO: 245576 - DNA, 449 bp, Glycine max
  unsure (1)..(449): unsure at all n locations
ctgcggcatgcagcttctaaggaagcttctcaggaggtgagcttatttattataggggtgtctgtagctaagctctagcttctcaaggaagtttctcaaggaaactacctaggctataaatagaagcacgtgtaacacttgttgaaactttgacgaatgcgagtcttgtgagacacacttcaaagttcaacttctctccctcttttcctccttcaatttcattctccccccctctctctttcttttcctccattgaagcttcctctctaagcttcttatccaaggcattctcttggtggtgaagctccttctttcatggcttattccctagtggatggtgcctcctctaacctctactcctttatcttctgctgcatttcaatggtggaaaatcaccattgaagtaccttagtgaagctcanagatccagcctncatagaagtttcaca

SEQ ID NO: 245577 - DNA, 371 bp, Glycine max
  unsure (1)..(371): unsure at all n locations
tgacaaaactagctaaaaactgaaaaactaactggttgttaaaagttgaaagttaaatgattagcttattaaattataagtgtttgaagtaattgaaaagtgtaaaataataaaaaatttataaagggtaattagaaaattaaataaatatattgagattaaaaattgaagaaaatataaaaagttagaatctagtttttaaaaaacattacttttcaaaaaacctaacagttacaaagaaattactaaaaaacaacttgttttccgaatactcaaataaacttttcatttagaagaaaattaanaattaattaagatgtcttgtcgaaacataacttaagtctcgtcaaaagtgaatcatctcttataaa

SEQ ID NO: 245578 - DNA, 426 bp, Glycine max
  unsure (1)..(426): unsure at all n locations
atctagctagcgtagactcatgccataagttgatacaatntcaaggagttagctctattcatttctgctattttntatgtatatatcaaagtttaactcanaatatcaagttgctgcaaaaaaagcctactgaagcatggttcaagcagatagcattaaaggagaatgaagcttaattgcttttgctttntaacagttatcccaagtaccatatttaggcattgtaacttgtatccgcaagtgaattggatgcagaatgcgtattgtggttaagtttgtcaactagtcataggtttttattcatagtaactccattgcatgcttagtttattacctaaaccaccttgcctcatgtcaaaccatacctgccgaaacactttgatgatgagatcatgatactcatctgcattcaaagtcaaataacat

SEQ ID NO: 245579 - DNA, 435 bp, Glycine max
  unsure (1)..(435): unsure at all n locations
atgaaagattagtcaacatatggaaaaacaacacataactcacacttccactaacgaaacatattataagattaaaagaactcacaatacccacattatccatttgtctcttaagaatcaaaggcctaagtcctttggttaagggatcaactagcaaggaattngtgtctatatgttaaacaactatgacatagtctttcacaagatttctcatagtcaagtagttcaattccatgaatntagaatntctagaagttttattggtctttatatataacactacaacatcatttccatataaaatcctcaatggtctatgaatagagtccatattgtgaggtaccaccacaagacttctcaactaaacatttatagtagtagaaacaaagcatgcaacaaactctgctatgcatatatagtagaaaacaccattcg

SEQ ID NO: 245580 - DNA, 257 bp, Glycine max
attagcagctgcatctaacacacatagatcgtgtcatgtaataagtgacgatattttaaatgaacaaagctattaatgaatgactatttattattctattttaaaataaatatttcttattctattaaatgttgaagttgactaaaacatccattcaatgagtagtcttaaacataataatattaaaaataaatggtactctctgcatattcttttaaaatttgaatatcaaaatggagtggagggagtcctctgaa

SEQ ID NO: 245581 - DNA, 435 bp, Glycine max
  unsure (1)..(435): unsure at all n locations
gcttcttatccaaagcaattctaggaggagatatctcttttttcttggcttattccctagaggatggagcctcccctatcctcttctcctttgccttccgctgcatctccatggtgaaaaatcaccattgaaggacctcattgaagctcaaagatccagcctccatagaagctccacaagcaagcttccatcactttgtcttccgctgcatctccatggtggaaaatcaccattaaaggacctcattgaagctcanagatccagcctccatagaagccccacaagcaagcttccatcagtttcttggcttcaccatggacttcgtcatatcagcaataagtgtttnttcagctttagtcaatcgccccgcatatgaatgtccaactaatgacttgaccaattcatgaatatgcactccacaaatcaacttcacca

SEQ ID NO: 245582 - DNA, 471 bp, Glycine max
  unsure (1)..(471): unsure at all n locations
gaaattcctctttaatcatatgagtttaagagntttgaagacatcgctaatggcaattatgatcctactatgctgattggtgagttggtttcacttcttttcaagttagttttatgttcttaaatttgccatgtttagtagtgtactaatacatcctttaccgtagatgtaattggtgttgtagaggaggtcaaatttaagcttcctaacctacaagagtagttnttaatcttaagatctgaggtagtatgtatgccttcaattttgtcatctaactaattctctatgnttgacattngttttttgtggattnttgcatgtaattaattctctgtgattcatggttgctntttttcattntcttttagtggccaaaattttggatgcactctgtggagtgaccatgccaccaaattcatgtnnttggttaaagaanatctggattaagtcccattgtattatattaacttt

SEQ ID NO: 245583 - DNA, 496 bp, Glycine max
  unsure (1)..(496): unsure at all n locations
tctctgtgctgctatctcatttcctccctcaaagatacttcgcagtccattctttagctcttctagatattcctcaggtagatgatgcattttttcacatatcatacaaacactttctctagcaacatcctgaagagtaactttgtctgaactagaaacacgatgaatcactttctgctcaaggcaattaacctccgcttttccattctccatcttctttgctgcagctgcatcagcagtaggccaagtttcctgagaacttgcactttcagccggagattcatggagattgttggagtttgatctatgttcatcaagagacaggagagggtctgaggaaaccagagacagcgatgttngtagtcctccaacttgtgcttgtggacgcagaggtagcatttntggagacgaccctgngttaatggtatagaagaagatgatgtgcctattaaaaagattacttggtnagcactagtgggggatatatcacattata

SEQ ID NO: 245584 - DNA, 482 bp, Glycine max
  unsure (1)..(482): unsure at all n locations
agcttgtgtgaagagatagacagagaaagacttttattatttttntggaattgnctatccgctaagcgnagaccttgtgctaagcgctcagtcttcacgtgctaaggcgagcttgctcgcgctaagcgcatcgacccctgattggttggctgaatagttcagctaagcgcacatcactgcgttgagccccacatcttcacggtaattgaaccttaagcagtgggcttagcgtggatgatgcgctaagcgccacttcttctctagaaaaattntactgtagcaacgctaagcgcgttgtcctgcactaagccccagatccattctttaacttgagttnttaagctaagcttaacagggcaagaagcgctaagcgccaatctcttaccaattttgaattctaggaagtgcgcttaacgcgcccgttgcgctaagcttaaactactcacttgaaaagtgaagcttatggtacgctaagcctcaca

SEQ ID NO: 245585 - DNA, 230 bp, Glycine max
cctgaattgccggggcagaacctgggactagtggggcttgccaaacacttgacatctcaccctcggcatgcagtcggaaaccggagacctaaacagcacctgcatcacaataaagacaaacccaacaggagctggggggcggcctgaacttatattggaaatgcttggattatacagtgggatattcagctaaatgaaagagtaaggcttggatcatcagctgaacagta

SEQ ID NO: 245586 - DNA, 380 bp, Glycine max
  unsure (1)..(380): unsure at all n locations
cgcaatatatcgacatgctcgaaatttaaaaccgaagctcctagcaaattcgaacgacaataacaattcactcggaagtccgattgagtcccgtaatatatcgacatgctcgaaatttaaaaccgaagctcctagcaaattcgaacgacaataacttttcactaagaagtccgattgagtcccgcaatatatcgagacgctcgaaatttaaaaccgaagctcgtaggcaaatctaacgacaataacatttcactcggaagntccgatgagtcacgtaatatatcgagacgctgtcgaatttaaaccgaagctcttatgaaatttgaacgacaataactnttcactctgaagtccgattgagtcccgtaatatatcgagac

SEQ ID NO: 245587 - DNA, 363 bp, Glycine max
  unsure (1)..(363): unsure at all n locations
ctgcagcttaagttttaatatacaagaatangttttaaataaacttcttattctcccgatagatagatacttcctgtctgacaatgaagttaacatcttaatattagtagcatgtcatcaacatgcatacatgttgatttcctgaatccttcgtntaacttagataggtacgactaagaattctaggattattgattgatggtggaaaaggcaataaacatgacaaatgtactagggagctcaatcttttagatgtggcaaagagacatgtataagtgcgaagttgtttcttttgatagtgcatatcagactgattacaagagacatggcatgggatcacatgtaacgcgagcatgatcaaac

SEQ ID NO: 245588 - DNA, 439 bp, Glycine max
  unsure (1)..(439): unsure at all n locations
ctgcagcttatctccacactgctttcggcttttttcttgaccggcacanatatacatagcaaggagcctctcgtgaatgattccatgaagtgatgggctgccatcttgaatcgcccagttggacaagcgcactccatcacctagtagatcagattgatacttctcagtaagctcaacatcttctaggtctaactcagctaccaacccagtccttgcaaagcttttcaacttgcgcagagctttcgctaattcattcagctccttaaccacagcagtcatggcaacaaggtaactgtagacctctggcttcaaaccagattctgtaaaatgaattactaatctaactgcgcttgtatagtcaccctcagcctgcanaagaaaaaaaaactgtcacattaacacttgcaaagatagtcttgaaatgaaactgcaacaagta

SEQ ID NO: 245589 - DNA, 347 bp, Glycine max
  unsure (1)..(347): unsure at all n locations
agatctttttaagccctctaattcttgtagcatntcctcttcttggttttgcttctcacgcaagttatccagcaactaaattcaacatgatttaaaaatattacaactaatgactgagaaataagcattgtacagtccaacagtaaaatggtggcccatcacatgtgtgtttggttcagcttatagtgaagaaacattcacttttcttgacatgtttctgaggctttattaagggaaaaagatgattatttcccaaagtctaagctgaagcaaacatggctacccataccaaaagtggtgtatctaacataccatatctttacataatctcatgcaagaaaactagt

SEQ ID NO: 245590 - DNA, 241 bp, Glycine max
  unsure (1)..(241): unsure at all n locations
gcaatagccagttgcagatgcaccatcgctgcctctataggagacaccatccctcgagtccatatntgctcacctgtagaggatagaactccagatgcatccatacatgcagcatgtgactagccagcagacggctaatcacaaggagtaagtgcagctaaacgagacattctaccggtacaatatgcaccggcagagtcaagaccccagtcctttcccttggcctacccctgagcagttc

SEQ ID NO: 245591 - DNA, 351 bp, Glycine max
cccatatgaaaattcgagataaagctctaagcagcagaggagcactttgcaaaacctaggttcttaattataagagatagtgagtgttagtgatggagatgttaaaagaggggagggaccctcttctgcgtaggaacaatattctgtctttcatctatttggttaggttttttctatggtggctaaccccttgtgggtttttaagaacactgatgtatacttaatattaataactgtgttatgtgtcaagctaatttgctctttggctgaccccttggtgcagtagtacttacatggaagtttgtgctaactgtaaacaatgatcccatccggatgtgtgggttgttttat

SEQ ID NO: 245592 - DNA, 400 bp, Glycine max
  unsure (1)..(400): unsure at all n locations
tatgaaagacaaattccttgggataaaagtagtgttgccatgttttcaaagcccgtactaaagcatacaactcctaatcataagttgaatagttaagggtaggaccacttagcttttcactaaaataagcaattggatggccttcttgcatcaacacagccccaatcccaacatttgaagcatcacactcaatttcaaaagaattttgaaagtttggcaacgcgagtatgggggcattagttagctcttgcttaagaacattgaaagcttcttcttngttctctccccatttgaaaccaacattnttcttgagcacttcattgagaggtgctgccaatgtgctaaaatccttcacaaatcgtctattanaactngctaagccatgtgtcgcaacctaccc

SEQ ID NO: 245593 - DNA, 459 bp, Glycine max
  unsure (1)..(459): unsure at all n locations
tatcaatagacctccaatctttaatggagagggttaccactactggaaaacccgaattcaaatttttatcgaggcaatagatctaaatatctgggaagccatagaaatagggccttatatacccaccacagtagaaagagtttcaatagatggtagttcatcaagtgaaagcataaccatagaaaaacctatagatagatgctctgaagaggatagaaaacgagtacaatacaacctaaaagccaaaaacataataacatctgccctaggaatggatgaatatttcagggtttcaaattgtaagagtgctaaggaaatgtgggacactcttcgattaacacatgaaggaactacagatgttaaaagatctaggataaatgcactaactcatgagtatgaatttattagaatgaatgcaaatganaatattcagagtatgcanaagagaattacacatat

SEQ ID NO: 245594 - DNA, 344 bp, Glycine max
  unsure (1)..(344): unsure at all n locations
gtgtattattgttagtaaatgggtggtctacgacttgtgttgttgtcttgaaaggaagggtatctaaactattatgggtagttgatgaggcttaacggttatcctgaaaaaatgtagtggaaatattataattgtaaaatgaaaatgaattggagggtgaacaacactntgtgcagcgtagctatcagattaggaaataaatcaactagtttaaacagtggatcataattcagatgtatgaagtagaaactgagacttagagaanatcacatacatgagaataacgaatctcctttgtttgatatatagagcctgtagtagcccttataccccactgaagacag

SEQ ID NO: 245595 - DNA, 336 bp, Glycine max
  unsure (1)..(336): unsure at all n locations
agcttatgctgcatacatntataatagacctctttagtttcttatccaacaacaacagaataattatgacttttcaagcaatagataccatccaggttggaggaatcatcccaacagaagatgaacaagtccttcacaacaacaacaatttgtccctcctttccagaatgctactggtccaagcaagccatatgttcctccttcaatgcagcaacaacaaagacaacaagcaattgaggctccctctcaaccttccttagaagagttagtgaggcaaatgaccatccaaaatatgcaatttcagcaggagacaagagcctncattcagagtctgac

SEQ ID NO: 245596 - DNA, 324 bp, Glycine max
  unsure (1)..(324): unsure at all n locations
gggcgcatgtttaagcatgaatagcaagagagtgggggcaatgtancatgccccattgcttcaagatgcaacataggcctaaggccatcccctacaacccctcaattcaaaccaatcaagcatgaaaaacaaaccagaattgccccacaaatgtgagcacattcccacaatttagagcacctaaagaaggccaaaatacaccaatggaaagctagaaagctcaaggatgagatacttacttgttggagtgagtaggagtaccaaaaaagaaagcaaaatgcaaccaaaggtagcttgggggagcaaaaaccgtgagttccgtaa

SEQ ID NO: 245597 - DNA, 249 bp, Glycine max
  unsure (1)..(249): unsure at all n locations
cgcaaacacgaaacgttatgccaccccaccncccaccaaaaaggacagcaaagccaccccaaagaccacccccaagaaaaaagaacactgacccccccttaaaaaacacaagagcgacccctcgaggaggacgcagacaagacccgctttgcgacccaaaaaaaaaaaaaagggaaacaaagccaacattcaataaagcgcgcctcggacaacggaaaggcaaacctcccaacgaaaacaaccccgaac

SEQ ID NO: 245598 - DNA, 315 bp, Glycine max
  unsure (1)..(315): unsure at all n locations
ctgcagctagaaagacccctctaagtttcacatgccntttgcaattctcatatctaatgacctaccatctactgaaatgaaaacaaattttcttgacaaattgcactataaaacataggttgagtccattgtcatagcaaaaattctactaggcatagaaagtcatctcagtgaattgactacttattacttttttaactgaccacaatgagattctctcaataagtaccctttgttcagtcaaaacccatataatacaaaagacttacacacatgtaaatactcctaacctggagggtattatgatctttaaaa

SEQ ID NO: 245599 - DNA, 404 bp, Glycine max
  unsure (1)..(404): unsure at all n locations
tagagncacctgcggcatgcaactttagtgatagctgctttaaataattanttaacagagagggggaaaacataaaacanaatctaaccccaaatctcaccataacctacacagctctagtcagttntacacacggcaatggtgttaagattcgaaacaaggggaaacaaanaaaccctatgcgctttctcccgacatagcaatggtgttaagattgaaatctgcacctttgagtttgtgattctttgcgtcaaagaaggcgaagagagggcgaatctgtgtttccctctctttcgtgctttctcccaatgctagcaacacgtgatccagtgtcgctctttctctgattcgaccctatgcggttacgctgcttagagtggtggaanaagcanagtgaatgacac

SEQ ID NO: 245600 - DNA, 350 bp, Glycine max
  unsure (1)..(350): unsure at all n locations
ctatggttgctaatttgttaatctctcccacacccaagtttggaccaattagtaaaagggtgacaaaagagttaactacaattccaattcttcattaccagtcaaacaaactattgttttcttcgatagaccaaaatcattttatatngtggataaaactgttggtcacaaagctgattctctccagcaagatgaacaacaataaggaaaacaaactttctcaccaacccactaagagagaagccnatcattgccaagcaagttgcaagggatgtttcatgctcaacttctcttccactattgacacaaattcatccatgctaatgttatattaacgccacttcttttac

SEQ ID NO: 245601 - DNA, 501 bp, Glycine max
  unsure (1)..(501): unsure at all n locations
tgcaagctntccttgagagatagttcacaaaggggcttatgtttgtttctccccctatctctaataactagagctccccattaagacacattgngtctcaaaaacggcttatccaaaaattcttctaaccattttttaagctcggctaactctataagagacatcctataaggggctatgaatatgggtccagcattgggtacaggggctatggaaaattctatctctctcttaggtggtaaattggatatatcctcaggaaaaacttcaagaaactctctaacaatagggaggtcacccatggaaaccttggtctctacttccaggttatacaagatcatgtaaacttgggcatcttctttcaaagatgtcatgactttattggcagagataaacatcttatccttactcactctagaatcattaaacaccatagttntatcannaacagttaactagacatnggtggaagatactagtccatacccaaaataacatcat

SEQ ID NO: 245602 - DNA, 370 bp, Glycine max
  unsure (1)..(370): unsure at all n locations
agctntgatgttgttagtcgtcattaggatgtttgatttgtatcttgtggattctgagaagaagatcaataaaatcttggtcctctaattcagctccatcttcttttgcaattntgttcttttcttgatgctctctgatgatgttttccaggaccttgtcaacctgcttgtgcaacttcttcaatctggtcatctttccagttaggaaatataagaatggaattgaaggaaagacatcagcaaggtcgaatcctcccccgagattctacgattttcggatcaaagacacaacaaactcatcttgctccttgtatatgccaccgaatgctaccctggaaatagaggcacatatcaatgagaaaattctact

SEQ ID NO: 245603 - DNA, 430 bp, Glycine max
  unsure (1)..(430): unsure at all n locations
gccattccatgcaatagcatatccacttgacccaatgcttgctctggaaattaggtatgaatattactggttataggatgcacaaccaattaaaagaaatatgaaatgttctattctatagtatattatatcctttccattctctttttgcagccgtaaatatgctgcacactgctcggtaattgcatctcgtttttctcttcctccattcaaccatcctgctcctattccaatcaagcgcgagggaggatatgaaagactaagggttgggtatgtcaattttgtagctaaatctctaaatagttttctccctctntacttctgttttatctgtatcaaaaaaatttgttattattttaagctagagaaactcttgagttgcagttatgttagtagtgactttggtaatcatccccttgcacatctcatg

SEQ ID NO: 245604 - DNA, 434 bp, Glycine max
  unsure (1)..(434): unsure at all n locations
tattaattacaacaactgaataataaaattccccaactntgtacatcatctcagtcaatgcaatcatacatatacaatgtggatcattaaggactttattaggcttgtaacgtagctgggctaacaaagaaatcatggtttttcttggattcaaagttaggatctaagagagcattcattcccccaatccttgacaaaccataacttagaattttctcactacaccaaccttattgttttgctacttttttcagcacaaccattttctttgatcatggtttaccccaacttttttattctttaaataagaattgaatttttttaatgaanaagtaatagacattaantgtgggctggagaataccatatactgngactcacnataactngtgtngttaatcatattctacaacanagatcacccaaacactccc

SEQ ID NO: 245605 - DNA, 450 bp, Glycine max
  unsure (1)..(450): unsure at all n locations
acctgcggcatcaagcttctggttggaaataaaagacaatgaggtatctttgtatttttcttcttaagtactcggatgaaatgatgaaacaaattaaaacttccaactaaacctaaatttactacttcaaagctacccttaaaatcatagattctggtatctagtagagtctgaattttaacttttccgtcttaaggtagatgtggcttctgaatgaatatatttttttttgtaaaatcctttcgataaaatatcatagtaaatattttgtaaacaaggttttttgaaacttaaagcatgaaacaatagaaaataaacaagacaaaataaattaaaaaaggatacaacatacaaaggaattatattggtttacctcaacttggacaacgtttagtaccgacacctataggcttnttccaccaagaataaacacataaccgtcattttctt

SEQ ID NO: 245606 - DNA, 202 bp, Glycine max
ccccctgcaacaaaccaggagaaaaaacccaaaaactaaaaacaacaaacaagcacaacaaaacaacaaaccagaacccagacaagcacacacaaaaccaacctcaaggaaaagactgggaagcggaaagcacatgattagacacaacaaacacaccgaaacaacccaaagagcgaccaagcagcaaagaacgggcgaaaaa

SEQ ID NO: 245607 - DNA, 400 bp, Glycine max
ctgcagctgtgactgctgcttcactaatatattattggccactacttgttgagaataacaatggtgaccacaacaacgctagaggcagtctttcaaataaacctgttgtgcgtgaacaaacattattaactcacatgaactagggaagtgattgcataattcttagactaactaccttcaatgtacctgaataaaatgatttccaaacacgtgaccgacacatatcatgtggtgcacagaagaaccgggtggtggttgacttctaagtggaaaaaatgtcatgctttgttgtggggacaacaatacaaggattatgttataccgtgatgcaatgacatatcccatctccgttatatccatccacttgtccttactaacctgaatcaagcaaacatacaca

SEQ ID NO: 245608 - DNA, 280 bp, Glycine max
  unsure (1)..(280): unsure at all n locations
aattgatccaaggaaactntcaaagaaaaacgtccgattggattttttgattattntattcaaatatattttgattattttattattattttttcaagatattttgattattttattattattttgcctttnttggtttaaccatggttacagcataaacgatcggttagattttgttttaacagtgattaaatgagattacaaagcaaatgatcggttgaaattcantttatcatttattaggtgagaaaatgacttanacgatcggttaaagctcgtt

SEQ ID NO: 245609 - DNA, 350 bp, Glycine max
  unsure (1)..(350): unsure at all n locations
ttgataaagagtgccttgccggagaatatgcacagttgcagnttgagaaagaaaaatcagaaatgaattctgtataagtaattcttcattaatccccaaaaatgaanaaagggaacaagtgatggatcagtaaaggctattactagtgagaatgttgatngtgaaaattgtctagaagatttggtttctttcaggagttcatatgtgagtgagagcacatataatctangccagccttctctgcatgacaatntcctactccaaccttatctctgatccagcaccaagcgccgtagaattgtgcgatttcaggagttagatcgcacatttaacgacttgagtttttatta

SEQ ID NO: 245610 - DNA, 366 bp, Glycine max
  unsure (1)..(366): unsure at all n locations
agaaaatagtagagaattgaattttgaatgtgctacaagtttacatttatcaaagttatgacagtgtacacatgtttcatttatagcctaggtcactaactaaatgaaagcttccttataaagctttcttgagaagctagagcttatctacatacatgaaaatacaaaaaaaaagtctctactacaaagactactcaaaatgccctgcaatacaaggctaaaaccctatactactagaatgacaaaaatacaagacccaaaagaaggataacttattctaatatttacaaagacaggtggacccaaccttggccaatgggctcatanatctaccatgaggttcatgagaaccctatggcgttattc

SEQ ID NO: 245611 - DNA, 364 bp, Glycine max
  unsure (1)..(364): unsure at all n locations
agctcgctaagnacatctgngcactaagcgagagtacgctaagcccatgttgtctttttttttaggttgagctaagcgcgcctgtcgcgctaagctcaaatctctctctatttgtgaaaattatggatttaggctaagcccagcttgttgcgctaagcctaatctgcagaanaacattttctgagtagtcacactaagcacgtggctatcgcgcttagcccatgagntaaatttcataaggcgtgctaagcctagccttttgcgctaagcgcccagtcctattttcagttntgtttttctattnttgttgagaaataatcctgtttaaccctattgttgatctaattcttttcagatggcttct

SEQ ID NO: 245612 - DNA, 427 bp, Glycine max
  unsure (1)..(427): unsure at all n locations
gctttagtaaattcacacgacaataactntttcttcgttagtctgtatgagncccgtaatatttcgagacgctcacaagtgaatgttgaagctctgagcaaattcaaacgacaataactttttactcggatgtctgattgagtcacgaaatatatcgacacgctcgaaattgaatgtttatgctctgagcaaattcaaacgacaataactttttactcggatgtctgattgagtcccgtaatatatcgacacactcgaaattgaatgtttatgctctgagcaaattcaaacgacaataactttttactcggatgtctgattgagtcccgtaatatatcgagacgctcaaaatggaatgctgaagctctgagcatattaaaacgacaataactttttactcggatgtctgattgagtcccgtaatatg

SEQ ID NO: 245613 - DNA, 439 bp, Glycine max
  unsure (1)..(439): unsure at all n locations
tgccgttagtgtcgcatgttttaattatatttttatcgaaaacaaactctggaggaattgtgtatagatttgtgtcttgaatgattggtttcacgttgctattgaaaaatgataatgtctcctctcctgtgcgtatttcaagaggagaaataatttgtatgctctgtctttttggtaggcagaccaatagataaanaaaatgaaacctccctaaacaagagaaaccatttgtgtacacagttttcgtataccttggacaacatttgtgtaattaagttgtttnttcatagtaatagtaataaggatacgtcactatatgtctacagaataattagaatgccaatccttagcgttgaatcattacagagtttgcaaatctttaatctgtttcttaattattctaagaatcactcttgtagggatatgctaacaacaatac

SEQ ID NO: 245614 - DNA, 410 bp, Glycine max
  unsure (1)..(410): unsure at all n locations
acttctnttcttttccatgtctctttttggatttagaattttttttagttgttttatgtatgtatgcatgtattcattgaacttggagaaaattgggtaataagcagttgctacaatatggcttgaaagttgaaacttattatgcgtttgcttggatatatgttgttttggtgggtgcatgtcttcgttaatagaccaaaatgttgtgggtgtgcctgcatttnttttttaaatcataagaaacctacaagttgttcaatatacatgtgtggcgttgattgaacgagtgtgatcacttggaagggatactcctttatagttgtacttcataataatgtgatcacttgagcggtngtagatngtgcatatgtggtgttgctcgaacattcatccattgggagaatgataat

SEQ ID NO: 245615 - DNA, 451 bp, Glycine max
  unsure (1)..(451): unsure at all n locations
ttcttcaatatgcacagggaagggactgaaaccttttccaatctgattcttttcaagttagataaagaaccaagcaactcaaacttctttatctcagaacgatcaaaaccataatttgtgactatcagaactttaagttttttcatcttctttgtgaaccgcggtaatgtgtattggcattgaaggtttaaaatcacaacctcagtgttgaaaggtttcatgtcaatccaatctgaattaaacgtttcatctgcaaaagcatcatatttgacatcaacaatggaagatgaagtgtgacacaacaaagtgtatttcttatttgtccctccttttcaaaataattgagactntaaaaangtnntttttatattctanatatgtcactatatacaactaagaaagcgtaattacttttttccaactccaccttntactcttgtatctcaatctc

SEQ ID NO: 245616 - DNA, 272 bp, Glycine max
  unsure (1)..(272): unsure at all n locations
cgcacaaaacaagccactttaagcgaaagacccaagacagcagacggcacaccgggcacccaagaagagaggaaggccaacacaagaacacancaaagacccaacacagaagaaaaaacagagcagccaaagaaacngaggaaacgaccccggacaacaaacaaaaaacaacgcacccaanaccaaaaacaacgaaacacacaacaaaccccaaaaacaacaaacccccaacaacacagccagaaaaaaaaaacacacacaaacgcagaaac

SEQ ID NO: 245617 - DNA, 497 bp, Glycine max
  unsure (1)..(497): unsure at all n locations
ctgcagctttatggggctggacttgagctcaatgaagttctttttttgatnttctaccatggagatgcagcggaagataaaggagaaaaggtgagaggaggcaccatccactagggaataagccatggaaggaggagcttaaccaccaagagagtgccttggataagaagcttagagaggaagcttcaatggaggaaaagaatgagagagagggggggcacgaaattgaatgagaaaaagagggagagaagttgaactttgaagtgtgtctcacaagtttcacattcatcaaagttaggacaagtgttacacatgtttctatttatagcctatatcactaactaaatgaaagcttccttganaagcttccttgagaaactttcttgagaagctagagcttagctacacacanccctctaatagccaagctcacctncttgagaagttncttgagaactatagctanctacacacacncctctaatactaagctcacc

SEQ ID NO: 245618 - DNA, 449 bp, Glycine max
  unsure (1)..(449): unsure at all n locations
gctttgatgatatggtcttcaccgacaaagtgttatttttattctaanaagaggaaaatctgatcatcatactttgataaatgccaaaaaaactagggcaaatgaagagggtgagaatgtgtggagaagcccatgctgtgactgccattcctatacagccaagtttcccaccaacccaacaatgtcattactcagccaataacaaaccttctccttacccactgcccagttatccacaaaggcaatccctaaatcaaccacaaagtctgtctaccgcactttcaatgacaaacaccacctttagcacaaaccanaaacaccaaccaagaaatgaattttgcagcgagaaagcctgtagaattcaccccaattccagtgtcctatgctgacttgctcccatatctacttgataattcaatggtatccataaccccaaccatggttcatca

SEQ ID NO: 245619 - DNA, 452 bp, Glycine max
  unsure (1)..(452): unsure at all n locations
tatactggggnngctaccttcttccactngtattatatgtatttggcaaaagatcacctttacttcctttacccaacagattaatcagaaagtgattgtggatcagaaaatcaaatcgcttgtattgtgtgtactaatagaaatagcttcctcatccaatccaatgcccttcactttgtcaaaaggtttcatctgttcaacatctaggctaggcagaattcccttttcagaaccagcattaatagaatggcctcctagaagattaatattgttctctatgggatatgggctgcctaaacttataattattggtaacctcaatactctgttgttgttgaanaagcttctntacttcttctaagttactatcaaaatcaagaaaatcttcctgaactttntgtngatcanaagttcaagatgagtcattacttngatcaatctggagatcatct

SEQ ID NO: 245620 - DNA, 430 bp, Glycine max
  unsure (1)..(430): unsure at all n locations
ctgcagctgcanattcggacttgtaggagattttgaatgatctaaagattaaatctttgggacaaaagggttagggttgagaggtgtggctgctcgcaaaaaaaaaagaaaggaatgttacgaacatggggaagctctcgggagttaaaaaaaaactacaggggagtggctctcttatattaatattatattattattttcttttctctctcctttttatttaaacggtgcatttcaaatgtaggccaactacaacaaccaacaagttgttaagcaagatctcggattcaaatcttatggatggaaaaaaagttattggaagagatttcccactaaaggtgaccaattacgttttttgatagatattagttatcaataaaagtggtggatactcttcatcaatgtgatagtgatccacaaaatcttagta

SEQ ID NO: 245621 - DNA, 431 bp, Glycine max
  unsure (1)..(431): unsure at all n locations
tgcagcttanncaataaatatccgaaatgtttttttttgtttgttgaaaaagcataacaagactntctatgatgggtttaaagatacaatctctgcagatgagaatgcttcagaaacattaagaaagctagcagatgggcctaaaagaaatgttataacctggcaaggatacgacataaacaggtattcattntacacaaaagcacaagatgacaaaagtacaatgcagaacagtggggtcaccctaaaggctgaatctcaacacttttgaagtgtcaatgacgccaatctctgtgtagctttcataccttactttgggttcattgatgaaatttaggagcttaactatgtgaaacttacggtatgtgttttcaaatgtaaatgggtcgacagcaacaccagtgtgtgcaccgatgatataagaaattacg

SEQ ID NO: 245622 - DNA, 476 bp, Glycine max
  unsure (1)..(476): unsure at all n locations
cttctgtacttcaatacgctcccatagttcgatgcgtacatcacagagaggaaaaagatagcaaaagcaagtggaagccagccaccctcaacgattttggataggacaacagacaagtaaattaactccactgaaccaaatacaagagcgaaagaaaatgccaaaaactagttagtctgccaaattaaaaccattacaagttgaggtagttggtcacccaaggtggtgctaaccatcatgacaacaacttcaacaatgcctgcaacaatgataatgaaatgcatttagtatagatatactacaaatgttctttagtataaggcatatgtgatgtatgaaactttttagaaatataatataaatccatntatgtgtcttcacctagcaacttacactatngagatagttggttagtacattggtcacactccaagcccaaaagcatacatgaaagggcatgtagaaatataatatta

SEQ ID NO: 245623 - DNA, 492 bp, Glycine max
  unsure (1)..(492): unsure at all n locations
tgcggcatgcaagcttccatcaagtaggatcagagcacttgagtttatagttgcgctccttaaacctctattaagtttttttctgtaccttctcttccattgntgnttcttcatttttctccatgtatatcctcacatgtcttgttctaaatgttgttaacatgattctttagagtttccaccgattaaacttgctatagaagctagaattgattttctatggttcaaatatcttgttcttgttcttgaaccatgaattgtgttgagtttaagttcctttgagtnttgtctagttattttttgtggctgaaacctaaaccataaaattcttacaaaaatattaaagtagaagaaaacttcaaaaatctagagtgactcgttcacctattgtagtnttgtcatagaagtcatgtctagtcatgaaacttgtcacatangaattcttatgttgngctgaaattaatttcttggggtcttgctactcatttgtca

SEQ ID NO: 245624 - DNA, 391 bp, Glycine max
  unsure (1)..(391): unsure at all n locations
gaaccaggccagtgctggcccctccatgtagaaagaggctatggtgaggcgttctgattctggggtaaagtggtaggcgaaaaactgttggattctgaagatccaccctgatggatcagaaccattaaaacgtggaacgtcaagtttcatttcgtgtgggttgagactattatctatggatgcagggttagctaaagaagatgaaggtgagtggctgtggctgctattgtgttcgaggttagctacacgaaggaagacatcctcaagcttcttagtaatatggatttgggcagctgcaagcttactgatgacatcctcaatgcggtccanactggacttgtcttggtctgccatgggaggatggcaatgaaagcacacgaaattgtataac

SEQ ID NO: 245625 - DNA, 441 bp, Glycine max
  unsure (1)..(441): unsure at all n locations
gcgcctgagctgcagcttcttgtgcatgatggtgaggcggtttcttatcttctgatgttgcaagtgcagatagaatcaggtctgaaattntcaatctcatcccaaatcacgcgcagtcgagtgaagtattccgttacctagagtgctccttgtttcaacgttgacgcttcttgctggagatcggaaatcctcaaaagatctccctgcgaatatctcgatttcaggtcttgccaaatttcttcagctttgtccatccagagtatgttttgccttatggaagttgcaatggagtggactatccaagataccaccatattattgcaccgacgccaagctccgtacattctgtctgttttcaagggttcaggtgcacttccgtctacaaattctaccttgtttttggcgcttaatgcagtgatcatggaacagctccatgaatga

SEQ ID NO: 245626 - DNA, 393 bp, Glycine max
  unsure (1)..(393): unsure at all n locations
tactatcatgggtatcatctcccttttcgtcattgggggtgccacctgagctgccaggtctctccacctttgggcgtattctttgagagattcatgccccttttcgcacatgtttctgtagttgcatcctatctggagccatatcagaattgtactgacactgcctaatgacggcaacaattaggtccttccaagaatggacttgggaaggttccaagttagtgtaccaggtaacagctaccctagtaagactttcttggaagaaatgcattcagcaatcctcatcttttgcgtatgccccccccccccnccatctttcgacaatacatctttagatggttcatggngcaagtagtccccctgtacttgtcaaagtctggcaccttgaacttg

SEQ ID NO: 245627 - DNA, 280 bp, Glycine max
  unsure (1)..(280): unsure at all n locations
ttatattttgagaaaagtacttgttgaatatttctgtattttacctatgtttggtagcttaatctgtaagccttattcagaaggcagcagngagatgtcactatcatcttctccctcttctctctctttttgnattctatatatatgtaacattgtgaatctaataaaagtgtgagagaaattgagggttttattcctcctcaccttcatttcaagttggtatcagagcaggtgtcatcgtcgccgtccacgcgccgccgtccccgcgccagaatcgtgt

SEQ ID NO: 245628 - DNA, 372 bp, Glycine max
  unsure (1)..(372): unsure at all n locations
ctcaaggactcctctaagganaatagcattatttcttgcattgaatagtcgggagttggaagccatcttctcaatcaagttcctagcctcaacaggggtcatatcaccaagagctccaccactggcaacatcaatcatactcctcttcatgttgctaagtccttcatagaaatattgaagaaagagttgctcataaatctggtggtgagggcaacttgcacataatttcttgaatctttcctagtactcatacaagctctccccactaagttgcctgatgcctgaaatgtcttttctgatggcagtggtcctagatgtagagaagaatntctncaagaacaccctcttaaggtcatcccagctggaaatgga

SEQ ID NO: 245629 - DNA, 292 bp, Glycine max
aacttgcacacggaagtgcgataacgcgcagctatatcgagacgctcgaaattgagcaacgaatgctctcgagaaattcatatggccataacttgtcacacggatgtccgattcaggcgcataatatatcgagatactcgaaatctaacaacggatgctctcgacaaattcaaatggtcataacttgtcacacggaagtccgattcaggcgcattatatatcgagacgctcgaaattgaacaacgaatgctatcgagaaattcaaatggtcataacttgtcacacggaatac

SEQ ID NO: 245630 - DNA, 444 bp, Glycine max
  unsure (1)..(444): unsure at all n locations
atgtctcggcccgtaatgatatctaccagctgntgcgcagcatcgccgcacaaaatgtggctgtgctgcttatctcctccgacctggaagagatcgaactgatggcagatcgtgtgtatgtgatgcatcanggcgaaattacccactctgcactgaccgagcgcgatattaatgtcgagactattatgcgcgttgccttcggcgatagtcagcgtcaggaggcgtcatgctgaagtttattcagaacaaccgtgaaatcacggcactgctggcggtggtgcttgctgttgtattacccggttntctcgaccgccagtatttaagtgtgcanacgctgaccatgagttatagcagcgcgcaaatcctgatcctgctggcaatgggcgcgacgctggtaatgcttacgcgcaatattgatgtttcagtgagttcgaataccggaat

SEQ ID NO: 245631 - DNA, 360 bp, Glycine max
  unsure (1)..(360): unsure at all n locations
ttacaataccaacatgttaatagatgtgacacttgtattgattgtttacactaagcatgttgtgtgatatatagattcagttcttttacatgattagtgaggataaaaaatgtggaacaattggattgatctcttaagttttctaagagtcagcaccagatctcacttctacttngaaattggctagcactatcaaattaatcgactgcttggtttagtaaacaattatggaagccagttttagaagaaggaagattatgtaacttaggataatcaattaccctagcagataattgattagactgcttctctaaacttaagaagctcactgtgtgatgaaataatcgantaccatttcat

SEQ ID NO: 245632 - DNA, 418 bp, Glycine max
  unsure (1)..(418): unsure at all n locations
ttcacattcacaatgcgcgcataaacccaccatcccctggtgcccacctncaactgagctcacgtactcccacgtagcccatatcctcgtttctctcaacaccgggtccccatcaatcctcccaagctgtcccaacatcaaagtaatacaacattcacacagcacaagctaccacagccaagcaaaacagagcaaaggcagaatactctgccaaaacaccaaccaagaatcacagctnttcccactcaaagaccccagtaacaattccttcgatccaattcgttaaccgttagatcgactccaaaattntactggaagtctatagtgcataagcctacatntttgaccgtgggatctactagcanacatccagaactcattctgcactagactttccacagccaaccacacacaagca

SEQ ID NO: 245633 - DNA, 364 bp, Glycine max
  unsure (1)..(364): unsure at all n locations
aattatgaaccgtcttagaagagtggcattctaatatggttcttaattaagaaccccattagaagggtttaattaataacatcaccttttattatgttgttgtctcacaagccattntgtcatatttttttatcatgaactttatagaaacaagttataaagaacttagttcataaaaaaccttattaaaataagaacaaataaaacgcttataggaatgactaaataagctntgcaaaagttctttcaaatgtcttgacattatttttcaagattttagcacccaaataagtgatgataatcaggtggtacaataattagtaatagctcatgatctcttcatttaaactgtcatctgcccttg

SEQ ID NO: 245634 - DNA, 476 bp, Glycine max
  unsure (1)..(476): unsure at all n locations
tctcacagncgttagaatcgggactcttccaatcctnggtccggactctcagccacttatgatagccgccgatgatcccattactgcttcccctaagctctctgtcctttcttcacaccgcatcacatgccttgcgaactccttggagtaactttgcattggggtcactgaaaccccgtggtgaggacagcgatataatttatacaaccccttgttcccattaagggaacatttggaaatccttcgcatgaagatagaatcctgattcttcgttccttctagcgagagggaccaataacagacgcccctctatgctagccaagagttggtcccaattcgntctttcttttttccacgcacgagcggtgaccttgtagcggatagacgagcctaccttcttggaaaaaaaggtgcgaaaccagccacacatagagagccggtgtacaacaaacaaatcttgcgccgctcttttcaca

SEQ ID NO: 245635 - DNA, 390 bp, Glycine max
  unsure (1)..(390): unsure at all n locations
ccatcacaagtgtagtcaactttcgctgtgatgaatcaatatattgacttatcttcacttgggacttgggtacacggtggcctttcatggctcctgacactntatccacagtctttttcacaatggttttgaaagccaccttactcatattaccttgccgccatgatggtttcaaaacctcctttacaaaattcgcaatggaaactctgaacaatttcatcgatctggaatccttactcttttttcttttcccaggagacttgacctgattaatctcaacctcccctgaagtcattnttgcaacatccacatcatcacttatgctctcattntcaacagcacctacttctgcatctgctgtttcaccatattcatcattantttgagaag

SEQ ID NO: 245636 - DNA, 423 bp, Glycine max
  unsure (1)..(423): unsure at all n locations
ttattgttcttcattanncttcctctnttcactgtagatcttcctatttcttgcacaaatattgtggttcttccatttaaacactcaatcaattcaaggatccactctaagcaaggctgaatttgagttctgatttagtatttctattatgtgtgaatgttcatatttttcttcaatatgatttttgattttcatgattatgaatacgctgaggatttaaaatggattaatttatagattcatttcctaattgcgaaattatatcacaaattgtttggatgatattccaacctaatntacgatttcagtgaatttagggattaactngactaaactaactctaatgacattgatngaataatatcaaatttattttaacataaaagaatttaaatataaatcaattaattaaataatgactta

SEQ ID NO: 245637 - DNA, 419 bp, Glycine max
caacacggatatggctcctgatcggaaccaacttcagagcatgaccaagcgggaacatgagttcattaaagaatatgctcaaaggtggagagacctatcagcccaagtccgtccgcctatgactgaaagggaaatgatcacgattatggtagatacgttgcctgcgttctactacgagaagctgataagatatatgccggctaactttgcagacctcgtcttccccagagaaagaatcgagttctgactgagaaaaggaaagtttgaatatgcctccaacgtttcccccaacaacaatagaagagtcccagtggtgggcacacggaaaaaggatggagatacccacgcggtcaccacctgcccaacatggatgaaagcgccctatatagcccaaactaaaccacacaccacccgtaatt

SEQ ID NO: 245638 - DNA, 439 bp, Glycine max
  unsure (1)..(439): unsure at all n locations
tgcaagcttctacggaagatgaatggcgaagagaaaaaatttattcttgctattatgaatcagaataagaatgtgtaacattgtaaaacagnctcctaatcctgtttgctttctaagtcaacacgttaacggtggcttatgtattatgcctcactgaaaagagaaatcacaaatgagcaaagaaagtatacaagaatcgaaagctgcaatataaaggccatactctgatcctcgttgacttgaaattgttttgcaaagtagcaaagaataagaatctataacagctcctcatcctatttgattntaaagtcatacgttaactcttttaaatgaaatacatacggaagccatctaacacacacacaaaaccaagaacaaaattaaaaagaaaagcaaaaatggtggtacttttatttaaacagcaccagaaagcactaaa

SEQ ID NO: 245639 - DNA, 379 bp, Glycine max
  unsure (1)..(379): unsure at all n locations
tctccatggattcaacctantanggttgggaagaagggttggaatttcattaataacccacatactacaatttctaaaattctcaaagctaaatatttttcaaatatttgatacttggatgccaaactaaggcataaaccaagctatgcatggcatagtatttntgcttcacatatattggtcaaggatggtattctgtggggaattgatgacaactccatcaatatttggagccaaccatgggtgccagcatcagcaagaccatatatcacttcatctaccccgctcggccttcaggatcttaaagtcagtccactcatcaaccaccaacaacaatngtggcattaagatgtggtacaacaaatntccaatgacaatg

SEQ ID NO: 245640 - DNA, 427 bp, Glycine max
  unsure (1)..(427): unsure at all n locations
aattgttcctactaccatctngtccgatggcagtcaacaaagtaccatggtattngccaattaaaaatgtctcatctacttgcacaagtggctggcaaatattgaagccttcaatgcatggattaaacgcccaaaatacacggttaagaatcaccctaggagggttatcgtcaccttcctccattgaagatgaagttttgtantttactatggtacctgctacannagtgtgagcagctgtgaaccatataggcaggtaactatatgaatgttcccaacttccaaatgtcatttcaagagttntntgtttagctcgccatgctcttttgtatgaaactgtgtaatgaaaccgctgatgcatgtctgcaatcaanggtttgatttcgatacccgaattttnttcactaaatgaacaatattatgggta

SEQ ID NO: 245641 - DNA, 378 bp, Glycine max
taaataagaacgagggggggggatgaatatattggtaacgaacctttactaattaaaaatctacccttcttaagctcttactataatgttaagaaaagtaagaacagaatttgaaacttaccaaaagtaaagccatattaaagtgcacagcggaaattaagagtgtgggaagaaaaagacaaacacacgaagtttatactggttctgcaacaacctgtgcctacatccagtccccaagtgacctgcggtcctagagatttctttcaaccttgtaaatccttacaagcaaaatcccaaggatgacccttcctgttctctttgacaacctagtggatcaccctcactagaacgatccacaaagatgtcccttcttgtctc

SEQ ID NO: 245642 - DNA, 315 bp, Glycine max
  unsure (1)..(315): unsure at all n locations
tacagtatgccaacgtgggtcaatctcatgcatgtgatgtacaccccaaaaaacccaaaatattaataagaatctaaaatatctttagaaaaagaaaaaagaaaaattggtttaaaaattaaatcgtatcttattttaaaagatgtagcaaatatattagattgggtaaagataatcaccactaaagataattgaaataagagataaagaaagatcggttaaattaatntaaaattacgtataattcttatataaggggaaacaatttcttgattagaatacacacataaacggccnaggaccaatatgacatat

SEQ ID NO: 245643 - DNA, 136 bp, Glycine max
cagcaacccacagcccaggggaacccagcccactagcggagaactgcccaaaccacatgactagatacccacgcaaaacccaccgggaacccctacaaaccacaaaagataaccgaagagcctaccaagggacccc

SEQ ID NO: 245644 - DNA, 414 bp, Glycine max
  unsure (1)..(414): unsure at all n locations
attaagactctctcttaattgacttcccggcaaggtagagtctctcccaaaagagtctgccttttcggggattnaggattcctggtaatacctacatgacacttttgacgtgttcttctacaaaaaccaattgccttactgtccttgccatagagctcatgcatatcttccacttcatactttttctgaattatttttatgattcttggctgccatggtggtgtctttacttcagctgtgtgtatcaaaatattgacctgatcaatgcacagcatgattccatgagtgaaattagcaaacaaagcaaatcacgagaaaggagaanactagttggtggaatgtgtgactctgaacaaccactctttaattattctgaattaacttcattattttacatgccacttacactcacta

SEQ ID NO: 245645 - DNA, 471 bp, Glycine max
  unsure (1)..(471): unsure at all n locations
tatacctaccatcgagattatgcttaaccttatcacatagactgctcagtgtttcatcgtcattctgggcaggtacaagagccgtggttatgcgatcataaccttttttaatgtgcttgaataaatatttgatggacattgattgattgcaccattctatgttgaggtgagcctgatatttcaacaataagtttggattgtatggtaccacgtatctattgtctaaggntattccatctttatctatanttttactatcattatgccttctataaataggatattcctgctggtcaacaacagtttcaggttgctttttttttggaaaatatctaaaacatctttcatgcatggcgactttctatttgcatgaccacatgaatcatgcatcatacgtttcttgacacactcataaagatgtggttgttcaatagaatctggtatctcaactaatatgatgctatcaatact

SEQ ID NO: 245646 - DNA, 393 bp, Glycine max
  unsure (1)..(393): unsure at all n locations
agcnttctatatgattagtcnggacagcatatattttttataacataacttngcatgcagtataccttaagcagattttggtactaataagtgtcctaacatttgttactgttggggatgataataatatgcaatgtataagtagacgattagagtatttgtatatcctcgcatttattgaacagatgtggctatattatttggggatgtttaaaaaaatgtatatatgagatgcttgtaatacttcttaccaagtaataaaattaaaaaatatatatttaatattttgtcacttaataataaactattagttattattacaggagattattcaaactaaatatgcaggttattattaggaattggcatttgtgttctctgagaatgctccta

SEQ ID NO: 245647 - DNA, 450 bp, Glycine max
  unsure (1)..(450): unsure at all n locations
cttataagaggcaaatttgatcatcctgctttgacaaatanaaggcctagggcaaatagagaggatgagaaggaggaaggaacccatgttgtgactgtcgttcctacatggccaaatttcccaccagctcaacaatgtcattactcagccaatattaacccttctcattacccaccacccattcaactatgaaggccacccctaaatcagccacagagcctacctgtcgcacatccaatgccaaacaccactcttaacacaaaccataacaccaaccagggagggagttntccaacgaaaaagcctgtagaattcaccacaattccggtgtcctatgttaacttgctcccatatctactcgataattcaatggtagccataaccccagctaagggtcctcaacctccaattttctgaggatacgactcgaatacaacatgttcttatcat

SEQ ID NO: 245648 - DNA, 328 bp, Glycine max
  unsure (1)..(328): unsure at all n locations
aacttcagcctctntgcccacaaaaatgttctgaattttcatctgacttaaattaccaccgccctttgcccatcataaatatgggtcaaaatccaatggaaccagagggcaaagtctataaatcagcttacaacacgaccatctgtgtgttactgttttaccatgtcaggtctccagataaaataggataccctaaaagagaaagtatgaacaagtgatcagttaaaatgccaccaaaaacaagtcaaaatagattacacaatagaaaaccctgagcccagtgaaggcaatcccacaactcatttcccagcacgggacttaacacaac

SEQ ID NO: 245649 - DNA, 436 bp, Glycine max
  unsure (1)..(436): unsure at all n locations
ctttgagcctnggttccctttccttgttntgaagctcactacaagccttaagtgaaaaaccatgatatttccatatccttaaggagatttggagctttggaattgttttgggaataagtgtggggggtttttgtttcattggacaacttgttttgttggctatgcttcatgatgtattttgggccatacttgatgtacattgtatattggttaaatgttggacatgctgaatgaaatgttgtttctcaaaggctaaagagtaaaaaaaaaaaaaaaaaaataatcgacaaacaaaattcgtaaaaagaaaaagaacagcaatatagttgagtgaataagatcttaaatggcacaagaatgatgaaactctcggttctactcttcatgtnnaatatntatctttacttctttttattatcttattttttcttaatat

SEQ ID NO: 245650 - DNA, 420 bp, Glycine max
  unsure (1)..(420): unsure at all n locations
tccttagagtcacctgacgctgcagcttacttattgcttatatagtgcacgatctgcttccacaggataacacattgcctaaaagctactatcaggccaagaagatattgtgtccgatgggtatggagtatcagaagattcatgcttgccctaatgattgcatactatacatacatgaatntgaagaaatgtcaaaatgccctaggtgtggggcgtcacggtacaaggtgaaggatgatgaggactgcagttctgatgaaaactcaaagaagggccctccagtgaaggtgtngtggtatctttccattattccaaggtttaagcgtntatttgctaatgaggacgacacaaaagatctttacctggcatgcaatgggagaaaatatgatggaatggtccgtcattcagctgattgctccc

SEQ ID NO: 245651 - DNA, 457 bp, Glycine max
  unsure (1)..(457): unsure at all n locations
cactcaattcactcaagtttcttttggccagtaaaactaacaacgttacaacactttgttcgttttgactcannattattattttgtggtttgacaaccttaacacaagtatcttcaagatttatatagacttcagaacttcaatccattaagagatcctaactagtcattgtctaatatctttggcgctttacacgaggttgttactgtgcaaagaaagtgtgggggccacaaacactttttgtggcatattttcagagaagtacaacttgctagtgtcgcctagttcttagagttgaatttcagtgtacaaatcaaatataatgttaatagcataagacaaaagaaattaagaatgttaagacaagaacaattaaatcttccctgttgtgcgctatcacacgtattgcttactgaacttatggacgttactttctaatgattgctttcagttctt

SEQ ID NO: 245652 - DNA, 412 bp, Glycine max
  unsure (1)..(412): unsure at all n locations
aatatatccttttgtagtttcgatctgtatggaaatctggttctctacctttttataggctcttaaattactaagagcatctccaatggtgatgtaagcaacctactttgggctcttaagtgagtccaaaatgggtgttcccactattatgtcactatgtcactatgtcactatgtcactatgtcacgtcacttttacgcaacccacatatttatccctttttatatttttatttaattcttctcaccattaaaatactaattnnttttattcacaatcaactntcttatacaagttgtgcttaaaattgagcaatccatcctgcagctagataagctccaataggggagaaatgaagaatggtttcttaatttacattgagaaaacagtttacacctagcataccttccaa

SEQ ID NO: 245653 - DNA, 384 bp, Glycine max
  unsure (1)..(384): unsure at all n locations
ctgaagagacctantgttacttatattaaggaaggctattggcatatataaactcaaattagtatcccactattngattgcacaattgtacatgctagtagcatacattctcttgttaaataaagttcaataggtctcattagtgccaataataaaaagtctcactacgttgagaatgagacccacaaaatgagaaatgagattgatatatttaattatttcgattcaatagattggaaaatatagtgagtataagacacattgtgttgaaagcatatctcttgttacaacaatacttactactatatctatgtaagagtgcatctggcataactctaattgtgaatgatgttacaacataattcaacagatgatagccttcac

SEQ ID NO: 245654 - DNA, 450 bp, Glycine max
  unsure (1)..(450): unsure at all n locations
tgaacttgacgccactggcagtgtcgtcgacggcctcacgcgccactatgggtttctccaaatgcgggtgggtaggtggatggggaaggggagggcanagggcaaaatggaaaagaggaaaaagagaaaaaagatatgcatagtaacaaattagttcatcgacctttggctgataaataaattcatccactcatctgctcaattatataattaagtagcacaaatgtacatttctggtgataatttggtccanaagcattaagtaagcaaaaaccgtgaagcttaacagtgaaaagttaactgtnagatcaccttgtcacacttttttaacatttagatctaaagtttaatgtttatctttctcgagatgtcagtccttgaaatttactttcaagctgaaatagatattaatccaattagatgaaagtatcgactatagagtcatagagt

SEQ ID NO: 245655 - DNA, 318 bp, Glycine max
taatcttggaagaacaactactgcagatggaatacaccctacaatatgaaaaaagcgagcatttgaggctttataagagctggaacatgaaatagccggtaaaaatgatgaaatatctcgactagatcgtgaagtacaggattggaagtctactgctgacaccctcaacagttcctatgaagaaattcagggaactagtaaaaagatggaagcttcccttctatcacatattgagaatgagaaagcccttaaccaggccaatgaaaacctgctctgtgttctcaaggataaggagagaaaaactgaagacctactact

SEQ ID NO: 245656 - DNA, 439 bp, Glycine max
  unsure (1)..(439): unsure at all n locations
tcctaaaggagggcgcctcctctcaccttctttccttagtcttcctgatgtgccatcattttcttctatattctaaaccttttttgcaccattttaattattgattggtcttaattgtcaattaattaggcagttttattatttgggcccattcagctaatttgatgtttttaatctaatttcaggaattaatgaagcattgngcttgaatctagcattgggcttgaatctagaattgggcttggacttgaagagggcagactaatttattctataaaattagatcttatcttatctagatattatttagatttgatctcatctagatattatttcatctagatcttatcttatcttatcttatcctatctagagtngattngattctacttatgggattggatttaaacatatttgctagctttggcgcttgaaaaaa

SEQ ID NO: 245657 - DNA, 491 bp, Glycine max
  unsure (1)..(491): unsure at all n locations
gatcttcctcatcaatttatttctttgcttcttgagggccgatggcagcggaatggagaaggagatagacgaatgaacacaccacttcaagtagaagatgagtctagaagaaactcatcaccataggaagccatggataagagcttgaacgtagaagaagatgaatgaaggaagaggaagagaagagaatgaaatttagtgcttgaagtctgaactttgaagtctaattctcaaatgatcaaagttgaaaaaaatgcacacacatgacctctatatatagcctaagtgtcacacaaaattgaagggaagattgaatctcacttgaatntgaaattgaatttgtggagccaaactttcactaattatgattaatgaatttccgctatggttcagcccactaacccaagatcaattccaaaattctccactaagtgtgcttaagtgtcataagacaatgtgacatgtacggacatgcacacagtgtgactata

SEQ ID NO: 245658 - DNA, 282 bp, Glycine max
acttaggtgtgaccagtcttatgtgcaacacatgtgttgagctcttgcatacataacactcatcatgggtggcatgttctggagacatctggccgtgaatcactaggactaaccaagggccgaccttgggtctcgccagccctctggaggatagactaaggaattgtctaaactgcgttctgggcgcatgctgttgatacatagcactcaccacgagtggcacatactgaaacttaatggcgtgctcttgcgcacatgtaactagagagggtggcatgtact

SEQ ID NO: 245659 - DNA, 390 bp, Glycine max
  unsure (1)..(390): unsure at all n locations
tttgatcttaaggacaaaacactcatatttggaaagataaaagtatgaaatattaggtcttcttcctatccatagttcataacgagttcttttttatcaatggtctaatcaattatggtttgaacataggaagtcatttcactattttttcccaaaagtgtttacgaagagagttttcacaaagcatggtcctagccattttgcagagttctatttttcctttcaactaccatattctattaanggttctcaatgaagagaagttgtgaaagataccattcctttataaaaaatgatttgaactccatattctaaaactcagttccatcaccacttttgatggaagagatgcacaatccctttttttcattttgaacccttgtaaaatat

SEQ ID NO: 245660 - DNA, 384 bp, Glycine max
  unsure (1)..(384): unsure at all n locations
acacagggatggggtttgactggtacaacttggtgtgccaaaggtgaagcctgagatgtctgctcattatgggctactcctaatgggaagaacattgaaaggatctctatttggaggatggaaacctaaatctgatcttccttcattagtagagaagtatctcaacaaggtaactgcaacagtacccaaaatactttctcttatctgaacatgactactttatatatttttactctaagctgaaacgtagcaatgtctaccttctgcataaatgggtctctatgactatttgaaaaatgtcantttgtcgcaaagataattatgttcattatcggccagtgattagaataacttctaagagaagatagaaaattagtaatgtta

SEQ ID NO: 245661 - DNA, 245 bp, Glycine max
  unsure (1)..(245): unsure at all n locations
gaatggtgacattcctagagacgagcgcgccagcaccaccatcaccatcgctgatgttattcaaaccctaaccctctcaccctcaccctaacccgttttgctcgtctttcctgtgggaccgccttcaacgacgtcgtcgaggagctcaagaatttcaccacccgcatcgctcacgttcttcccatttctgacgatggaagaagcactgctgagattngtcgtgtgtngtcagtactgcgttatgt

SEQ ID NO: 245662 - DNA, 474 bp, Glycine max
  unsure (1)..(474): unsure at all n locations
atgcagcttttatccaggcaattcttggtggggaagctcattctttcttggcttattccctanggatggagtctccctcttctcttctccttagccttccgctgcatctccatggtgtaaaatcaccattgaaggacctcattgaagctcaaagatccagcctccatagaagctcacaagcaagcttccattaagtggtactcagagcacaagagcttcaagtaggtgctccttaaacctccattaattttttgctttaccttctcttccattgttgtttcttcanttttttctccatgtacctcctcacatgtcttgtgctaaatgttgttaacatgattctttagagtttccaccaattaaacttgctatagaagctagatttgattttctatnggttcaaattcttgttcttgttcttgaaccatggattgtgttgagtntacgggtcctttgagtttgtcttggttattt

SEQ ID NO: 245663 - DNA, 343 bp, Glycine max
ctgcagctggacgaggggaagaaggatacatgttatttgcttgaagacactagcagtatccattcatttactaagatacttctctctcatgtatatgtgaagagaagagaacaatattagtagattgcattcgctattcttttttttttggtgaaattacagatcacatgtacataggcatatgcttaatttctgatgactttgtacaggacagtatacataatgagtggtggttaacctcagccacaagaacaatagaatgtggctataatactgcattggtttggcgttgagtcttaatttacatttcaatcaatatcttaatattcaattcaaccatctt

SEQ ID NO: 245664 - DNA, 410 bp, Glycine max
  unsure (1)..(410): unsure at all n locations
ttaatttacttttaattaggtataatgataccatcaattgttgttattggggatcatttcatcttctcacttttgtaaccaacttgatgtcattcctatttatggattgtgcattttctaataaaaatcaaaccttgaattgagtgagttttaatcaccttctaaaatgtgagagtgaatctccttagttacttgagtgattcaagaaattagtttatcaaggaacatcaccttgtgtgtgacaccaatttcngaggagtgattcttccaaccaccttcttcattctccttcttcatcattctaaatcttcattcgacctaaacaaactcagaaattgttttccccaaccaccccataatttaccttaactcaaattacggatatttttttctaaaaattgccaactaaa

SEQ ID NO: 245665 - DNA, 473 bp, Glycine max
  unsure (1)..(473): unsure at all n locations
actactctgacatttttttgtgagcttcttcataaaacactgtgtcgtcagcaaattgaagaacattcacaggaactttgttcttccccaccaaaaaacttctgaatttatttagagaaattgcctctctcatcagtcctgtgaatccctcagccactatatcaaagaggaaaggtgccaaggggtcaccttgtctcatccctctttgagggttaaaggaagacaataatctacagtaaaaatatatgcaaagcattcaagacatattcacacaaaattgagaaatgatgggtaacaaacgttagcattagaatcctgtcagttctcttcctatgtaacctaattccactctcaatgcaagatataaatctcaattaaagatcaaattcaccagattaggctagactcaattccttgacattaagctcctttgttcaatttaggagcactattcctttggngaccctaaccct

SEQ ID NO: 245666 - DNA, 121 bp, Glycine max
gctttctgcaagacctgtgggaagatttgggacctagctatggtagaattctccgtgggagcaattgcatcccttactcagtattatgaccagccccttaggtgcttcacttttggggact

SEQ ID NO: 245667 - DNA, 231 bp, Glycine max
accaaacaggcagatttaaaccaccacacaagaagggccctaagggccacacccacaacaagacggacccatggccgccggcaaacgaaaaaaaaaagtctcgcagagcagcaaccccgccaacacaggagaaaagaaaacaccccaaacaagacaaaagaaaaacacccacaaaagggaaaacgcaaaacaggaagaacccatacgcgaaaaaaaaaaacaaaaatgcac

SEQ ID NO: 245668 - DNA, 432 bp, Glycine max
  unsure (1)..(432): unsure at all n locations
caatagccgagaagtccgtggatctcctcgggggcggagtaagtgtctgcctttatcaatcgaggaagttcttgactcccgttcaagggaagagcaaatcggtccatccacattgttgcctcttgatgtaatgagtcgatcacccttcctctaacctccttttccgcgtacacttgggcatactcgtccgccactttatgctcgtgggttgtggctagatatagttcttcttggacttgctgacgatggctaacatgttagtctctgtctcgcataaacgctgagacaagtttcttttggaccatgagcaagcggctaactcctctttcaagaccatgctatgtgctcgtgaatggtctctctcttcccttcgaagcttgagctcactgttgctgccccacaaagctccacgaaatntgtcacgggcatgct

SEQ ID NO: 245669 - DNA, 433 bp, Glycine max
  unsure (1)..(433): unsure at all n locations
gtctaaagagtcacaactcttcagaaactaactgtgtaatcgattaccacatttatgtaatcgattatcagtaaggaatattcgaaaataactcccaagagtcacaactcgtcaagaaagttttgaatggccatcaaaggttgggatacgaaattccttagagttttcctgaacaacattgtcttatcctctcacaaccaaattgtcttatcactctcanaatattccttggccaaaacacttgcaaattcaataaggaatcttgatcaatcttcaattgtaatatccttctcttaaagagagaaaattcttcttcttcttattcagagagatctgtttaagagatcgagggtctcttaagttgtaaggatatctgaacacaaaggaacggtatccctatgtggttcagaagttgtaaaaagccttttacaag

SEQ ID NO: 245670 - DNA, 436 bp, Glycine max
ctattattcctattaactctagctagacatgtagcacaaatttaacatccacctttaagactcttcaaacagatcaagagcactagaattactattaaatacagcttataatataagagattctgcattcaggaacctaatttcggttgattctttaatattatataagtacaagaatcctcctccttttcaccacatattgggctagtttatgagctatccctaggtggctacaatttcttaatactcaataccaaaagggagaaaccaggatttccttaatagatggtagaagcaagccttttctatagcgcgcacacacacacgaacatatatatatataaacctgccctgcagatcatattgtcatagtgattctttggtatgtttcttaccacaatattgaaaacgacaacactatgtcttactgaactgc

SEQ ID NO: 245671 - DNA, 432 bp, Glycine max
  unsure (1)..(432): unsure at all n locations
catagaccacagactcttgcaacaggtgcagatttttaattcatggcgagctgagttactagggtgaccaaagcattaagttttccctcaagttttttattttcaacagatgaagatgaatccgtggccacctcatggactcctctaaggacaatagcatcatttcttgcattgaatttttgggaagtggaagccatcttctcaatcaaattcctagcctcagcaggagtcatatcaccaagggctccaccactggcagcatcaatcatactcctctccatgttgctaagtccctcatagaaatattgaagaaggggttgctcanaaatctggtggtgaggacagcttgcacacaatttcttgaatctttcctagtacgcatacaagctctctccactaagttgcctgatgcctaanatgtcatcccaactg

SEQ ID NO: 245672 - DNA, 428 bp, Glycine max
  unsure (1)..(428): unsure at all n locations
acttccccaccaattcctgatgaagcccatttgaggcctctacccaaccctctaatgttgtaggacagaatattcatgtctgaatattcttattccccaacttcaaagcttctttcctatcccgagactccatggttgtaaagctgtgaatacactcatattgatctgattcatgttgaaggcctattgatttcgcaagaaaccattactgcttagcctcttccatgtcttcaatagagtnttcttctgtattctagaactcctcgatagcctctggtgtcctgttgtttgggcctttacgagaggaatcatttaaaccacccagacccttgtcctcccttagcaagatatcttcttctactacaggctcaagaggggcagctntatatgggccatttctttgtctaacgtagactttagaaaacata

SEQ ID NO: 245673 - DNA, 430 bp, Glycine max
  unsure (1)..(430): unsure at all n locations
cctttatgagctctagattaacttcaagctgcctcgggagaaacgcttcccagccttccttaaccggtggatcttctcaaaaattggtttgcaacttcacaagacaatttaccatgatttaccgttgggatctttgagaaaatatctggagtgtgctagaagcttccgttcccgagagcatctcttatttaagcatttcagcctttgctttcttgtagcttaggaaaaatgccatntcttcttctttctttcttccaaatccatttctaaagttccaagtactttttccatcacccacatccaccattagccaccacaaaccatcattgttctccattgaaaacccacaccgagaggaacccttcaaccgaagcagaatttccaacttggcttgcggtttcggtagagaacgaanaccctaatctgatat

SEQ ID NO: 245674 - DNA, 455 bp, Glycine max
  unsure (1)..(455): unsure at all n locations
ttacaagaatgaagctctgattctactcgttagacaagtggcctcagatatcttaagaagggnnggggaattaagatattccaaactggttcccctaattaaaaatctatttcactctttactcaagttatgaattcccttaatgacaatcttcttaaatattaattcaaatgaagcaactcgaatatgaatataaagcaataataaataaaggagattaagggaagagaaaatgcaaactcagttntatactggttcggccacacccttgtgcctatgtccagtccccaagcaacccgcttgagagttccactatcttgtaaattccttttacaagttctaaacacacaaggacaatccttcctttgtgtgtagagatcctttacaacaagagactcacagtctcttaatcccttagagaatgagaagaagaagaagaacaaatctctctagaa

SEQ ID NO: 245675 - DNA, 348 bp, Glycine max
tgaatcaaaaatctgcacctgtcgccagactctatggtttatgctcctctgccgaccaccacacagaccttcttcctactatgcaacaatctgaagcaattgtacagcctgaagcttatgctgtaaacatctacaacaaaccttcttaacctcagcagcaaaatcagccacaacagaataactatgacctctccaacaatagggacaatcccggatggaggaatcatcccaaccttatatggtcaaatccttcacaacaacaaccttatttgcaaaatgctgttggcccaagaagaccatatgttcctccaccaatccaacaacaacaacaacagccccagaaacaac

SEQ ID NO: 245676 - DNA, 354 bp, Glycine max
acctcttcttctagatcaccattcaggaacatcgttttcacatccattcgatgcagctcaagatcaaaataagctactaatgccaaaattactcgaagagagtctttcttagatacacgggaatagggctctgtgtaatccattcctatctcttgagagaatcctttagcaacaagtcttgccgtatgtttctcaatgtcgccttctgagtctttctttggttagaagactcatctaccttcgatggctttacaccaataggcaactcaacgagatccaaaacttggttagatgccatagaatccatctcacccctcatagcattataccacaaatatgattccttagaactca

SEQ ID NO: 245677 - DNA, 420 bp, Glycine max
  unsure (1)..(420): unsure at all n locations
gctccttaaacctctatataattttttttctttaccttctcttccattggtgtttcttcatttttctccatgtatatcctcacatgtcttgttctaaatgttgttaacatgattctntatagtttccaccgattaaacttgctatagaagctagatttgantttctatggntcaaatatcttgttcttgttcttgaaccatgaattgtgttgagtttaggttcctttgagtnttgtcttgttattttttgtggctgaaacctaaaccatataattcttacaaaaatattaaagtagaagaaaacttcaaaaatctagagtgacttgtcacctattgagttttgcatagaagcatgttagcatgaactcgcacataagattcttatgttcgctgaatatatttcttgttctttgctactca

SEQ ID NO: 245678 - DNA, 387 bp, Glycine max
  unsure (1)..(387): unsure at all n locations
aaatacacataaccataacacttgtgtgcttgagagaaacacctatctcatgagaagtgacgcatggttgatcttctctgatagttgacatacttgctaacctattttatctccaagtgcattcctcgcatgcttctatcatgagaactatgtatgacaaatgtgaacttgagagtcagaaattgaagttgtttgagagatatagtagttgtctcaattattggggctgattacattctacacattgtcattgacctaacttagtgtagttaagtcacttttgcttgaagagaagaaaagctctattgcgggagttagatatngttatgtatacgtaaatggtgcaattaaatcacacaacaattatcttatcttccctttttatta

SEQ ID NO: 245679 - DNA, 422 bp, Glycine max
  unsure (1)..(422): unsure at all n locations
tgactcatcaaaacacttgctatggtttgctctttggatatctttcattgcatcatttgtagatcttggatatctttcttgcatatgatggtctgctttgatatagttggctaatgcaaatggaaggccattgaatgttattcttgtgggaatactttgatgagatggcatgacaaacttgcattccaaacattntaatgtcagcttgttatagcatgttgtgcttgctcactattttgagttctttgacccttcgaatggcctaactagctttttgttttctccataagaagtgtatagaattctatcattgacattcaagcactggtctcatgtcatttggaccactacaacataaccaatcttcaaagcattgtagttgtgttatattgtgaggacagaataacatctttatcttaatg

SEQ ID NO: 245680 - DNA, 422 bp, Glycine max
  unsure (1)..(422): unsure at all n locations
acgacaanaacgntgnactctaatgtctgattgagtcccgcaatatatcgagacgctcgaaattgaatgctcaacctatgagccaattcaaacgacaataacttttcactcggatgtctgattgagtcccgcaatatatcgagacgctcgaaattgaatgttcaacccatgagccaattcaaacgacaataactttctactcggatgtccgattgagtcactgaatatatcgagacgctcgaaattgaatggttaagctttgagcaaattcaacgacaataacttttactcggatgtctgatggagtcccgtaatatatcgagacgctcgaaattgaatggtgaacctatgagccaattccaacgacaatacattttactcggatgtctgattgagtcccgtaaatatcgagacgctccaaa

SEQ ID NO: 245681 - DNA, 452 bp, Glycine max
  unsure (1)..(452): unsure at all n locations
aatgaaaataccaagtgtttattacctatacttaacaganaatacttataacactacaaaataaccataaattgggagagtttgatacaacttatacaagttntatacgcaaaagttagtcgttttcaccgactaacaactttcccaaatttacagttttgcttgtcctcaagaaaaaagagaacaactcacttgtcctcaagtaacaatgaaatgcagtgactacgtacaaaggtgtatgctgcaaaagttattgattgcataataagagaatggagtaaaatgcttccatcacttgtctttcacaaggtatgcagttatccaaagagaagaatgaaatgtaacctgaacaaatagatggagttaggcataagacanatatcaaggaaagtatcttanaccacaatctcacagctactggttcactcaagcacaagtgtttaagctattca

SEQ ID NO: 245682 - DNA, 425 bp, Glycine max
  unsure (1)..(425): unsure at all n locations
ttgcgatgatgtttgtgatgtttatatgctgaaattacttttggaaaactgttagagatgaaaggtagagttaacctatggttagaaagtgagaatgtgatgttatgagtggaaaaagagtgaggctttaagagttggaaggctaagtctgaattctatggtaaatggaggttaaagtgagttaatactagcttgaaatgtcatttaggacttgggagaaagcttggactgtgctagagagaagaacaaatgaccaaagtgaacaaagagccatttctagggcaaatttgggtgttgaagagtncaaatttgattcagtgagattntaggtgtaaattcagtttgagcaagtctagattgatgttatggacttgtgtggggtgagagtttgcttcaaatttacctcattctaaatttcacttttc

SEQ ID NO: 245683 - DNA, 354 bp, Glycine max
  unsure (1)..(354): unsure at all n locations
ctcccactaatcaagtcattctcaagaaattttgcgtttcttgattccacaatcctagcgctatgtgatagacaatagaatctataccctttggacttttcagcatatccaatgaaaaacccactaatagtccttgggtctagtttcttctcttctgggttataaactctcacttcagatggacatccccaaacacgtatatgtcgcaaactcggtttccaacctttgaataactcaaaaggtgtctttaagacagccttggttggaactcgtgttaatatatacacaaccttctttaatgcttcaatccacaagaatcgaggaagttgctttntattacttctcatatttcta

SEQ ID NO: 245684 - DNA, 407 bp, Glycine max
  unsure (1)..(407): unsure at all n locations
tgatatgcatctctcgcattgtatattcgcgtgattgttgtataactatttacattgtgctcctttcgcgttagcagaatatttcttagattcaccattgactttgtcatatcaacaataataatcttatcatccttagtcaatcgatcaacgtatggatgtccaactaatgacttgaccgattcatgattgtgactctcacacattaacttcaccatccatctttggcctccaaccactggtttcctacacagcttaaagagacacccacattttctactgctagtatctattcttaccaaatctttcttcctggacctatactaaccactcctttcacaaccaattaagacaaatgacgtccttnctttcataccacgatntgtgtctgacctcataatgaatgc

SEQ ID NO: 245685 - DNA, 91 bp, Glycine max
aatggggaacgaacacgaagacgcaacgaatgagagagcctggggctccccgtcgattactttcttgggagctcttatgaacatcctgact

SEQ ID NO: 245686 - DNA, 306 bp, Glycine max
  unsure (1)..(306): unsure at all n locations
tgatcttgaaggaaacttgataagtggggttctccctcttangtttaatggcttgaaaaacttgaagggtcttaatctaaggtttaataagattgttggggagattccgagttcgctgtctatttttaagagtttggaggttttgaacttggctgggaatgggattaacggctctgttcctaactttgttgggaggttgagaggggtgtatttgtcttataacttgcttggtggggcaattccgcatgagattgtggaacatngtgggccactggatcatcttgatttgtctggtaatcttttgat

SEQ ID NO: 245687 - DNA, 369 bp, Glycine max
actgaactcggtaatcattctacagcatctatatctctgaactgaagctctattgaatgctatgaccacgatcctaaattttatcacttttttttacatatatctttcttccaaaaaagaaggggaaaggggaataaagttacatggggttatgttttggggaaatttaatcctagtatttgaagctttcaactttagttcatgaattttgaaactgcgaagacaataaataagagaagctgaaaatgtaccacgaacaggaacgggaggagcaagaggaagatctgagcaaaaatggaagccttttttctggtgaatagctgagggaaaaaaaaacccccaaatgcgaggagtttgatgatgttgatc

SEQ ID NO: 245688 - DNA, 367 bp, Glycine max
  unsure (1)..(367): unsure at all n locations
atcgcaattggggttaaaattaacatgtgttgggatccttaaaggaataaattgcgatttattttgggatgtttatttgattataatattttcctttatgattataaatacaatattgatcttctgatgcaaattggttgataaaattgagtgttattggtgttttcactttttatacctataatttggattaattgnatttgatataatngtgttaaattatttgaggggtatacttgcctaagtgtgataacctttgacaaattgtatatgagatgtgaatgggattcaatggatatgtataatgaaccttgagaagggaataactgtttgaatggtgagtggacttaactggctatacacatgt

SEQ ID NO: 245689 - DNA, 384 bp, Glycine max
  unsure (1)..(384): unsure at all n locations
ttgtaatcatgcaggttttgatgaagtcgaaaagaatctgcttgataatgattgtcatcataaaaaagggggagaatatgaatgtatgaatacattgaatttgatgatgcccaagaagaatcaaacaaggttgtttcaaaggataaacattgcttcaagattaatacaagattacttcaacanacaaagtcttgcttcaagattattttaagatcaagtcttgcctcaaaacaaaggattccaagacatgcaagactctggtaatcgattattaggcagtataatcgattaccagaagacaagtttgaggaatagctgttaaaaagggttttaaatttgaattttgaacatgtaatcgattaccagttgtttgtaatcgattac

SEQ ID NO: 245690 - DNA, 373 bp, Glycine max
tgaaaggatatgagggagaaaatgaacacattgtgcacgaacaacctcgctttaacaaacatttgtacaattgcaaccttatccatgtgaactcgcattaaataatattttatttcgttatatatatatacatcccatttgattccgattatggcatttcctaaaaaaagttaacacgcataattaattatggagagatagaatcgaatatcattagattttggtaccagcatattattcaattttatttactttcgggtgtacccttgtatttgttatcagcacgttcgactgtgttggtccttatcgtcgacctaatgctatattgagtggattcccaccctgcttagaatgaagatatagtccatcttat

SEQ ID NO: 245691 - DNA, 427 bp, Glycine max
  unsure (1)..(427): unsure at all n locations
ggctgcagcaccggctccgcttccctaactgtactggaggcggntgtcgngactttatcctctatagttttctggaagtttaacatgacctccgagatggaagccatttgatcttttaaagccgatagatcggccttcatctgttcctgcatgccctcttcattatccatttttctggatcgagtgttataggggtgccttggtgttttcttagttatgatgaaattcctaaagaaataaacaacggtgagtatgccaccaaaacatgaacatgcaaatgaatgatcggagcacttggatccaccccaaagtttcttagataacgtgatgacttcagaatttctcattttataacaagaacaaagctttcatccccncagattatacaaaggtgttacaagagaacactaatggttctaattatatg

SEQ ID NO: 245692 - DNA, 388 bp, Glycine max
  unsure (1)..(388): unsure at all n locations
gagaagcatagnngccttatgacctcacgtttctcttcagctccttctaagatctcaaccttgtgtttctcaatctctttctcttgatacttagctcttgatggtagttcctccacttgtttatgtgcctcttcaacctcatcatttcttgaatttaccacttctttgagtgaaccaacttcttctttgagatcatttctctctaacttcaaagcatctaggcttacatttgcatcatctatgcttttctttcttgactcaatctcttcctttaacttctcaatttcacctttgagtgtctctcccatctctaattattcagagtgtgatgtttttatctcatcttccaaggcttggcaatgaaattcccgttctttcaacttctcct

SEQ ID NO: 245693 - DNA, 221 bp, Glycine max
agactggagaggggccaacccgccaaacaaaaaagaaggaggcagaatcccaaaaaaccacgccggacgccccggaggacaaccaagggccccagggaaagcaccgaaaacaacaagcgcaccaacgccacagacacacgccaatgccgaagaggaaaaagggccagacacaaaacgacgacacagccggggaacaaaaaacacaaaaccaaaaaaacagg

SEQ ID NO: 245694 - DNA, 392 bp, Glycine max
actccaattaaagccttccttcttagacaactcagtgagtggcttaaccatatctgccataatccttgatgaagttcctataatatccagtcaacccgaggaagcctcttactcccttaacattcttaggtgtgagccacttttgcacactcttcaccttggtaggatccacgaccactccattttttgagataatgtggcccaagtattatgcttccctttgaccaaacacacgtatcttcctattcacaataaactggtggtgcttgaacacttgcaacacttcttcaagtgaattaagtgggctggtcaactcctactatacacaaagatatcaccacaaaataccagaactgtcttcctcatcatagatctgaaaatttcatcatcaa

SEQ ID NO: 245695 - DNA, 440 bp, Glycine max
  unsure (1)..(440): unsure at all n locations
gaagactgagcatgcagctggcaactcatttatatcctgatttgttgggtgaagatgaattaagctcaaattcaaaataatattagagtctatcctcaattcatcgtcgggccacctacattgacatgttctaggtccataaccctcggctgaggggcttgttgattatccccttaatattcgtaactcctagccactttacttgcagcctatagctatgccttatatagttaaatagaagttttaaagcttagacaattctcactgttgagactntggcaagtgcaccaaatcgctcttaagtattaaaactcggaagtccgagtatcgtttccgcatggattgtattgcactctatcgaatacttctcaatttgtaagtatgagtaaaataacaacaggaataaatgcataaatacgtggctactaccaaatcaaata

SEQ ID NO: 245696 - DNA, 442 bp, Glycine max
ctaacccacggaaactcctaatatctcctgttctttttgtggtgggtggtagacatctcctgcggccactctttgttccactctttcttcgtacaaatatatacaagggaaatccggttttccggaaagcacaccggatcgtcaagtatttaaaaattaaaatggatgaatccgagtatctaacacacggaactaatgttagcctgagttaagttcagaaatgaagcattattgagagaacatgtatgattgataatttcaaacagaatttaaactatacctttatgctaaaaactataaaaatgccacgtaagtacaagtgatagcaattcggagaaatgttgggtctttctaacaaacaagctgatgcatataaatatatttctctaatcaatcatgctcttgagttctatgatgtagcctaaattactgaacctcgatc

SEQ ID NO: 245697 - DNA, 455 bp, Glycine max
ggacttgatggggcctatgcaagttgaaagccttggaggaaagaggtatgcctatgttgttgtggatgatttctccagatttacctgggtcaactttatcagggaaaaatcagacacctttgaagtattcaaggagttgagtctaagacttcacagagaaaaagactgtgtcatcaagagaatcaggagtgaccatggcagagaatttgaaaacagcaggtttactgaattctgcacatctgaaggcatcactcatgagttctctgcagccattacaccacaacagaatggcatagttgagaggaaaaacaagactttgcaagaggctgctagggtcatgcttcatgccacagaacttccctaaaatctctgggctgaagccatgaacacagcatgctacattcacaacagagtcacactgagaagagggactccaaccacactgtatgaaatct

SEQ ID NO: 245698 - DNA, 344 bp, Glycine max
  unsure (1)..(344): unsure at all n locations
tatgcgaagatgatattccgagtacttnggatttggtacgaccatgctctcctgatttccagctgggaaattggcgagtggaggaacgcccctgcatttacgcaacaagcataatgtaaacctttacggtttaaaagctctatagttgggcctaggctctagaagtttcattttgttaaagctttgtgtcttttggttttgaatttataatacaaggatctttcttcatctgttcctgggctctacccattctcattcatttgcatgtttacttcttttcctaaaacggcagaatcaatgacaagtcccccgaaggtactaatacctgggacccgtctataact

SEQ ID NO: 245699 - DNA, 428 bp, Glycine max
  unsure (1)..(428): unsure at all n locations
ctcatcttggaggtgtatctctttttaccatggcttattccttaatggatggngcctnctctcagctcttctcctttgtcttccgctgcatctccatggtgaaanatcaccattgaaggacctcattgaagctcaaagatccagcctccatagaagctccacaagcaagcttccatcaagtggtaatcagagcacaagagcttcaagtaggtgctccttaaacctccatctaatttttttctttaccttctcttccattgttgtttcttcatttctctccatgtatctcctcacatgtcttgatataaatgtggnnaacatgatntcttagagctctcaccgattaaactcgctatagaagttagatttgaatttctatggttcaaatttcttgttcttgttcttcaaccatgaattgtgttgagttt

SEQ ID NO: 245700 - DNA, 434 bp, Glycine max
  unsure (1)..(434): unsure at all n locations
cagcatgaagcttaagcttgttccatattcaaatcatatatgtgtttctaaagttgtgcttttatcaagtccatgagaaaatatctaagttcatttggtctttgagaaagtccttcattgtttttcattctcaaatgttttcaaaagaaatccttttgttgtgttctgatccaaaaataagtttcaaaaatactggttcatgattctttccacaacatgttatgttcaagaaaaaatttctatttaattcctaaaaaagagttataatttataactatactaacagaatatcaaagcacgcacaaattagtcaaaataaacttgcgtaactttttcaaaaattaaaaacaataaataaggtaataaagtattgaaatttaatacaaagcgataagtaaacacaaagacaagttcacgaatatntgaagatcatg

SEQ ID NO: 245701 - DNA, 362 bp, Glycine max
  unsure (1)..(362): unsure at all n locations
aatcacggcaaagctcgtaaataatttaactgggatggcatctgtgattcataccaaatgatggggcaatgtgccccttggtgtttattttaatagaatataatgtaatatcatctatttgtatgccattatgtggtatgcttaccttggacaagagggcataagaacctataaaattccccatcctgcttccatcttcttaagctgcttctacatcttgcatgtttgcctgggacaagacggtagaagatcccataaaattcttcatcccgctttcatcatctgangctagttcgacatctggcatgtcatactcctgctccaatgtatacagagtaatatgaataaacaattatattcaa

SEQ ID NO: 245702 - DNA, 437 bp, Glycine max
  unsure (1)..(437): unsure at all n locations
tatgcagcgtgcagcttnggaagcctaaacctttgtgatatatnttatcaagggcgcagcttngcacaaacaccaacacccgttggcagctaaacctgtccctttcccataccaaaatagccacgcagtcccatagaggtacacacctctgaacaaaaaagaagaagaagccaccgacatcagttcgttgtcggccaaggtaagcaatatcgcggggcctagcggtgtgacccacagcggtcgcgtgtttgcaccccccgacctaccaattcaactcacgaacgtcaaggggaaggcaaaggtagtggaagaacaagatgataagacgcccctcactccaaatgaggatattccggtgaaaggtcttccaaagaaaagggatggtcatggcaagaatgaggtgtcgctagaggatgccaacgaatttctccacataa

SEQ ID NO: 245703 - DNA, 260 bp, Glycine max
taataacctgcaaagtatagttctctgttggtgaaatgaacccgagcaaaacctcaaatctgattgggcagtacacactctaattgtcgaaggaagcaacctcacagcgtgatgagcaatacaactctcatcatgtactcccacatgatgatgaaaaaacaggcatcgacttaacagtacagaagcaagctcatagctatttctctggccaggatgttgactactagacctctacacatgataaataaccaccaaaaata

SEQ ID NO: 245704 - DNA, 440 bp, Glycine max
gtacagccacacgaactgcctcataaaactttctatccaccgatgagtccatggaaaatgaccttctcatggcttgaactgataacctttcatctttggatctaacacctatacactcatctcccaaacttgtcactttatgaagcttccttgctttcttctcctccaatagcttcatttgtgaagagagactaataatacgacatgttggtaactcttgtctttcttgcaagtattggtctctatcatgttcaccatccaaattaatcacaacaaaacctccttcatcctcagcagcaccaatgaggtattcatagatttggcttcgacctcgaggggacagccttggagtgagaataaagttgacttggtctacatgatggtggactaggcttgtctaggaaacagttcttctacaaagaaggcaatatgcattgttc

SEQ ID NO: 245705 - DNA, 404 bp, Glycine max
atttaccatccatgtgtaattcattacacattataaattttgaattcaaatttctagtgactgttataaacattttcagctgctggttatcgattaccggagagcaaatctcaatttgaaatgatagaattctttgggcaaaccttttgctttttcaatttggaaacttcttccaaaagattctagatatcaacttgatcatatatcttgactttcttggattcttgtgttgaataaaacttagaagcacttgatcctttatcatcatcaagacatcaaaacatcttgcttctacataagagtcatttgacttaatccatcaactgagaaatccctcaattatttctccgccttggaacaatatttttgcaagaatcaattgcgtctttcattcttcctcacta

SEQ ID NO: 245706 - DNA, 426 bp, Glycine max
  unsure (1)..(426): unsure at all n locations
atgtacaagacacttttgcttgtgaggagttcaaggcattactggatgaaaaggtatccaacggatgagagattcttcttaaggattttcaagacttggaagaaagggtgaaatcctttaccataattcttgaagattcaaaagccaagcgcaaggaaatgcttaaacaaaagtttttactactacaagaagaatgtgcctttgcaaaaagatgagctagataggttgaaaaataaaaactcaaatctctagacggaatgtcaacattataaaaacatttcttctaatttaaactataactttagaggacatgaggccttgaagaaactaccttatgagattgtaaaactctatgaggagatagaaaccttgagggataactntggcaaatntgttggtggtcatgaagcccttaacaaaattatt

SEQ ID NO: 245707 - DNA, 304 bp, Glycine max
catgctcacctgcctcaaacaaggtcacgaaggactattcggtcgaatgaactattcccgctccggagtatgacagtcaccgctttacgagcgctgtacaccaccaccgcttcgaggccatcaagggatgggcattattcctggagcgacgcgcccagcttagggacgacgagtatactgatttccaggacgaaataaggcgccggcggtggacatcactggttattaccatggccaacttcgatccaaaaatagtcctatgagtcttatgccaatgctcgtccaatataggagggcctgcgct

SEQ ID NO: 245708 - DNA, 436 bp, Glycine max
tttatctctcatggtagaagcaaacacatagaaacaaggtttcactatcttatggatcaattgaacaaagagaaattgaaagtggagtattgctgcacatttgatcaactcgctgatattttaaccaaacccctcataagggagagggttaaaatgttaaaggacaaaattggcttgatggacttatgagatcataattaacggagggtgtgagagtctaattctgttatggctttgtatataagagagagtaacataattttaaaattctgttataagtgctagcctaagagtgaagggttgttactttgtattgcttgtataaaatggcaatcatacatcttaataaacgggtcgtttttcattctatcatcttcagtctctagcgctatttctactaagtgtgcaattctgtgcaaatctgtgcttataaaac

SEQ ID NO: 245709 - DNA, 315 bp, Glycine max
ttatatgcggatgatctcttaatagtcactggcagcaacatctagcttattccacaattcaaagaagacatgatgtgagtccgtgagatgattgatcttggagaaatatcttattttctctgaataaaaatcaagcatagaccacatgaaatattcattggtcaacacaagtctgcagagaagattctaacgaagtttcacatgggtaactgtaagagtatgagcattcctatgtgtcaaaaagagaaattgtgcaaggattatggaacaactacaagggatgagtccaatattgaagttggttggtgcttgatg

SEQ ID NO: 245710 - DNA, 408 bp, Glycine max
  unsure (1)..(408): unsure at all n locations
gctcacctccttgagaagcttccttgagaagattcctaaagaagctagagcttagctacacatacctctctaatagctaagctcacctccttgagatgagaagctagagcttagctacacacccnctataatgactaagttcacccccattccaaaagtacatgaacatacaaaaaagagcccctactataaagactactcaaaatgcccttanatacaaggctaaaaccctatactactagaatggccaaaatacaaggcccaaaaaaaggaacaacctattctaatatttacaaagaagagtggacccaaccttggccaatgagctcanaanatctacccttagtttcatgagaacccaagggccttctttagtagctttagttcaatcctcttggagtcttctat

SEQ ID NO: 245711 - DNA, 401 bp, Glycine max
ggcaacatcaaaaagccaaagtgtgtggcaatcaatacaagataatatcatgaagtggacaaaatcaatcataagtcataaccaaacataagcgaaacataaataattcataaccaaaataattcaagcattccaaagtgaaaatatgtatccaaacagtcataatttaaaaccacatacaatccaatcataaaagactaaagtccaaataccaaaatataactaaagtgcagaaaaggatagtccaacgatcatatccaaatacaccgcgtataagaaaaagagaattatatactacaccctatcaaggcggtggtggtggtggaagatcaaactctaacgatataacccacatcttcttcagctgcgtacacggatatcattcctgcaaccgatattca

SEQ ID NO: 245712 - DNA, 315 bp, Glycine max
actcacgattcaaccaatgtggcatggacccttgctgctatgctgagaggtatactaatcgttacgttatccttgccgcgtatgttgatgacctgttgattgcgggaactaatatgactggaagtgatatattgaagcagcacgtggtagaaaactttgatatgaatgatcgtcggccacctaaacaaatccttggcatgagaattcgtagaaacagatcataaggaatttagaagctgcgtaggagaaatatatcacaagttgcttgacaggtttaccttggaattctaagccaagataccccttgggatctat

SEQ ID NO: 245713 - DNA, 362 bp, Glycine max
acagaggccattgcctccctcgcccagtattatgatcagccgttgaggtgcttcacctttggggacttccaactatcacccatggtggaagaatttgaagagatcctaggatgtcctctatggggaaggagaccatacctcttcttaggggtctatccctcattaactagaatttctaagatagtccaaatctcggcgcaggaattacaccacagaaagcaagtcacaaatggggtggttggaataccgagaaaactgttggaggcaaaagcaagaatcttggcaggtaaaggaaaatgggccccgtcatagacattctcgcactgtggatcttccgaagaagcctctttccacatgtggat

SEQ ID NO: 245714 - DNA, 346 bp, Glycine max
  unsure (1)..(346): unsure at all n locations
gctaaactggtggcacgatgaagactactaccgatcaagattggactacttgacacccaattttaccctagaaatggctcttgcctacactttggtcattagtgattctctcttgcacagaccaagctttctcataagtactaaatgacatttcaaactaggattaactcattttgacctcgatataccattgaatccagatttagccttgcaactctcaaagcctcactctattttcaatcataacaccgcattctcactgtctaatcctagagaaactctacccgttatctctaacagatttncgtaagccatntcagcacacaaacatcacaagcatcatgat

SEQ ID NO: 245715 - DNA, 302 bp, Glycine max
ggggggttttttgtaccgctcaatccaagctctagccttgactactaactacacttacggacatgcgctacgagtctacaaccataaataaaatggaataaacactcgctacccaggcgggctacgagtctaccaaagctaatcaacagaatggacacctacgggacgggcgactatgagtataaaaacccaaatcatcaaatgtgaatactacgacagctcgtacagacataaattccaacaatgggttacagccttttcaccacttagctaaagccaaaaccccaagacctcatactcaa

SEQ ID NO: 245716 - DNA, 423 bp, Glycine max
  unsure (1)..(423): unsure at all n locations
ttttttttcagcccacacacatgcggaaagactgcgacgccggatatccgtgaaaatttacggcagatatgcctctgaaacgagaagcccctagccaagcagaagccttatctgctttcatttggagttgatatgcggaagtgactgcgccactgagaacatatgtcgtgatccacatagtcaacctgcgtccaaagaaggaaccaccactgcctcgaaattcctttggccattactacctaatctctatgacaattcgctcgttcaacactagagagcacctaactagtgaaacaggtaatggattagataaacaacaatgacaaggattatntgaataaacttcaagatggaaccgagcatctatatttccttaacgatagtncacattgactactatgtgtcacgttctgattggacatg

SEQ ID NO: 245717 - DNA, 298 bp, Glycine max
  unsure (1)..(298): unsure at all n locations
aacgagaaaacactgaagaaaaagagagtcaaaagggtgattcttattaagacgatgaccaaaatgaaggtatccatccttctaagggtgcggaggttgaacatgttctaaacctagtggatcctacactgacccaagatgatctcaatgtggagaccatagatgatatntctgccaaactaaggactactaacctaagtttgaagaaatgacctttattattattatttacaattgtatgctataaatgggtgctaatatactttcatagggacattcaatatcttaataaatgata

SEQ ID NO: 245718 - DNA, 340 bp, Glycine max
  unsure (1)..(340): unsure at all n locations
catcctcaacatttcaactgttgtcaaactttagccttaatcttcaggagccttatcttcgtgataataacattgttttggcatctcctctctgcacaaactttccttctcttgtgatccttgacctttcctataataatatggcatcatcagtctttcaaggtggtttcaacttcagctcaaaacttcagaatcttgatttgcgaaattgtagtcttacggatggaagttttcttgtgtcatcttctntcaatatgagttcttcatcttctcttgttcccttgatctcactcaatctgttgaaacatcaactatatttactggtcttaactcacaccat

SEQ ID NO: 245719 - DNA, 305 bp, Glycine max
ctttattggcgggagctatgctacctactggagccaaagagacccaattacttgagaacaacagccagaaggtccattctcaaccaatggaagaggccatgaattagaatccagaagcaatggaaaccctaatatctaaagtgtttacaaatatctcttccttgaaggcagcttatatccagcttcgagctgtcatactccctacgactctgataaaatccacactgctgataaacttgttattattgagctgaaaaatctgtctgaacatcaagcatttctacagggagaacaacccgaaacca

SEQ ID NO: 245720 - DNA, 405 bp, Glycine max
  unsure (1)..(405): unsure at all n locations
ttgaacgcattaaattcttgtaataccaaacacaagcgcatgtacatttgttgcaatctcatcttctcacttctctgttactaaatggaaacccatatccatactatgtaacatcttccatccatggttctctcagacatttcctctcccaccaggtaaagttcacaccttttcccctctacattcatcattttccctccctcatgtgtggcaatgcaccattttctcttctgtgttaaaaaaagaccaagtttttattatttgtgttatacaaccagctgatcaagaacagtatgaatataaaagtcatgcatgcctctttttgcaactgtgaacctatttggttatncatataatttcttatttgtgtccatgaaatttcatgaaatcttatccataccattt

SEQ ID NO: 245721 - DNA, 471 bp, Glycine max
aatttaagtggagaggatcttacattcttaaagacctgattttaaataaacagaaccaacatgatgaactgaaacaaattggttatcaggtaatttaacagatgtagagacagatcaaataccatatgatttgtagcacctgaatctaaaatccaaataatagaataagttttaaaagagataaaacagcaaaaagtacctgcaaaatctgcaacaggttgttcattaccaatgttgagtctgagatggaatcaaattattcttaggagcagagtccgaagatgaggcaataacaacaacaatggaatgagcctgcatggagtgagatcctgagtcgcgatcattatgggttgaaggaccattatgagaattgttatagccaagattattgttccaccaagaaggatatcctatctttgagtaacagcaactgtaggagtgacaatcaacattgccaatggaacaatgata

SEQ ID NO: 245722 - DNA, 480 bp, Glycine max
  unsure (1)..(480): unsure at all n locations
gctgctcggtaaaacgctttttatccttcgttaaccggtggatcttctcgacattcggtctacaactttacaagacacttgtccatgatctgaccgttgggatctttgagaaaatatctggagtgtgctcgaagattccgttcccgagagcatttcttatttaagcacttcagcctttgctttcgtgtagcttaggaaacacggcatttcttcttctttctttcttccagagccagttttaaagttccaagcactttctgcatcacccagagccaccattagccaccacaaaccatcattgttctccattgaaaacccacaccgagaggaacccttcaaccgaagcggaatcgttcaacttggctagcgggtntggtagagaacgacaaccctaatctgacctttcgttttctttcgaggtaaccatggttctatgcttggttcttggtagcttcatcttgtctttcatctttctgactt

SEQ ID NO: 245723 - DNA, 383 bp, Glycine max
caaacagaacgatgttggcgcttagcgcatcctttcccgctaagcccagcttgaaagctcaacttatagaatgaatctagggcttagcgcagaatggcgcacttagcgcagctataataaattttcacaaagaggaagtggtgcttagcacatcatccacgctaagcccactgcttaagtgcaacttatagtgaagatgttgggcttagcgcagcgatgtgcacttaactgaaccactcagccaatcaatcaatggtctttgcgattagcgcgagcaagctctgcttattgcgtgaagagatggcgctcatcgcaacgtttacgcttagcggattagcaatctaaacatatgtctaaggtatttgtcttcttatctcttcaca

SEQ ID NO: 245724 - DNA, 373 bp, Glycine max
ctcgaatttcgataacgtcgaatacacagaacccttcactcttccttttacaagctgctgtattatagctaatttagcaattaacaggaataacagacttgcaaatatatcaaaagtatgaacagatttgaagacaatgttagctgatataagagtgtgagagggtctctgatgtaatagtatcgctagcagagcttaagcactgacaaaaacagcaaactatgatcagagcaagtatcatacttgtgaaatccataatcctggcgaattctttatcttgggcagaacagagctgaatgattattcagtaagccaacatgttatatgtccagattatgctgctttggtagaatggaggagaaccacactttat

SEQ ID NO: 245725 - DNA, 324 bp, Glycine max
ccacaggattaggcacctgacaaataggtgctagactaatgcgcgtggagcatttacaaataacggtctaaggttacttgaaaatttgggtttaggggcattcgactaatgacggcttatgggacgcgagtaatacggtttagtgtacttgaccgatacggcctaggggacttgaacattaggattcgagggttacttgacaaaatggggctcatgcctgttcaaccaactagggctatgactacttgaccacataatgtctagtgttacttggccaattatggcttacgattcattcacacatgatgatttatcgttacatga

SEQ ID NO: 245726 - DNA, 330 bp, Glycine max
ggagagaagttgaactctcgtgtgtgtctcacaagactctcattcctcaaagttacaacaagtgttacacatgcttctatttatagactacggagcttccttgagaagctttcttgagaaaacttccttgagaagcttctttgagaaaacttccttgagaagctagagcttagctacacacacccctctcataactaagcccaccttcttgagaaattaccttaagaagattcctaaagaagctagagcttagctacacatacctgtctaatagctaagctcacctccttgagatgagaagctagagcttagctatacacaccctataat

SEQ ID NO: 245727 - DNA, 305 bp, Glycine max
cacagtcttaatgataacacctgaaaatatcaaacatggtacacaccatatcattacacacaacacaaagaacaaaacataaacataaattcaacacagccgcataccttaagcaaactcccaacaatacaaacacccatataaaacaaacctacagctcaatctccatgaaacggaagcaaatcatctcaactaataatggaacagcacaaagaaccacacaaagggcatgtgtgattcccatctcgcttatttgttcaaaaactgatgtctaaagcactgcaaactactgagcaatcaaactc

SEQ ID NO: 245728 - DNA, 350 bp, Glycine max
gcggatggcgcctcctctcacctcttctcctttgtctaccgcttcatctctatggtggaaaaccaccattaaaggacctcattgaaactcaaagatccagcctccatagaagctccacaagccaactttccatcagtggtttcaaagcacaaagagcttcaagtaggtgctccttaaacctccattaattaattgcctcaccttctctttcattggcggtcactccattttctccatgtatcccctcacatgtctagtgctaaatgttgtaacatgactctttaaaattccaccgataaactactatagaagcagaattgatttctatggtcacattcttgtcatgttct

SEQ ID NO: 245729 - DNA, 341 bp, Glycine max
ctggcatatttatacttctacaagatgtgatagtagagattatggccccactctcaacaattgatttttcggaccatttcagacatgaaggaagttttcagagagagagaagaagagacccaactatcataacgactagtttgacctgtgaggtctatatactgataaaagaccactatagaacatgagacagatggtatgagacaacctacattgtgcacaaatgagatacatctcctctctccccctccatgatcctttgtgatccttatatgagtagaaatgaacacaatagagtgaagtacaatcagagcatctataaagatccaagctatgagtat

SEQ ID NO: 245730 - DNA, 354 bp, Glycine max
cactcggctgtcaccataagtgggacattaacgtgcagcctattagagtcatcaccggctcgagtctgaacagggttggcgagagtgtcgaacttggatattgataggaaggaataaagaggtgaaattgaaaagtcaaccttttggctgtcgttgagtgagttgaggaatcctgcttttagctctgagaaagcataatcaggtggggagaaaatggtcaatcccccacaacctgacgtgaggagttgagagtcgagttggttgatcaactgggtctgcttcagaagccgtatcaaaacagaagatctctttggcttactcaagatttgagcaatgtcaatggtgggagctttt

SEQ ID NO: 245731 - DNA, 393 bp, Glycine max
aaaacaacatatctcacactccagatgttatattgcaaattccaacggtcaaactactgatataggaacctccagaaaaaaaaaacaatttaaggtgatccaacaattaaacattaatttataactagtaatattgtagggtgttacagtaccaatcaggcaatgggccatatacatgactttctggtgataccaaagcatgattaccgttataaacactgcatgtaaatccacgcaaatctgcaaacaaaaacatagtaaattcaatccaacacaaattcactatatagttattttcaagaaatagttgaagacttgcactaacagaaactatgagatggaaaggtcactatgtctgaaaacacacctcacgccatcaggacataacataat

SEQ ID NO: 245732 - DNA, 413 bp, Glycine max
gctgaagtacctatatgaattggtgctataggagtacgagctgtgtgttaacgaagagcacaagtatggggagcatgggcagctgaagaagatggggcctcagatcctctagccctggatttgcgggtccctataaaagtgaccgaagggttatctaggttccagcaattcttcttaatataagccaaattactgcctgggctaatagactcataagtgagaaaatctgatgtgactcctcacgccttgcacacggcagtgataatggctagaaatccaagcctctaggagttggactgagcaatgagtgaaatctgaccaaaaataagtgatccttagttcatgttcatcttcattacaagcacgtagactaacctggccctatccagatcaagatcataaatatgggatgt

SEQ ID NO: 245733 - DNA, 260 bp, Glycine max
ctttaacatgatttaaccattgtgatctttgagaaaatatctatagtgtgctagaagcttctgttcccgagagcatatcttatttatagcatttcagcctctgctttcgtgtagcttaggaaaaacgccatttcttcttctttcttcttccaagccatttctaaagtccaagaacttttccattaccacttcaccatagccacccaaacatcattgttccatggaaaccccactgaaggacccttcaccaagcgaatttc

SEQ ID NO: 245734 - DNA, 452 bp, Glycine max
  unsure (1)..(452): unsure at all n locations
tgtccacaaaaaaatcactaagaaggagtttaagattcaattcctcagnttttcttaccaagtaaaaaggatcatttttaaggtccaacgccttataatgatcaccttccaagtaaaaagaatcgtttgattcacccttaagaaagaactacgtaggtctgatttcctcttcgatggagggtacgtaggagcaaaagccccgcttttgtcgacctcaaaaaataaaaagaaataaaagttaaggtaacacaatttccacaattctaaaaaataggctgttgtcctttgagacaaacgtgagaggtgctaataccttcctcaaacataaatacaactcccgaacttagaaatttcgttntgacccggttccttcggttnttccgacgttttccacanataaacgttggtggcgactccgcgcatctttccttctttggaaagcgcacccgtga

SEQ ID NO: 245735 - DNA, 331 bp, Glycine max
actttaaaaggtgagctgacttatagaaacaattagccgagccgacggcgagccaaagccttaacaagagctagctattccaccctagtggacatttcatgccttatcataaaaagcattgatggcgccgaaaaaaaagaataaaacttgatgattgattcttttaactattagtctcataatattatgatagcatcttttttactcaaaaaataagggttaaaaatcaaataataatcttttctcataacctcaaaaagaagtcttaactaaataaaaaaatgctgaaggggataatataaattatatctattattaagaactattcaac

SEQ ID NO: 245736 - DNA, 388 bp, Glycine max
acattgcgtattgcactgaaatgggcttatgaccatgcttccattagccatctattcaagaactcccaagcttggcagaagaatgtctaaaataggtcataaggacttcaaactcagcaacagtagtgggttttgcccactggcacataaattccgttaagatccttgcttgtccattgcgtgtgtagaatttttccaaagatgcaagacacataatctatgaggtgcaccacgcatgacttcctgtatagttggagtaaagacctgaaaaaatgtatgaacgtacttaatacttcttgactagtccctaactcatgtcattaactttaattaaatacctaacttatgataataagtacaaatcacaccatgtcataccttatgcatg

SEQ ID NO: 245737 - DNA, 390 bp, Glycine max
  unsure (1)..(390): unsure at all n locations
atttgaagagcatcctagatgaaccttcacccgacgaagacactgaanaaaacttatcttctcattcttggacaaagtattacaagctgagagcaactaaatcttctttctatcagaccttggatgcaactgtgatcgtatccccatcttggctagatcttcacgggtattcaagccatcattcgtcttgccttgaatgttaaggatcatcccaatcacactatcacatacatttttctccacatgcatatcattaatacaatgcctaacatctagatcagaccagtaaggatgatccaagataatggacctcttcttccatatgcaagtctcactcttatcctgctattgggtcttttcaaatacagtattcatgtgttgaacctgctg

SEQ ID NO: 245738 - DNA, 366 bp, Glycine max
ttgtttggattgaaatctgatatatttgtacgaattatgacttattaaattgctatacgtggactttataatggggattctttctcgccttgtgatgaagcaagtgaatatattattgatatctgtttttgtaatttattcaattgttcagtgtacttacatcaaatgaactgatgcagatatggaaatacccaaagttatgggtgggattcttgaagtgtgtgcagctgacataaccacagtcatatggcatcttgcttcaagtattatctctcttcactccttgtatcaggaacttattattattattattattaatttttaacttatggcacacgtgtaatctatattctgcattatgtaaca

SEQ ID NO: 245739 - DNA, 439 bp, Glycine max
accacaagaggagcacatgcacaaattgcgcagaaacccaccatcccctgtggcccacctacaactgagctcacgtactcccacgtagcccatattatcgttgctctcaacaccgggtccccatcaatcctcccaagcttgccagacatccaattaattcaacattaaaacagcacaaactatcacagccaagaaaacagggcaaaggcagaaaactctgcccaaaacaccaaccaaaatcataacttttctcacttaaagaccccagtaacaattccttcgttccagtgcgttaaacatagtcataactttgaggatggggtaaattcgaaacaaactctcaccttacacaagtctataacatcaatttaaacttgttcaaactggatgtacacctataatatcatcgaatcacaatttgactcttaacacccaaata

SEQ ID NO: 245740 - DNA, 358 bp, Glycine max
  unsure (1)..(358): unsure at all n locations
tagcagatgggcctaaaagaaatgttataactcggcaaggatacgacataaacaagttattccttttacacaatagcacaagacgacaaaagtacaatgcaaaacaacggggtcaccctaagggctgaatctcaacacttcgcaagtgtgcatgatgacaatccctatgtagcttccatcccttactttgggttcattgatgaaattatggagcttaactatgtcaaacttactgtgtgtgttttcaaatgtaaatagggtgacaacaacaccngtgtgcagaccgacgatgtaggatttacgttggtagacctaaagatactagctaatcacaatgacctcttcatcatggcagaac

SEQ ID NO: 245741 - DNA, 201 bp, Glycine max
gacaagagacaacaaccccgaacagcacacgacaagggagaaaggagcacggagaagggcccaagcggcgacaaaaagacgggcaaaagaagaaaaccagcagcgaagaacagaaacggaaaagaccgagaaggcaacaaaggacaaccaccgaaaaggaagaaaccgagacaacagcgcaggaggaaacccgaggaaaac

SEQ ID NO: 245742 - DNA, 258 bp, Glycine max
ccatgaatacccaggatcctgaacatgaaagtatacacgcgccttgagcgcatgaaaccttgtccatgcagtgaaaacggctcctcccatcgcatcttcaaaatacccaggcaagtcaaagacaaaccgagagcgaagaggaggagcatcacacactagacgtcaataagactcactatctccttcgtgccttagaaaacacaactaccacgcctttaagcaatatatcctggctggacgcaagaatgcaccatgcac

SEQ ID NO: 245743 - DNA, 362 bp, Glycine max
tgaaatggccacgtcattagtaggacatccatatgcaggggcgatgactaaagttgaataaacacttattgtcgatatgacgaagtccatggagaagccaagaaacattctactaactctgaaggaacacaatgccaatagctgtgcgatcattatacaaatatacaatgcaagaagtgcattccgttcttccataagaggaagcgatcttgaaatgcaacatctgatgaagcttcttgaacgtgatcagtatattcattggcacagaataaagcggtggatcaagtggcctcagaataattaagaaggaggggggggcggaataattattaatgacctcggctattaaactaaccttctga

SEQ ID NO: 245744 - DNA, 216 bp, Glycine max
gatacttttctaagtactatcactgcaattgtctaaacgaaactacaattgtacttgaataactcatgtacacaacattggcactaaaataaataaaaattatggacgcgaaactttgtatataaaattcgcctacgaagatccattggcggaactccattaaggccaggggtgcactcacccccccaattctacaaatcacaagcacattcttcc

SEQ ID NO: 245745 - DNA, 329 bp, Glycine max
actctccggatcgaaattgtcgaaccgcaccttcttcaatgccactatcttcctcgtctcaagctccctcgccctaaacacactactggacgtgccctgccctatctgtcaacatcaaccaccaccaccactcaatcacttaatcatcatcatcaccatcaaatcgtaatcattatcaattatcataatcaaaataatgactataagaataataatgttaatctatctatcttctagaataaaatatgtttttaatatcggtgggtaaaattagtatcagactccgaacttcaactatcattcctgaacatccagaaacagtgatatcc

SEQ ID NO: 245746 - DNA, 443 bp, Glycine max
aaatcaatgcctatgctaccccattctaccatcaataatggcaggaaaatgcacattgttgatttaattgcttctggttccgcacttgaaattgaatatcattagtcttaagcctgatgacaaccatcatctcgaaccaaatacaatattttcatttattttgcatattgttggatcgtttcaatgaatttatctctaaagcatgattttctatgattccaagcactggtttgagtatcagcactcatatggtacattatactatcatatgaacaagtgcactgctaaatcatataaacaatcttttccacagtttatatgtgttaatgatcgcatactattattggtatcatcctttctttatggttcgagttaagtatcatttctaattctagcacaatattgtatcactgtgagttgaagcaattcggcttataactata

SEQ ID NO: 245747 - DNA, 278 bp, Glycine max
gcaatcgctggagagtttcgaacgtctaatctggagcggctccctatatcataatcctgatgaagacatccgagcgattagatatcaccatagtaatcgctggagagcttccagcgtacagtattaagcctatccacatacgaagctccctgagacgacatctgagcgaaaagatatgaccatagctatctgtgtacaatttccaatagttaaatacgagcggcgccatatatgaacatcctgaataggacatccgtgcgataagatatgacaataga

SEQ ID NO: 245748 - DNA, 374 bp, Glycine max
gtacattcactcggctgttcagagataacacgggagggtacatcccttgcggatctttgcttgcaaaggattttagaacgttgatagaaatcttataaaccgttggttgcttatagattggatgtacgcacaggttgttgccaaaccaatagtaaatacttgtgtttgccttcttattccctacacttttaattttccctgtgcacttataattatcgcttttacttttggttaagtgtcaattactgctctttactttcttaacttggcagcaaaatcctaattatatctagtaacattaagaatgataagtttaattagacacgcacattaatagttattcatccccttttaattatccgtgccacttgtct

SEQ ID NO: 245749 - DNA, 324 bp, Glycine max
aactctatgcgaatcctgagatttaacacagcaatacgatggatgaaactcacagaaacagttattatcgcgagtgaatttactaacactaagtaaatctttggcaagggagggaactagcagtaaatttttaagggagagagtactgtttggagaatagggggacctatacacatttgagcctatggaagagattcttgtacccgtgccatcagccaataagatatgttcatttcctgcagcttgactgcttcgaaagagattatgtggatcatcggttgcatggtgtgaagcacctgaatttggataccacacctgggaaat

SEQ ID NO: 245750 - DNA, 439 bp, Glycine max
  unsure (1)..(439): unsure at all n locations
acctggagatatgtcgcgggggtcaggagaccttgtggacgtcaggtggggtgctattgcccaaaaccaagcttgaccaatcccgacccaacccgggcatagtcggtcagtgagaacctgtgatgtacctaagcaggcgagctcctggcagtcaacagataaaaggaaaacaagaccacaaagcaaggaggcttgtggtggctggccagctgtgaattatgtgtaatatgtggatggtggcctctggtaatcgattaccaagggggggtaatcgattacaaggcttaaaattgaggacaggaggctaagatggtctctggtaatcgattaccaaggggtgtaatcgattaccangcttgataacgaagtcaggaaacttanggagcctctggtaatcgattaccagcctgtgtaatcgatacacagaggaatgtcactg

SEQ ID NO: 245751 - DNA, 272 bp, Glycine max
taaatctgtttaacaccccccccgaggccacgtgaaccttaacccttcaacccaccaccacccacgctcacacacaaaagactttatttctttaacagggcaaaaattaagacggggcggggaatatcaaaacccatttcacccagaaaattaatacaccacccatcatcaaccctacagaaccctccaaacaataccacaacacctcgaacaacaaccacaaaacccccgcacaccgaaaactcccagcacccaactgcccaccaccccct

SEQ ID NO: 245752 - DNA, 262 bp, Glycine max
ttcccttcatcgattattaaatttaagctatgccacgtgtctccatatgaggggagcaaaacggcccacttcctctttagattgaacccctactcagccacaaaaagtgagcaaaatctgaccttcgaaacgctaaaatactgcctcggtttgcgatctatttctctgattccagcacctcgcgtttctctgcgtgcgtccgggccagctctctaaagtaagcactatatatatcataacgctcaaaaataaatccccgagc

SEQ ID NO: 245753 - DNA, 338 bp, Glycine max
  unsure (1)..(338): unsure at all n locations
ggtgaatacacatcagtgcttgcatttcttggaagtgttgttagaccactccacccacgatagcaacttatcccctggttgatggttatgaatgcacaaaggattgttagtattgttctataaagcgggttaatacctctcgttgaccgtcagactgaggatgatacgctgagctcatccgtaactttgtgccggatatattgaacaattcttgcccaaacttgctaatgaacaaaggaactctatcccataccagacatttgggcataccatggtgtttngcaacaatgtccatatataaaatggcgacaatatatgtngtataatgagaaggaaca

SEQ ID NO: 245754 - DNA, 381 bp, Glycine max
  unsure (1)..(381): unsure at all n locations
gccttatctcatggaatctaaaggaacataaaggctgactgtaactgaaattgtggtaaccaaaagtcacccctcaacagccttcatcgtcaacaccatttggtctctcaaaaggctgatgcctatgttgacaattgggcctttattacaactggaactaaaccaaactaaagcccttttagttgaataacacaaaatatatttgtggtcaaccaaatatataaagatagggccattatttatataaactaaacacttcaaatgagaccaaggggngccatgtagtcctactccctttgggccatgatacaactcacaacattggacttttctccttgaaactagtgcgtgtattcaaataatatggacaacacttttgaa

SEQ ID NO: 245755 - DNA, 424 bp, Glycine max
  unsure (1)..(424): unsure at all n locations
cttgatgntcttggncttgctagtacagcatgaggctgcaaattccgttgaagcacataccaatctatgattgtgcagctgagtgatggcagtttgtctgtcataggtaacacaatttttaataattaatatatttttatgtcttctatatccttttgatgctctaaatttggaaaattactcttggccccctaaatctaaagtgattaatttagttctattaatttgaaaatgacccatttttttgtactttatagggtttgttgggataaacttctcataagaagtacttataagagaaaaaaaaacaactaagaatgaaataagtctttccattagttaaaatagttcttgcacaagttataaattcactcttggatgaactaatatgagaaagtttctatatgtaagtctatagagaaaa

SEQ ID NO: 245756 - DNA, 230 bp, Glycine max
taccccattcaattgatgtataaatcggtgggagcatatcgaacctaaaacttagtgtttcacaaatgctttacaaacttgacttttttgtttcttgtcttcagagcgatataatgtgttgcagaacctcaaccttgatatatgtattctccattatagtatcatccgcaccaatatgtctctgtcaaaaaaaaacaaaccttcatccccactatgtccaaaaaccctta

SEQ ID NO: 245757 - DNA, 344 bp, Glycine max
  unsure (1)..(344): unsure at all n locations
taatgatgtaacctggtaactagtcatttaagatcaagttttccacatattttgattgcatacttctcaaatcctcaagcattatatgtggagataacanaaacaaatatccaaactaacacgaggcatatgatatgtgattatgttacaatgcatttcattaacattgatataaatggtatattggtgctggccctgatgtcagatttgtggacatccttctttgctggccacgttgatcatattgatggagacatatgtgaaatcatattccaaaatgctgctcacagtacatttctatctcattcggaattttagaatctgtgatcttctagctactactg

SEQ ID NO: 245758 - DNA, 329 bp, Glycine max
  unsure (1)..(329): unsure at all n locations
gagctatgatgtagaaattatgaaaaactgttatgttttgaggtttaagaccaagtgagtgtgtgatcactcggcaatgaatgttgcatgattatgattttgagctttacattanggattaggtctaggggtatttgcccttcaacaaagtatatatattgtagagtatgattgatgttgaataggtgtagtgtgctctatcgtgatagaaatgtgaagtacgatatcgagagtggtgtatgctagtgaaccacatgtggcatttacgtatggtatgcataacgcttaatgtttgtgtttgtggcttatgaatggatggagtattcact

SEQ ID NO: 245759 - DNA, 276 bp, Glycine max
tagagcttagctacacacacccctctcataactaagctcacctccttgagaagcttctttaagaagattcctaaagagactagagcttagctacacatacctctctaatagctaagctcacctccttgagatgagaacctagagcttagctacgcccccctataatagctacagctacctccatgacaaaaaaaacatgagactacaacaaagagtgcttactacaaagactactcacaatgcgccgaaatacaaggctaaaaccctatactatta

SEQ ID NO: 245760 - DNA, 475 bp, Glycine max
  unsure (1)..(475): unsure at all n locations
cactgatttatgtatatgaactaccttatttttattaggtntccctaaaacttctaaatatttgatggcataatctgcctgttccattacgctcttaatgtctttagatggtacttcctcattagcatcttttttttttaacggaacggtcatgacaggcttattgttgctatctttgacatttggtagttgtcgcaacctacccttctgcgggagggcgactcgtgactcgcgggatgcgtgtttcacgaatggaatacgcgcggagacgccaccaacgtttatttgatgaaaacgtctgaaaaaccggaaaaaacgcgatctacgaacttttaagtgaaacgttccggagttgtatttacgcacggagaatgtattagcaccccacacgttcgctccaagggacgacagtctntaatcgaatgtgcaaacatgactctgattctatgtnccgttgtatgccttatatctttat

SEQ ID NO: 245761 - DNA, 479 bp, Glycine max
  unsure (1)..(479): unsure at all n locations
tggttatctccttcttcactacatcaagaatcacttgtttagtcttctctgaggttggcttaccggtttagctccatcctctaaatctattcgatgcatacatgtggatgggctaataccaggaatgtccgccagggtccagcctatagccttcttatgcttcttgagaactgacaacaacttctcctcttgctcatcagctagggaggcagatataatcactggaaaactcttgctatcgtccaagtaagcgtattttaaatttgatggcagaggcttcaattctggtgtggtcggctggacagtggtggaaggtgatggcttctcaccctttacctcataaagaaagtcagaggtatgtgtacttcgtgaaacatggntagtcctatctgactctataaaatcaatctcaagaggtaaaacaccaccaccaggcatgcaatccatatcactctcagattcactctcagcatcaaatt

SEQ ID NO: 245762 - DNA, 300 bp, Glycine max
ctgccaacggcagtgaatgaaacggtgatgaatgaatttcatgacaataggtttaacacgaagcaaaacaaatcaatattgtgaatacatctttttaattgtgatatcccctgctcaatatacaagttatgtcctcactaaacctatggatggggctcattgttcactccatttattttttctcacttaagcctgtaaaaaaatatatgaaaaacacatttgtatccctgtcctaatttcttaaacccttcccctcactttccctcttttcctattatcacaacatccccttcctggtca

SEQ ID NO: 245763 - DNA, 450 bp, Glycine max
  unsure (1)..(450): unsure at all n locations
gaataaaatcatttaattttctttctctctagtgttttgaatctaaggatacacaagcaagaataatgattaaaaaaaaagcaaaaatttctcggattagatatatgaatccaaaccaagacatgttcgtatcctatgtttggaataaaatcaacaaaagtaaacactgcagatgtgataggagcgagaggaatggaaagagaaatgccttgaattggaggccaaggaacctcctgtgctaaactatactattcgggaatattctttctatgctttattcatgcctcaagatatacttttatacactgagttatggctntaaccaataatagcttttgcaataacaactaacaacttcttatgtcgttataacaaacaacggactctctcactaactatggacatgcatgcaatacatcacgtgatcctagtttacacgtagctttaaat

SEQ ID NO: 245764 - DNA, 398 bp, Glycine max
ctaaacatccaatacaaatgtcacatctattaaacgcccaaagattggatgagaacattccataagaatatatggtactaagcgaaacacaacattttggtaagaaacgtggtgttcgcctatgttgagacatcccttgagaagtgggcctcattattactcttatgaaagcccaaaaaccattcataacctccttctcatccatatgtcatgtcacttcacattcctgcaacattcaatatctcaaaatcagttcaactcctctaatctctctctgtgaaaaaattccaccatcatccatggcttatgaaaaccaaactttagagatgttcattatggtgattgaagcgatgtttgttcgcgttgaacgagaaccaaacattcatgtcgaacactac

SEQ ID NO: 245765 - DNA, 442 bp, Glycine max
  unsure (1)..(442): unsure at all n locations
acctctagaactacttcatattgacttatttggtccctctagaactatgagtttgggtggtaattactatggcttaattatagtagatgattactcaaagttcacatggactttgtttttgaaaaccaaaaataaagctcttgatgcttttcgcaaacttgccaaggtgattcaaaatgaaaaaaggtcttaatattgtttcacttagaagtgatcatggaggtgtatttcataacgagtcttttgaaagcttttgtgaataaaatggaatacagcacaanttttttgcccaagaacaccccaacaaaatggtgttgtggagaggataaatagatcccttgaagaaggtgcaacaacccttctaaatgacacaagggtacctaagtccttttaggctcaacgtgtacatactatttgctacactttgaatatatacttatta

SEQ ID NO: 245766 - DNA, 347 bp, Glycine max
  unsure (1)..(347): unsure at all n locations
tgattcaagaacaccttggctgtatcaaaggactctcacaactctctgtgtgttgccctcgctggaaagagtgattctttccttcctttcatcttcacccttgttctttcaaaccacaattccagaaaatccacctctgcccagaattatctcgtggccataactccaattttacgcactcaaattaagtgattcttgagcctaaattgaattccaaaacgagagcttccacctcgttctggaatcacttcatttggagccgtgtagcttccgatattgccatttctatatctcttgccagccaccacataacctacattntaccatcccattcatccactttatgc

SEQ ID NO: 245767 - DNA, 303 bp, Glycine max
tcttttgtggcacacaccacaggcaggagagaatatgacgagctgaacgatctccacctgaccggggcagaagcactaccgtgcggaacgaaaaaagctgcacaggaagaatggagcgcgaacatgctccgaggggcgttgtcaggcaacagaaataagctcaaacctacaaaggccaagagagacacatcaaggacggaaagcacattgttagaagataagtgcaaaagttggcagaggtcaaagagaagttagaaaaaatagttgagcaagacggaagagaagaagctgataaacatcgac

SEQ ID NO: 245768 - DNA, 304 bp, Glycine max
  unsure (1)..(304): unsure at all n locations
ggactactcnccttaacacccttatgttcaatattgctggctttgcggaggaaatcatcaaaaaatagacgagagaagagacacaatgctgatgcggaggaaatagaactattctattctcattcaaatcgttctcaccagcgacacaataaacagcgaaagataaactaatttaatatcaagatcttagcacaatatcatatttaaactaactctgctcctttaagataggaaccactcattgactaagctcactcattcaaaccgatttactcctcaaatatcggaatccaacctatttact

SEQ ID NO: 245769 - DNA, 312 bp, Glycine max
  unsure (1)..(312): unsure at all n locations
cacagacgatgaagcggccctcatgtctgggaaattcaaacagacgataaagaagaatggaaagtttcaaaacgcctccagatgcaaagattctagattccataagatgaacaaggaggaaaatcatgagaccatctactctaagtgtaaaaagcctggacatatgcagggtgaatgtccccaactaatgaagaagagatattntacggacaacaagaagagaagtctgatggttatctgggatgactcagacagagagaagagtagcagtctngatgctgaacaagctaacatttgtcctatggaagacac

SEQ ID NO: 245770 - DNA, 408 bp, Glycine max
accatggagatgcacctgaagacaaacgaaaagacgtgagatgatgcaccatccattatggaatatgccatggaggaaggagcttctccaccaagatgagccttggataagaagcctggaaggatgcttcaatggaggaaaagaaagaggacggacagatagaggggggagcaccaaattgaaggaataaaacagggagagaagtggaactttgaagtatgtctcacaagactctcattcatcaaagttacaacaagtgttacacatgctcctatttatacactaagtagcctccttgagaagctttcttgagaaaacttccttgagaagcttctttgagaaaactctcctgagaagctagagcttagctacacacaccctctcataactaagctcaccctcctgaga

SEQ ID NO: 245771 - DNA, 393 bp, Glycine max
ccacagcacaacaatcatgacctttccagcaacagatacaaccctggatggaggaatcaccctaatctcagatggtccagccctcatcaacaacagcagcagcctgttccttccttccaaaatgttgctggcccaagcagaccatacattcctccaccaatccaacaacagcaacaaccacagaaacagccaacagttgaggccccttcacaacctttcctcgaagaacttgtgaggcaaatgactatgcagaacatgcatgttcagcaagagaccagagcttccattcagagcttgactaatctgatgggacaattagctacacaattgaatcaacaacagtcccagaattctgacaagctacgttctcaagctgtccaaaatcccaaaaat

SEQ ID NO: 245772 - DNA, 331 bp, Glycine max
  unsure (1)..(331): unsure at all n locations
ttcaagaacaaattggctactcgtgattggtccctttcctctctccggagcttaagctcgctgatactgccccacagagccnctgagaatttgttccggccgtgttcttccctacgagccctttcgatctcttgttccaaggccttggtggtagccatatttacatctctcagttcggcattctcctttcggatcttaagagctgctgatttacacctttctttgactgtgtgggcttgctcgagtattgccctaagggcctgcacctcttcgtcttccttcggtgcctcaacttcctcccctttagtggttctcagactcgcgagccaat

SEQ ID NO: 245773 - DNA, 410 bp, Glycine max
  unsure (1)..(410): unsure at all n locations
tcgaaattgaatgttgaatctctgagcaaattcaaacgacaatagctttttactcggacgtctgattgagtcccgtaacatatcgagacgctcgaaattgaatgtttaacctctgagacaattcaaacgacaataactttttacgcggatgtctgattgagtcccgtcatatatcgagacgctcaaaattgaatgttgaagctctgagccaattcaaacgacaataactttntactcggatgtttgattgagtcccggtatatatcgagacgctcgaaattgaatgttgaacctctgagccaattaaaacgacaataactntntactcggatgtctgattgagtctcgtcatatatcgagacgctcaaaattgaatgttgaagctttgagccaattcaaacgacaataac

SEQ ID NO: 245774 - DNA, 354 bp, Glycine max
acaccttatgactttatctatactagttatctcgaatgtccaattggcacaaccctttatactataagccacttgaatgtaggatggcatatcattgagccactgtcttggataatattaaaggtgtctttacttgaaatataaccatttaagccaaacaaaatcttaatcccttattcgttaactctcccacttgcgcataagattaaagatatcattagagcttcaataaaaaaatgtcaaaagtttaggaaacctattcaccatatctgtgaaaatgtagagcctccttttaagttatcatctaaagatagtcgatgtgtaagtcggcagctataccactaatctatttct

SEQ ID NO: 245775 - DNA, 435 bp, Glycine max
  unsure (1)..(435): unsure at all n locations
agacattctaagacgggtattcaaagaaccgtcttagaaagtctattttttaagacggttttacagaaaaatagtcttagaatcttttttttttgttttttaatttaaaaaataaataaattctaagacagttatttagagaattgtcttagaaagtctactttctaagatggttttttgaataatcatcttaaaaggatatcattctaagaaatcatcttagaatggtagttttctaagatagtttcttaggaatcgttgtggaaaatcttgactttccacgacatagcctttagaaacggttcanaaccatcgtcgtatgcctcgaaaaatcgtcgtcgtagaacctttttctagtagtgatttggtccttaatcatanntttttggtcattttgatcatttatcntttaaaaagntcattnttgtcctttat

SEQ ID NO: 245776 - DNA, 418 bp, Glycine max
tcctaagtgacatctggtaaataaccagattgagatagtttggtgtggccatgactatagttctaatagcagccatgatattaaaagtcccttttagtcaacctaaattcagttagttaacaaaaattcagttcccttctccctaaatttgatctcatgtttcccacttttttctccaatctctcttcattatctgattttatttcaatgattcaactctctccataacctgtcctgacatgttggaattttctctaacctagttagattgaagacgaggaatatcaataatgaggcataatatttggcctaaatatagttcattctatacttcaaatcaaaaattgcaaacctttgatgctgcttcttagagcacgggagacaatgatcgaaagcactcggaacactatattggtat

SEQ ID NO: 245777 - DNA, 456 bp, Glycine max
cgatggagaaagtaggagacccatatggtcttctatcacaaatctgtacctggcgcacaggtttgtagatagagctcctctactgaccaccatacagacctatgcccttccatgcagcaacctggagcaattgagcaacctggagcttatgatggagatatttacaatatacctcctcgacctgaacagcgaaatctaccaccgcagaacaattatgacctctccagcaacagatataaccctggatggaggaatcaccctaaccttacatggtgcagccctcagcaacaacaacagcagcctgctcctttcttccaaaatgctgttggcccaagcagaccatacattcctccaccgattcaacaacagctactagcccagaaacaaccaacagttgagacccctccacaacccttcctcgaagaactcgtgaggcagatgactatgcagaacatg

SEQ ID NO: 245778 - DNA, 307 bp, Glycine max
  unsure (1)..(307): unsure at all n locations
ccgaaatagattctcctctggttaagattaacctttctactacctacacaagtatactgccataacaaaatccatcaatacttcaggcccaacacttctgatttctttaaagagctgtcaatgattgctaattcttctcgccataaatgtctgtaatctaactattggctaaatattcaaagaaagcttgccagtgatagaatcataaccacaggtgacaatagattaaaaaaatttataactcacttaaacaagaacctaatgcactgtgactntctcataataatacctcaagttgcatgagact

SEQ ID NO: 245779 - DNA, 435 bp, Glycine max
  unsure (1)..(435): unsure at all n locations
ccctaggcacttctctctctttcgaagttgcttaggaaaattgtttccgtgaagaanatccaagccgaggcgcttccgtaacgattccgtaacgtttccgtgagtgatttcacgaaggttttcgacccgtcttcgacgttcttcattcggtcttcaccgttcttcagtcttcaacgggtaagtacctcaaaccaagcttttcgattcattctatgtaccacgttggaaaccaaaataaagaggttaataataatataataataaataaataaaaaaatacccctttagtaaaataaagtgaaaaatcaattggacgttttctctatgcgaattctcattcttaatcgaattgactaataactaacgtgaaactaatgctaanatcaactcgcctagtcaagctcgtccacaacaatagggttctggaagttatca

SEQ ID NO: 245780 - DNA, 299 bp, Glycine max
aaacaaagatgtatgtaattgcaaggatacatggtctcctcaataaaaaggatactgcttttatttaaaaataaaattgaaaactttgaggaatgattaattgagttatcttttctcttaaaaacgaacacagagagaataatgaaatctatctatcttcttatccgaagtctgggaggccaataggaagcaccccagctgctaccaatggtgaataaaagacaaaagaaacaaactgttacatagcatacagtctgtcttctcttctcttctccggttatggcgcccgccttgggcac

SEQ ID NO: 245781 - DNA, 428 bp, Glycine max
tatgcgtgtcgtttttatcagatatcagatccttaaaagtttaacgttgcctacaaatctatttaatagtgaaacctattaaatagtgaaacaaaagttaccaataagctaatgacctaaaattatgcgtacgttaacaaacttaagtatgtaactagagtaccaaatatataattaattccaagacattataatatgaatctaatacaataataattatattattatagatatattcatcattatcaatctatcattattattgttattattatgtacttacataagtcaactcaataaagttaagagaattttaacagctcacagcctcaactttctaattaaattaactcagataaatcagtctaaatttactaatataactacgtcaagctaatataaattacaccatcattgaccgtatactc

SEQ ID NO: 245782 - DNA, 256 bp, Glycine max
tctgacccccgcacatatctttaggtaccactctatggtccacaaacagaaggaggaagactgactctttcccatgttttcacatcaagcttattggattatgggacacccgtcgtatgtgtgactaagtatcgatcgggcaatggtgcaaatccactctcccatttccacaaggcaggcataagcacaccatccccaggtgcccacctttaaattgagctcacgcactcctacggaggcgcttatcctagtcctc

SEQ ID NO: 245783 - DNA, 340 bp, Glycine max
  unsure (1)..(340): unsure at all n locations
ggacgcgcggttagcgcacgtaagtgacttctggcttagcgccagtcacacttgctcagcctgaaggtgaagactgtgcgcttagagttggccttcgctcagcgcctctatacaactcatccttcttctagaattgtccatgcgcttagccattagatggggcgcttaacagatgatgtgcttagccagaagataagtggcttaacgagttcatgaaatttgcacttcaccaatcttgcctattntacctgaaattgaagtagaatgatcattaaatacatagcactgggatacaaaatatctgttacctaaattaacaaaaagtaattacaatactacc

SEQ ID NO: 245784 - DNA, 478 bp, Glycine max
  unsure (1)..(478): unsure at all n locations
ntagagggggtcaactttaaagaatagaagcttcttatgtttaatcacacacaacacatattacttgtctttttttccacacttaatgctccatatataattatcttcaatctaaaattgaactatgtatgcttctggttaatattgaccaaggcaggtactagttgctgcttcacttaacagctgcttcaacagtagataatacagcagtgcagtggtgaacttgacttcaaccccttcaaatccacactcacgtagtagaaaacaacaagccgggaaagaagcttctaatacagcaaacaaggaacctgaagccntacaaacacactcatattcctcaacatagcagctgatcagaacaacaacaactctatctattcatcaatacaatgcacaatggagccaagagacgatgtgaagatagtgcctgaagtgctcccatattcgcatgaccatcatactaaactgttgctagctc

SEQ ID NO: 245785 - DNA, 474 bp, Glycine max
  unsure (1)..(474): unsure at all n locations
gacattgcactctagaacatcccttttccgctctgtcagttccttcccctgtaaaacacatcctctgcttcctcccagagtcctttctcagcaaaaacatccataatcgcagaacgaatattcgatgacatctccccattcacttgaaacttcttcagcaagtcaaatgctttatcaacatccccctcaccaacatacatctccacaataccaggaacacaatgctcatcaacagacacaaaagccctctccatttcatcaatcaaatcctccacctctcgaaccatattcttcctgcacaacacgccaagcagagcccggtaagtcacctcatccggacacnaacccagcctcctaatcctcttgtaacacaaaaccgcagcaccaatatccctggcttcagcatacaaagaacagaaaatgttaaaagtcttggtatccggtggccacgcctttctgctcatcatcccaagc

SEQ ID NO: 245786 - DNA, 339 bp, Glycine max
  unsure (1)..(339): unsure at all n locations
cttgagctatacccatcatggcaaacatgggccgaacaacacttctcatggcgcgagtgacaacatgcgctttataacataatcataatgaggccgtgctatgttaagacacattctcatctgcacacatctaacttttgtgagaagcattgtacgacacctatccatgtacatatactctgacgaacctattcatgctacatcctatatatatacacacatttttttggaaggcgtctgttgttacctactcacaaatacacatagtttgaacaacactnttacactacccatccaacacntctgaaggcacttcatgctatatatattcatattatg

SEQ ID NO: 245787 - DNA, 268 bp, Glycine max
  unsure (1)..(268): unsure at all n locations
ctcatcgataatggctctagttcaaacgtgatgcctaacagcactttggagaaattaccattcaatgctctccacctaaagccgagtttaatggtggttcgtgccttcaacagcacccgccgaaaggttagaggagagatcaacctcccagtacagatatgccctcacacatgcccagttaccttccaaataatggatattaaccccncctacatctgtctgtcggggcgtccgtggatccactcagagggagttgttccctctacac

SEQ ID NO: 245788 - DNA, 447 bp, Glycine max
  unsure (1)..(447): unsure at all n locations
taccagtgggacactactcttaaaacaaaaatgacatacaacctcctcccataaatacaaacatcaatgtaaatttagagcaagcttatgcgcatatttccctacgaacgttcacttgcacaagacatcctattaactaagataaatgcacccatatacaatcaaggtagcttcattacctagattatttacatgtacttccaaggtgtatttgttatttacatcacacacgcctccttggctaaatttacatacatgcatactcaaagcatttcggggtaccaaaaattgcacatgcgctcatcttggtatttctaatacctatacatatacaaacttcatgatgaatcttgactacctacgcaataaggtgctacatntcatgctttctttttcaagtntttgtacctaaaccacatgcanatcaagcatattttctttgtgact

SEQ ID NO: 245789 - DNA, 97 bp, Glycine max
aagctctgatccacttgtatacaagtggcctcagatatcttaagaaggggggggggggggtgattgaaacatgctttcctcttcccccttatcccat

SEQ ID NO: 245790 - DNA, 267 bp, Glycine max
gaacttccataggtgtgaaagatgcccgttgtccaccgatgacatgcttgtcattctgcatgaacagttatgcattcaagtgaggggagtccctgcatatgacaatttttctctttttccaccattggagaacacattgaagacaaacattttgtttgtctattgctgcggccgagttgtacacacacacgttgctattgcactatgtgcacccatggagtgggcatgtaatggagatgcagcacatggatgattgaggctgcatca

SEQ ID NO: 245791 - DNA, 405 bp, Glycine max
acccactaatataatggatgtctcacgtttgagaagtgaaatagagaatggggtaaatttggagcatactctcacctcacacacatctataacatcaatttaaacttgttcaaactgaagttacacctcaaatttcaccgaaccaaaatttgacttctcaacacccaattttaccctagagatggctctctgttcactctggtcatttagtattctctctagcacagcccaaactttttcgtaagtcctaaatgacatttcaagctacgaataactcactttaacctccaaataccactaaatccagatctggccttccaactctcataacctcactctcttgccactcataacaccatattctcactttctaaccctaggtgaactccacccttcatctctaac

SEQ ID NO: 245792 - DNA, 408 bp, Glycine max
  unsure (1)..(408): unsure at all n locations
gcgatggatgctgttcacccaccatcatccaatgtgaaatatgatatgtcttcaaactccaacacttagcatatacagtcaaactaaaaaaaaaaaaagacaggaatttcatttacaagtgaatcaacacccaatagatgagttcagttcctgtttcattgaattttgaaaatgaggcaagccttttttattgcgcgcatacaccacacatgtatggatttgttaataggatgccatcaaaataaaatcaattccttctagctttgaagccaatcttatataggacacaacgcaagtttcttacatacttntgttattatccaatcaaaatctgagtatcacctcggtaatctaggtactaaagttattgttaacgtcacatatattacacaataagctccattctat

SEQ ID NO: 245793 - DNA, 281 bp, Glycine max
acaaacactcatttcatatcaaacacaccacacgaaacatgattcactcattccattgctcaaacaagctctttgtacaggccatcaacactaaaataactagaatttaaatgactaaaatttaaagccaataaataactaataactaacttgttcacacatttcagaaatttaaacaaaaaaaaaaattaaacatcctactcattctatggctaatcttcatttaaatttaacactggagaaactggtacatcctgaagaatgggctgttctggctccat

SEQ ID NO: 245794 - DNA, 303 bp, Glycine max
acctcactatcattcctcacccaataccttataaacttcaatggctcaatgaacaaggggaaatgatatttaaccaacacatgaaggtacctttctccattgggacatataatgatgaagctaattatgatatagctcccatggatgtagggcatattcttttaagaaggccatggcaatttgatatgaagatcatttaccatggcctaactaatgagattaccctcacccatcttggcactaaatttgtgttgcatgctcaaacaccttcacaagtggccaaggatcaactaactatgaaag

SEQ ID NO: 245795 - DNA, 289 bp, Glycine max
atgaaccttatatccaacataagctaactatatttattatataccataactagtcccccgacttgaaaccaaagatgaatattcgttttagacttaaatatatatttttttcatgtaattgaatgtattttttttcctaaatgtatttattttattttttattctctaaaacactctaaatacgaaaaggaaatattttaaacagtgaaaacacaatatttaaagggctcaaaggataaaaaatacaataaatatattttgtaaaaactaaatcgatattcttttgtag

SEQ ID NO: 245796 - DNA, 254 bp, Glycine max
ctatggctcaatccatagtggatggcgcctcctctcacactctattctttgatcttcgctgcatccccatggtggaaaatcaccattaaaggacctcatcgaaactcaaagatccacccttcatagaagccccactagcaagcttccatcaagaaccctctcctcttataccattaactctcaacaaaagattggacacgattgtttgctgacttgcgacattaattgccccatggtaaaggcaacgcacactc

SEQ ID NO: 245797 - DNA, 408 bp, Glycine max
actactgtgctagagaatgctggcttattcttaaaaaaaccctcaaattgatgatgaaattttaaccgaaggcctgcatatatgaaatatatatgctgaagtgcttacaagtgttggatgggtgaggaaaagtgttttcaaaatatgtgtatatgtgagtaggtagcacaagaagccttccaaaaaaatgtgtatttatatagaggatgtagcataaaaaggtttgtcaaacaatatgtacatggatgtgtgtcgtatagtgcctttcacaaatctttatgtgtgcaaatgcatatgtgtcatataatagcacgcacccaatatgatattttattaagcgcatgttgacactcgcgccatatgaagtgttgtcggctctcggtataatgaatggatatttcttgaaac

SEQ ID NO: 245798 - DNA, 391 bp, Glycine max
  unsure (1)..(391): unsure at all n locations
ggcatgtaatcataaaccaacataagctcgttcctctttctgcaccaccctctcatttgaaccaagttcttgtgctgaagcctccccatgcttgaaatctccgccatgaattcccgcaacccttgcttcgaatcgtggttcacgcacttcaccgcaatttgcgtatggttcggtaacgtccctctgtacactctcccgaaccctccagaacctaacagcatctccttccgaaactcccccgtcgccgaacttaactcctcgtaagaaaatctgtgcggccagtactctagctcccagtcttcgatctcgtcttcttcctcttttcgcttgttcattcgccaccataggtaaaaaccagaagcgcatataatgacaaatancaaacaaccga

SEQ ID NO: 245799 - DNA, 340 bp, Glycine max
  unsure (1)..(340): unsure at all n locations
atgtattggtcatagccggtaatatacgaatgacttccttatatatattccacctcgtatgactcccaaccacctatctatatcttatgagttatngactcattcaacccttataatattctatggttattttattaatatatgctatgtcanatcccatctcatatgacaagaagtctacgtagtgtacagtaaagagaatagagaacaagagcactggatcatggccacgtatgccaaacgaaaaatattagaagtctgtattatttatgcttatttggtgtgaatagatctaaattcacacctataaaggggaaccttcaagcatacgctcatacta

SEQ ID NO: 245800 - DNA, 442 bp, Glycine max
agtactcgggaatcaacacagatataataatggagtagaaacagataaatatcaaagtataaggcataaccaaccaaactcacaaataagaaataaccaaaccagaatccaaataattcaaaacttcgaaaccacataatgtcaaagcataaaagtcacaaatccaaatattacaagataaagtacttaacataataattgaaactctaagaaactgaatagccaaaatacacggcttattagagacatataattagaaactaaagtctaagaaggcggaggtggtggtggaagatcgaaactctgacgaatgtaacctacatcctcttcaagctgtgtgaggcgaatgtccatgccggcaaaacgtgtatctaatgagttgaaacggtcaccaacataagaacgaagacccgtaattcgagaggacttcatcatgtgtgct

SEQ ID NO: 245801 - DNA, 436 bp, Glycine max
  unsure (1)..(436): unsure at all n locations
gtgcttgtgagtggcaacagctaacaacagaaacattaataatgacttatcagagcaaatattgagtcggcatgactcttcttttacaacctttttcatttaatcaaggaagattctcaaaaatcaaaatatgatttccagaactgtccctcactccagaagtccaaagaatcaanatcaaaaggaaactctataattctggttgtgcttgtacttcccgaaacacttctaaactcctacttaacataacagcgcattccatacttgactggacatcacgttttgaaattggatgaccacttagaaaagaagccatacaggcccttaattacgacaatggaaagcaattaccacatgcctcgtgcaggcgaacaacatcagggtgcctaactagcttcatgatcgaaatctccctcttgatctgataatagaaaag

SEQ ID NO: 245802 - DNA, 291 bp, Glycine max
  unsure (1)..(291): unsure at all n locations
gttataactcttctaaatggtcctcttgaccagacatgaagagtctatataagcaacggttttgcttttgcattttcatgaatctttctatcaattcaatcaatcttatacaatcctttataagccttgaatctctatgaacttcttcttcttctttgtgccaaaagctntccaaagtattctgggtttctaaaccttgaaaacatgtgctattcattctttgcatctcttctccctttggcaaaaagaagtcgccaggactaaccgcctgaatctttnnttggtctctct

SEQ ID NO: 245803 - DNA, 418 bp, Glycine max
  unsure (1)..(418): unsure at all n locations
gcgtgttccacgaaaggaatacgcgcggagtcgccaccaacgtttatttgaggaaaacgtcggaaaaaccagaacagatgcgatctacgaacttttaagtgaaaggttcgggagttgtttttacgcacgaggaaggtattagcaccccacacgtccgtcccaagggacggcagcctttaatcgaatgtgcaaacatgactttgattttttatgttccctttntatgtctttatatcctttataccctttttatatttttctcttttggtggtcgacaagggtgtttccctttgctcctacgtattcctcaattgcgatgaggaaatcagacctacgtagttcttcttatcaagtgattctttttactctaagaggtgatcattntcaggggttggaccttaaacatgatccattttac

SEQ ID NO: 245804 - DNA, 166 bp, Glycine max
cccggcatagtcagtcagtgagaacctgtgatgtacctaaacaggcgagctcctggcagtccacagattaaaggaacaaagaccacaaagcaacgaggcttgtgtggtggctggccagctatgaatcttgtgtgatatatgggttatggcctctggtaatcgatta

SEQ ID NO: 245805 - DNA, 138 bp, Glycine max
cacccaacaccagggaaaaccaccacccaccaggaaacacagaccccaccgagagaacccaaagacccaggggacaaccacaagaacacgcgaaaaaaaagtccccccagacagaaaaccccccacacacaaacccac

SEQ ID NO: 245806 - DNA, 346 bp, Glycine max
  unsure (1)..(346): unsure at all n locations
gattaagtggttaaactgataaaggataaactctcgtaatctaggataagagacttgcttgtgaatcaaggggaagcaacgtgttgtaattctgatattttctaattcacatatattcgctgtttaatttacanaagcaaacaaccgcncccactccccccatcgttactgttactggtactgcaagtatattatgaacattcggcttgtcactgctcgctgggaaacgacctangatcacttgctagntactancatttaatgtttatttgattcnggtacgggctcgatcaatagacttgatgacccatactattangaatcgctaagaagnttgattatcact

SEQ ID NO: 245807 - DNA, 374 bp, Glycine max
atatacaaatgagctcggttcaattcttctagacttagagttataacatatagtcctcttgaactctttctttccactcttttgtcttgccaagactccagaatcccaacaagtgtttccttttcgatgtactctgaacaaaacccaatagcttcttccgcaatatacctttcaacaatagatgcttcaagacgatgtaaattctttgtatatcctatgtcatttcctaactgtcttaggctcgatatcattatagacaacatcatgtattttcagttcacacacaaccaaggaggcaagttgtaaattactagaacaataggccacgaactgtgttgagtacttaaactgccatagggattcattccatcact

SEQ ID NO: 245808 - DNA, 242 bp, Glycine max
  unsure (1)..(242): unsure at all n locations
gtatgtgctcaaagatatatgagtatagcactcggaagttggtaatttcgataagtaattntgctaactaacgtctgaaatgaataaatgacattntcattcaccaagaaaatgatatttaagaatatatattctgtaaattatatatatacttatattagtatttacaaatacatattatatatatgcttaaatatatatattttcatacctgaaaaatagggtcgtttcagaataccatc

SEQ ID NO: 245809 - DNA, 386 bp, Glycine max
  unsure (1)..(386): unsure at all n locations
tatgagtcatgtatgtaaagatcattttacacgaggtagtaatctaatcttggaatcaccgttagttcacatttgtgatctaaagctttcaaccatggaattaatttcacacaacagattcaacaaacttgatcgaataacacatccatcatcttttccaatcatacgagacctttgaagaagaagaattttcaaaaatcaaactctgaatttgaatgcaaacatgatacgattatcaccgaattgctctgaacacattgtaagattgaattcccactttcattgtgatgtgagggttccaccaagaacattactttcggagaaagaaacaagaaggaaagatagactaagactcttanaacacacgttagtagtatttaacaatt

SEQ ID NO: 245810 - DNA, 269 bp, Glycine max
  unsure (1)..(269): unsure at all n locations
tcctcgcaaccctactatcatctcggatagtggaagaatcttcatatntgagaattataatcgcgtgaccccattactaactttaattactaagtgcctatcttaacttcacgaagcgagaaagcccgagtcttccctacagcttcttggaaagggcgtatcttatccatcatgggacgtgtccagcttgtcaactcacttatacaagggatgttaatgtacaactctcttcgctacgcttggccagcttctatcctgaaacaattgga

SEQ ID NO: 245811 - DNA, 84 bp, Glycine max
tatgatctctaaactcttagtcttttctcttaagatgctctaagtgttttgagagctcttcaattttacaaaaatatacataaa

SEQ ID NO: 245812 - DNA, 185 bp, Glycine max
  unsure (1)..(185): unsure at all n locations
cccccacccctcacgcccctttcaacccccccacagcnatgaactgaccctgaacccnnnnnngcgccgcggcccggcagccgccagaaacccttcgaccgagccaaagaaggcggcgcacaaggcaaaaagcacacccaaacgcaccgcccaagggggccaacaaggaacgacccccccccagg

SEQ ID NO: 245813 - DNA, 279 bp, Glycine max
  unsure (1)..(279): unsure at all n locations
cttggtaaactaactctccaaatgtttgccttcgcaggaaatggccccgaggaagcttgcctcaaagaggtccaggaaggacaatgcggccgaaggaactagttccgctccggagtatgacagtcaccgctttaagagcgctgtacaccagcagcacttcgaggccatcaagggatggtcatttctccgggagtgacgcgtccagctcanggacgacgagtatacttgatttcaggaggaaatatggcgccggcggtggacatcactggttactcccat

SEQ ID NO: 245814 - DNA, 207 bp, Glycine max
cgcccaccaacagacacgcagaaaaacaccgaaaccacccccccaaagagagagacgccaaaaaaccacggaagaacatcaccccccaacaaccccaacgccccaacgcaggaagcccacccccaccgaacacaacaaaaaaagaaaacaagcaccccgggagagcgcgccaaggaaaaaccccccacaaagcggggaagacacagc

SEQ ID NO: 245815 - DNA, 221 bp, Glycine max
  unsure (1)..(221): unsure at all n locations
cagtcacaatctctcgagtcaaggtagggaactctcattttagataccgtgtggagacgatggctctgagctcattgagtgttntccagccagtcaaagcaaagtaagatgtatttgcattgacaattaaatacctgattgtaaagcttctagagagctgtgcttgaccacaggtggtcatgaggtcgacgtagcctcttgtctctactctttctcttgtg

SEQ ID NO: 245816 - DNA, 399 bp, Glycine max
  unsure (1)..(399): unsure at all n locations
attaatcaaccaaggaaaaaagaaaataaactcttaatttgtaataaattgatagaatcagtcaactagtgaacctcaattttaaaattactattagttatgacaagttaaaaatgaaggaaaaataaaatatgcattntagtgtctcatttgtttacctcacagacatgactaaaggttgtcactacttctctatggttaggagaactatnttcatgcatggcaatcatcaaagaagtcatgacattccaatcaaaataatattagatattttgagaagaaacaatgaagacttgagaatatgtacaacatctaanaaatggngggaaacttgcaaatntcaattgccaagataatatatcttctaataataagtctaagacttccattaacaaaatc

SEQ ID NO: 245817 - DNA, 85 bp, Glycine max
  unsure (1)..(85): unsure at all n locations
ttgggtttgactgatctcttaagatgcgagactcaccaanggccggccttggtttgaccagcctttggagaagtgagactcatga

SEQ ID NO: 245818 - DNA, 321 bp, Glycine max
  unsure (1)..(321): unsure at all n locations
tcttacaaaactatattcatatgtcattggggcatttcaccgagcacttggtgggcgcgtgtttaggcataaattgcaagagaataggggcaatgtggcatgccccattgcttcagaatacaacataggcctaaggccatcccctacaatccctcaactctaacaaatcaagcataaaaaaccccaaaactgccccacaaatatgagcacattctcacgaattagagcaccaaaagatgaacaanatgcaccaatggaaagctaanagctcatggattgaatacttacttgttggagtgagtacgaatacaaaaaatgaaa

SEQ ID NO: 245819 - DNA, 162 bp, Glycine max
  unsure (1)..(162): unsure at all n locations
atgaagttgaaacgcttatgttatgcattcaacgattggatgatatactcctatgtacagattacatagcanggtccanatgatcaaatgaatggaaaacaaacacaacacatattaaaactacgttgccttccaggaagcgcttcttaacgtcattagctt

SEQ ID NO: 245820 - DNA, 458 bp, Glycine max
  unsure (1)..(458): unsure at all n locations
tactggaattgagctggaattctctgggtggatcaattccatttgagattacaaagttgagcaatattactttcctgaacttgcaaaccaacaatctaagtggttccataccaacatccattgacaacttgaaatttctctttgaactccaactcagggaaaacaaactaagtggtgtgataccaagcatgccggggagtttgcaggtgtcactgaatcttagtagcaaccactttagtggtaatactcccaacaatcttggtaatttggatagcctgcaagtcttggatctctcaaataacaaatntcctggtccaattcccaaccaactaactggaatgtcagctttgacatagttgttacttgccaacaatgcactgctgtctggtgaaatctcaaattagtcaacatcttaaagtgatcttctggactggctaaaaatatacctacctgacata

SEQ ID NO: 245821 - DNA, 350 bp, Glycine max
  unsure (1)..(350): unsure at all n locations
tcgtgggaagtatggtttaggctataagcccactcaggcggatatgaagagaagcaccgcgggaaggaaaagcagtggccaaagctcgcagttgagacaagaaagtgaaggaagcccgccctgccacataagcagaagctntataagcgcaggtttgggagacgaaggtcaagtggtcgcgatatacgaagatgatgttccgagtacattggatttggacgaccatgctctcctgatttccagctgggaaattggcgagtggaggaacaccccggcatttacgcaacgagcataatgtanaccttacggggttaaagcttatagtgggctaggcttnnnagtttctttgt

SEQ ID NO: 245822 - DNA, 389 bp, Glycine max
  unsure (1)..(389): unsure at all n locations
cttgaatgtgtctataagactctattcatcaagtacacaagtgtacacatgcttctatttatagactacgtagcttccttgagaagacctccatgagaagcttctttgagaaaactttcttgagaagctagagcttagctacacatacccctctcataactaagctcacctcttggagaagaattctaaagaagctagagcttagctacacatacctctctaatagctaagctcacctcctctagatgagaagctagagcttagctacacaccccctataatagctaagctcaccctatgacacaatacatgataatacaaaaacaaatctctactacanagactactgcaaatgcctngaaatacaaggctatgaccctatactacta

SEQ ID NO: 245823 - DNA, 274 bp, Glycine max
  unsure (1)..(274): unsure at all n locations
atgctgtatattacaatacatgaatgaatctgtgcgattatgtgttatgctgtatggttgacggatccatttctttgttgtttgtatgggccgtatgggtataatcttcttatgaaaggtttcatgggctattgtctgtatctggttgttggatcccatggataatccttatctttatcattctttangagttaaatagctgtgaacctttggtgaacacatctctgtatcgttggattcggtactcctgttcccatcataatatatcttttat

SEQ ID NO: 245824 - DNA, 325 bp, Glycine max
  unsure (1)..(325): unsure at all n locations
gagctcattctttgttcagaatggattcaccacaggaataatggacactacattatttaaaaagtcttagaaaggaaaccttctgattgttcagatctgtgtagatgacataatcttttgttcaacctcgaaaataatgtgcaaggagttttctaagctaatgaaaagtgaataaaaaatgagtatgatgggtgagctaaagttcttcatagggcttcaaatcattaagaaagatgatgggatattcatccaccaagagaaataaacaaaggacctgttgaagaggttcacaatggatgaagccanacctatggcaacctttatg

SEQ ID NO: 245825 - DNA, 54 bp, Glycine max
ctcggcacactctttccggatgtctggtgcgactaaccttgatttttctttggc

SEQ ID NO: 245826 - DNA, 290 bp, Glycine max
  unsure (1)..(290): unsure at all n locations
ttttaaccctaggttaactctacccttcatctctatcagttttccatcagccatttcagcatacaagcatcacaagcatcatcataaaaaccctaaaacagaatgggtaagctngactcataccaaacatgacaagtttaacatgctttcatcaaatttcttcacaaataactatcatgaggcataaacctagtaaaactacccatcataactcccaaaacccaatacccacgaaaattcatgtgagaagaagtctacccacacctgacatgtgaagtcccagaatggag

SEQ ID NO: 245827 - DNA, 256 bp, Glycine max
  unsure (1)..(256): unsure at all n locations
attgacacttttcaattctcttcttaccacacagtaaaagggaaggtcgatcgcacgttcatcctatggaatggagatactgattcggattagttgccaactactgactcctcatctaatcctagaaataagcagtctagactctcaagtttcaagacaaccaattcaatgaacttgtaatnttatctggaaataaacaataatataacagagtccagatataattataaatgaccaatgtcccatcgaaagaacc

SEQ ID NO: 245828 - DNA, 346 bp, Glycine max
atgtgaagatgatgttccaagtacttcggatttggtccgaccatgccctcctgatttccagctgggaaattggcgagtggaggaacgccccggcatttacgcaacaagcataatgtaaacctttacggctttaaaagctctatagttgggcctaggctctagagctttcattttgttaaggctttgtgtctcttgtttttaatttataatacaaggatctttcttcatctgcttctagtctctacccattctcattcatttgcatgtttacttctttttctacaaccgcagattcgatgacgagtcccccgaaagtactaatacctgtgacccgtctatcaacttc

SEQ ID NO: 245829 - DNA, 344 bp, Glycine max
agaccttggggacgtcaggtggggtgctattgcccaaaaccaagcttgaccaatcccgacccaacccgggcatagtcggtcagtgagaacctgtgatgtacctaaacaggcgagctcctggcagtcaacagataaaaggaacaaagaccacaaagcaaggaggcttgtggtggctggccagctgtgaaacttgattgatatgtgagatatggtctctggtaatcgattaccaagggtgggtaatcgattacaaggcttataaatgaagacagggggctaagatggtctctggtaatcgattaccaggggatgtaatcgattaccaggcttgaaaacgaagtcaa

SEQ ID NO: 245830 - DNA, 268 bp, Glycine max
  unsure (1)..(268): unsure at all n locations
atctcagaaaaacagncactntctctccctacacttttctttctatttcattcacttgccattactttctcaagaatctctggatattaataaagaataacaggaataataataaactattctatgacactaatctttgcaatgatacattaactcccacaatttccaatgacatactaattgctattaccatttccaacactattatatgagttgaattggttagattataaatgaccatctactagtagtcgcaaattctttaaca

SEQ ID NO: 245831 - DNA, 223 bp, Glycine max
  unsure (1)..(223): unsure at all n locations
taataaacatactagtccttggacccaaaaatgatttaaaaaaatatttttcgaaaaataaataatgctaaaattagaagaattttctctttcatactttaagtgtaaatatatcacactaaaatatataaactcttataatagtattaaatactaaatattaaagtggtaatactaanatatatcaacgctcatgatagtctcaatattaaaaatatcaaaa

SEQ ID NO: 245832 - DNA, 255 bp, Glycine max
  unsure (1)..(255): unsure at all n locations
tgcgtcttgtatcgatcaatatacttntgagttctcattctatatatgagtatacataaattccctagtatatgatacggtaaaggcatagcttggcttgaataacgaagcattaatgtagatatcttttgacatccgtatttagattcttaatattgtatttatgagcgatgctatttcatactaatataggttgcaccaattacacgaactgcgatatgtaatgctcagatgtttaaatacagactaatttat

SEQ ID NO: 245833 - DNA, 304 bp, Glycine max
  unsure (1)..(304): unsure at all n locations
ctctttctcatgctctccatcatgtcctcatcttcataacctatgattctcatttgatcaccaagtttaatcatctccaccatgagccttgcagttnttggagatggtggagtagcatctccacttgtagaagccatacctacaagtaaagttagtgcacaagtaataaatagaataggacctcaccactcaacttagtgttgcactcaagttcactcatctatcactctttcaaggctctttttactcttataatatgcattcttacctcttaccactcttgcccctcttcagttcttaagca

SEQ ID NO: 245834 - DNA, 303 bp, Glycine max
tgtgtgatcacttggcaatgaatgttgcatgattatgaatttgagctctacattatggattaggtctaggggtatttgctcttcaacaaagtatatatattgtagagtatgactgatgttgaataggtgtagcgtgctctatcgtgatagaaatgtgaagtacgatatcgagagtggtgtatgctagtgaaccacatgtggcatttacgtaggttatgcataacgcttaatgtttgtgttctggcttatgaacggatggagtattcactctctttttaccattctaggaatcttatgccatgt

SEQ ID NO: 245835 - DNA, 212 bp, Glycine max
aactagttccgccccggagtacgacagtcaccgctttatgagcgttgtacaccagcagcgtttcgaagccatcaagggatggtcgtttctccgagagcgacgcgtccagctcagggaggacgagtatactgatttcaggaggaaatagggcgccggcggtgggcaccactggttctcccatggccaagttgatcagaaatagcctgagttta

SEQ ID NO: 245836 - DNA, 336 bp, Glycine max
  unsure (1)..(336): unsure at all n locations
aacccgggcatagtcagtcagtgagaacctgtgacgtacctaagcaggcgagctcttggcagtcaaccaatataagaacaaagtccacgaagcaaggaggcttgtgtggcggctggccagctatttatcttgngtgttatctganaaataccctctagtaatcgattaccattcgtgggtaatcgattacagggtctacaaattgagacaggatgttaagtagcttctggtaatcgattaccaattgtgtgtaatgattacacagtgtgatatggcactggtaatcgattaccagttgtgtgcaatcgattacataatggtacctgctactggtat

SEQ ID NO: 245837 - DNA, 290 bp, Glycine max
  unsure (1)..(290): unsure at all n locations
caggcaaaacacaaacggagggaccgagccgacccaccccctaacccgccagaaacacaacagccgcaaaaccaccatacagacaccagcacaacatataaggaaaaaaacacagcccacaacattaagacaccagccacagaaaccacggtgaaaaccagcacacaaacatcaaaacaacatcgaagggggaaaaaaagttcaacaacatgaacataccggcaactcacacagaactcccagaaccagtgannaaaagcgccaaaccatcacacatacatcaacacaac

SEQ ID NO: 245838 - DNA, 415 bp, Glycine max
  unsure (1)..(415): unsure at all n locations
tggatgggccttgattatgcccatataatctacctaattaaactaattacacaaaataaagcccaaactcntagcctattattcaagtgcagaggttctgnacttcaagttcaatgtaaccctcaaaatggaaaaattggccaaagcttatttctgacaagattgaatatctctttctccactttctagtgactactcacatgttccatttggagttctgtagtgtcctctaggccctgcacaaggtagataggtcaagtaagcataaaatctaaaatctagctataattctcaattaagctcaaccatttgtctaagaccaaagctgagttaaagtgagaagataaagactaaagaaatgtcaattgaactaagaagaatagagaanatattaaactacagatgctcaatcaca

SEQ ID NO: 245839 - DNA, 261 bp, Glycine max
  unsure (1)..(261): unsure at all n locations
aaagtctttttcaagagatttactctcttgtaatcgattaccagaagatgtaatccgttactagtggccaaaactggattacaacagctattaaaatttgagttcaaaatttacactgtgtaatcgattacacatatatgggtatcgattaccagcagttattgaaccgtttaattcacattntaaagcttgtaatcgattacacacatactgtaatcgattaccagagcagattttcagaanatattctcaacagtcaca

SEQ ID NO: 245840 - DNA, 471 bp, Glycine max
  unsure (1)..(471): unsure at all n locations
atcttaagtctccaatcggtcacgcatacatatatatatatatatatatatatacacaatgtgtcaatgtgaagactacaccaccacattcttggtgcaaaaatagtatatacactggtaaccaaggaccctcttgtttttcctttagcctataaataagagggcgtgccctcccaacattaaaaagataaagatagcatatggtaccaaaatacccttacaaggccaaaaagcagcacggaaacaaccatataaaagagaagcatgccgacggcaaaaccaacgtggacagaatcaagagagtgacacattattatgaagtcaanaaagatcagccagccatgcacaacaagaatggacgcatttgcaatgtgtacggcttcatcacagagagaagttggaaaagtgtaagagacacaaaatatacactcatatctaaactatctacaccacatctatcacaccactatt

SEQ ID NO: 245841 - DNA, 319 bp, Glycine max
  unsure (1)..(319): unsure at all n locations
tgcgtgttaggtataattattaagaagaggcactatatatatagacttttatatataaatcttattagagntttaacacactctntgtaacactctccactggtggttgaaatctatcgagaattatcaaatcagaagaatgactcatcatatgactagtgggacctgccaaatttgtgaattttaacaaattcgagccaacaataaagagtgtgttcaagagaatgtgttaaagacagtgtcgctagcatttctatgtctaggaatggtgtttgtagttattagtgaaaatataaatagaaaatattctccttatgtc

SEQ ID NO: 245842 - DNA, 141 bp, Glycine max
ggagttgcagtgatacgaggcaccatccactatagaataagccatggaaggagaagcttcaccaccaagagagtgcttggataagaagcttcactggaggaagagaatgaaagagagacagagcggcgggggggggtgtgt

SEQ ID NO: 245843 - DNA, 259 bp, Glycine max
  unsure (1)..(259): unsure at all n locations
cagtctagatagaacgatcgtacgatcctataattactatcctctatcatgtcctacaacattgcatgctagattgaacgaacgcacaatcctataacttttatcctctacatgtcttgcaacaaaagacataataaacttccacggtatcacaatctttctcttgcataattgcgatttatgatccatgccatgttatgtcgggtgtcattttgagactcattcgtttggctctacccggctcataaatctanatcaa

SEQ ID NO: 245844 - DNA, 185 bp, Glycine max
  unsure (1)..(185): unsure at all n locations
cgctgagcaccatcaacactttgaggccatcaacggatggtcatttcttcgggagcgacgcgtccagcttanggacgacgagtatactaacttccaggaggagatagttcgccggcggtgggcatcagtggttacccncatggccaagttcgacctagacatagtcctcgagtttatgccaatgc

SEQ ID NO: 245845 - DNA, 291 bp, Glycine max
  unsure (1)..(291): unsure at all n locations
acaatatagatctctcaaccgtncttcttatatatacaagaaacatgccatattgaaactatctcacataactaactcactaatggaactaactaccggataactaacctattataactattaatgacaggtacctaatcactctccattctcattgagaagaccaatgactagctctggctatatatgaatccttaacaaatcgactccatatgccttttaatctttcttctcatgtaataactctacttaaaatggaattactcacctacaagaataaagcatacaagt

SEQ ID NO: 245846 - DNA, 218 bp, Glycine max
aaacttgcttcgaaaacaactctaaaaaaaaaaattttgactggaaaaagttatcaatattaaataaaaatatttttatttaaaattatctatataagataaggaatagtgtgatgtagagaatttgacacgtcgtacaaaatacatacatggtaaaaattactataaataatatgatttgtaaataaactttgcttaaattttaataacatatcctc

SEQ ID NO: 245847 - DNA, 347 bp, Glycine max
  unsure (1)..(347): unsure at all n locations
actggctaactccatcctctaaattattcatgcatacatgtggatgggctaataccangaatgtctgccaaggtccagcctatagccttcttatgcttctagagaactgacaacaacttttcctcttgctcatcaacacgggacgcagatataatcactggaaaactcttgctatcatccaagtaagccgtatttatatttgatggcagaggcttcaattctggtgtggtctgctggacagtggtatatggagataggttctcagcctctacctcataaagaaagtcacacgtatgtgtacttcctgcaacatcgattgtcctatctgacttctataaatcaatctc

SEQ ID NO: 245848 - DNA, 213 bp, Glycine max
aggcgggaaagacccccaacgaacgaaaactgccgccaacaccggcccaaaacaaaaaacccaaactaaggaaaagggagagcaggaagggaaaccaaaaaccagagcagccaccaaaaaaaacgaaggccaagacaaggaggcacaccaccaacaaagaacagagccccacgcaaaagcgaacaacaaagattgagcaacgcgcccaacgaa

SEQ ID NO: 245849 - DNA, 80 bp, Glycine max
  unsure (1)..(80): unsure at all n locations
gaagtgaactttgaagtgtatctcatangactcttcattctctcaaggtacaacaggtggtacccatgcttctatatata

SEQ ID NO: 245850 - DNA, 393 bp, Glycine max
  unsure (1)..(393): unsure at all n locations
tagttggcacatcaagtgttaacattgccttagaatttacactaacttcctccacacactacttaaaagttgtcaacctacttcgagaagacctcataaacttacatgcagcccctattctactaatatttgactaatagaggagtaaattttcttcaatccatcacttacaatcaaattcaaaatgtgagcggaacattacatgtgcacgaactctntattcaacaaagtatgaccattccaaacacatagatctctacttaaatatgacatggctacattgttagcacttgcattatccattgttacaccaaatctttttaatccctcattctttcaagcaattctctacgggtatccctatggcttcacctttgtgggcgacaatcaaaa

SEQ ID NO: 245851 - DNA, 135 bp, Glycine max
  unsure (1)..(135): unsure at all n locations
cttctgcacaccactgggtactggaacgtcaatggtggctggcttcaaatcacaattctctgancaaatctttgggtgctgtacttcatcaagttgagctttaaagtcccctggtgaagacccctcagtaccctg

SEQ ID NO: 245852 - DNA, 400 bp, Glycine max
  unsure (1)..(400): unsure at all n locations
agcgcgcataaacccaccatcccctggtgcccacctccatctgagctcacgtacttccacgtagcccatatcctcgtttctctcaacaccgggtccccatcaatcctctcaagcttccacaacatccaagcaaaacaacattcaaacagcacaatctatcacagccaagaaaacagagcanaggcagaatactctgccaaaacaccaaccaaaatcacagcttttctcacgtaaagaccacagtaacaattccttcgatccaattcgttaaccgttggatcgactccaaacatttactggaagtctatagtgtataagcctggcatttgaccggtgggatatactagcaaacatccagaactcattctgactagaacttcacagccaacacacacaacat

SEQ ID NO: 245853 - DNA, 262 bp, Glycine max
tttaggaccaaccaccggggaaaaccgcgcccccgtgcgtacaaccccacccccccaaagcccgacctcagacctcacaaccactcgccgcccccagccaaacgaaaagctgcacaaaaagaaggacgaacccccaccaaagaacagaggggcaccccccaaacaaccaggagagcaccccaaccaaaccccaacgccacagaccagcatacaccccgccactgagggaggaaaaaaacaaccaccccagccccaagcagac

SEQ ID NO: 245854 - DNA, 333 bp, Glycine max
  unsure (1)..(333): unsure at all n locations
agagcttnctatggttaatattgagcgtctcgatatattatacgcctgaatcgaacctcagtgtgaaaagttatgaccatttgaatctcttgagagcatccgttggtcattntctagcgtctctatatgtgatgcaccttaatcggaccttcgtgtganaagtatgaccatatgaatttctcgagagcttncgttggtcaatatcgagcgtctcgacatattatgcgcccgaatcggacatccgtgggaaaagctatgactatntgaatntctcgagaagcttccgtggtcaattncgagcgtctcgacatatgatgcgcccgaatcggacat

SEQ ID NO: 245855 - DNA, 216 bp, Glycine max
atgccccacattatttccatgacacaaatgcaaaaatgatgatttggaaatcttatgcaaaactggtcatgcatgcacctatgtggacgctcaagtgtcaaatttttatggtcatgtgatgctagggctcacgattcatttcctctattttaaatcaacccaatgtttccaaaatatggtcttctatcaatttgtgcattcattcgagtccatttt

SEQ ID NO: 245856 - DNA, 121 bp, Glycine max
ttactactatatttccatgaatctctgcagtatggactgaatgcatgaaattgacgacgatgaacgccatgtttgattgtgatagccactttacccaaaagctgaccacgtgcttgaatga

SEQ ID NO: 245857 - DNA, 326 bp, Glycine max
tgttatttacattattaggcatttccttgaaacaacataatttctcttttaatgatttcaaattaatggcgtccttcttgtgtatataaaatgattatgtgataatggtataatattatctggagttaaaagatgttaattgatcttctcaaattaaatatatttatttttatgatgtcattaatttcaacatttttcacttgttcataattaacaaaccttcagttgattttctattggctctaaggaaaaaccattctgctggtattcttggctagacatattccaatggacgactcttcgtgttaccataataaaccttttaa

SEQ ID NO: 245858 - DNA, 348 bp, Glycine max
  unsure (1)..(348): unsure at all n locations
atgttatctaagctcctgtcctatttataaatcctaacattgagctcctagggagcaaaacaatgtgtgtctcctacagaaggcatcagctaccacatctgttttccctgtttgtatttgatacatatggaaatgctctngtactctacccatttgcatgcctcttgttaacttgctttgcctctaatgacttaatgattgatgatcactataatgacaatccttggaaacaagtatgttccagtttggaggtttataagcataagctttatatagtgggtattgaggggactataattttactataaacaatagggcccctgtacatcactcactcactcaagataa

SEQ ID NO: 245859 - DNA, 262 bp, Glycine max
taagtgtccaaggaagaattgaagctgcaagattcacgatgtctgatacaatggtccagacatcctgcctgaaaatactggaatagctagaagcattgaagctgcatgatccacgatgtccgatacaatgtccaggacatcctgcccgaaaatactggagttgctaaaagcattgaacttgcatgatccacgatgtcagatacgatgtccaggacatctagcccgataatactggacatatacagctggtatatctgcaaca

SEQ ID NO: 245860 - DNA, 377 bp, Glycine max
atttgagttgagtcaaaacttgcattttaattattccttaacatgttcatgaataattcttagaggctctgattctgaaccttttcttggcctctacgttttcttatgattgggtctattctaatatgagtttggtgattgactgctggctgaaatttgacctacgaaatttcaacttctaaaacttggtaacaacctagtggtttacatcataggaaagtgaagtagcctatgcatcacatccatgcgtaattctagtctgaatcctgtgttgcacatgacattgaactgtaaattaatagaattgtcctacaatttaactaactttctgatttctgcatcggagacattttaaagaccgtgtcgactaagaaata

SEQ ID NO: 245861 - DNA, 274 bp, Glycine max
tatttagggcacctagactagtctatgtatgaggggtagttgtgtaattgcacatgcactgagtggactatcgatctgtgtggatcgtaataaaattaattgcattggcagaagccccatgcaattgaaatctatacggggaggtgagcatgtgcttactacagcccattgcgaccttatatagttacacgttgtgcatgttcgtcatgctcttcgtgccccatgacatctaagcacacttgagtgtgaatcttgaataagtgggcttgaccat

SEQ ID NO: 245862 - DNA, 445 bp, Glycine max
  unsure (1)..(445): unsure at all n locations
gattgattagagaaatatcttcatatgcataagcttttttgttagaaagacccgacgcttttacctattgctgtaaacttttacctgcatttactattttaaccatataagtagtttattnttgtttttaaccatcatttatcaatgttgctccaaaaatgccttacttctgaataaaactctgtctaataagcaagttccctgagttcgatactcagatcactctgttttaattntaaatacttgacgacccgttgtgctttccggctaatcggatttcccttgaacatatgtgtataaaggagaattggaccagaaagtaactacaggggaaatccaacaacatgcatggactganagaatttgatggcaggtattactggctcactatggaaaacgatgttgcatcatgtagaaagtgcatgagtgtaggccttcacgatat

SEQ ID NO: 245863 - DNA, 417 bp, Glycine max
  unsure (1)..(417): unsure at all n locations
cattgaacttaataataatcaataaattcacaataactcaattccaatatggagaaatatgaactcacatngatcaaataatgcatatctgtaatattgggctgagccaaccaataacaactggactgcctctgcatcccttgtcatagatattgctgcagatgcatttaagttctgtgtgtctaacagaataccagcaagctacaaaatatatacaagtattgagcgaccaaagtcacttaaaaccagttntctataactttcagaagcatcttctgatgtgggggagtaataaagtaaattaatagcaccaaaaatttgctaaaaacaaaggtcattataaatttaccaatagtctcttcagcatatagtttcgtagtaatcatacgcatcctcacagtgaatatcattaacaac

SEQ ID NO: 245864 - DNA, 340 bp, Glycine max
gtaatgtgtctccataacctctacaggagacaccatccctggagttcatcttcgctcacatgcgaatgatatagctccatacgcacaggtatattcagcatgtgactggccaacatgcggtcaatctttggtgtagatgcaacttaatgtgaccttcaactgtacactatgcaccataatgtgttacctatcaccataatgtattatctatcaccatagtgtgttacttctcataccctaatatattcggggatgattgtttgccacttgtgaacccgtaggattgtgacgttcaatagtatgtcatatattaaatatggcaaaggcactttgggttttt

SEQ ID NO: 245865 - DNA, 252 bp, Glycine max
agctccagctactttctccccatatcaactatgcagcttgcgagtaacatgaatggcctccccaatattaccggaatggcattatcttcacagatatccattaccataaagtctgtcgggaaaataaaatgtttcactctgaccaacacatcttcaataactccatatggtctggtaatggagcggtcaacaagttgtaaagcatcctagtgggcatgatcttcaactctcccaaccttttgcacatggaga

SEQ ID NO: 245866 - DNA, 295 bp, Glycine max
  unsure (1)..(295): unsure at all n locations
ctctggcgtgacattgcctgcaactgattgagctgattacgtatctactgccaaggatgctttatctgaaacagaggccacaaaaattcccagtgaaactgataagagtggtaatggcgaacataatgcagataataatggtaatgacctcaaatgggctgatccaagttcatgcttgtatagaaatcagttatgtattataaattgcagagtgtgatagttatgtgtagaatataaccgcttgtacgagtatatgtatatgatagtatgtcgngtgattagaatgagaatgatg

SEQ ID NO: 245867 - DNA, 443 bp, Glycine max
  unsure (1)..(443): unsure at all n locations
atgacgaatcttttccttcttggaaggtaccatacgatatggtacttccataccttcatccatagctttttcacttctactcttctttgcattcttattattatttttcttccttttcattatgttcattcactattatgtttctacttctattttttcttggtccttcaattctttattcttgaccattatttgttcctctttttcttgagtactttcacctcttacctcatttttcatgccatcggtacctttcttgtcagcagtattcttcttatgcacaacattatcctcatcctcagccttcacaaaccttatactccttgtcatcacagctntgcattcctccttgggattctattctgtaatntgccacacaactgtntgatgacttgtcagctatctgcttggccagctgtcccacctggacctcaatgttgttc

SEQ ID NO: 245868 - DNA, 416 bp, Glycine max
  unsure (1)..(416): unsure at all n locations
tatgcacttctctaatgacaatagcatcactcctggcacctaaatgctggtagtttgaagccatcttctcaattaaatgtctggcttcagcaagggtcatgtctccaagagctccaccactggcagcatctatcatactcctctccatgttattgagtcctccataaaaatatnggaggagaagctgctcaaaaatctagtggtgagggcaactggcacatagtttcttaaatctctcccagtattcatacaagctctctccactgagttgtctaatgcctgaaatatcctttctgatgaccgcggtcctggaagtatggaaaattttattctaagaatactctctngaggcatcccaactcgtgatggaccgcgcagcaaggtaataaagccagtccttcgccactccctctaaa

SEQ ID NO: 245869 - DNA, 462 bp, Glycine max
  unsure (1)..(462): unsure at all n locations
gctgcatggaatgtcttatgttgtttggtggtcagtaaaagagcacaaaccacaaaccctcgcgacaggtacagatttctgattcaaggccagctgggttaccaagttaaccaatgcatccagatngccttcaagcttcttagtttcagatgatgcagaatgggttgtagctacctcatgcactcctctaatgactatggcatcatttctggtgctaaactgctgggagttggaggccatcttctcaattaaatttctggcttcagcaggagtcatgtctccaagggctccaccactggcagcatctatcatacttctctccatattactgagtccttcataaaaatattggagaagaagctgttctgaaatctgattgtggnggcaactggcacatagtttcttaaatctctcccagtactcatacaggctctctccactgagttgtctaatacctgagat

SEQ ID NO: 245870 - DNA, 425 bp, Glycine max
  unsure (1)..(425): unsure at all n locations
catttgctgcgcaagtttcatggtcttgcaggtgaagatcctcttaagcatcttaaggagttccatattgtttgttccaccatgaagccccctgatgtccaggaagatcatatctttctaaaggcttttcctcattctctggagggagtggcaaaagattggctatactaccttgctcccaggtcccattttagctgggatgaccttaagagggtgttcttggagaaattcttccctgcatctatgaccactgccatcagaaaagacatttcaagcatcatgcaacttagtggagaaagcttgtatgagtactgtganagaatcaagaaaatgtgtgcaagttgtcctcaccaccagatatctgagcaactccttctgtatatttctatgatggactatcaacatgaagaggagtatgattgatg

SEQ ID NO: 245871 - DNA, 514 bp, Glycine max
  unsure (1)..(514): unsure at all n locations
ctaagctcgaatntgacatgctaagagcattacatataattttcttaattatagcaatgggctttaaagtaattttaatgcattntcattatgaatactaatanaatatttagcactctagattaacaaaatctttatatntacaggggtggtctttntcataggcacatatattccgctacctataaatctagcaattcctccaacgaacaatgaaatagacttacctgcgtagtagtatagtacagctatttaatgaactttgactgccatgtgatgagaatacctagacacccacctatcatgtaaccaagtctagttttcttattccaatgacttgattatggattacggaacatctcatcaaattattaactaactagaatattgatcacacgccccccaatgaataattggctaccatctcgatatcatcattgattgtcaactgctctcaaatggtgcaatggagtgcggatcaatgtaagagtacctctaatgatattcaaatcgt

SEQ ID NO: 245872 - DNA, 89 bp, Glycine max
aaaaaacgcgagggaccccgagaaaaaaatcttggggaccaaggacaacccgccagaaaacccgggcccaaacccggcaagcaacaagg

SEQ ID NO: 245873 - DNA, 331 bp, Glycine max
  unsure (1)..(331): unsure at all n locations
gggcaaacacaccaaatgattataatgatggatgagtcaaattctcacaacaggaaagacattcacttcgaatcgagctgtcaaaactagcatgacatgtagagaagaaccaacgatttcaagacacacaatggcaagaacttttatttgcaaaacaatnacccatttctcgaacatattctataattcaaagaaaaacatgcagagtcatacgtgcacacagaattgacccaaaatattagactgagaatgcgacgaaactaacaacattaacaaantaacacagctgacagattaacaanaccaacacaactagcaaaaccaaagaaca

SEQ ID NO: 245874 - DNA, 397 bp, Glycine max
  unsure (1)..(397): unsure at all n locations
actatagcaacatttctgcactaaactgtagggagttggaagccatcttctcaatcaaacttctggctttagcaggggtcaagtctccaggactctaccactggtagcatctatcatacttcttgccatgttactgagtccttcataaaaaattggagaagaaacaactctgacatctgatggtgagggcaacaggcacatagtcntttaaatctctcccaatattcatacaagctctctccacagagtagtctaatacctgaaatatcattcctgatggccatggtcctggaagcacgagaaattctttataagaatactctcttgaggtcatcccagctcgtgatggaccttgnagcaaggtaatacaaccaatcctttgccactcactcttaat

SEQ ID NO: 245875 - DNA, 370 bp, Glycine max
  unsure (1)..(370): unsure at all n locations
gttgctgcacatgatgttcaacgttatgtcaaagaattagatcgggctgcacaatgcacaaggcaagataaagtgtcaaatgaagaattgaagctgcatgattcacgatgtcngatacaatgtccaggacatcctgcctgaagatactggaattgctaaaagcattgaagctgcaggatccacgatgtctgatacaatgtccaggacatctctgcccgaaatactggagttgctaaaagcattgaagttgcaggatccacgatgtcggatacgatgttcaggacatcttgccctgaaatactggacatataaatctgttatatctctaacagattatcgtgtagttagcaagatattagatgatctatct

SEQ ID NO: 245876 - DNA, 303 bp, Glycine max
tgtctgcctgagtgggcttatagcctaaaccatacttcccaccattaccttgggtatttatcagtctagttatgccgcgcgtgatatttcctagacccatcccgggctcataaccggtccccaacataactctggccatcattaccgctgcatcgtacagactaggctgcccaaagagggagtccaccgaggaaatgctgaccacctcataagactggagagtagtttctaacgatacttctgcggctgtcacataaggcatggaggatgggcagctcaccaagatatcttcctcgcctgaca

SEQ ID NO: 245877 - DNA, 278 bp, Glycine max
atcacacgtatcttttattatacgtaatattggtaaaggagattgggtttatgaagtaaaaagttccttctctaagtatttaaagtaatgtgatatctagaactcagactcacaacttttggttaaattgaaacaatctcacggcatacacttgatggtcggaatattattatccatgtatttctcaaggttgaacaagtcggcaactaaaataatacatgagaattgagaggctgctgtgtacatctttcaacctatcagaatatatatgtggtcta

SEQ ID NO: 245878 - DNA, 265 bp, Glycine max
gggaaaaagaagaaagaaaatggaaaggaacacggaacaaaaacaccgaaagaaaaacagaaagaagggggggaaacaacaggcaaaaagggagaaaagaaaggaccgaaaaagaaggcaaaagaaaggaagaaaaaagaaaagacacgggcgagaaaaaaaggaaaacgggaggaaaaaacagaaaaggggagggggaagcacacagaacgaaaccaagaaaaggagagagaaaaggcaggagaaaccccgaaaagacaagaaa

SEQ ID NO: 245879 - DNA, 400 bp, Glycine max
  unsure (1)..(400): unsure at all n locations
cgctatctgacacacgggtgctatggtaaccatggagtctcacaacttccctaaaacagagtgttgagatgtgggaagcatcatccaccttgtggcatggnataaagagagtcatcttgctaaacctatccaccaccacaaagatagagtctacacctctctgcgttctaagaagcccaaggacaaagtccatactaatgtctacccaaggtgcagatggaatgggttaaggtgtgtatagcccatgatgcatcaccctagacgtggcttgtaaacaagacacagacctagtgcaatgcttatgggcatcgttctacatatggagccatacaacttctctttgagtaaacaagggtcttggtatgccatagtggccatgacccacctcatgctctcctta

SEQ ID NO: 245880 - DNA, 287 bp, Glycine max
  unsure (1)..(287): unsure at all n locations
acaacagaatcagtgtggagataccgaaagaaatcggcttcctcaataacctcaatttccttgatctgtctgagaatcaccttactgggtcagtaccacttgagataggaaactgtaaagaattgcanatgctgaatctaagtaataactccctctctggtgctttgcccagctatttgtcttctctcacaacgctggacgtattggatctttctatgaataacttttctggtgagggtccaatgagtattggccaactcacttcacttcttagagtcatcctaagc

SEQ ID NO: 245881 - DNA, 375 bp, Glycine max
  unsure (1)..(375): unsure at all n locations
tggtgtatcagaaaggcgtaatagaactttgtggatgtatgccttgaaaactgtcatgtatttgttgaatatggttcctagtaaggcacgttcaaagacacctttgaactgtggacaaataggacacttattataaggcacctgcatgttccgggttgccagatagaaataatgatntataatccgcaagaaagacaattggatgcaagaacaaccagnggatatntcattggttattcataataatcaaaggggtatatgntttattggcctaatcatagtatgagaaatgtcgaaactggaaatgtaaggttcattgaaaatggtgaaatcagtgggagtacagttccacgagaagtgaaaattaaagaaata

SEQ ID NO: 245882 - DNA, 401 bp, Glycine max
  unsure (1)..(401): unsure at all n locations
tgacatctcaaacaaacaaatcaagcgtaacaagacaattatagtcgctgtatgaatacctcacccactcaagtgtatcacacaattatggcttttctctaatgaaacactcttgccttgtaccactctaattccccttgagttcttaggcaattcaagagattatggccacaacaaagaacaattcaccaatatgtgtaaggtaaggctagagagacaaggaaaaggttaaccaagaaataggctaacaatggttntatgcacaaatgaaggaaataaaattcagaatgtaggaattcaagtaaaaatccttcatgcaaccaatatattaccttagagagatntgtttaaagttcttcaacatgaaccattcacccaattttttttttttgtataacaaa

SEQ ID NO: 245883 - DNA, 231 bp, Glycine max
cacccccactcttactaagatcacaccctgactttgtccgggagatacttatgtccttaagttacggaaacggacgaatctcgtaacgatccttggttctttcgtgatggcagcacctcgggatacataatcatcccttgtgactacgaatgctcggaactcccaattggcgacgagctcaagtgatttggtgtgcacgaccctacgaagtgataatatgtctttgtttcc

SEQ ID NO: 245884 - DNA, 402 bp, Glycine max
caacacatctcgagggatcgtctggaaggcccaagtgggtctggttgcatatttcacccccattattactatatacacacgcttgcccttttgttgagatacttatttcggtaagctacagaaacttacggatttcgcaacgatacttgttttctttccgcaatgttacgaaaccttgcggattacataatcatcaccctttttgacttatgaaatctccgcgtgttaacgggcttgtcggccgcgattgacgaatggcgcatgagacgacgttattctctgcgtgctatcatgcttctcgtcttatatatagcacaaaggaatttattctgatgaccactcgggtatatcctgccgtcagcatgactcataagtcatcatgacagaacttgtgagcactga

SEQ ID NO: 245885 - DNA, 337 bp, Glycine max
  unsure (1)..(337): unsure at all n locations
acactatctagaagagcaccacatttcagactcttactagatgtacacttatgaaaatctctatcttgcgaaagagctttcaagtattatctaacacattattcataccccctcttatcttgtgtgttccttgtatntcaagcacaaagcaagatctatggtggagacatcgtgctcacaaccatcgtcatcactgccacatgcgcacgaaggttgtgcacttgtgcctctcagtgatttgaagagacaccaatggtggtgtttgtctccttggttgggcacaacaagacaaagacgaagaagaacgtgaacgacatgacatcattgcatggaggag

SEQ ID NO: 245886 - DNA, 442 bp, Glycine max
cttctttagccttcgctgccatcactgcttatgaagggaccgaagcaagtgctctacttgagtggagagctagccttgattaccaaagccaagcctctctgtcttcatggacaagaggtgtcagtccttgcaagtggaaaggaatcgtttgttaagaatccaactctgtgaccgctataagtgtcacatatcttgggctaaaaggtactcttcacactctcaacttctctttctttcccaagctgctaactctggatatcagttacaaccgtgttattggaactattcctcagcacattgctaacttgtccagagtttctcggctgatcatggatgattatcatttcaatggctcatccctatctcatgatgaaggagctagctgtcatgctaaactatcatgcataatcttctgctacttcctaagagatggacactgcga

SEQ ID NO: 245887 - DNA, 385 bp, Glycine max
  unsure (1)..(385): unsure at all n locations
acccgcagagaggcaatgcacctatgacgtttctttttgataagacatcagtgaactataaaactgcttgttggaagtcaagaccactgagtgcgtaacactctgccatgaatgctgcatgataatgattctgagctctacattacggactaggtctaagggtatttgcccttcatcagagtatatatatcgcttagtatgattgatgttcaatacgatgaatgtgctctatccagatagacatgtgaaggacaatatccagagtggtgtgtgctaatgaaccacatgaggatttacgtagagcatgcataacgcttaatggatgtgtctgtggctcatgaanggatggagtatccactcctattctaccaattaatgaatccta

SEQ ID NO: 245888 - DNA, 341 bp, Glycine max
tcacgaaacctgcgattcgtaggttagcgagaagaggtggcgtgaataggatcagtggtttgatctacgaggaaaccagaggagttctgaagatattcttggagaacgtgattcgcgatgctgtgacctacactgagcacgctatgaggaagacggttactgctatggatgttgtttatgctcttaagggcagggaaggaccctctatggttatggaggcttataagctcttagtggtatcggattctatcgcagcgacaaaatacctgttcttttgaatcggtgtgatgttttggtttagggttgttctgttagatatgaagattattctgttctgttct

SEQ ID NO: 245889 - DNA, 227 bp, Glycine max
ccccattgatcaatacataatcacatggtctatgggagtaaaatatgtcttcttgattgatatgtcgaagatacttcacttgtagcaaatgacttatgttcgctacatgagatgaaacaactttgacatgaacgatatgggtgacgaatcttatgtcattggcattaagattcatagagatagacctcgatgtattttatgtctatcacaggaaaactatattaaca

SEQ ID NO: 245890 - DNA, 424 bp, Glycine max
  unsure (1)..(424): unsure at all n locations
aacatgatgattacttgctcttggtgttatggtatgagtttaaacttaattattttgatgatatatgattagtggtatgtacttttatctggttattatgaatgactttctggattatatgacattctatgaagtattatctttctaagaatgatgaatggttaagttatcttgtttgattggtttctattctcttgtatgattagtaatttatgtatgttttatatttgttacgcactctggctttttgttgatgccaaacgggaagagaaatagagattaaatcaagaacttacataagtaattaactttaattcaagtgaagcatatactccataacanagggggagaatggactattatgtgagtaatcgactangatcacgtgtgtgtatgtgtttcttgatttcagacgtttcatcat

SEQ ID NO: 245891 - DNA, 159 bp, Glycine max
aaattgaggatgatcaagcccttgagaactaaaaaagttacactgactgcaataaacttgtaaattagcagaacaactaagcagtagcaaaaattaaactatattaattcaactataagtctccaaaaaaggataaaattaaagaagattgcaaataag

SEQ ID NO: 245892 - DNA, 395 bp, Glycine max
gacaacagcatcatggaatacatgcaccccggatacaaagacatctttgaaacactttgcgatgtgtcatacatagaggacatgtacgtcgttgaaaagactcttgtccaaggacacgaataatagcctctaagcgaactcccatttctacatcaaacggttcatattgagacccactctgtatgcttgtcaatataccatgccatatccacgaggtgtaatgcttcttaaacccaccacataataaatgctcctgcatgatgaccagagtttgtcatcttccattcaaacaattgatgcacggacaataataatctctgtcctcatacaggtaagttcttctaaggagaagtgcaagaacactgtgacgccttcctcatatgcagggcccatgc

SEQ ID NO: 245893 - DNA, 340 bp, Glycine max
  unsure (1)..(340): unsure at all n locations
atagttccaatcaatcatgttcagtatgatgcatgcacctgaactcaactctcaaatgcaatgtggtatcatccccaaagaaatagcctaagcatgtccacatgacactctcacttatgaaaactaggtagtaagtgtcgaggttaccatgtcgtgcacaggaaactccccccgcccccatggtgatcagcctaagtctcaaaggagttccaaatcgagtgacatacccccaagtacaagtattcctcctcatgagaaactacaagtacttactgacaaaggtgatactatttccatatcatatgaagtatgaaacacggacaccatcantgcactgacc

SEQ ID NO: 245894 - DNA, 304 bp, Glycine max
gtttacttactactcctctaattgaagaatgctgccaagtactaacatagtaacatgcgcttagtccaagttattcagtaatatccatcgtagaactctatccaataatatttgataagtgatcaaaactagaagtagttgtgatgctgccctagatttctaagcataggaatgtagtaatttaagccaaaactcattatgcctttcaacatgctatcctatcatattatgacaactttataaatttataatcattactctcacgaatcttgcacaccactaaatgttcggctagttttctttc

SEQ ID NO: 245895 - DNA, 361 bp, Glycine max
ttctatatcatcaacagcctctcaacaggtagtatgcgattgacaattatctgtctggaacctataatactgtgcacatatgcttcacatacactgcatataacaaatggatccaaccaatgcatatcaatgactcaaataacatctaattacatttttacagccaaactgggaataatgatcatgagtttgcacagagcccgagaccaatacgttacagcccacataattaatagcagaagacatgcgaaacggcttgaaaaagatatgcgaaaaattggtatgatattgaacctaccatcacatcacatcattctataactaatcaataatatcattcataagggaagctggaatatac

SEQ ID NO: 245896 - DNA, 261 bp, Glycine max
gttttttaattatcacgctacacttgtaacattatagaattaaatgtcaagagctgtgactagtaggaaatacatgcctaatgtacaacatgcacaatataagctctaaaaactgaggaaaagagaatgaataccctttcaccatgatgactaagtaaaactagaaaccatccaagaacgaaaggaaaatattaaccagtaaaagaacctattctatgaaccatataaattggaataccagacactgcaatatactcatgt

SEQ ID NO: 245897 - DNA, 462 bp, Glycine max
  unsure (1)..(462): unsure at all n locations
ggagatgcagcggaagacaaaggagaataggtgagaggaggcgccatccactatggaataagccatggaagaaggagcttcaccaccaagatgagccttggataagaagctcggagaggatgcttcaatggaagaaaagaaagagagaggggggagcacgaaatngaatgaagaaaaaggaagagaagttgaactctgagttgtgtctcaccagattctcattcatcatagttacaacaagtgttacacatgcttctatntatagactacgtagcttccttgacgaagcttcttgagaaaacatccctgagaagcttctttgagagaacttccttgagaagctagagcttataatcacacacccctctcataactatgctcaccttctcgagaagcgttcttaagaagattgctgaagaagatagagcttagctacacatacctctctaatatctaagctca

SEQ ID NO: 245898 - DNA, 361 bp, Glycine max
cacaaacgctgtaagttacatgaaactcaattccgaaattccatctacacaaaactcaattctgtaaagtaggctttgcgtgctaatgatggatgtatttttatacattcaagggatacgtgcctcggcggtctcaagacctggaacaaatggtttgatgagaggagggggaacctttctattcctcacctattcatcacaaattcataatcacgtgtgaccatgaacttatgcacacaacatctattatagaatcatgaacaaggaactctaaactgacgaactctggaatgtgaaaacttatataagaacaaagcaaaaaggatggtatcttctattcttagacacgggaaagtcagga

SEQ ID NO: 245899 - DNA, 270 bp, Glycine max
aagcattattcacatccaactgaaataactcccaattattatgtagggcgagagctatgataagcctattagtgataggctgaacaacaagagaaaacgtctcatgaaagtcaaaaccatggacttggtgaaagccctctgccactaaccgagcgttgtactagttgatggacccatccacattttctttgatctgaaaaacccatatacaccctactgtctttctattagatggcaagggaactaaatcccaggtgtgattctttagta

SEQ ID NO: 245900 - DNA, 174 bp, Glycine max
ggcaaaagcaggcaacggaagggggaagaggaatcaaacgacaaagacaggacaaaacaaaaaaagagcaaacagaggaaaagacccgcaaacagaagagcaacgaacaaagggcatccacgcggaaaaaagaggaaccggcgaaaagtggaaggaacccgagacaaaaaaaga

SEQ ID NO: 245901 - DNA, 391 bp, Glycine max
tatgtgaaactgtatgaatagcttatattgttaacaacttataacttgtcatggattattttataattattattgataagttctagaacaattgaagaatcaacttttactcatgagattgaatctgatgatgaatgtatattcactctcatgtgttctaagaaaacttaatatcattatactatctaatgttcaaaattttaaaaaaacgtggatcgttggcaattcattaccacatctgcaagatagtaacatattgggattggaaagtatatcatacttattacaacggatgttatttaagactgaacagatcaaatatgatgtgtttataaatacacgtgtgataatgtgagactcttggaattgtggatttgagaggcatgttcat

SEQ ID NO: 245902 - DNA, 322 bp, Glycine max
cagaagagaaccctcgggttgtgccatatacacatcctcttttcactcaccactatagaaagtcattctcacatccatttgtcatatctcataatcatagtatgctgctatagcaagaaaaatctgaatagatttgaacattgccataggagaaaaggttgccgcataatttatacctctcttttgatgatatcccttggcacaaagcaaactttgaggtctcgaccctccatctcctaaatcgttttcttgttacctatgaaaaccaatcgggttaaaatcctctgaaacccgactaaaaccatactttcttatatcttca

SEQ ID NO: 245903 - DNA, 313 bp, Glycine max
gaagcgagatttcctctttttatacagagaaatgcaaaataaacctaaccctcacataggagtgtagaaagaaaattaagctagagaagcacagagtgcgcacctgatctttttaaaaactctgttagagcttgtgttatgggtgtagtgaacactatctgagagaggtggcacacgcagaacaaatagggcatctcccacaccaacacgtagcagaagcttgaaccctgaaaccgttgttgaattcatattcttaggtagcaatgtgaaggtgtagcgatgaatctaactagtttaatttatgtgcttgtgt

SEQ ID NO: 245904 - DNA, 314 bp, Glycine max
agacaagagaaagtgaagagcccttcctaggaatagcctggataagagctcccccagatagcctgatataactggaaggatgcttatggagaaagaagagggggaagaaacgaggacacaaatgtagaaaaaaggaaaattaacttgattgtgtcacaaactctctctcaatacacagtgtccatctctttataacatgactcctaaagcttctaaaaacttctggactcttaaaaatcctgaaaatgactactccaaccataaaatactacctctgaaactctgaagtacttctcccccattaaacactactc

SEQ ID NO: 245905 - DNA, 293 bp, Glycine max
  unsure (1)..(293): unsure at all n locations
atctctgctagcttagcaatttttttttactacttccaagcgaggcaactcctatgatccacgttcaaatcacaaagaagaagctctcacactatttcttcgtgtttgtaaagccttaatctccaacatatgtatattggaagcactacatttacatttgagaatcaaatcatagatgattataatgggtgtgtccatgattgaatacaggcttggattatgagacaaactaatatagacctcttgtgtgtatnttttaaaatcatctcttatctctctctattttactaacg

SEQ ID NO: 245906 - DNA, 390 bp, Glycine max
  unsure (1)..(390): unsure at all n locations
cttcctcaacggccagatcatagcacctcatgtgcaaactctctcatgatttattgaagtattttccagaacagcgaatacaccatgcaatcttggcatcttgatgngtatgaattttgggtcattgggtatgccagcttcctttatttataaactgttgtttctattatcaatatttttatcagtagaagcaatctataattagcttaagaaaagtctaaagatgttcattgacccttgcagtcatggtttctgccagtggacagatgctagcagaaaaacatataatctagtggatgccctgactagacacactgcacaggtaacttaacatgaaagtacctattcgcttctgtgagtcttcttaaatacccttaataataataatta

SEQ ID NO: 245907 - DNA, 412 bp, Glycine max
  unsure (1)..(412): unsure at all n locations
ttgtattgtaataaagtggcagtgaatctggactcatgcttctctcacatcctaaatgcctgtgcagataggattgttgctaaaagatgaattaaatttttagttcgattaataggtagcatcggtgtagctcgaaaatgtgatagtccacaattatgaacttacaaatgaaagataatattttccacttacaggctcatagtggggaggatcattgtgatcagagagtggaaaatggaccttgcaagatgcctacatcgtatatacaggaacaacttggaaacgaataagaaaatcatatgaacataactataatatctatgtatggcaatgagtgttgaaatattgactanacatgtcataaattatagctctgagttacatttacatagtaacctcaccaccaaaatat

SEQ ID NO: 245908 - DNA, 241 bp, Glycine max
aatgacacaccaacactaataaaagttattccttataaattccatcaataccctatttctaataaggtctaaaaatgactacaaataggaaacaaggctcattcacatagaaagaatgatttttagtcacaacccaagagaacccataggcgccatattgacaattgtacaaccctgaagaactaaataaactggactatcacacggaactgatgttaaacaacgacggaccaaaatgagg

SEQ ID NO: 245909 - DNA, 332 bp, Glycine max
  unsure (1)..(332): unsure at all n locations
tacattgaatttggtacgaacatgccctcctgatttccacctgggaaattgacgagtggaggaacgccccgacatttacgcaacgagcataatgtaaacctttacgggtgtagaaactctatagttgggcctacgctctataattattcttttgttaaggctttgtgtcttttggtttgaatatataatacaaagatctttcttcatctggtcctacgtctctacccattctcatccatttgcatgtgtacttctttactttntaaaacngcagatccgatgacgagtctctcgaaggtactaatacctgtgacccgcctatcaacttctag

SEQ ID NO: 245910 - DNA, 435 bp, Glycine max
tggagagaacggggcttttttctgtaatatggagaggacggaatactctaacgttcaacccttctcgtatctgaagatcacttgtaaatagtgaaaaaaatcattttcgtgaagaaaatccaagccgaggcgcttccgtaacgtgctcgaaacgtttccgtgcttgatttcgtgaagaattttcgtcatatctcattcgttcttcggtcttcaaccggtgaagtcccgaaatcgaacttttcaattcattctatgtacccttgggggtccccacttgtttcgcgtacttttattttcatttcatatactttctgtacccgcttttgacgtgctctagtcatttatgtaagtcatttgttcgcctaatcaataagataaagaaattttcactgataatttgaattggtacatctgttatatcctgtaaaatgaaat

SEQ ID NO: 245911 - DNA, 175 bp, Glycine max
atgcaagctttaaaatatgaattccatatatggtaatctattacacatgtgtaaatttgaattcaaattttaatagctgtttgtaaatcagttttgctactggtaatcgattacatcctctggtaatcgattaccagagagtaaatttcttgtaaaagactctttaacttaaaat

SEQ ID NO: 245912 - DNA, 322 bp, Glycine max
  unsure (1)..(322): unsure at all n locations
agttctagctatttcttctaaagatctatntttcctctctactactccattttgntgaggggttctaggtgcagaaaaatagtgttcaatgcccttttcatcacaaaatgattcagaatccttattntcaaattctcctccctaatcactcctaataaatgcaatattgagatttttcttgttntgaatgattttagcaagtttcttaaaagcatgaaaagcatctcttttgtgagtaagaaattatgtcctcgtaaatcttgaataatcatcaactataacaagagcatagtaatttcctgcacaactcataggtctagag

SEQ ID NO: 245913 - DNA, 261 bp, Glycine max
gatgaagatgcccgtctatgccctatactgcccctcaatgattcggcgccccatgaattgccctcaacacacatagtgcgtcgtgtaccgtgtctacccgcacccgtaagagaatacggtgcctctgcgtaagataaaggagagattgatttactccaatacaggctgatggcggtcgatggcctccattactacaccgtctcagatttgacggatctgggtccggtacctgacatcggaatgcctcccaaggtctaagta

SEQ ID NO: 245914 - DNA, 267 bp, Glycine max
  unsure (1)..(267): unsure at all n locations
catgcaagcttcacaaagagaatatctagatataacaactttggaagttctcttacgaagctatgcntttcaagcattaagattaacctnaagctagccgaccaagcttctcatgccatgcccaatgatgctttttgactgagagtaagcatgacacttttttctggatagatcaccagattaaatctgtcaataaattgtgatctctaaagcttctaaaaattgtacaatgtcttaaacatttatggtaaggcattgctttattat

SEQ ID NO: 245915 - DNA, 408 bp, Glycine max
  unsure (1)..(408): unsure at all n locations
ggagatgcatcggaagacaaaggagaagaggtgagaggaggcgccatccactatggaataagccatggaagaaagagcttcaccaccaagatgagccttggataagaagcttggagaggatgcttcaatggaggaaaagaaagagggagagaaagagagaggggggagcacgaaaatgaatgaagaaaaaggaagagaagttgaactttgagttgtgtctcacaagactctcattcatcaaagttacaacaagtgttacacatgtntctatttatagactacgtagcttccttgagaagctttcttgagaaaacttccttgagaagcttctttgagaaaacttacttgagaagcttcttttagaaatgtaaagacccgcctcgtcgctacggtatccacactctaata

SEQ ID NO: 245916 - DNA, 394 bp, Glycine max
  unsure (1)..(394): unsure at all n locations
tgtaatatcgacttacctttaaagataattcaggttgtggtcctccaaggtctatatgaatcaactgtagcttttgtgatgctctccatttagactatggaaatggctacctagactacttcccatactggcacgtgccacaactgcttacatgatcttctaatgatggcaagcctttcaccacattctgttttttcatgtgtaacaatgaagcatggttgaaatgacccaatctcttgtgccaaagctcagtgacattaattgtacttgaaatagaagcctgcacctcttccataagatccaaagagaaacttttccccttcattttgaccttaagcagatncttgtctttngcatcttgaattagacacatattgtcttcaaacaatacttt

SEQ ID NO: 245917 - DNA, 104 bp, Glycine max
gaaaaaatacaaattggtctgacaaaccccacgggaacaatacaccctacagtagagaacaaccagctttttctcataagaagacaacaacggctctcacgtca

SEQ ID NO: 245918 - DNA, 393 bp, Glycine max
  unsure (1)..(393): unsure at all n locations
gaaaaggctcatatcatacaaatataccaaggataaagaatgataccatggtttggtgaccctaaagcttcaacattttcccataaattttgaggaatcaaagaaatatcttcagccggtgagtacaagcaagcataaacaataagtgctaatgaaagttgcaggataggaccatcttgcgatggttgcgcattacacaaacagcaaatgctatcaactgccacaagataagattgcaaatgatggcgctcagcaaatggaatgtaatttgaaagaatgccattgcatgaaatcctcattgtaatgacaaatcagatgatgccagcacaacaacttcatnccaagtactagaaaccagacgagaaagacataatcacgaatggataaaactaa

SEQ ID NO: 245919 - DNA, 175 bp, Glycine max
cagtataaccgggtattatcctcctctcggagattacgaaatctatttattatggtgcgattattataagagcaaagtgaaaaacagaagttatggagcaactcgatcatggttgaaatacgagagaagaaatatcgattgaacttgcctaaaaagagaaagacaaaatacatat

SEQ ID NO: 245920 - DNA, 374 bp, Glycine max
  unsure (1)..(374): unsure at all n locations
taatacatgacgaagctagtcttactcccatctaaaagttgaaaaatacactgtggacctatgtaaattgagtgttggcttaattcaagtgctttcgtcaaatatgatgaaggacaagctttgttaaagttatttattctaaaaatatatatttctagcaaaataagttttcttgatatattatttaaactattgttacttaaaaaatattttntaagaaacaaatcctttttatatagaattcttttctccattcgtcccccctcccccgtttattgggctgggctcacttacggatatcaatagaagcaacataacatgggcctagttgaccagctcattattatcatctcatccaactttttattctcatc

SEQ ID NO: 245921 - DNA, 406 bp, Glycine max
gactttcatttaaagttaaagttcaattaaaagtgatctaataaggttttagtaattttggctttaatatatctaatagggtatatggacttttaatttgtagagagtggaggaataatttatttttacgatggaataagatagagataccaaaaataatcttagggttgtctattaaataggttatggttcctaagtaacatgtacattaatcattctcttcttttttgacattccatcatcagagagaaaactaaaggattctctcaagagaatatgtgttgatctggaaggtcaaatcgcatatatttaaagagtgatcattcatcatgaatataggtaggcttccacttcaattcttaatgataacatgactcatcggatttgtagatgatgatttcatcta

SEQ ID NO: 245922 - DNA, 367 bp, Glycine max
  unsure (1)..(367): unsure at all n locations
atgttgattctttgacttctcgaatgcattgtgctttttcatcgaaggccatgccaacctcgaatgcaccgatgggtggttgtacattatgttgttgttgaacgaaatggtgtcgatcaatgtactgtggtaggtggtcaaggttcaagtctattggacacctatgttggtgatattgcaacagaggtgacggaagtgtcgttgatccgccaacaccctcgtcttcgctttggtcatcactttggtcatcgctttggtgatcgatgtgatcaaagaagtgtngatcctcatcctcactaaaatcattcatgttttcctcatgaaattgtataatgggatctttgttatcgatgggatgttcaattcc

SEQ ID NO: 245923 - DNA, 228 bp, Glycine max
tgggcaataacaccccacctgagttccaatgttctgacccgcgaatatctcgaggaccactctgtcccacaataaaacacgaagttcacccttaacactttctatttcaacttgaagattatggcacctatacatgtgcaggcggagcaatcatcagcaacctctagactagcaatcaacattgttaacgcataccactccatacaaaaataaccttccagaagagaa

SEQ ID NO: 245924 - DNA, 305 bp, Glycine max
  unsure (1)..(305): unsure at all n locations
caacagcaggaggagggccagtagcatccacccgtagatgtgtctccataacctctacaggagacaccatccctggagtccatctccgctcacatgcgaaggatagagctccacatgcacaggtatatgcagcatgtgactggccagcangcggtcaatcattgtggtcagatgcaactaaatgtgaccttcaactgatacactatgcaccataatgtattacctatcaccataatgtattatctatcaccataatgtattacttctcataccctaatttcattccgggatgattgtttgcaaca

SEQ ID NO: 245925 - DNA, 209 bp, Glycine max
gatggacctctttatgttttggagaggatcaataacaatgcctataggttggacctttacaagagtatggagtcagcaccacttttaacatttctgatttaactccttttgcaggtggagctgatttgaggaggaggaataattgatttagagagatttgagcactacatacagaaatgctattaagctgtttactgtattacatgagt

SEQ ID NO: 245926 - DNA, 412 bp, Glycine max
  unsure (1)..(412): unsure at all n locations
ttaattgcgctcaattttatttaattacacttaattaacttctgtttatagcctttaccattttgtaaaggtttaatcctctaatgagcttgtttatattactggaatgaatttattttgtagttttcaagtactttttcctatgtaaaaaaaaaaaacttaagtctttgtgttcaatggttaagcaattttgcagttgtttatatcaacctttggcaacattntaacagtaggattgggattaattaggctacaagaccactagaaaatagtagaaaatatataccaggcaaaagttttcatatatcttttcatttaagtcatattatattattcaactaatgtagttaattgtttggacatgcttntccaaaaaacaaaatagtgtaacaaagcaaactaatgcattttt

SEQ ID NO: 245927 - DNA, 345 bp, Glycine max
  unsure (1)..(345): unsure at all n locations
atgttttctcataatctataccttattcttgattatgtccttttgcaactaatctagccttatttctaatgattattccatgttcatctaacttatttctaaacacccattttgttcctatgatgggataatttttaggtttctctacaagttcccacacattgtttctttcaaattgattcagttcttcttgcatggcaatgatccagttatcatctactatggcttcttttatatttntaggttcaatcatagatacaaaagtcatattattgcataaatcgtaagagagtgtctagttgtaccccttttgagatataccaataatgttgtcangggatgatc

SEQ ID NO: 245928 - DNA, 196 bp, Glycine max
  unsure (1)..(196): unsure at all n locations
atgctatgngctcgcgactggtccctttctttccttngaaattgtttcattattgctaccctatagagatctgcgaaatttgttccggccatactcttncttgcgagcctcttggtctcttgttagttggaatttgacgatttagtgacatattctgagtgttatgtaatgattgcttggtaatctctgataatga

SEQ ID NO: 245929 - DNA, 392 bp, Glycine max
  unsure (1)..(392): unsure at all n locations
ttattatcgatctgtaactaaaataacttataacactacaaaataaccataaattggaggagtatgatacaatttacataagttntatacacaaaagttaatcatattcaccgactaacaactccctaaagtttacagttttgcttgtcctcaagcaaataaagaacagagcattggttcccaagtgacaaaaatatgcagtgattatgtacaaaggtgtatgcaacaaaagtcactaattgcatgatacaagaatgaagcaaaatgctctcatcagttgtctttcacaaaatatgcaggtattcaaagagaagagtaaaatgtaacctgtacaattagatgaagtctgcattagacaaatattaatgaaagtagcttaaaccaaaatctca

SEQ ID NO: 245930 - DNA, 227 bp, Glycine max
cgacgcgtacagaactagcgctttttttacgttactactttttagttgctaatttctaagcctgattctcttgactgtgtaaatacaaataacctatattataaaaacacgaagaagattatcttatagcaatgattaaaactaattttttgtacaaactcatgaaggttgagagaactaacctaagtaggtttatgcacaaactttaaggggtcaaaccagggcaa

SEQ ID NO: 245931 - DNA, 413 bp, Glycine max
  unsure (1)..(413): unsure at all n locations
aaaatggaagatatgcctcatgcattaatctctntctccaccaactcaggaccaacaccaatcaactatgctccttcatcctctttgtcgaaaaatgaagtctgggagatgatacctcaagctatgaactcgtttgttaagcatcaaaggcttgaaaatgagcattttttcaagatttatgccaaaggccatcaatcaacaattcatgtttcatagtgccaaaatcatccaaaatcttcaactagctcaacaatctctattcagtgtcattgatgttgcatatacgagtccacctccactatccaacctttacctccaccaattaggtntccaccccctgtccatcctcaaaaactaagccttacccctacaccacaaacagtcaactctaaacccccttaaccaccacctac

SEQ ID NO: 245932 - DNA, 149 bp, Glycine max
gtcgcacatcgttcgcgtgtatgatatccactcgacaagggttgagtagaggagaccttcaatcctataacgcaacgtggtggacaaaaatgggcagataacttgaattgcattattgtaatgcagatgcataataattgtggtctata

SEQ ID NO: 245933 - DNA, 317 bp, Glycine max
  unsure (1)..(317): unsure at all n locations
ctgaacatggggtctatattaaaggagagactactgccaaattaatcctattgtgcctctatgtggatgatctattgatcactgggagcaacatgtcataaatcaacaaagtcaagcagctgttgatgaagtaatttgaaatgactgacctgngccaactatcctatttccttggcattaaattcaaggaaactgaagtaggtgtggtgatgcatcaaagtaaatacacaactgacatgcttgtgaggtttcaaatgagcaattgtaatccagctgaaactccagttgaaactggactattgatgagcttgaatgat

SEQ ID NO: 245934 - DNA, 357 bp, Glycine max
agccaaccattgagtacactgctgaagaatattcacagattatgacagttaatttagactcctcattccatctgtgccagcttgcatatcctcttctgaaagcatctgaaaagggaagcattgtgttcatttcatctgttgctggtgtagtgagtttaggtactggagctgtctttgcagcacagaaaggttagtaccatagtcatcccgtcctttctttcgtgctcatgtgatcaataaaagtttatcacatactaacataactttaatgtttgtccactgaatattcagctgcaattaatcagcttacaaaatacctagcttgtgactgggccaaagacaacatacggagcaact

SEQ ID NO: 245935 - DNA, 414 bp, Glycine max
taaactacgggatatttataaacttatttattaacgtggtgacaagtcaactgtagatcaaaattaaatcctctgaaagattgtactgctgggtcatgaaatatacccgcactagtgatatgattgaccaataaggcagaagtacttggataaaatacccatctgggacagagggagtagtggcctaatgctacaagaaattcgcattaccccaaattgaataattcaatttcttgtgtatacacaaagataaattgttatattcgaaccaacatatcactatgcacacgtaataaatgaacatgaacacaactcagcataagacaaccataccacacatgttacatgaactatccaagaaaatacataataataataataaccactataataatacagcatttgttaatgatc

SEQ ID NO: 245936 - DNA, 60 bp, Glycine max
caatatcttgggaagtgcaaaacaatatcgtgttactttacaggagatattaatagtgaa

SEQ ID NO: 245937 - DNA, 393 bp, Glycine max
  unsure (1)..(393): unsure at all n locations
accttccttctctctagcactttttctctatgaaggtatgatgaactaagaagtggagagtggtatttataggctaagttaggagacaaggtgatgaataagacttatgatgaatgagaactcataagtcctatggttagtaagcctttaatttcctattaatctaacctcttcattttctaactcatctaagcctttaatttaattatccattattctttctatctcacctcatcattttcaaactttgtattttattctattctatcttaataattatattgtttaattctaccaatggatcaacaatcaacaattgttataacatccaaaattctgctattcacactttccattaactcccataagcttattttattntattttattata

SEQ ID NO: 245938 - DNA, 151 bp, Glycine max
aaataagggtactagttctcgttcttgaatcagtgctaatcagtgcttcggggacattcttcgaaacaattattgaagaggctaatgcacatgatttaaatttttcactcagcgccgtgatggtggagagatattaatagtgatagtattg

SEQ ID NO: 245939 - DNA, 395 bp, Glycine max
  unsure (1)..(395): unsure at all n locations
tttgtgtttagtcagtgcanaagggcttgtgacttgtgggtgtattaaagagtatagtctaattagttgagaaatgtttctttaacactaaattacatgtttggctttttaaacttttttttttactaatttgagacgtaaaaattactcaattagattctcttacctgaaaatgatgaaattaaactaatgtactaataaaaaaaagggatcaaatatgatagaaaatgaatttcatgaataattggaaaacaattgatactaaattctttaattattcagttgctcttggattccattttcattatgtttattggctttcttattcaaatatcatttgatttttataggttttctgtacgcgaatctaatgaaataattttcatatcttaaat

SEQ ID NO: 245940 - DNA, 386 bp, Glycine max
gatgacaaacagctccaagatcaagaacaactcatgataacaaagatgatgatctcaagaatcaaagaatgagttcaagattgaatcaagaacactttaaggtccaaaaggaaatctgatttctagaatcaagaatcaagcttcaagattcaagttccaagaatcaaaatcaagattcaaggctcaagattcaagaatcaagagaaaactcaattaagataagtattaaagagttgtttcaaaaactgagtagcacatgaatttttctcaaaaccttttaccaaagaagttttactctctgggaatcgataccagattatggaatcgataccagtacaaaatgttttcaaaagcttcaactgaattacaatgtccaattgaatcaa

SEQ ID NO: 245941 - DNA, 207 bp, Glycine max
ccggagctgactcataagcaagcaacatcatccaggccttctgagcagataatcacctccttgctcttcgcgaattggcaagcttacacttgtatggcaaacggtacttcttgacgccatatacactcttgccgggtctaggtggcaactttgactgacacactactccctaatagccagacggaggctttctttcgactgaccatg

SEQ ID NO: 245942 - DNA, 400 bp, Glycine max
atacacgctcacacaaattgaaacatctaccccctcccacataccaacccagttatgttaatcataattaactttaattatgatgattatcattataaatacataaatattataaaacagaggaaagcagcctggataccaaggtcttctttgattcttgagaggaggttggcaattgtagcctaacaaacaactcctggataaatgtactgtcatccttcaacacagagacaatctagaaataatagagtcgacaacaataaggacatcattcactaaattaaatgatatgtctgtattcctagataatcaaatcttagatagaactgaccctttcaaacctctctcgtatacagagttactttccctgcttgcttgaccctgaactacaactgcatat

SEQ ID NO: 245943 - DNA, 454 bp, Glycine max
taatgatgactaagatgatgatcaaaagcccaaagagtgatttcaagattgagtcaacaagttcaagatcaagtttaatttcaagtttcatgagaagaaatcaagaagatttatgaatccagagaagtttgacttctagattcaagagaagatgaattcacgattcaagagaagaaatcaagaagacttcacaaggggaagtattgaaaagatttttcagaaaacaaacatagcacaattttgtttttcaaaagagtttttctcataattttctaagttaccaaagtttttactctctggtaatcgattaccacgttcatgtaatcgattaccagtggcaaagtttgatttcaaaagttttcaactgaatttgcaatgttccaatcgatttcaaaatggtgtaatcaattacaagatattggtaatcgattaccagtgtatctgaacgttgaaa

SEQ ID NO: 245944 - DNA, 251 bp, Glycine max
  unsure (1)..(251): unsure at all n locations
tgaacttgttaaccataaatggaccattataaaattatccaattataaaaagnttagattctttttgcataaattatattctataaaaattaaatattttcttttgaaaataaattatttattacttcactaaaaaaatatgggctacatataaaaattaattaaaatatatcatattatatacattgtctattatgtagtttataatctaatttaaaaatatttttttaacttgaaaatgggtatctata

SEQ ID NO: 245945 - DNA, 412 bp, Glycine max
  unsure (1)..(412): unsure at all n locations
catatcttccaacctcaacaataggtccctcccaaacagctagatttgaaaacccaagaggaaattccaataagttacagacaccctacaaagttggaacttctcatactactgtgaaagtgaatntctattcataatgaaatattatcatatagacaaaagaaacaatctcacacttagcaagactagccatgccataccaccctacattncgggaaatttatgactcattagtccattgcaaattaagggcactagggcagtatcagatcatggtttcaatatccaacaagtaacaaagatccataggagattcaataaacatactaacaaacaacaagtcaatngttattattaagcatgtgctacgcttgaatggtcctaacatntaactcgatattcacttcttcac

SEQ ID NO: 245946 - DNA, 423 bp, Glycine max
  unsure (1)..(423): unsure at all n locations
tgagtacataatgcaaatgcgatatattccaacttaacttaagatacataatgcaaatgcaaggacaaatggtctatcaataaatcaatgaccatgtgtgtttatgaagaagaaaagctngcaatggagaggggtgagagtgcattgctaacaactgcttgtggaaaaaacaaagcaattaagtctcaagctaatgagaagggaaatggtaaaataccacctcaagctaatattaagaaggtgacaaagtatctcttttttaagaagaagggacacatgaagaagaatttcncagattcccatatggtatgagaagaaaggtaaatcaatctcattaatatgctcaagtatgcacaagacctaacattgcttttgcagttggaatgttagaaagatatcacaagtattcacgtattgaccact

SEQ ID NO: 245947 - DNA, 401 bp, Glycine max
agttacctatgatttggagtttaatgacctggtttgttgttcactgctcttatgttaccgatctacccatttccaaatttgattactgttttgacatttcttttgtgtcctcaatccatcagtatttcttctaattgaccaatgagattttttctttaatcatttagctctctaattggccactatatattattttcttctcgtggtcttctcttgttctgtgaccagttctgatgtgttgtactcttcccccttctgatgtctatgaaattataaaatgagtgatccaactacagtcacaagtcttaaattgtttacatttgttagatcttggatttccatttcttatttctattttatcaaaggtttccattgagtcctcaactatgttgttctttaag

SEQ ID NO: 245948 - DNA, 429 bp, Glycine max
  unsure (1)..(429): unsure at all n locations
atatatgattgctttgttgatatgaagcgcaaattgggaactgattgttagttgtttggatgaatagacacttgcctgaaacacttgtgtgcttgagagaaacattggcttgtgaggaaagaagcttaatcaatcttgcttgatgtttgtcatgcttgctaactgatttcatctctttagctcaattgcacatgcttctatcttgaaatgtgacaaatactaatttgggggagatattgattgatagatgtgcagttatctcagttactgtggttggtacttactaaacatgccattaacctaacttagcatagttagcttaatttgctcgaggacaagaaaagctctatattttggggaagttgataactgatgtgcacaagtagattatgtnattaanacatataagaattagcaatattctctcat

SEQ ID NO: 245949 - DNA, 417 bp, Glycine max
  unsure (1)..(417): unsure at all n locations
aaagcctttntaaaatgtctgacttggtctatataaaagtctggtttgacctacaagcatgtttaagagactattttgtgataacttaccattaagataaaaatgaaattgtaacaatccttctttggtacataactaacaaagccaacgatgtgatttgatttactctaaaaactctttaattattttatatatgaaaatattgtataaacttttcattntattttcgaaaactaacaaatataattcaaaacttgcaatatgaaccatgcatgtattaaacatgactaaatcaaacttggtgcctcatggcacttcaagtcttcaaccattaaaagaagacatatctttaatcgcataagactcttggaaagtatgcataagacanactaaagctagtcatctctatacatgtaa

SEQ ID NO: 245950 - DNA, 364 bp, Glycine max
gaatgacagtcatccgaaatgagaagaatgacttgataccaacacggactgtcattggctggcgaatgtgcattgactaccgcaagctaaataaagccacaagaaaggaccattttcctttgcccttcatggatcagatgttgaaaaggcttgcaggtcaatcatactactgctttctggatggatattcaggttataaccagattgttgtggaccccaaagatcaggagaagatggccttcacatgcccttttggtgtcttttcctatagacggatgccatttgggttatgtaattgcaccaccacattccaaagtgcatgctggcatttttcaaactggtggaaaaagattgagttttatga

SEQ ID NO: 245951 - DNA, 397 bp, Glycine max
  unsure (1)..(397): unsure at all n locations
attcaagtcgagaaaggagaaaacaataacttttcgtttttattgcgaaataccgattgattctctttctgcccgcgatatagttcagagtatttattttcttagctcattttgtttagataacaattcgatgtgatgctttgatcgggggtggtgcttgtattgctcccacactatgctgaactggccgtagttttaaatgcgagctttacttaattttaagtaaaaaggtgtgagagaagangtactgcatatgtttttcgggacatatagcttaaagagttaacatcttgaaacattcaggttaatgtggttttctggctgctttgtagcggcagaaaccaacttttcattacttattcggtaataaatttttgcttcaaattcttccccttga

SEQ ID NO: 245952 - DNA, 157 bp, Glycine max
aagaatcttttgtactttacattaaccatagctcatgacctgtgttgtaatgatataaacttatttttggttgtgcatgaagaaaaaatacacttatgtgtttatgatgatttcaggttcaagacaaataacaaataacattgagatagctgtaaaa

SEQ ID NO: 245953 - DNA, 430 bp, Glycine max
  unsure (1)..(430): unsure at all n locations
tgtgtcctttccaacagagagtagttcatttcatatgcggtgaactttttactcaagtaatagacaacccgttctctctttctggaatcatcgtgctgccccagcatgcaccccatcaattcatccaataccgtcatgtacgagataagaggtctcccgggcatcggtggcataagcacaagaggattcataaggcattgcttgattcttccgaatgcctcttgatagtcatcgttccaacaaacggactggttcttgcgtaagagtttgaagagtagcttgtaggtagtagtgagctgcgatatgaacattgctatgtaattcaaacgccccaagaaaccttagacctgcttttccatccatggctgaggcatatcaagcatggctntcaccttgtcgggagtccatttatccccttctgacttacaac

SEQ ID NO: 245954 - DNA, 334 bp, Glycine max
  unsure (1)..(334): unsure at all n locations
gtatcatttggacttgataattgtgcttcttttaacatattatatcacttgtgcttttatttaatcggcttgtgtcatatataactatcacttaagttaaactagggttgggtcaaacaccacaataccacttgagcgcttggttcaaacatcactatatcacctggtctatattaggcttgagtgaaacatcattcgatcacttaataagatnatattgtttangaaatctatatgtgaaagagaccatgttgaggttgaatactctcgtgtccaatctggaatttattagaagtccaagaattgtgtccattactttgcacaaatcatactc

SEQ ID NO: 245955 - DNA, 213 bp, Glycine max
tggaggtgcaacgaaagaaagggagataaacgagaggaggcgtcatccatcagggaataagccatggaaggaggagctttaccacccataaagtgatttggataagaatctaacgatatggaaaaaacgattagaaagaataatatgtaaatctaaataaggaatattaacagaataaagtataaataaataactatttatttaatttattaa

SEQ ID NO: 245956 - DNA, 326 bp, Glycine max
  unsure (1)..(326): unsure at all n locations
ttataaatcactgaagaaatgagaaaactctaagctgaaagtgggaacgaattgctaatttagctcatcctcgaaattcagcatgtgtcatctttgtgaatgtatgtgtatgaagggtttgatgatgcccagatataagaaacacaagattacttctagcctaaattcaagttcaagaaaaagacaagacttagtttatttgttaaaagaatctcatattggttaaagaagggttagcctcaaaacttgatttccaaatgattttataaaaagccttgaaatatntttttccttggtaattgatggccaaacttcataatcgatta

SEQ ID NO: 245957 - DNA, 401 bp, Glycine max
ttttctataaactttagcaacatctttaataattattaagaacaaaatattgttaaacacgtatgtatatgtgtagtagtgcaattgtcacttttacatgtattggccaaagtatcctctgcaccattctgtccccagtaaatataaattacacccgccatagaggcatcaagcagggttgtgaacacaaggaaaacaaaggcaaattaatggggttagtcttgaggtgccatagtgcaaataaattggttaatttgttgcttgccttcaatgtattatgtatgagttaatctatttatattaccgtctggggaaaatatttcctaatcttcacgtcctggggagaaatattaagacacgtgttaatatatctgtgtgggagagcctggaccttataaatg

SEQ ID NO: 245958 - DNA, 273 bp, Glycine max
aacaacatcgcgcgttactaaattcctcatgtaaggatctgcatgagcctccaaataaggaagccctttgatcttaagtattcgatcatagacacccttgttgaagctgtcagccactgattctgagaccaataagactaacatcacaagtggaagtaacaagagatcattagtgagctcaagcaatatgacacaaagagacactgtcattctcatggtgccaccaacgaaggaagcagctccaagtaaggcaaagagtcctctgtcgagttc

SEQ ID NO: 245959 - DNA, 409 bp, Glycine max
tttgagtggcatttgtattggctgttatcttgattgatgcatcttagtacatttgatatctattttgcattgtgcatcatcatagtttgtgtgaagaaaaatttctaagttagaaaaatttcatcagaggcaaaacctctatgttttaatcgattacagccttgttgtaatcgattacaacaagctgtctgaagcttgtagagttaagtctcgtatcggtttaatcaattgtcgatatctggtaatcgattacactattgtttgagacaatgactaatttagtcaggagtctctgctttaatcgattaccaaggggattaattgattacttctctctcgttcagttgttcaaaggtgaacaagaacactttaattgattacttaggtcatctaatcgattacattattc

SEQ ID NO: 245960 - DNA, 230 bp, Glycine max
actggcatgttttgaggcttaagaccaactgagtgtgtgatcactctggaatgaatgttgcatgaatatgattgtgagctttacattacggattaggtgtaagggtatttggccttccacagaatatatatgtttgatagtgtgattgatgttgcataagtgtaacgtgctctatccgtactaacaatgtgaaggacaatatccagagtggtgttagctaatgaaccaca

SEQ ID NO: 245961 - DNA, 201 bp, Glycine max
gtgcgggtctgggagacgaaggtctagtgtttgcgatatgtgaagatgatgttccaagtacttcggatttggatcaccatgccctcctgatttccagctgggaaattggcgagtggaggaacgccccggcatttacgcccaagcataatgtaaactcgtaactttgcagtatattgagtggttgtgataaagatctattgc

SEQ ID NO: 245962 - DNA, 296 bp, Glycine max
tcacctccgatatgtcctataaaaacccgaatgaccagcctgaggagtagaatgaaattcctctagtaacttctgaatccaacgagatttctcatgcaccaccaaccctcctttataaagcagcactccctgattatatgagaaaccggtatgggcctctttatcctgtcgcaaatcacaaataacctttttccagtgggtatcttgctgcacctcatgagtcaactgctgccaatctaaccactcaagataagagatcatattagtcaattctgcgtcctccaaactccttgaca

SEQ ID NO: 245963 - DNA, 143 bp, Glycine max
attatgcgtaagaagacatcgtttcccatttcttcatcaaaacaagaaaatatgacaattttacttacagacaaagaatattggatgatttgttagtcagaatctaaacatactatccacctattgcatttgttcttcacagt

SEQ ID NO: 245964 - DNA, 229 bp, Glycine max
atgcagctgggaccttgtgatctgaatggcatttttgactttttttgggtgcatttatttgtaacttcttttttttttcaattctctttaatttggtttcctattggccaagaataaccaagaagccgacactatacctactgggtgtatgttttaacgagggatattggcttcacacttgatgtcagagtgaatggattgttgctaagcagacatcttaggtgctaat

SEQ ID NO: 245965 - DNA, 389 bp, Glycine max
tgagaacctgtgatgtacctaagcaggcgagctcctagcagtcaacagattaaaggaactaagaccacaaagcaaggaggcttgtgtggtggctggccagctgtgaaacttgattgatatatgggatgtagcctctggtaatcgattaccaagggtgggtaatcgattacaaggcttaaaagtgaagacaaaaagctaagatggtctctggtaatcgattaccaagggagtgtaatcgattaccaggcttgaaaacgaggtcaagaagctaggagggcttctggtaatcgattaccaaggggtgtaatcgattaccacgcttataaatgggactgaaagattatggaggcctctggtaatcgattaccagtctgtgtaatcgattacac

SEQ ID NO: 245966 - DNA, 271 bp, Glycine max
tgcagcttaacgttattttgagcgtctcgtaagtacgggacttaatcagtatttcgagaaaaaagttattgtcgtttgaattagctcagaatgcaacattcaatttcgagcgtcttgatatgttacgggactcaatcagacatccgagtaaaaagctgttgtcgttgtatgcaataaatcagtttcagataataaattgcggtgtatatattagtattcgattactcaaagatgtgatgaatatataggtagtggaaatcattgtgtgtat

SEQ ID NO: 245967 - DNA, 382 bp, Glycine max
  unsure (1)..(382): unsure at all n locations
gacgctcgaaattgaatgttgaagctctgaactaattcaaacgacaataactttttactcggatgtctgattgagtcccgtaatatatggatacgctcgaaattgcatgttgaatctcatagccaattcaaacgacaataactttttactcggatgtctgattgagtcccgtaatatatcgagacgctccgaaattgaatgttgaagctctgagccaattcaaacgacaataactttttactcggatgtctgagtgagtcccgtaacatatcgagacgctcgaaattgaatgttgaagctcttagccaattcagacgacaataactttntactcggatgtctgattgagtcccgtaatatatcgagacgctcaaaatgaatg

SEQ ID NO: 245968 - DNA, 238 bp, Glycine max
  unsure (1)..(238): unsure at all n locations
cagtaatttgagtcatttcaaaaaaacagtcacttactctccccccttttgctttctatctcattcactggccattactttctcaagaatctctggatatttataaaggtacacaggaataataaacttgcattgtgctccaatcagatatgtacttcactatatatgtactagctcttaggantaccttgtattctgtctaatggaaaaagaaattagcgaactaatgtactagatt

SEQ ID NO: 245969 - DNA, 422 bp, Glycine max
  unsure (1)..(422): unsure at all n locations
agtcgaacaaatcgatatgtgaaaaaatgaatttttttttaaagatcgnatcttactcgccaaatccactaataaacatactagtccttggacccaaaaatgattaaaaaaatattttctgaaaaataaataatgcataaaattagaagattgttttctttcatattntaagttaaaatatatcacactaaaatatataaacttttataatagtattaaatactaaatattaaagtgttaatactaaaatatatcaacgctcatgatagtctcaatattaaaaatatcaaaatatcttaccatactggtttacatcggtaattcgcaagttagtgtataataataactttaatttttctcgtgtgtttacaaaccacactatgagtagatcccttgcaaatgcatcgaattttaagtggtga

SEQ ID NO: 245970 - DNA, 412 bp, Glycine max
  unsure (1)..(412): unsure at all n locations
gatttcgcttagcaaattgaaatatggttggattaagtggttgactgttnaggacgaattctccataacccacgataagagaatggcttctgaatcaaacgaaacaacccgcttttaatattagtagtttcgtattccagtttacttgttctgctctttaatcacaaaacaaacaaaccccccaatcgttactggtactgcaagcatattatgagcatctggttagtcactgctcgttgggaaacgacctatgatcacttcctagttactgcattttcatgtttatttgattcgggtacggcctctatcaaacatcaaacatctatttttaattattgaaatttatggcattacacgtgtcccttttgatatatatacgtataatctctttactcatattggaatttcatct

SEQ ID NO: 245971 - DNA, 257 bp, Glycine max
aaaagaatagaaggaaaatttctcatgaatgccaaccaagaagagaacgaaaattccccaatcaaagagtgggagaaagccaaaagaaaagaaaggaaattcccaatcaaagaatgggagaaagtaaaaaaggaagaagaagaaggaaagaaagctcctgatcagggattgaaggaaaaacagaagaaatgtgcacagaggtctttatactggacaatatctgaacaatacacaatttgtccccaatgaacaaaaag

SEQ ID NO: 245972 - DNA, 191 bp, Glycine max
tccataatataatgagacgctcaaattttagaatagaagtctcgagcaaaccaaacgacaatatttttacttaatatgacttgagttgtgtatatttggtacgcctaattgaacactgattaatattgtctgtggatcacaataatgttaataagattttagctgtcgattagaaataaaattgaataaat

SEQ ID NO: 245973 - DNA, 398 bp, Glycine max
tcacctaacaaaagataaaatctttttctaccgatcatcggggtggaatctcgtttaatcactgttaaaacaaaatataaccgatcattcacgctataacctcggttaaaccaaaaaaagcaaaataataataaaataataaaataatcaaaatatcttggagaaaaaaataataaaataatcaagaaaaatcaatcggacgtttttctttgaaagtttccttcaatgaattgactaataaccaaagtgaaactaaagctaaaatcaactcacaaatcaagttttgtccgcaaaaaatcactaaagaccgttttaaggtccaacgccttatacgaaactctttgcttttatcgattaacatggactggtcaaaagcataaaaacaacccataacttta

SEQ ID NO: 245974 - DNA, 197 bp, Glycine max
  unsure (1)..(197): unsure at all n locations
acccctcaataaaaggattttcaaggtttgagaagtgaaattccaatgaggtaaatttggagcaaactctnacctnacacaagtctataacatcaatttagacttggtcagactggattacacctatacaaatattaactactatgttgattgatgttttgacacttatctaaatagtagacattaccatgctaaaa

SEQ ID NO: 245975 - DNA, 396 bp, Glycine max
acactcaagtgcttttgctctcggaaaaggaagcgtttctcacactctagatgtcgtatcgaagttcacaacggtcagatcacggacatctgtccattgaaccaccacaccgaatttcgagaaaatccaacggttaaagaatgtaggagggcacttttaccgagacaacttcaggtagcttccttgagaagcttttctcgagaggcttccttgagaagcttcctcgtgaggcttctttgagaagttccctagagaggcttctatgagaagctagagttttaactacccacacccctctaataactaaactcatcttctcgaaaataaacacggatataataccacatgaataaatccacatcaatattataacttataaattctacggtgttacac

SEQ ID NO: 245976 - DNA, 364 bp, Glycine max
  unsure (1)..(364): unsure at all n locations
tctgattttctctcacgtttgttgctgaaaattaaaactgctttactggatgtgcttcttgatataattggaagcttttagctcaacaatgtttcatcatactttttcttgagtagtttagctcaactatgaaatctactttttgttcagttgcaataaatgtaaaatgttctatcagttgttttaaagatgatttactggaatgtttgtgtgatcaactctntatgtgccattattcacttaaactaagtggtgtgggataaatttcaattatgtatatcatattaaactatatatttctgcctttggtctcttggtggtattaataatgctcatttagctggtattgctatctangggtctg

SEQ ID NO: 245977 - DNA, 430 bp, Glycine max
  unsure (1)..(430): unsure at all n locations
aaacctgcatgtctaagaaaagaatacacttcccacacagaagcggggtaaggtagagaagtaataacataaatcttggccttattgacctcaagacctctactagagaccaaatgccctaagactataccctcatgtaccataaaatggcatttctcaaagttcaaaacaatgctagtctcaatgcattggtcaagaactctagaaaggctattcaaacatgcctcaaaagaggaaccataaacaatgaaatcatccataaacacctccatgcaactctctaataaatcagaaaagatactcaccatgcaccttttaaggtggtangagtgttgcatatgccaaaaggcatcatggtgtaggcaaatatgccaaatggacaagtgaacatggtcttgtgttggccctctagtgcaatgtgaatctgcat

SEQ ID NO: 245978 - DNA, 415 bp, Glycine max
  unsure (1)..(415): unsure at all n locations
cataatagtgagacttgactagagtcaagagtttgagcttatgtgcgacgccaatgactatgcaatggggacaattcttggatagcggcgagataaggtattctatgccatttattatgccagcaaggttctgaatgatgcacaactgaattatgccaccactgagaaagagatgcttgccattgtctatgctttagagaagttcatatcctatttggtgggctctagagtcatcatctttactgatcatgtagctattaagtaccttctcacgaaggctgattctaagccaaggctaatcagatgagtccttctgattcaagacaaaaagggattaaagtcgatgaagaggtcactcaagaggagtaggaaatccgtgatgaatntcccgatgaatctgtactacatgtgcatg

SEQ ID NO: 245979 - DNA, 275 bp, Glycine max
  unsure (1)..(275): unsure at all n locations
tgatgcatgcaagcttgtgacaagtgatatcctcaaaccaaatctcttatatattatcctaagagggtccgcagnggccaatctccacaaacaccagccaccctttgcctcacaggaatagcattcctcaaagtggtgtcttccttcacaattgcagaatcaattcgtcacaaataaaagtttctcaattacttaaacttggtctcaatctaatctcagcttgctcacattactaataaacacttctttactaacgaagctgagattcttactta

SEQ ID NO: 245980 - DNA, 428 bp, Glycine max
  unsure (1)..(428): unsure at all n locations
acattgcaatactatagaaatactcttactctccctctatcctcaaaataaatgatataactactatagtgaaagagagattaagtatatatatcctaccacattttctttatggttctggattcagattatttttcctgggtcatgttgatatagctttttaataattatgtgcttgtttagaatatagctttgtgtccctacagatcattaatttcaggcttacacttgcacttatgttttcttcattgctaatctaggattaggatacttttaattntgagcaaccacacaatcgtgttatacatatgactagcttgaataattttatttcaataacaaatttgcaggtgtaataattatgatacacataattatgcataacgatttcagttgtatcgcataatttttatagtatattaatttca

SEQ ID NO: 245981 - DNA, 321 bp, Glycine max
  unsure (1)..(321): unsure at all n locations
acaaagaatgaagaaaagttatttgtaataagtggctntacagaaggttcctcctcaacatcattcatcctaatctcaaccaccaaataatggccttgcgtaaaaatgctgtattgtaggagttttatcttaccaaatatatgttttacctattaaattctcctcgtattagtctcatctttgagcagcacttcctctatatatgttgcatatgtaaacagggacggaactatgtaatgtaaagtgtaaaccaacacgattagcaccgagccaggttctaaattgcagttgcggccataggtgcattttaattattgaaac

SEQ ID NO: 245982 - DNA, 275 bp, Glycine max
  unsure (1)..(275): unsure at all n locations
cttttggcgagctnggagtacccaatgggttgacccgaaaccgaggtctgccaatgtggcctgagtttgaccaaaaccaaatctccaatcataaactaaacgttgcgacgtctagtggttgcaaaatgcttcatgtgagcctaagccttttctagattcttcttaacttccgcaaaaattgcctctcgatcagtgagcatgttatcaacaacgtcaatgttagaatcacctgccagatatttgggaaaattaaagggctctttgccaaaagtgat

SEQ ID NO: 245983 - DNA, 249 bp, Glycine max
  unsure (1)..(249): unsure at all n locations
tgattgccctcttcacatctttaagggtctgggcagagccctatacttcaaactgccctgactggaggagagaatagcctagccaatccctgggaaaggataacgtcctcagggctaccttattataaccactctcttttcatggcgagatttccacaaagcnagtgcacggcggaagactcacgatggcggctcataatgggcctacgctagaggatggaaccaccactatcggcttacactccaagt

SEQ ID NO: 245984 - DNA, 423 bp, Glycine max
  unsure (1)..(423): unsure at all n locations
ccatatacaatcaaggcggcttcgttacctagattatttacacgtactgccaaggtgtatttgttacttacatcacacacatctccttggctgaatttacatacatgcatactcaaagtattttggggtaccaaaaattgcacatgtgcacatcttggtatttctaatacctatacatacacaaacttcatgatgaatcttgactatctacacaataaggtgctacatttcatccctttttttcaagttttgctacctaaagccgcatgcaaattcaagcatattttcctttgcggagctaaaatgtattcaaattaaaaggtatacattttttggtaatgtatcttctttacataacatgcaacatatttatgtatatttttttgtgagacattntgactaccaaaaaatatatgtacatac

SEQ ID NO: 245985 - DNA, 377 bp, Glycine max
  unsure (1)..(377): unsure at all n locations
acaacacaaacctattataggaagtatcagacatacaattcaaaagcaaaggtcagaaatactaggttgcctcccaagagtgcttctttaacgtctttaaccggacgcatggttgtggctgaggcttcaccatctcatcctccacaattcttttcttcgatcatgagcaaatacaatcgtggacttagcacctgttggcatctgctcgaatgccttgaaaaaaagaatgttaacatgcaaatgtttaaaatgctcgtactgcctctcctatttacccctaagtctactcaaggctcatgcgtggcacctatcataacccanatgactctggagtgcgggtcatgtgagcgagcaaaatgagagggtacattcatacc

SEQ ID NO: 245986 - DNA, 243 bp, Glycine max
agcttgtagaatggccagacatgatcatgttttgtttggtttggctcaaggattaaagggatgccccacattattttcacgcacaaatgcaaaaatgatgatttggaatatttatgcataaactggtcatgcatgcacctatgtggaccttcaagtgtcaaatttagatactgtagattttatacatgaatgctatattgttcacttcgccgataattactagtacatcaaatgttatatttt

SEQ ID NO: 245987 - DNA, 345 bp, Glycine max
gctgtcatcgattacacaatcgtggtaatcgattaccagcagttagtaaacgttttaattcaaattttaaaagctgtaatcgattacacaattgctgtaatcgattaccagacaggaatttcagaaaaataatttcaagagtcacaacttttcaaaggctttactcatgaccaccaatggtctatatatatgtgacttagacacgaaatcgctcagagattttcagaacaacaaagtgtttattctctcaaaaagcaatttcattttattctcttagagaattacttggccaagttaattgcaattcattaaggaattaattgagtgctcaatctgtaaaatcca

SEQ ID NO: 245988 - DNA, 199 bp, Glycine max
tttttgtgccgccacgatgatttattacatatctaacacctaatattaattcctacatatacttacacttttatataaacctattgtacaccattgaaagtataggagatatgtcacatgagaaaataaaaaaatcagggaatagttaaaaaaaaaaaaaatactcccccttttattgaaactcatatttcatactaga

SEQ ID NO: 245989 - DNA, 406 bp, Glycine max
  unsure (1)..(406): unsure at all n locations
tcaaggtcatcattcattggatctatctcatgttgcaattttttatttttttccaaggctttataagtaatttaacgttcacgcattaccatcgacttcaacactggagcacaatttacatgatcatctgccgtgtnataagatgaagtttaaacatcaaaccaataaataaaacatatgcttaatatattcaagagtggagaagcatctttanggattcaagagaattctatattgtgcatttggatccacctataattacagctagttctaatcatgtttgattagaatagttagttagatttgatccatcaaatctattaacttttaagatgctagactaatcaattctgaactgaacatgattaaaaaaaataatgcatgaaataagacgtaaggttctttt

SEQ ID NO: 245990 - DNA, 59 bp, Glycine max
catatttgcagacaaaaagaaagcattttttaaaacaaaattggtgaaaatgataaaaa

SEQ ID NO: 245991 - DNA, 378 bp, Glycine max
tattgttattgaaagatatgtcctaatccttaatccatttcaataattatttttggtccttgaattcttgatatatgataggaaacaaaagataatgatttacttaattactctgatattctgatgagatttctttgctgaggcaggtaacctgaattggcttcggagaataaatgtaattcatgaacttgcaaagctcttgaaattcattcatgacctgtagaaacaaaatatggtgttgaatatcagtgcatctcatatactactccacaagtttagcacattattgtggcaataatccacttcccagctcctaagaattttatatatcgatgtttcctttctcatttgcactatctctggtttggcactcaacat

SEQ ID NO: 245992 - DNA, 361 bp, Glycine max
actgatttttttcatgagtctctgctttaatcgatcaccaaatgaattaattgattacttttatcttgtttaagattgtcagaggtaaacacaaatactttaattgattacttacaatatctaatcgattatattgttcttgagtgattttccatatgttggatgaacatgtagaaacatatatgatatgaagtcttgatgatgccaacataaagtttgatgatgccaaagataaacacttctcaagtgtaaataacttccaagagacacaactctttattcataactctttagaaaataacttccaagagtcacaactcttcagagaataactcacaagagtcacactcttttaaaaaac

SEQ ID NO: 245993 - DNA, 227 bp, Glycine max
  unsure (1)..(227): unsure at all n locations
aaatacaagtcattgatttgatagacatcatattccatttcttatcattctggatttantttacatggtatttaaaaatatttaacaagttttaatttatgtttttaacgtaaatggcttttagattattatatataaaattataaaattcttgcatataatttggagattgctgattagaaaaaatatatatttatttttaaacttttattctgttatattaattt

SEQ ID NO: 245994 - DNA, 407 bp, Glycine max
  unsure (1)..(407): unsure at all n locations
ggatgtgntttcacactattgaagaaactttttgttaattcaagaacgcgccttcatgtacacatatatatttctctatttaatatttttgaatgcaaaatacattgtgtttgcactatctaggtctcaaactaactacctacaacttagttaacgttgcatgagcaactgaaccattcaaggttctttgatattttttccctatatcggatatgtttatgatattttgttcacatttgcaatttgtgcaattntgatttatcttatgcatgaatctattcttcgatatntttttccctatatcttatatgtttatgcctttctgtttacttttgcaatatgtgcaattttaatctatcttatgcatgaatatattctggaaaagtctattatgtgcatatatgtgt

SEQ ID NO: 245995 - DNA, 408 bp, Glycine max
ttttgtactgtcaactatgtgaggatcaaatgaatcaagttccacagatcttttgtcatttgtttcaatagttcatttcatttgtatataacttccgtgtgatttaatcatgatgtgatacatgtgcatttgaataaattcttataagcctgttcaactcatttgaagtatttgtttgtttgaagtccgtgaatcataaaactcatgtctataatactattgtctggctcaatgcagtgcatacagaggactatacattctcaactggatctatcgctactctactgagccgcactttgtccattggataagtatgattctctcttattgtggtttatggctactacttgttttgcttcacgcctattatattataaagaactacactctgcttattcctactatgtc

SEQ ID NO: 245996 - DNA, 320 bp, Glycine max
  unsure (1)..(320): unsure at all n locations
tgcctatgttgttgtggatgatttcttcagatttacctgggtcaactttatcagagagaaatcagacacctttgaagtattctaagagttgagtctaagacttcaaagagaanaagactgtgtcatcaagagaattatgagtgaccatggcagagagtttgaaaacggcaagtttactgaattctgcacatctgaaggcatcactcatgagttctctgcagccatcacaccacaacaaaatggcatagttgaaaggaagaacaggactttgcaagaagctgtcaggtcatgcttcatgccaaagaacttccctataatct

SEQ ID NO: 245997 - DNA, 420 bp, Glycine max
  unsure (1)..(420): unsure at all n locations
gcgagcctatctcttcttatctcccatacttagntaattttctgaatttcatggtgctgctaagcacaaccctgctgagcttancgcacatctgttgtgacaatcgttaggcttagcgggcagtctctcgctaagccaattatacagaagcagaattctctgcaacatcagctaatcggcccccatgtcgctaagcgatagtgtttattttgtgaaggcgcgctaagcggaccatgtcccgctaagccgctagtcttatttttctatttttcaatttgaataacatgcggtctatntaactntntgggttcctttgtgttgcaaatggcctccaagaagcgtaaaagcattgtggcaaggccaactgctcagtatgatacttgacgggtccatttgcttgatgcatggaatcgctataca

SEQ ID NO: 245998 - DNA, 469 bp, Glycine max
  unsure (1)..(469): unsure at all n locations
ccccntcttactacatcaagaatcaccgggttgtgtcttctctgtggctgncttactggnttagctccatcctctaaatttattcgatgcatacatgtggatgggctaataccaggaatgtctgccagggtccagcctatagccttcttatgcttcttgagaactgacaacaacttttcctcttgctcatcagcaagggaggcagatataatcactggaaaactcttgctatcatccaagtaagcgtattttaaatttgatggcagaggcttcaattctggtgtggtcggctggacagtggtagaaagagatggtttctcagcctttacctcataaagaaagtcagaggtatgtgtacttcctgaaacatggttagtcctatctgactctatnaaatcaatctcaagaggtaaaacaccaccaccaggcatgcaatcaatatcactctcagattcactctcagcatcaa

SEQ ID NO: 245999 - DNA, 378 bp, Glycine max
ctgttagtgttattacatgggttaaatatggcaacagcaattgggaccacaatgtaaaggcattttgactcaccttagccacatcatgactgtaattgtgaccgacaacgttgtaaatatccgtggtgattgtgttactgtttcgtcatgtttgttaatattgtgataaatcgcaaataaataccatcgatacagtctccaattgcgatcggattgtagtcgcaaacacaattaataaatcttgaagttacgacccacattacggtcatgaactcatgtttaaaaccttgacggccacatcaattacattttcccacaattgcccacagtataaatgttttatattcatcaccgcaatggcaattctaacatcttaat

SEQ ID NO: 246000 - DNA, 449 bp, Glycine max
  unsure (1)..(449): unsure at all n locations
gagacagagaccatcatgttatctatcatcgccaagtaccaagaagattaggtctagccacggcccacgaacatagagtcgcggatgagtatgcccaagtatacgcggaaaaagaggctagaggaagggtgatcgactctttacaccaagaggcaaccatgtggatggatcggtttgctcttaccttgaacgggagtcaagaacttccccgattgttagccaaggccaaggcgatggcagacacctactccgcccccgaagagattcatgggcttctcggctattgtcagcatatgatagacttaatggcccacataattagaaatcgttaggaaacttgtatggtctctcaggccttgactagatatgactttcttttntgaaataaatgagntggtcccatgtntctacctccaaaagcttgtgcanatcaaatcactcctacatct

SEQ ID NO: 246001 - DNA, 475 bp, Glycine max
  unsure (1)..(475): unsure at all n locations
tctgctacgtattttgagagaagcggctctctctatatattgcggnnctttgctgaaaagaaaaaatacaatnttgttagttttaaattaataaagttaataaacaaacaaaatattaggttcattaatcacgtttttctataatttaaatatcattaaatgagataagtatttatctaaaaatttatttttcttttcttccacatctaactttcaaacaaattataaatggagtaaaaaaatgtttttttttctaaaagaactaactctgattcttaaaagtattttatatggtaaaatttatggagtgatctcaatgagttaacttgtcacatatgccataatgttgagagaaataacttcttataaatattaaaatatttaatacttgtttatgtgaaaatttaaatatatttttggtttttgtaaatatacatgtatgatattttgactcagaataagtgttaactcactg

SEQ ID NO: 246002 - DNA, 184 bp, Glycine max
ataacaaactttctgtgattggtttaaaatacatttttgcgaacgagaatgctttataaacatttagaaatatatcagatggggttaaaagaaatgtttttcctgggaaggattcaaacgtttaaaaaataataaaacgtctaggtttttatataaattgtttttatgttatatgaattttaaa

SEQ ID NO: 246003 - DNA, 119 bp, Glycine max
ctagtatccgattaaaaattttaatttcaacatgaccttgtggaaacttatatttcaaatgattttgtgagctgcttaatataatgtgaattgttaagatagtgaaatttgaagttgta

SEQ ID NO: 246004 - DNA, 120 bp, Glycine max
  unsure (1)..(120): unsure at all n locations
cccagcgagcttagtggcttttttttcnaaataggcgcttaactactctttaaatgtcttatatgaggcataacgctccatctagagcatttttgatgtaactctggcaagatatattat

SEQ ID NO: 246005 - DNA, 80 bp, Glycine max
aaaaaaaaataaaaaaaataaaaaataataaaaaaaaataaaaaaagaaaaaaagaaaataaaaaaaataacagaaaaaa

SEQ ID NO: 246006 - DNA, 332 bp, Glycine max
aaactcgagtgacttagaaaattttgagaagaactcttttgaaaaacaaaattgtgctatgtttgttttttgaaaaatcttttcaatacttcccttgtgaagtcttcttgatttcttctcttgaaacttgaattcatattttctttgaatcttgttgactcaatcttgaaatcattttcttgattcttgaatcttgttcactcaatcttgaaatcattctttggggtttttgtcatcatctttgtcattatcaaaactacttgaatcaacttgattcatcatcatgaaccttgcttctacaggaaaaaatttaccttgataataacttcccc

SEQ ID NO: 246007 - DNA, 98 bp, Glycine max
tggtaaattatataaaaaaggtaaatgtttttagaagactattaatatataagatacattattattattataaaaaaatcataattaaatataaaaaa

SEQ ID NO: 246008 - DNA, 380 bp, Glycine max
  unsure (1)..(380): unsure at all n locations
ctatacttactaaaatctagagttgtcccttgtcanggtggacctcgccaaagtangctctaaaatctctcacgtcgaactgagagtatcctttgttaaaacgacaagaggggggaccttgcaaataaatgacttcgacactgaagtaagtacgacagttacgtgagaataaattttgtaaaacggtgagatataaccttgtacttatagagtggagtggaagctgcgggtccttattggctgggatcgttatggtgttgtaacaacccttgcacataatgactagcttgtagataattgtagcgtacagataatgtgtacctcgtagataattgaatacctgccacgagaaaaaaacgtcacaacatattcaaataatg

SEQ ID NO: 246009 - DNA, 350 bp, Glycine max
ggacctcccaagagagtattgagtcagcaccacttttaatatttctgatttaattccttttgcgggggagctgatatagaggaggaggaaccaacagatttgaggtcaaatcctcttaagggggaggggatgatgcaatcctccctatgaaaggaccagttaccatagccatgagcaagaggctccaagaggattgggctagagttgataaagaaggccttatggttctcatgaaccttacggtagatttttgagcccatgggccaaaggtgggtccactcttcttttgtaatagtagaataagtatgtttcttcttttgggccttgtattttggccattctagtagtat

SEQ ID NO: 246010 - DNA, 243 bp, Glycine max
catgcaagcatgacatggagagtgtcattatacacaatgtcaccatttatcatgtgaaggttgacctaccatataatctcactagacgcaaactaaactagatatataactactagtactatagccaaaactcattcatacatgatagatcaactcccctctaggtactagttaatagtattctaacatctatgattttactgcttgttataatatgagtcctttgatactaattttgtcaat

SEQ ID NO: 246011 - DNA, 257 bp, Glycine max
  unsure (1)..(257): unsure at all n locations
cctctggccatatgttattaggtattaattacgagcatacttatgcctaccaanattgaacctcatcatgcctatctcaacgcggtgctataaatagggtatattcactctgaagtctttatgttatataataattttgatcaangtccataatgatataaatcctgtatttgagtctatgaacttgtgtgtatttgacaattatgtgccgttattcttaattatttacttgctaagacctcgttaaatatcacata

SEQ ID NO: 246012 - DNA, 398 bp, Glycine max
caacaaccggcgtaatgcgctttaccaccagtgggctaccttcaggcaatggtagcgccagtgcgggaagaatactgatgccgatgcctgcggctaccatcgggaacagcgtcgccggatgtccaatctcctgcacaatattcgcctgaataccattgcgcgccagcgctgcgtcaatcagcggtcggctgcctgacgcgtaatcctgcaacaccaatttcgctccctgtaatgcctgccacggtacataatcttccacggccaaagcgctatcgcgatggcaaagcagaaagaaaggctcggaaagaatcgcttcacattgcagatcgcccactgggcctggatcgatgaccatgcaaaatcgacatcttcctggcgagatactttcattacccact

SEQ ID NO: 246013 - DNA, 153 bp, Glycine max
gggtcaggagacacttgggacgtatgtggggtgctattgcccaaaaccaagcttgaccctaccgacccacccgatcgagatgatcacgattgaaaataaaacacacgtgggtgccgatatgtgatgtgaatcagggatcagtaaaaggtagtg

SEQ ID NO: 246014 - DNA, 371 bp, Glycine max
  unsure (1)..(371): unsure at all n locations
actttcttctatacactctcttttgttacttatatctnctagcacacttccttctcaaactaaaattaacccaaagaagaaacatgtcacggctataatgacaagaagcaagaaagctagagagaatatgaagcaaaatgggggatccacttcagatgccacaaaggaggtttttactaaagagaacctattgccacataaaaaggtagaggatagggagatactaacatctcccaaggtaagtattcctttccctcagagggtgaaaaataagcaataagatgagcagcttaaaaaagttattgatgtaatgaagagactgcacatcaacattcctttaattgagattatgtcacaaatgccaaaatatg

SEQ ID NO: 246015 - DNA, 375 bp, Glycine max
  unsure (1)..(375): unsure at all n locations
tatatctactgagcatcttatatatgtgcatgttgccctaatgctttctggaatgggatcagcaggaactgatgttttcagaatggtaagaataactcagactactgggttatttaaatgttcagatatttccttccgattttttaactacatttgtgtatatgtcttgggggttaatgacccggacttagtataaaatacgggtgatatcatcatattctgcatttcctactgcatacctccaagaccttgaatttggaagcttcttctttctgactggaaataatagttaaaaagtcatgataacatggatnttgaaagcacttcgtcaaaatgtttcatagtagcactatgcttgttccattctagtgttct

SEQ ID NO: 246016 - DNA, 195 bp, Glycine max
cttctggctataatctggccgcgcctcccagtggtattgtgtccaacagaaggcaggtggaataaaacgaattgagcaagagtccgaaactaaagatgaattccaatttagctcacgactaaaagttacgtttgtcactttgtaagcacaagactatgttgtgaccataatggggtaaagagaaggaaaataagg

SEQ ID NO: 246017 - DNA, 425 bp, Glycine max
  unsure (1)..(425): unsure at all n locations
gagaataagaaaaactacaggcaaaactattaaggatttagagttagaggtcaatctgtcgatgattcacagtagaatgttctgggttctggcattgtttgatccatgtagctgaccaacctaatgggaaacgacttggttgttactggtcgttaattttgattagagattatttcatgtgggtatccattcaaaccatgatantttttattggtcatattcactgatttcatgctctagaatatgtatggaaatccatattttttatctggatcatgaacatggagtaattcattactgaacttgtattatgtgcttgatntgaatttcaaaacatatattttatcttatgcccttgtacttctttcattantgtctctgatcagtatttttcttttatcacataaattattctttgaacgtgg

SEQ ID NO: 246018 - DNA, 382 bp, Glycine max
tcctaaatgggaatattctaaatcagatagcataaggaaaatttcatctgcaatcccacaatctaggaaacaaccatataattatttaagggaaaaccttccatagacaacaactcagaaccttaaatctacacactaaataaaaaggtaaagaaaaaacaaacaaagaacacactgaggtacatcatgcaagtctcgataatttaaagactcagctctgaattgagagtcactgacactgaatcgagattccatcctaataactcattagcacactggagtgtgaccacattaaagggggacaggtctatctacacaccgtaacaaattttttccatcatctcgaatacctccaagctgccagggaaacctttgagtgtct

SEQ ID NO: 246019 - DNA, 373 bp, Glycine max
tgtccacgcctctgtttaattaattggttaactatgcccatataatattggtatatatgcaagttgaattaagtcaaaaactagcaactagcttaaatagctatgagctatgcattatagggtctagcaaatgagtacacagggaggggaaaacaacgatagattaagaaccatgttagagtgtgaaagctcgaaaaggaaccaacttaactatacaatatgcttgaatgcttgaggatgtaattatatttgagtaaataatctgaacactgcatcttactgtcacactctcacaattagatatatagattttaaccttataagactaaactataataatattaataactctcttctatcgactattgaacat

SEQ ID NO: 246020 - DNA, 355 bp, Glycine max
ctttcagaaaatattctcaatagtcacatctttttacttgattcttgaatggctgtcaaaggcctatatatgtgtgacttgggacacgaatttgctaagagtttttcagaacaaaaaggtcttatcctcttaaaaagcaaatcattgtatcctcttacaaattccttggccaaattacttgtgattcaataaggaattatttgagtgctcaaattgttcaatcaatctctctaaagagagatttcttcttttcttcttcttcattctgaaaagggattaacagaccgagggtctcttgttgtgaaagaattctaaacacataggaagggttgtccttgtgtgtttagaacttgta

SEQ ID NO: 246021 - DNA, 317 bp, Glycine max
attccactcttctcgccaccaccactaagggagagctgtaaactttgctcttctctagccttttctctattttctctaaaactctctactatgagaatttttgtttgaggaactaacgaatgaggggtgatatttataggctacttaggtagtaaggaaataaaaggactaatagtagataataaatgaaacaacttataagtcctaaggttatttaacctttatgtttattattaatcccacctctttatcttatttttatatgaatcttcctcctatcattagataatctagatctctcctacgctatttgaagt

SEQ ID NO: 246022 - DNA, 306 bp, Glycine max
  unsure (1)..(306): unsure at all n locations
cttcagtaggggtcatgtctccaagggctccaccactggcagcatctatcatacttctctccatgttactgagtccttcataaaaatattggaggagaagctgctcagaaatctggtggtgagggcaactggcacatagttttntaaatctctcccagtattcatataagctctctccactgagtngtctaatgcctgaaatatcctttctgatgaccgtggtcttggaagcaagggaaaatttttctaagaatagtctcttgaggtcatcccagctcgtgatggaccttggagcaaggtaatata

SEQ ID NO: 246023 - DNA, 424 bp, Glycine max
  unsure (1)..(424): unsure at all n locations
gcccctcggaactagggactttcgtgctcttccccttggggagcccctctcatggggtagccaagttgccttctaacaagaacgggattgtaactaatgcaaccccttttccccatcaaaggaacattcggaaatcctccgcacgaaataagaaccacggctcttccttctttccatcgagggaaccagttgacaaacgctccttctttgtttgctaagagccggtcccaattttcccctcctttctctgtgcatgaacagtggctttctagcaggcaagcatgcctcacctcttggcgaanaaggtgtgaaaccaaccatacataaagagccggagtataacanacaatcctcatactgctctcctcacatcttcggtcgaaggtgtcatataagtcggctacatattgacaaccggccttct

SEQ ID NO: 246024 - DNA, 421 bp, Glycine max
tggacaacgaagaagaagaagttcaaagagattcaggacttgtaaaagattgattgaataagtgtaaaaagtgtattgaaaagcaaatcaaagccttgcatttatagactcttcatgtctggccaagaggaccatttagaagagttataacttttagaaaaacttaaaaccaatttgaaaaagtcaaaaaccttttgaagagttacatcttttgatttattcagaaatagttaccggtaatcgattaccaaatcagtgtaatcgattacacaaggcttttatgtgaaaggatgtgactcttcatatttgaatttgaatttcaacgttcaaaggcactggtaatcgattgcaaaatattgtaatcgatatagcttttgaaataattggaacgtgtaattcattgaaacttttcaaacaattt

SEQ ID NO: 246025 - DNA, 198 bp, Glycine max
tacttcaagcgtgtattatagagcaacaatgtagctggatggattgtttgccattgattgagtttacttacaacaatagttaccaagccagcattggtatggctccttttgaagctctatatggacgaaagtgccaaactcctattttgttgtatgatgatggagaagcagaacttcttggacctgaaatgctacaac

SEQ ID NO: 246026 - DNA, 372 bp, Glycine max
  unsure (1)..(372): unsure at all n locations
aacgattcttctgcggcttccacataaggcatagaggatgggcagctcaccaatatgtcttcctcgcctgacacgatgaccaaatgcccctccactacgaatatcaacttntggtggagtgtagagggcacaactcccactgagtggatccacgggcgccccaacacacagctgtagggggggttaatatccattattcggaaggtgacttgacaggtgtgatggcctacttgtactgcgagatcgatctctcccctaacctctcggcgagtgccatcgaaggcacgaatcaccattgaactcggctttaattggaagcattgaatggtaattgctccaaaggctcttaggcatcacgtgtaaactggaacc

SEQ ID NO: 246027 - DNA, 287 bp, Glycine max
ctacagaatacatgacgatgacactaattccgacgcaagcctcctacttttggcggcactttcctggatggtgaatgaatactcctaactgcgactgcattatataatatcctttgtcccaaacagaccacaaacttcaacctaaattttatttaactcgtaatagcttacccattgaatctccaaaattcataacagaagtcatgaagctgagttcactgtacttttgtctactctaacatagtaagtttctaatgatgaataataaatgtgaaacacaatgcaac

SEQ ID NO: 246028 - DNA, 416 bp, Glycine max
gaaggcatgaacttctaattgcccttcagattggtcatctacaattctcttttaatctactttcactcatctgattatattttgaattgtaaatttgtcattgatatcttgggttaatctttgtgatatgctcgagtgttagctttaaatggctagaaaatagaaacaataaacgctttgacgtatcgcttgctgctatctgcatgaatgtctatgacttggtgtgaacatgtggcttccaaatataagttatttttcattagatgatgtcaatgcctttctcagaattcagattgtttatactgttactctatccttgggacttgcacgtatcacgtggataagtccttttaagacagtgtcatcacgcacctcaggttgatttgttggtgttcttcgacatcacaatctacagt

SEQ ID NO: 246029 - DNA, 384 bp, Glycine max
  unsure (1)..(384): unsure at all n locations
ttctcctcatacatgttaacaagttcttcatttccaacccaaaatgaaacaaacattgtagcatgatatatgaacatatatgatagacagaaaaagatgaatcaagataagaaaccaaactaaccatccatgagtctaacttacagtgttgtcttttaaaacttgaattatatcttgtggtaaccataatcttctgcgctttcctagctctttcagtgattcttgctggtcaatttgtctacccatgtcctgaatcaagttgtgtatttcaactgtaccatgcctaacctttaagagagattnttctaccaacaccccaatatgatgcttcttgcagtcatcataaagaggaccaagtatatgttcaacctctttcaattcaca

SEQ ID NO: 246030 - DNA, 368 bp, Glycine max
  unsure (1)..(368): unsure at all n locations
catcacncacacctgcctgatttacattctccccctttttgatgatgacaagcattatccaacgctcgatatttttgacatcatcaaaatcttcatgatttacattctccccctttttgacgatgacaaccacctgtaggttatgagcaacaacaaagaaaaaaaaaatctatttacatatagtntactccccctcggttttgcaatgtttgcttatatgagacaattgaagatttcgtatatttgatatataaaaatctgcctcatattaagaatagataacctcctcttattattgtatcttttatctttctctccccctttgcaacatcaaaaacaaatcatgaatagagaggagaaaaatgtta

SEQ ID NO: 246031 - DNA, 326 bp, Glycine max
cattctcattggcctaaattaaatcacacttatttgatatttactcttgtattttcaatcatgtgttgctgactaatgtattgttgtctgcactctgcagatttctgttgacctcactatctagtgtagacgcacctgtcttatgctctcctgtgccatttcaaaattctgctttgccttctcttgacgtatgtccttggctcaatatagatcttgtttatttgaatggtaacttttaaaaacctttgaccaactttgtgcatgtggtgactaactagatcaagtttatattgacctcaagttagactgtctcttctgctctcatg

SEQ ID NO: 246032 - DNA, 347 bp, Glycine max
tagttcaatggctacctacacccattcaagagaagaaattaactaatcctctcacatggggaaagtcttgtttctactaataatgggggaagttttgttttcataattgatataaaactaatgacagcagttggtccttatttttattatgaatttctaactgatcgaaacatatattatactaagcaagtattattatttttgcatattatatattatatataaaaaggagagacaactaagtcacttcaagaatatctagctgtaagattatcagtcttcagttcacccacaatcttatctttcatattcttttaatttaacagttaaaaatgaagtacttaata

SEQ ID NO: 246033 - DNA, 402 bp, Glycine max
acacacccaccccgtcccacggcttctgagatgatgtttatgatgctcatatgctgaaattgctgatggaaatctgttacagatgaagggtagaactaacccaaggttacaaagtgagaatgtgatgttatgagtggaaaaagagtgagactctgagagttggaaggctaagtctgaattctgtggtaaatggaggttagagtgagttaatactagcttgaaatgtcatttagaacatgtgggaaaggttaggctgacctagacagaaaaacaaatgaccaaagtgaacaaagagccattgctacggcaaattttgggtgttgaacagtcaacatttgattcggtgagattttatgtgtaatccagcttgaacacatctaaatggatgttatggactggtgt

SEQ ID NO: 246034 - DNA, 300 bp, Glycine max
  unsure (1)..(300): unsure at all n locations
ctctcgacgcgactcggcaagaagtgatggnggagatcgatattcccattcacataagcccccacacttgcaatgcggtgcttcaactgatggacataaatcccgcctatagctgcctcttgaggagaccttggattcatgcgctcggagtggtccattcaacgcttcaccacaaattaaagttcgcagtcggtggacacttagtgataatgtcgggtgaagaagatgtgttggtaagcttcctctcttccacaccatacgtagaagcagcggaagaatcattggaaacaactttccaat

SEQ ID NO: 246035 - DNA, 400 bp, Glycine max
  unsure (1)..(400): unsure at all n locations
acaccactcatcaacacagggagttatgtttgcaccaaaaacactgctaaataatactgggaactggactgctaataatacagtagaaaaatctgttatacagcatattttgttaaattcttgaaatcggctaagtatatcaaatagcatgtaaagtttgagacaagaaaacatggaattgngggatataggagagttacattattttctttctaattgaattgctntttggttacaacatacatgtaactngtgaatgacaactctggtgattttaagtttgaagcggtcatnaatttttgcaggccgtaaaggttgtaccatgcagcatgatgatgaactttggaacaataatcaagcatgcattcaaacctgcatgtatatcataactaatttatca

SEQ ID NO: 246036 - DNA, 398 bp, Glycine max
  unsure (1)..(398): unsure at all n locations
cgacctacataatgagtagaatctcaaattagttcagggctgactcaatatattattaatcttatttcagaaaaaaaaaatcctacaatatatactatatctattaaaatgatggcacttaatgtatgattattattacttttttgtctaatanataagaatgttcaataattattactagtataacaaacaagaaactaatactacaagacttataaatttgttgccagcaacatctcacagtcacagactctcccccaacaacccanacaggagatctccattcgctcagggcgaaaataaaatatctagaattaatttatttgaaaatataacttcttacaaaaagaatattataatattaatttggaaataatcctttcacatggccctgaaac

SEQ ID NO: 246037 - DNA, 346 bp, Glycine max
  unsure (1)..(346): unsure at all n locations
cttcaactgcacaaggctcttatatttgaagagtatccttgnggaaccttcactcgacgaagacactgacaaaaacttatcttctccttctttgacaaaatatggcaggctgggggcaagtaaattttcttcccatcacactttggatgcaactgtaatcgtatacccatatcagctagatcttgacgggtattcaagccatccttcgtcttgccttgaatgttaaggagcgtcccaatcgcatcgtcacaaacatttttctccacatgcataacatcaatacaatgtctaacgtcgagatcacacccagtcggaagatcaaagaagattgacctcttcttcatat

SEQ ID NO: 246038 - DNA, 418 bp, Glycine max
gcatccgctaagcgcaacactcatgggctaagtgcgaggaagactctataagaagatgagttgtacaggttcgctaagcgcaccgcttcatctcactaagcacaccgcttcattccatccgctaagcgagaaaggcacgcgctaaggccacctatttaagcttgaaatcagattttaaagagagagtttaggctgggattcagagctttgcatgtctagagattatagagagagaaaggtccaagttccagagagttttgagagattatgctgtgtgaatatctacagatactacagcttgaagcatgagccggtttgagagcttgagatgagtttgtgagtgattgtgagatcctagaggtgaaggagacatcctcaccacttgtatttttgcaatctttcatcttgttcttctctt

SEQ ID NO: 246039 - DNA, 316 bp, Glycine max
accaagtgatacactctgcagcagcatctcatacagtcattcgtagaagtactctcaatggaaacacactctatgatacaacctcctactatcatatagtcaagaaaaactctataaaacaaagtaaacaccaatagacagagactccaaggaccttataaatccaatcaactgagcccactgagcatcaacagtactccatagatccccctcaataaccaaaaaaatatgaaatacggtatgtgagaatagggtccgagaggataacattagcacacaccatgataccatagagggtgacagacacgaaatcctc

SEQ ID NO: 246040 - DNA, 376 bp, Glycine max
  unsure (1)..(376): unsure at all n locations
gggcctatgncaagtgaacgccttggaggaaagaggtatgcctatgttgctgtggatgatttctccagatctacctgggtcaactttatcagagagaaatcagacacctttgaagtattcaaggagctgattataggagatccaaacagaggggtcactacaagatcaagggagattgagattgcctccaattcatgctctgtctccaaaattgtgcccaaaaatgtgaaagaggcactgactgatgagttctggatcaatgctatgcaagaagaattggagcaattcaaaaggaatgaagtctgggagctacttcctatacccgagggaactaatgtgattggcaccaagtggatcttcaagaacaaaaccaatg

SEQ ID NO: 246041 - DNA, 351 bp, Glycine max
aacggaagctctcgagagagttgaatggtcataaaatctcactcaaatgtacgattcggggacacaatatatcgagacgctcgaaatcgaacaacggaagctatctaaaaattcgaatagtcctaacttttcacacagaagacagattcggggacatattatatccagacactcggaattgaacaacggaacccctcgagaaatccgaatggccataacttttcacacagatgatcgattcatggacataatctatcgagacgctcgaaattgaacaacggacgctctcccaaatcccaatggtcatacatttcactccgatgtccgagtcggggacataacatatccaga

SEQ ID NO: 246042 - DNA, 264 bp, Glycine max
acttttactaaaatagcaattggatggccctcttgcatcaacacagccaccaaataccaaaatttgaagcatcacactcaatttcataagaattttgaaagtttggaacgcaagtatggtggcattatataacttttgcttataaacattgaaagcttcttactgtttctcttcccacttgaaacaaccattttcttgagcactttattgagaggtgctggcattgtgctaatatccttcacacatcgtcttataaaactgcta

SEQ ID NO: 246043 - DNA, 308 bp, Glycine max
  unsure (1)..(308): unsure at all n locations
cacangactcgaggcagcgaattaggtatagtcactggaactcaacggagaaaggcttggaagccacttgagaagcgacgacatccaatcaatcgatgcagatcttgaaacacagagtaactcgaggagggggacaacgttgttagacttggagaccattcggaaccattttggaggatggataatgagcattgtggaaggatagaaaatgctttgctagtgagtgaattatggtttgtgcacgattggagttttcggtgacttgatatctgacaggggacggacgtaatcattaaccactgcgtgga

SEQ ID NO: 246044 - DNA, 385 bp, Glycine max
gacccaagagacatccgagtaaaacgatatcgtcgtctgaatctgctcacagtttcaacattcagcttcgagcgtctcgatatattacgggactatatcagacatccgagtaaaaatctattgcctgttgaattggctcacagcttcaacattcaattgcgagcgtgtcaatatataacgggactcaatcagacatccgagtaaaaagatattgccatttgaatttgctcagagcttcaacattcaacgtcgagcgtctcgttatattacgcgactcaatcagacatccgagtcaaagagtattgtcgcttgaatttgttcatagcgtcaacattcaatttccagcgtcttgatctatgacgggacataatcacacatccgagta

SEQ ID NO: 246045 - DNA, 302 bp, Glycine max
gagacgctcaaatatgaatgacgaagctatgagcaaattccaacgacaataacttcttactcggacgtctgattgagtcccgtatatatcgagacactcgtaattgaatattgaagctctgagccaattccaacgacaataactttttactcggatgtctaattgagtcccgcaatatatcgagacgctcgaaagtgaatgttgaagctttgagcaaatttcaacaacaataaccgtttactcggatgtctgattgagtccctgtatatatggagacgctcgaaattgaatgttgaagctct

SEQ ID NO: 246046 - DNA, 269 bp, Glycine max
ttctccagagctacctaacccaaaagaacatgatacacagatgaactcaatgatgagaccttggaaccaactcaaaccaactcttcccttatctccttaatccggacccccttcttcttctcacctctcgttcctcatgagcatcttccagctctatcagccactggcggaaccctctcatgctatcctatgagggcctctctactctccttgctccgtgacacaggggaatccataaggctctgagctaagacacccataacccacac

SEQ ID NO: 246047 - DNA, 217 bp, Glycine max
aacattcggaaagttaactttaccagtgggacattactcttaaagccaaaatggcatataccctcctcccataaatacaaacctcaatgcaaatctacagcaagcttatgcgcatatttccttacaaacagtctcttgcacaagacattttattaaccgacaaaaatgcacccctataccatcacggcagcttcctacccagattattacaccgact

SEQ ID NO: 246048 - DNA, 291 bp, Glycine max
ggttgatacatggacggagatgaacaaagatcatgatgaagcggtatgtgccggctagttactcaagggacttgaaatttcaagctccaaaaactaacccaaggcaacaagggggttgaggagtatttcaaggaaatggatgtgctcatgattcaagcaaatattgaagaagatgaggaggtaactatggctcgatttcttaatggtttgactaatgatatctgtgatagctgcatgagtttgctgaaatggatgattcgcttcacaaagcaatccaagtggagcaacaat

SEQ ID NO: 246049 - DNA, 421 bp, Glycine max
  unsure (1)..(421): unsure at all n locations
atattcatatcacatgcaccttctgatgcgtataccaacagggtaggtcgtcgctagatcaactacatacgtctatttgaggatccccttatcatatctagatcctcttaagaaggtctaatatcaatagggttaaagggaaagaaccttgtgcgagggccccaaataccgacatccttataccagagaacttgaggaaggaaagattgttaatactggacaatccattgaccattaggcattctaccctaccttntgatttgatgattacaagtgtattaatcattcatggactaatgagctattcttaagtgaacaagacttactacataacaagcaaacttggtgttaattcatatcctacaactctagtaagtacgtgtccaactataagtggaaaagtgattattaataagtatat

SEQ ID NO: 246050 - DNA, 430 bp, Glycine max
  unsure (1)..(430): unsure at all n locations
ccaacagctcacactttatggcacttcagagggtgacacaccactcagcttccttgttagttagaacacttcactagttagaactttctgtaggcacttcagagggtgacactccactctgcttcaactacttttaggatcaatgattgtccccaaaaaataacacgagacattttagcgtgctttgtcctcacccacatgctgataaaccacttcctgagtggtattttgtatcagtttttatgccattttgcatgcattttcttggcagaactcacgtttgaacactatttttgtattgcataagcacaaccactcaatngagtgataaagttggaaattgcacaaatttacgaagattcaaagactctacacttgattacgagtgtggacatttaccacgaccatggtaattagcatgaccacaata

SEQ ID NO: 246051 - DNA, 420 bp, Glycine max
cccacgagtgcagaacgatgatcaacgttctattatcggcgaagaacgttctcagaaatgatcgtgggaacattacggaaacgcctaggccttgaaatttcttcttctttatccttgttcatacccaattcagtgacaaatgcttactaaggacgctgaaccctttccctatagtctcctacgcctatttatagcttaaattagggaagagcttgccgcccaactcgccaagcgaactggtggcttaggcttgaagtaacaagcctgcctacgcgagctggctgcttcatgtacaaacctactgaagggcctacataggccacaggcgtgataacacccctaaagagataagtcagcctattatgaccttcggttatttcgtgcaaacataacaaaactacagatcggccaaattgggtc

SEQ ID NO: 246052 - DNA, 251 bp, Glycine max
cactcgggattagggacccctctaaagtctggaaccttaataagatccttggaaccactgagatccaaagctcttaaatgtggcagatactggaaaataccaaccagaatgaagagacagccactacccatattttttaaaagatcctgaacactcggcgggaatcaactgtgatcttaatatttattttcaactcatttcaaaaagtaaaattaaacagatacctctatgcctctccatagttatttgat

SEQ ID NO: 246053 - DNA, 343 bp, Glycine max
accactaagtgtaagaaatgcttatcatggaattgtgccaccttgttatactccactgctaaaaaaatctaccacataaagagtagtagcatgctgcaaccacaagaaaacttattcaaatgattttaaatgtacaggctcttaacttccaaagtaaataatacttaactttgtcagaatattttaacaaacgaaaatggaagaatttctcctatcaaggaatatctaatgccaaaaagcgaataacatgttcagaagtgaacaataacaaatgataaatagaaggcgagagagaatatcatttacacgtttcagaatttaattgttcacgcaaccttgtaca

SEQ ID NO: 246054 - DNA, 330 bp, Glycine max
acaaacaatcataagccatggccgaagttcatcatccctcagcgacaagacaaagcccaattagacatgattcatagcaacatatactaatcatgggcctatataaaactatttttaaaccttattcttcttgcgggatattacacactcttcatcgttttcgtaagaattgctcctctctttgattatctttatgaatctcgatcaatatgttattatagatcttcttgcttgcttaatctctttgtctaatatatggtttttcaaccttcaaactaaacacagtatgttaatgctctatcttgtgattatggatatcttataccttgc

SEQ ID NO: 246055 - DNA, 398 bp, Glycine max
acaagaaacacacacacacacacacactttttcctagtcgatcactcacatacatttccattctccccctttgttattgaatttatgcttttctgaaaaattaagttgattactcatgtgagttcttgatttaaaccctatttttctccccctttggcatcaacaaaaagccaaagtgcgtaacaaatttgaagcattcaaatataactaaacattcatacaacatccatggaagaatatcaaccaaatcatgaagtaaaaaccatgaagcaacaatcatgaatagattaactataaaatccacatagtcaaataacatacttatatatttgtcaaacataccatgcaaataaggaaatagtaaattgttcaaatatcatagtaatatagcgcaaata

SEQ ID NO: 246056 - DNA, 365 bp, Glycine max
tgtggtgtctgaggaattctgtgccttatgcattgtaccctaattcaacacaagacaggctttaaatatgctctgaatccgcgacgttgcgcttaacgcatgtaagtggattctggcttaacgcccgtcatgcgctgagcttggctgaagacacttgtttgcgcttatcgcactaatctcgcgcttaacgtgtgggcttgatgctgatgccctgccaaaatctccttcgcgcttagcatgctgaagttgcgatttgcattggatgcacgcttactccactaatgagctaagctcaactgttacctttaggcgactcatgacttatccctctttttatctaaaattcacctactcatcattaattc

SEQ ID NO: 246057 - DNA, 384 bp, Glycine max
gcgtatcaacatagcagctccatcacagaatgtgactctaaggaagatattacataccatgtatggctttatagcccgagtaaattcaaaatcttatcctcaatcctaataacgtaatctatctcttaaatgtgccaaaatcaaactttaacacaatatgcgtgtctctacttatatacacaagacataacaagttattttatgagctgcatcatgccacccattacacgacatatatataaagtgaatgctaatatgcatcctaactggcctgccttagcgtataacacatataaattggactaaaaaccagtcaatctataatttttcaacatcatgcaaagacatcatcgcattatcatatctcattacaaaataaaattc

SEQ ID NO: 246058 - DNA, 380 bp, Glycine max
gagaacgccttatttcgcaactggtggcaacaatcacgtcatgagagtggatgaagggaccccaatctgaaccctgatcatctatgaagcatgtctgggagatcatgatggggaatccgatgcggatccgcgtgatgacattgatgacaaaggcccaaagcctattaaagaacttgccaagttgcagctaagacccaaacatgtgcaatatagacagcttagcagagaccttattggtcatcagtacaaacacaactaatgtcctattcaggaaaacagacccgtgcgcataggaaccatctatcatgctgggcatccaccccaacatcatacgccacaaactggccatgtgtctccaggccagaccaatatcacaaaag

SEQ ID NO: 246059 - DNA, 439 bp, Glycine max
tctcttatcttggtttttaaatgttcccataatgcagcagtctcttcatcacacaccacagcgcttaagctctcaagctccgtgattgagtatggcaaatcagtcaatcttgtgcaacctctgcaattgagattttctaaactacgcaactctcccatgttctctggtaacttactaaggcttacgcagtcagagatgtctaggaagttcagtttactaagacttgtgattgattctggtaactcttctaatttagtacatgaagtaagccttagtgattccagatagaccaacttcccaattccttcaggaagtgcagaaagtttgtgacagtttgtgatacttaacttctttagggaaacaatatcagagagcccaattggcaatttcaccatatcacagtagtcaatgttcatctccttcagatttgtgaacactt

SEQ ID NO: 246060 - DNA, 334 bp, Glycine max
  unsure (1)..(334): unsure at all n locations
gaatcgaatgtgcacttgtaactccaaagtatcaaacctctcaccaacaaaggttagaagaccatcgtacctgtccaaaatcctttgaagaagagaggaatcctctccaccatgtaaaagtccttctacatcaatgggttgaacacacctcttcacccaagagccatcatgctcgttacaataaccaaaggatgcaatcacagtagcgcctattagataggatctcttgattggaacatatagttcagaatcaatanggatgttgaagtggtgaatgaacagagtcactatgtgtggatatgtcaatgaagcatttatcgcaatgcttagcatg

SEQ ID NO: 246061 - DNA, 422 bp, Glycine max
gtatccccttccaacggagatgggaggagatctccatgatcacattaacatgttcaatcagctagtaagttaattgctgaatgcagatgataaactctttgatgaggagcaagcgctgttgttgttggcctcactaccaaagtcgttcaaagctttggttcaaatgtttcttatgggaagatcaactctgaatttcgatgaggtgatcaccgctctcagagaatatgatgagaactaaaaatgtcgatgatgcacaccatgcaatagatatggtggagtctgagcgagggaggatacattcaaggagacatgatggaccaagaggaagatcaaaatcacaatcgcgtccgcacgaagatatgagtaacatacaatgctactattgtggggagactgtcatgtgcatcaaagttgaaccaatg

SEQ ID NO: 246062 - DNA, 273 bp, Glycine max
gagtttatgagcaactcaagattcaacagatgtgacatggaccattgctgctatggttacaaatatactaatagttatgttatccttgtcatgtatgttgatgacatgttgattgcacgatcttatatggcagaaattaacagagtgaagcagaagttggcaaaaaactttgaaatgaaggatcgtggtccatctaaacaaatccttggtatgagaactcttagaaacagatcagaaggaatttgaagttgtatcagacaaatatatacacaa

SEQ ID NO: 246063 - DNA, 334 bp, Glycine max
agaccctccttgttcgagtcgcacaagataacaacaataaaatcattctgtcacaatggaaatatgactatgtttctgcaaaaatctaaaaagacatgtcaatccataagatgatctatgtttgatcttacagagatacacattaataaaaagtgtttactaagaggcgataatgcgtggagaacataagaatgttgacatatattctacatattgcataaaattactttaggagggtaaacaatgataacataaaacatctaattatcaatatggttgattggtaaatcaatttgtttttttaaaaaagtaaaactaatgtaccatgccatat

SEQ ID NO: 246064 - DNA, 278 bp, Glycine max
aatcttaagcatggcaccgcacgacattctctaacagaaatactcgcacttcttttgtccccttttcgacatttattttattgattcttttaaggaattaaagatcaaaaaatatcacagcatattgttagatatatcttattactataattctactcttttttattattaatttcttaactaagatactgattaatacttatttcttattctaactttactttccgtctataattctcagacacaatcatttaaaagatttcaccattaactattaa

SEQ ID NO: 246065 - DNA, 382 bp, Glycine max
  unsure (1)..(382): unsure at all n locations
caaccacagncacgagacggaagactccggcgctcaatattcgggagatgaggaaattattatggattcttttgtttttcttattcaaccatgttgatttctactcttttcgaatatcttcaactcttctttaccatcagactattcatattctctgaagtccgctttctgtgcttttcttcgctccctcagcggcattagggcaaaatagaagactaacaaagccattctgaaaatgctaaagagactaatatgagaggaaactttttacatgaattaaaacaagaaacatttatattagtaagaactaaaaacatagttgaagtctaaattattttaccaacaaagaatagctcaagtggtaaagaatgagctcatatat

SEQ ID NO: 246066 - DNA, 280 bp, Glycine max
taagcgctctccgatagatacttacaccatcgaccgaaatcatgccatagtcaaataacatgaaaggacaatccaataatcaagtggatagggaaagaggcactcacaagactataggccttagacaaagggtctcctaatccaacaatgcttgcgaaccctaagacttgctaccaaggaaacaaaatgacaatcggttagacatgtatgcaacctttcacaataatggttaatacacaatatccaagaacatactaattatacctcaagctgttctctt

SEQ ID NO: 246067 - DNA, 393 bp, Glycine max
gctgttccaacattcgcaatatctaattctacttttaagttaagtaaaatgtaattgtcaatacgcgagattatttgttctgtttgatgcatgctgatgattatggagatggaaagttgacactcttcccttatctcatttattttgttgcaatcaattttgtcttgtatgttcaaagaacattattaaatcgattgctgcttcttctgctttcagagtctatcatttagaagggggttaaaagcttattactggaaaaataattcaccccttcttaagttattgaggtcgctggtccaacattcgcaatatctaattctactcttaagttaagtataatgtagttttcaatacgtgagattatctgctttgctgatgcaggctgatgataat

SEQ ID NO: 246068 - DNA, 367 bp, Glycine max
gaatataagacggactcaaggtcactatgaatgacaaatatcttgcgattaaggcagagtctccatgtcttcaaagcacgtactaaggcatacaacttcttatcataagttgaatagttaagggtaggaccacttaacttttcactaaaataagcaattggatggccttcttgcatcaacacagccccaatcccaacatttgaagcatcacactcaatttcaaaagatctttgaaagtttggcaacgcaagtatggcggcatcagttagcttctgcttaagaacattgaaagcttcttcttgtttctcttcccatttgaaaccaacatctctctcgagcacttcattgagaggtgctgcgcatgtgc

SEQ ID NO: 246069 - DNA, 385 bp, Glycine max
aatcaaaagaaataaaaatatgcttttccttcttccattgaacagttttaacataaataaactgaggggtgatacttggtgcacccagcacccatggtgaaatggtaaaattgcccttcaccctaatattataaaactcctatttttctgtccgtacagagccatgcttctcctcctactccgcttcatcttcctcttcctcttcctctgacatctttgactcatcctctttcgcttccttaggtggagcttggaggatgatcctgtacctctcctggagctcattgggtgacctctatctctgacatcattaggcggtgttcctcttcgtctttccgtgcgcacctcttcgtccacatcaggagtccatggatgagaaatggct

SEQ ID NO: 246070 - DNA, 388 bp, Glycine max
ctctgccctggaggcaagtgccataatcatatcacgttcccattgatgaaagtatgttatggtcaacggtggcgaaacacgaacaatggcgggattctctccgggatgaacaaaatagggattggcacggtcgactaggtgatcagaaagtgaatgctgattgttaacagtcctggttgataaacaataataataccagatggattaaacaatggaaactaaatcttccatatagataagcggaataatgatgaacgaatatagcttcgtgtacaaggatgataccattgaaaaaactctcacagatattggaggagaaactcagtttctgaaatgatcttctctacatcaaactgagtgttacaagacttatttatactccaaccta

SEQ ID NO: 246071 - DNA, 417 bp, Glycine max
  unsure (1)..(417): unsure at all n locations
cagcggaggcactntccttccaggagatagtcaaaagctttgttgatgtcctcatgcgttatgaagccgtccaagtcaagcttctgtgacacaaatgcacggcaatatataatatagctaatggttgctactttctacaaagtaatatattattgattaatgatagatatacattcatttattttaaacactctaatcaatatctctcatttatctctatccttactctttgtctatcacattatcacattataaacaacttattatacttataatttctttttccttttttcaactctatctctaagtgtaagataacattggggtgttcataaaataattttctatatcaatatcttttgttttgctactaacacttttttaaacagggcaccattctcaatcactggtaatatt

SEQ ID NO: 246072 - DNA, 287 bp, Glycine max
acggactcatcaactcacttcattcacaatattatcattctcttctcctcttctttatggattctcacttttatatctaagactatacccactcacacatgtatctacgtgtttaatacgtaaacgtgcgaccagctatatgattaaatgccctctatctaaatccattattaagaataacttatcacggtacaccactctcgcctaacaagcgcacataaaatcagacctatgttcatactagaatatcaatcagctatcaatttggtgaacccaactattcatgt

SEQ ID NO: 246073 - DNA, 317 bp, Glycine max
agccaaattgatggttgttaatgggtgctaatggccactaatgaattataacaaccaatagtgagtggtaatggctactaaatgcattcttgatggtagaatgcctatatatagcacatgtatttggtccctgaactcatctctttgaattcattctgatacaccatctagagagagcttgaaagaaccaaaacaagacaactcttcatggcaatggttggaggtatgatttaatttttattttccgcattttgttaatgacatgtgtttcttatggtatgaagggtctggtctcttaaacataagattagaaatct

SEQ ID NO: 246074 - DNA, 415 bp, Glycine max
  unsure (1)..(415): unsure at all n locations
ttagtagcacattcactcttcatcaatcaacatatttagtctcaaatgatcaaatgagtactaatggacaaatgagttggagggactgatcatatggatttgttaaatctaaattacatgaggtcaattaagcagtgaacttttgttctcttatcatcaaagtatttatgtttcaaatgcgacaaattaagaaaaaaaactcactagtatgaaacaagacagtatgttaccaaaacatatatataattaagttcagaatactagtncctgcttataattaatcacgtcaccaacccacatagcctctttatattgctattgcacatatgaagcttgggtgaccactgcaagtgtagttttgtcactgggagacaacatatgcactcacaacattgttttgtctcaagaagataca

SEQ ID NO: 246075 - DNA, 437 bp, Glycine max
  unsure (1)..(437): unsure at all n locations
accgcacagcgtggaagcaccctgataacatgaanattgaagttaaataaagcagcacataatggttacatctcttgccaatatgaagttatgttatttgatgataagttgcatccctaaaaatgtaaatttccactaatgttacatttactcttgctatagcaatctaaaaaggtttgctgcatgcttcatgtctctttccacaacacaacagatgtaactgacctcatatctctgcacctggtactcttcgtatgtagtcacatactgtgaataagtattagtcaaccccgcaataacaacatgaatgttgctaccaaagcctatgctaccacttagcactgtcttcacagcgtcacgaagacgcctcccagccattgtngtaaattctgtcagaagtaaaacaattacaggagcatgaagcaccaaaaaataca

SEQ ID NO: 246076 - DNA, 423 bp, Glycine max
taaagctcattatccctccccaatgatgtattctacgaggatagaacttcagtcctctctgacaaactcaatgcgtgttgtcaaccaaattacacttattgggtaacttgacattttcaaaagtctaataatttaacagaaaaatatagttaaaaccttactttctaataaggcttgatgaataagattgtaatcatacttctaagtaagataatgagtcaaatccaaatctatagacttaatgttacttttagtccattatgtattaatggtttttatttcggtacattaagttctaacattctcattttggtcctttatgtgttcaaacagtttcgcgttagtccttcattaccttaactttaacatcgctaatgtgttgacatttaaaatattaaatgtatatagtgcacgtaaaatatc

SEQ ID NO: 246077 - DNA, 245 bp, Glycine max
aacgggcaagcgtacctacacctgaacaacccacaaacggacaaggggaagcgcacagacaacggcaccataccactgggctacgacacgaccactaacgggtgtgtgacactgatacatgggaaccattgccggtaccccttagaatcagatgcagggacgccggaactcatcatgatggccaacactaggaaacttatctatgaagaaataaaatccccgccaatgctttaaaaaactaaaca

SEQ ID NO: 246078 - DNA, 277 bp, Glycine max
  unsure (1)..(277): unsure at all n locations
aacagcagtgaacactgctacaccccacaatgggtnaggggagccctttaccttgagcatcgatgtaacatcctagaaattcctacccggagtttacggaaacgacgtatttcgaatgattatatatatatataagtattatccaatgcacacgcctatatgttcttggtagaagtaggaatagtgggggcaagatacgcgagttaggctaattaagggagagacatccataactgggaggctatgggttaaatcctaattaaatagctaaaaatca

SEQ ID NO: 246079 - DNA, 414 bp, Glycine max
agccatggaagaggtctccatagaggccattgcctccctcgcctagtattatgaccagccgttgaggtgcttcacctttggggacttccaattatcacccatggtggaagaatttgaagagatcctatgatgccttctagggggaaggaaaccttacctcttctcaggattttatctctctttagctagaatttataagatagtccaaatcctggcgcaggaattagaccacagaaagcaagtcgaaaatggggtggttgaagtaccgagaaaatgtttggaggcaaaagcaagaatcttggcaggtaaaggcgaatgggccccgttcatagacatcctcacacttttgatcttcggaggagtcctctttccaaatgtggatggggtggtggacctagcagcgatcaacacttt

SEQ ID NO: 246080 - DNA, 324 bp, Glycine max
ctttgatattcctactgagccttgtatccctttccttgttttgaatctcactaccagccttaagtgataaaccatgatatcaccatatccttaaggaattttggagctttggaattgtcttgggaataagtgtggggggggttcttgattcattggataacttgttttgttggctatactccatgatgtattttgggccatacttgattgtcataccctaatttcctccggtgattattacttgattacatgcaatctttggttagccgctttgagatactagcgttcttttctgacaataaatgaagtctccagacgtctcat

SEQ ID NO: 246081 - DNA, 232 bp, Glycine max
  unsure (1)..(232): unsure at all n locations
agccnncgagatatatgcgcccgactcggacatccgcgtgagaggttatgaccattttcatatggccagagcttccgacgctgatgtgcgagcctgtcgctttattatgcgccgggctcggacctgagcgtgagaagctctgaccattttaatatggtcagagcttctcgcgctgattttcgagcctatctatttgtgatgcgccacactcagacatgcgcgtgagaaggtc

SEQ ID NO: 246082 - DNA, 403 bp, Glycine max
  unsure (1)..(403): unsure at all n locations
tctngaataggggcacgaagcggacacgctgcgtgccattttttcacactgccatgcataagtgtcacgtacccttttgcttatatnttgtgaatattgtcatactgtacattcccgtgttgcgccattcgcatatgcatcacacacggattctgttttggtcccctctctttgtcaaaccaacggagggtccgtgccaccttcttaaatacatacgtcgggcactttgctaccgcaagatgttgtatctaagaaggagacaatttcccgggctcccgtattcataaattgcatctatgtcatatgcatttctntatgcattcatccatttccacccatgatagaatgttggagtttgattcgcgccgattttctgtcactntagtaaaacatgggatcaagt

SEQ ID NO: 246083 - DNA, 291 bp, Glycine max
ggagaccatacaagtttcctaacgatatctaattatgtgggccattaagactatcatatgctgactatagccgagaaacccatgaatctcctccggggcggagtaagtgtctgccatcgccttggacttggctaacaatcggggaagttcttgactcccgttcaatgtaagagcaaaccgatccattcacatggctgcctcatggtgtatagaatcgatcacccttcctctagcctcgtttttcgcatatacttgtgcatactcatccgcgatactatactcgtgtgccgt

SEQ ID NO: 246084 - DNA, 287 bp, Glycine max
acaaaccaagcgctgcaaatcaacgcggaaccccacaaaagggatggcaaatgggctcaagacgaatcattgaattggctgcctgaatccaaatcggttccatttttgtacaaaaagaaggacaagaaacctagacggagagaacagagcagtctgaaaaacgtccttcctcaaagaaagtctgatagtggcctcttacttaacaaggactaggcggctgtcaagaaaccttttacccgaactgaaggtatttcttacgaaaagcaccctcaaaaccaagggcccca

SEQ ID NO: 246085 - DNA, 391 bp, Glycine max
  unsure (1)..(391): unsure at all n locations
cactggttcattcaagcagagctacgcccagttctcctctacataattgaaagggtttcactaatcaaaattttgattacaaataagtattttatcctgcccctcctcactatacaagtattctctaagccactcttagcacacccttggactcccccagaatttaagaattcccaagtattgtntaacactaagtcacacttggattttagaaacaaaagtttgaataaatacaatgattcaataatactcaaagagtggataatcagtcaagcccaaatataaatagctcttgttaacaaaggatgaaaagataagtgtaagtgtgtgtccctaattagcggagtttgcttcaagaactatggctgtttcacttaaaatattctacctt

SEQ ID NO: 246086 - DNA, 350 bp, Glycine max
  unsure (1)..(350): unsure at all n locations
tcgccagcgagcaagatgtttcttttatattcagccttctggagaatctttggaggcccaatgggcctggtgctatttgacccccattttactaaatatacccnctgcctttttttggtgattcttttctcataaagttacggaaacttacgaacttcgtaacgatacttgttttctttccgtaatgatacggaaccttgcggattacataatcatgcctcttttgacttacggaatgttacggaacctcactaattgtgcaacgatgcttccttttgatttccggcgcgtcacggaaccttacgaattgtgcataatattttcttttgatttctggcacgtcacggaat

SEQ ID NO: 246087 - DNA, 261 bp, Glycine max
tctcggcatcctcatccctcttgttataacatgagtatcttctgttcctctataattcttttattgaaggatgcttggagatttctttaaccactaacccttagttctaatgtaattatatgtggtgaaggtacttggagatctacattttgaacaacatacttgggagtaaatatggtgcttgattcaccttgaaaacctctgttagatgtggccaatttcacttttctatatgtgacagaggtcttgatacagctttta

SEQ ID NO: 246088 - DNA, 193 bp, Glycine max
agccacacaaccaagcaagctgggccgaaggccccacagccagcacgaatgcgaacagacgctgcgagaacacacccagaagcccccagggactctacaccaacaaccgatcaactcaaaaccgggggaagaaggggacggatggaacaccaaccccccctcagggaggaaccaccacccaagacagccgaga

SEQ ID NO: 246089 - DNA, 248 bp, Glycine max
atacaaacaagctccctgcttacccagataatgtacctgaacttccatagggcatttgtgaattacatcaccacgtgtccttggctatatttacattaatgcatactcaaagctctatggcgcaccaaataattgcacatgcgcacatcttggtatatctaacaactatacatacacaaacttcatgatgaatcttgaccatctacactatgaggtgctaccttccatgctcttttcactatttttct

SEQ ID NO: 246090 - DNA, 277 bp, Glycine max
aaggagccaaacccaatcgtccttattaagaactagctcttttcttcctctattgcctttagttgaatacacctttgttcggctctctatttggtgtcttagctctctcatgaaacttcttcacaaactctgacctaaattccccttctttatgtataaaagaactgcccactgggaggggaatgacgtcaaacggtgataggggattaaactcatacacgaccttcaaaggcgactacatgaggaatatactcattccaagacttatggttgcctt

SEQ ID NO: 246091 - DNA, 405 bp, Glycine max
cttgttggatgaaccctcctctcacctattatcctttgtcttccgctgcatctccatggtggaaaatcaccattaaaggaccccattgaagctcaaagatccaacctccattgaagccccacaagcaagcttccatcatcttcattgctactatcatcaataatagtaacaaacttcttttccaacatagcaagatcatgatccaaaacactaaggtgaaattggacttgctcatttctgtcagagaagttaagcccattaaaatcggcacagataatacataagaatccaatgaattcagaacatgcattacataataaaattcacataagtgtgttgagacataaaatacatgtcatacatatgattcatgcaaataacggtcaatgttattgatgttcttct

SEQ ID NO: 246092 - DNA, 305 bp, Glycine max
aaacgggagctgctaacaccacaaccaattacgggcagagaacgttctcaaagcatgagaaagagaaagctccactacattatccgtactttctgcacatctatgaaaagaaaggagtatgtgacctttgttctttgttggttatggctatatatatagaaactcattttgctacttcgaaacagctatggtgaagctagtgaataaaaatatttctccccctctaaataatctaactcgaaatgattttttctctttaatttgtacttttaaagtgcgtgtggaaaattcttgctagcaattgg

SEQ ID NO: 246093 - DNA, 129 bp, Glycine max
actaaccaactaacttccactaatatatacaattactactcagaaggaagggatgggccttgattaggcccatataatcaacctaattaaactaattacacatagaaaaaccctaattccagtccaatt

SEQ ID NO: 246094 - DNA, 395 bp, Glycine max
atgtatgcatacatgactttgatgatgtcaaaagaagattctaacaacgcttatttttcttccagattaatgcaagattttatcatcaaacaaagccttgattcaagatttcttcaagatcaagccttgcctcacaatgaaaggcttcaagtcattcaaggcacatgtaatcgattaccaatacatgtaatcgatttccaatggtttgaaagcgtgtaatccattacacatcgtatgtaatcgattaccatagactctgaacgttgggaattcaaatttaaatgaacggtacaacctttcaaaagaacaactatgaatcgattcacttatcttgtctcgatttccgagagattttcaggatatcgtcacagtccatcttatatttggatttgaat

SEQ ID NO: 246095 - DNA, 379 bp, Glycine max
  unsure (1)..(379): unsure at all n locations
ctcggatgtttgattgattcccgttatatatcgagaccgtcgaaactgaatgttgaagctctaagccaattcatacgactataacgttttactcggatgtctgattgagtcccgtcatatatcgagacgctcgatattgaatgttgaagctcccagcccattcaaacgacaataactttctactcggatgtctgattgagtcccatcatatatcgagacgctcganattgaatgttgaagctccgagccaatccaaacgacaatatacttttactcggatgtctgattgagtcccgtaatatatcgagacgctcgaaattgattgttgaacctctgagccaattcaaacgacagtaactatttattctgatgtctgata

SEQ ID NO: 246096 - DNA, 432 bp, Glycine max
  unsure (1)..(432): unsure at all n locations
caaggccgaactccntacatatagggacctagatgagctagtccaagcttttataagagtggagcagcaacttaaaagaaggccttcttgaaaatctgataatgaatcataacaataccaactctgcaacatactcgtacaatgattcatcaagtgtcggtcgtgtaagtctgataaccacattattgatctaacttcagctaattaaatcaaatggaaaaaagggactgaagcaattaagcccaaacctatagtaattgtaaagcaatatactgactaacaacaacacctattaggaggcttcaagtgatgcaatcntaccccgcaagggcattggatataagactccaagaagattgggcacagatgcacagaaggcttacggttccatgagcctatgatagattcggttcatggctactatgacccgct

SEQ ID NO: 246097 - DNA, 321 bp, Glycine max
  unsure (1)..(321): unsure at all n locations
cgacgacatctgtcacaccatctaatgcggatatcaaacgcgtggaatctgctatgggcacacaacgaaagcaccaacgtcatcaactactgatagaggaagaattgtcgaatgagggacatactacgaacttgagataaagaagggaactagcctatattatgtcctctcttctattccatactatcacagatatntaatagccattagtgcttgctatcaaaccacgatccataaactaacatcaccttgtgcgcctaatagagcactataaccgaaattgccaatatgccatgcactacttacaatactaacacaatt

SEQ ID NO: 246098 - DNA, 430 bp, Glycine max
  unsure (1)..(430): unsure at all n locations
ngcttaacaatgacagatatgtttctcgggttggccacatcgagtttcatgtattttcattctcgttttcatatactttccgtaccgccttttgacgtgcttaagccatttatttaaggtcattctcgcttaatctaataatgaaataaatttccaccattcattttaattgtagtattcgttaatttctgttaaaatgaatttcgaccgttcggttgggcctgaaccacgttggaaatcaaaaaagagcgtcaaatcatattattataatcaaaaaaatatcttttcctaaatgaagcacatattaatcggaccgttctgtcgggatcctcatctttattgattgactatttctaatgcgaaactaagctgatatcattcgctaagtaagctctccaccaataatacttgtaagggattcgaaagtcat

SEQ ID NO: 246099 - DNA, 391 bp, Glycine max
ctaagctttcctatggccgcctccgacttactcaccggcatccttgaagaacaagccaagccccttctttgagggaactcccaccttatgaaacattccgggcacagacggggaatgagatcccttcttggcccctgctcccctaaagatctttccgcatgaactcccctccgaacattttcgcatccctggttaccccaccgtaaagatccgttcttccagataattggaagatgagcgctgacaaggttgaagctcctagccttgcattcccttcttgatttctattgtgtttcgccactctttccccaattcaagtcaacttatatgtcaaggcgctagccaaggctctccgtttgctcagttggcgatctccactaaatttgccttt

SEQ ID NO: 246100 - DNA, 414 bp, Glycine max
  unsure (1)..(414): unsure at all n locations
ggcaaagcatgacgccattatcacgtcctttataagctaaaggaaatttatttaaaaataattatgcatggacatcataattcatatactatcctagtcttcctttatacttttttcactctatttttcttttttttattaagttatttttaatcacatggtatcatctattacatctatctatatctatataaatactatttagtatccatacacaattgcccatgttaaaatcattccagagcatctcctgtcccgagaagagggagttgaactgagtttagatccaaagcatctgatattcatccaccatcaaacaaaacccgaatcagatgtagttaataacccttggccanaagacaaatattgtgatcacgcataatctatcacacgatcctacgcgtgatgaataat

SEQ ID NO: 246101 - DNA, 265 bp, Glycine max
cgcacatcccgaaagtgtgcatagacccaccatcccctgtcgcacaccttcaactgatctaacgtactcccacgtagcccatatcctcgttcctctcaacaccgggtcaccatcaatcctcccaagctttcccaacatccaagtaatacaacatgcaaacagcacagattataatagccaagcataacatggcaaaggcataaaactatgcccagaacaccaaccaaaaatcacagcttttctcacttaaagaccccaggaacaa

SEQ ID NO: 246102 - DNA, 312 bp, Glycine max
atattagagatttccctcacttcggaacaagtttatcttgctacacctctttatcaaaaactatcacacatattactaaacaggtgaaattgcagactgtgatattaaaaaaataatatatttttacaaaggctcgttttagcacttatgctattcacaaccctttttctaaataatagcacatttaattgtctgacttgagcttaaatgtgagaagtaagaacttaaccgaccattcaaattctaaaattcaaaatgctttatattctctatctctgatgataacaattatcgcaccatgttcgaaaaatg

SEQ ID NO: 246103 - DNA, 345 bp, Glycine max
gaccaacgtctcttgggttcattgcaagaagcacattttgctttttggttgatcactggacacaaaagaccaacgtcttttgggttcattacaagaagtgggtataacttcttggttgctatcactggacacaaaggaccaatgttccttggtgctcattgcacaaagtacgaataacttcttggttgtaatcactgaacacaaaagacggaactcctttgtggtccatttcttgtaaaggatcttacaaggattgtggaaattccatacgggttgtttgggacggacttaggcaccggtgtggtccaaccaatataatccgatttgcttctctcttccttaatc

SEQ ID NO: 246104 - DNA, 299 bp, Glycine max
atcccgtgagtaatgacgcgtaaagacaagttgatacacattggtattcctaataggagcctgacgctaaaaggatatcctctattgaacaatgctcatgtgaactatggcgtctcctgaaatgctaaaccccgattcctcatgaaagtctagcctaatcctgactacgcatcatccgcaaattcctcttgttggactaacccgaccaaaaccttatcgagacaaacattacagcaacttggtaccataccacaattcctcgagataatacgataaactagctccagtctatcaacttc

SEQ ID NO: 246105 - DNA, 244 bp, Glycine max
  unsure (1)..(244): unsure at all n locations
ctgcctcccatatagctcgaccgagtgtgagaatgtttatccttacnctcggaagcaaaataagaatagaggggaaatttccgatcaaagaaaaagagaaagaaaatctccaatgaaagctaaacagacatgaaggaaaattccccaatccaagagtgggagaaagcacaatacagacaagaacgaacattccccaatccaagagtgggagaaagcccaaagacaagaaaggaaaattcccaat

SEQ ID NO: 246106 - DNA, 224 bp, Glycine max
taccaccaaacggcgaacctcataccccaaataacaaacgaagtaaagaaagtggaacccaagatgacggaaacaacaactaatcgccaggcgtaacaaaaagaagtgagaaaacggacccgcaaaagaggaaacatatcctcaaactggatgatagacattacctgcaccctggcaatcacagcaccgagcataactctctgtgcaaagcaaaagacctacac

SEQ ID NO: 246107 - DNA, 304 bp, Glycine max
gtttgctatcaaaggagaagatggtagatgactaccctatattaatcaccctgatcaactctgttaaagatgtttacttggcaagaaatttacaatgattcttccaaacgagtcaaactcaagagctaagaagccacccgagctaatacatgttaacgtttgtgggccaatcaagccccaagctcactacgtaaaaataaataattcctcttcttcattgattattattcaagataaacatgggtctatttcttaaagcaaaaatataagtctttttcaccttcaagaagttcatagctgcagt

SEQ ID NO: 246108 - DNA, 410 bp, Glycine max
cacgactactcctttaagctttaaatttcatctaccaatgctcaaatgcgaaaaaaattgtgattaaaaaacatcatctcattttggttggaattgaacgataaaataaattatattaatgttaatcgtttgaattgatactcgacaatttgatgaatctcatgctatattattctaaaattttaattataaatatatatgcattattatatctttccttttaattcgaattattccaaaaattaagtcatttacctacatcaattttgttgttaattctattactggcaattctattttaaataaattacctcaaaaataactgttcattgaaaaattagtgaaaaatgtcataaaaatgacaattattataataaatacatatccatagagaaatatacttcatcaat

SEQ ID NO: 246109 - DNA, 445 bp, Glycine max
  unsure (1)..(445): unsure at all n locations
tgtttggatgttttacatactatcatgtaagtgaaggtatgatggagtccaaagccaagaagggattctttatgggatatggagatggagtcaaaggattataagtctggtcttcatctgaaagaaaggccattctgagtagagatgtcatctctgacaaactctctatgttgcattcaaaattcactgaagatttgggcaaggctaacgatgtcattaagcaggtggattttgatagctctacaataaaaaaacataagccattatgatcctcaaatgccccttcaacatctaaacacaacaccagctaaggggattgactggacgagtcaaaaccattcaaagaagcttaaaaccacaacacccacaaagacatataggcaaatanagctcttgaagatatgattttagataatgcctatgcgctattgtagcaaagacatga

SEQ ID NO: 246110 - DNA, 322 bp, Glycine max
  unsure (1)..(322): unsure at all n locations
caagctgcctcatccgcacaacagatcactgttgccggagctctctcacacacatcacactgaatattcatgttaactcttctcttccttctacaacactaaaaactgggtcttcttttagctaacaactcttttcactggaaatgttaacgaaccctttaccagacacggtagttttgtacagccaaaaatgaagaacgatgtggcgtacaaagattatgacatggcgtggagatgagaacaaaaaaagacgaagaacatagttaacattcgtagtacaatacacagctggtatctattgtgggaagacactgntgaacac

SEQ ID NO: 246111 - DNA, 364 bp, Glycine max
aattttttctatagcacaaccctcgagtcaccttctccaaggaataatataacactataaattctataaatcgtacaaggcatatatgcttccatgaaaagcatgccaaagccattaataatccgtaacactacgaaaagaatgttcccaaatttgactgaaaaagaacacagtcacatcaacattggattctagacacacgcaaaccatttccaactcatgtgctaggaatttcacccataacaaattcgtgatattaatgccaaaacatgcgaaacaaatataatgggtgttctaaatccgatggatgaaaacattacgaagtgaagatcagcgaatcaggcattgaattctcgagatcatg

SEQ ID NO: 246112 - DNA, 401 bp, Glycine max
  unsure (1)..(401): unsure at all n locations
gcttccancaacaaactacatcggctcttcaaaataaaaaactacaaccaaacttattttgtcatcttggataagcacctcgatntgcgaagcagtacaataaggagacacttatgatagcatgctggagttgtcagcataaactacctagaagatcactaaatacatcaaatcgcatcccaaatagtttcattcagccacgagtgcttaactaactagccactagacatcaaagaatcttcctaaagaagatttaccaatcaagctagatttcagtcactagggtgagagttaacctcagatctttaaatactggcgtgaactcacataaataaatattgcctccggtaaagctcagaacaaaaggttgatatactaatactaactaactaatactaata

SEQ ID NO: 246113 - DNA, 356 bp, Glycine max
cctcaagagcacttgaaattctattcttttgacttctgctataaaaaaattgcaaagatattaatttcttcacttattcattaaaaaccatagtagaacaataaaattataatcattattattcaaaattgattatcaatctaactcaaatttcacatttatcaatataatatgtattattaacactaaaacatattttattatacttcaattattttgaaatactcacttcagtcttatctaatgataatgacatttacatatgcatttcaaattgtactctgagttaaaataaccctacattcaccgaaaaactctctagttatgcatttaaatacatgaatataatgagatat

SEQ ID NO: 246114 - DNA, 349 bp, Glycine max
ccacaaatgcgaaatgatgctccgaaaccttggatgcggaacgaccatgccctcatgatttccagttgggaaactggcgagtggaggaacgccccggcatttacgcaacgagcataatgtaaacctttacggttctaaaagctctatagccgggcctaggctttagagcgtctcctttcgcaaggcttcgcgtctttcgttgatgaatttataatacaaggatctttcttcatctgttcctggtctctacccattctcattcattggcatgcttacttcttcttctgaaacggcagatccgatgacgagtcccccgaaggtactaatacccgggacccgcctatcgatt

SEQ ID NO: 246115 - DNA, 200 bp, Glycine max
gtttttttgcacccgaaaacgattggcctgattaacacgactttatcttaattcagcgttcgattattcgggaacatcgacatccagaaaagtttatcgtggaattgctggagctttgtttaattcgagcgctcgattttacagactcatccgcatccgacaaaagttttgtcttcaaatttccaagcttcgtcatcact

SEQ ID NO: 246116 - DNA, 321 bp, Glycine max
actaatgagaaaataatgacgggacctgaagaaaagaaaaaagcaaaaatgaatttgatatttggagttaaagaaatgagacctaactactgtgaggacattacattacagtaagtgcatgtctgtcaacaatccacaataagaaagaccaaataataatgaagatatcatgaagaggaatgcagacaattcaaaattatatgttcatctcaaccactatgggaaacaaaaaaacatcagaagaatacccatagatgatgagcagtcaagaaaagcaaagcacaacatcagattctccatcgtagaaagaaattacataat

SEQ ID NO: 246117 - DNA, 322 bp, Glycine max
  unsure (1)..(322): unsure at all n locations
ccactcatggtngcagaaatgatgtggttatagttctcaactgcaacaaacaataataaacaaatgataaattgaactcaccactcaatgagaataaaatataatctaacacaactcatattccatttagaaaaggggaccaacaaccacaatgatngagtaaattcaagtttttcaacaaccatgaccaccagctatatgaccactaaaactcactagaatcctcccaaaatataatgatatcggtaaatatattcttgtccttgcaactatgctgcgtttgtcttaatccttgaaatcttctttttaactatttatccca

SEQ ID NO: 246118 - DNA, 408 bp, Glycine max
gcaggatgtggtccagtagcggacagttatgagcatggaggagtttgttcaaaaggtggtttggccagaagtccaaccttctcttttaggagggggtgaggcctctgcaacccatgagcctcagtcggaccaagaggatgacattctagaggcctcagagcctattccgcctgagcctttcatctttgaggatccagtcattgcataagaggatgcttcagcagttaccccacaggtgactccgcagcctccaccagagcctaccacttcagtgctggacttgtcatctcctcagcttgagccatctgcaccaatgccagacctgcctctttctcaggattcaccatcaggcactcctcgcactgatctgaatgagcatgccatggaccttgcacaggatcattgaca

SEQ ID NO: 246119 - DNA, 349 bp, Glycine max
ggtgccgaacccaaaggctccatattacacaaacaaaacatgctgggctatacatgagcaccaaaactgcatgaagtatggaagaccagactctgagttcatgaagtggaagtggaagccaaacggatgtgacctacctgtgttcaacccctctcaattcctagagattatgaggggaaaatccatggcatttgttggtgactcagttggcagaaatcagatgcagctcatgatttgccttttatcaagggtaagtctctcttctgcctaattacttacatgacaatcagatgcttacatggttattaaggtcccagttaaattgtaacctttacgagctcatctattt

SEQ ID NO: 246120 - DNA, 374 bp, Glycine max
  unsure (1)..(374): unsure at all n locations
atactctgctagcaaggaataaatagcggttgttgttgcagtttcatgggacggtccttgagattactcacaatacgggtgaatgtggtggatgtggccacaattacagtcactgtcactcaagaaacctggactttgtggccaaaatcacagtcacagaccatnttttaaaatcttgctgctatcctatttggtatcaatcacttaagattgcttaaggagaaagaaatttcactcttcacattatttgatcaacagaggtaaaaataatgatggactccttcaaagattatctaccaagagtacgaaagggtcatgatatcgctacgttctatttcattctttcatgttacatgttaactcgaaattattat

SEQ ID NO: 246121 - DNA, 355 bp, Glycine max
  unsure (1)..(355): unsure at all n locations
ctggtacattataagtcataactcatgagtctggctttgcctagagcacatgtagaccccattaacaacagcagaaaactgatatttgcttttnctaattcaggccactcattaacaactactactaaaattaggtctacaaggatatacacaaccttgcctccttttgaatggaagacaccatatataaacagccaaaataagaaatggaagccactgaatacaaaatgatattagactagtctggatggtgctaaacaaatngtctacgctaaattggatagaaatataaaataatatgggactatattatntatganaacaaccataaattaaatatgtgaatgtacttact

SEQ ID NO: 246122 - DNA, 363 bp, Glycine max
gtatatcattaagctttatcacgtgttagaaagagacagagaagcgattgtactcgatccatcttctgccccaactattgcaagctagttacttccatacttgaccttgacctgatgaaactttccttaaaacatgtacttgtgtcaaaccccataatccaaggaatagcaattttgagcggcaatcctccgacaacatatcatatagatgaatgattgggcatacttatgctatgcatgacacatgtaattatgagatagacatgagaagcccaaagaaccatcatttcctagttaacgatgcattatgtaccatattcacatgatatttaatcatcattcgtttcaaaaaaagagaaatga

SEQ ID NO: 246123 - DNA, 350 bp, Glycine max
tctgctacccaatttcgttcgggaccttgcttgatacatgcgacattcttgggcctgtgaaggcttggcacccatcatagcatttataagttccagaatcccaaaaccaaataaaatgttatcacattcgaagtttccggaccatctgaataaatggagcatcgtgcatattaatgaagtccgtacattccgtagtaaaaaggggatgatattaatccgcaagttcgaacattccgaagaaaaaattatgtacaaatcgtaattcctaacttacgaaaagaatccaaaaatgcataggggggtcttttaaaaggtgtgcatttcaccagccactggcctcagagatctca

SEQ ID NO: 246124 - DNA, 375 bp, Glycine max
  unsure (1)..(375): unsure at all n locations
aatgctttcgtcatctgatcaacaggcaactcttactttttattattatttgtttgagtaaactacatagacctcccgagttttggacatattacacacactcaataccctttccctttttaaccctacaaaaatctccttaattcttttgggtttgttacacctacacnccctggttccaaacggtgtaaaaaatcgttaagttaaacatggaaggtgattggcacatgggctataatgattttttcttccaaaaaagcgcttatcatctttcttaaaactggacaggctgtgatggaaaattcaccagcagcatgtcatcacaaatgaataatcccactttatgctacttaattatggaaattaacaaaaaac

SEQ ID NO: 246125 - DNA, 268 bp, Glycine max
  unsure (1)..(268): unsure at all n locations
ctgcattttnttaaatttctcaagggtaccaggttgaccctggccttccgtggaagaattttgtacagctggtgccaggttattatctttttcttaggggatttgaccattttcctatcaagtatgatgaattactactggcaaaaaaaaatatagtttgtgactaatatttcatatcctaccagttctcacatttgatcttccttttatttctacccgtgttaaactgatttgttattgtcttgtatggattcagctggtcttgctg

SEQ ID NO: 246126 - DNA, 349 bp, Glycine max
  unsure (1)..(349): unsure at all n locations
caaaatataacgagagggataaggagtgtctgtacaaaacaatatggcttataggacatgacaaactaaagatttatacccattctgtgaggcaatggacaatggtgaatggaagatgaaaaatgctctggaagttaacaaatattaaacgcatgtgggagagatgagtggcaagcattatatataattggtggcgttattattatattattattaatataagggaaggtcaaaacgttcaagggagaaaaagtggagggcaccacttcgtcacaatagggtaatgattnttaacccatgaaagcgatctatatatctttatctatatatatatatctatatatactta

SEQ ID NO: 246127 - DNA, 385 bp, Glycine max
  unsure (1)..(385): unsure at all n locations
tattatttaatatattttcacaagacactttaataataaaataagttaaaaaaaattacactcgtatctaattataaatttaatgaaattatcacattttataataaatanttgctatccataacaattaaatacaatactaacagtttagaacacacaagaagactcgttggttgtaacagttatttaaaagttacactaacaatcatttctagttaattagttgataatgaaaattttggctgacaatacgtaaaaagttaattcctacaaatgattgcctattagggatgaataacgagcaaagaatcaagtgttgatctganggcagttcactttgacatgtgatcatggcgatgaagcagatcgcgggatcacagggagc

SEQ ID NO: 246128 - DNA, 429 bp, Glycine max
  unsure (1)..(429): unsure at all n locations
gctgctgcaacttcacattaanacgagtctttgttttttatgggactcaaccagacatccgagttaaaagttattgtcgtttgaatttgctcaaagcttcacattcaatttcgagcgtctcgatataatacgggactcaatcagacatccgagtaaaaagttatggtcgttcgaattgcctcggaggttcaacattcaatttcgagcgtctcaatatatttcgggactcaatcaaacatccgagtaaaaagatattgtcgtttcaattggctcagaggttcaacattcaaatttgagcgtcccgaatatnacgtcactgaatcggacatccgagtcaaaagttattgtctgtcgaatttgctcaaatcttaaacattcaatttcgagtgtctcgacatataacgggactcaatcaaacataccagaaaa

SEQ ID NO: 246129 - DNA, 283 bp, Glycine max
  unsure (1)..(283): unsure at all n locations
aatttccaatcaaaggaaaagaaattcccaatcaaagagtgggagaaagcaacaagaaaagaaagaaaattcccaatcaaagaatgggagaaagaaaaaaagagaagttaaaaagaagaaagctcctggtcaaagaaaccaaaagaaatgtgccgagaggtccttggactagacgatatctgaacaatacagaattgtcaccaaatgaacaaaagaaagaaaaggaaaccatgacctanaagtggtcttctccctttgattaccaaccaaaatcctgtgcgct

SEQ ID NO: 246130 - DNA, 360 bp, Glycine max
  unsure (1)..(360): unsure at all n locations
aatgccctgaaataaaaggcttaaaccctattctactagaatggccaaaatacaaggcccaaaagaaggaaaacctattctaatatttacaaagacaagtggacccaaccttggtccatgggttcagaaatctaccctgaggttcatgagaaccctagggccttcttcagcaactctggcccaatctttttggaatcttctatccaatgcccttggggggtaggattgcatcaattaataaaatcactgacttgacataattacaaccattagtagtacattatgattagagacttttggtattctatgaccaactatatgtatctcaaatnttatgaatgaaagggagaatattggata

SEQ ID NO: 246131 - DNA, 362 bp, Glycine max
  unsure (1)..(362): unsure at all n locations
tttttaccgagggatctctttagcatctcattgggtgcattacaaggtgatgcangtataaattctgattttagaatcattcgataaacatgtgaaaggcctgcattctgcgcttatgaacaaggaaaggatattctacttgctttgttggaaaatcccattttggtatcaagccttaaactctctgaaggctaactcagagaggaagatctcagtatctgttgagtctagtccacagagatcaanatgggtttatatatattccagagagaatatgctaccattaaccccaccctctgtgatgtaattttttaacctttctgtatgtcactaaactattatgtattacttcaaatgtaatc

SEQ ID NO: 246132 - DNA, 336 bp, Glycine max
ccgtctcacaaatttctagctttgctactgcgtttacatcatgataagttgcaattatgccgtctcaaatacgcttggttgttatagaaagtccatgctcaaatgcctcatttatagcattctgcatttttcgttaccaggcttccttggcatatagttaatcaacaaaacatttaaccatggcctgtactctatttgtggaataaactctaacaataactctattctactaagtctatttgcatgagaacttctacaataggcacatatcatacatcttgattatgaaaattcctctatattaacatgatcccttattaaggaatacatcttttc

SEQ ID NO: 246133 - DNA, 416 bp, Glycine max
  unsure (1)..(416): unsure at all n locations
gttgaaaaacataacaagacttcttgtgattggtgtaaagatacaatctctgcagatgagaatgcttcagaaacattaagaaagctagcagatgggcctaaaagaaatgttataacctgtcaaggatacgacatanacaggtattcattttacacaaaagcacaagatgacaaaagtacaatgcagaatagcggggtcaccctaagggctgaatctcaacactttgcaagtgtcaatgacgccaatccctgtgtagcttccatcccttactttgggttcattgatgagatttgggagcataactatgtgaaacttacggtatgtgttttcaaatgtaaatgngttgacagaaacactggtgtgcgcccgatgatatatgattacatggtagacctaagaaacttggtaccacatga

SEQ ID NO: 246134 - DNA, 151 bp, Glycine max
  unsure (1)..(151): unsure at all n locations
agaaccatcatgaatatggtcagaagcatgctatcatagaagccaataccatagagattctggcctgaagctgcanatnggacagtgcatgtgcttaacagaagtcctactttggcagtaaaagacatgacccctgaggaagcatgaagtg

SEQ ID NO: 246135 - DNA, 282 bp, Glycine max
atgtttacccttccaataattccaaaatttaatttccaaactttattatgatatatttttagggttaaaaaatattatcttatctttaagatgttgtttatgttgaaaatattatttttaaattaaagatatattttctcatttaaacttataatgttagctaggtctataaatataaagggttttcaaatgagaagagttatccaactcaaagaagggatcactgacggcgatatcgaaacactgtccaaagtactagtttatccccaaattttgcaatat

SEQ ID NO: 246136 - DNA, 349 bp, Glycine max
ataaaagatgaatatttataagtgatgtgaaatcataaacatgctctatgcctagatacaacctgataatcaatatcttttcttcaaatatgtatagcactataaagcatattaccactatcaattttggaactcacttataggctgtgagtgcttgaatacccaactcaatctcttcttttaggatcagtggggaatgacagctcataacatatccaagattccgtacctaactatcttggttacaaaccacaaatatataaaaagttgctattctaatcagccaataccatatgagagaatcaagcatattaatatcattaatctgcaatcacctatctatatgata

SEQ ID NO: 246137 - DNA, 339 bp, Glycine max
gagcatctcgatatattataagcctgaatcggaccattcgtgtgaaaggtatgaccatttgaatttcttcagagcttcttgtgttcaatttcgagcctctcgacatattattgtcccgaatcggacatccgtgtgaagagtgatgactatttgaatttcccgagagtttccgatgttcaaattcgagcgtatcgatatattataagcctgaatcgggcatccgtgtgaaaagttatgaccatctgaatttctgaagagcttccgttgttcaatttcgagcttctcgacatattatgcgcccgaatcggacatttgtgtgaagagttatgaccatttgaa

SEQ ID NO: 246138 - DNA, 81 bp, Glycine max
gcttccctgagaagaatcttttatatctttacctacctcacacacccctctactagctgtgctcacctcattgagatgata

SEQ ID NO: 246139 - DNA, 385 bp, Glycine max
  unsure (1)..(385): unsure at all n locations
aaaaccgaaaggaaagacatagggagtctcaaagctatccaaagcctaagcctatcccttatgggagactctccttctttaattatttctccctttcttttagtaacaagccccttctttcatccacattagtccctaaagtgtaaagtctctcatggttatgagaggctaaacctctctgttgggagcttggctggccaacaccctcttaatgtaactattcttattatctattaaatgcaatttatgtntctattgcttctnttttgctcttcatncttattggatgaattgatcatacatgcattagttntatgaaatatacattgngaaatgatatttctaaagaactgggaataacattaaacaatcattgtagggatat

SEQ ID NO: 246140 - DNA, 317 bp, Glycine max
ctttatatataaaggtaacgactatgtgcaatttaccctaagttttagcgctcacggtatgtacagcataaccacgtattaaaaaacatacactgacctcaggactatatttataatatatattaaaagaaagctactcttaataatacataacaattattaaaaaaacatacacttttgcatcaatacaaaacattgattcagattgattcatgacgcactcaaaatgtctacgtgaaagagacatattttctttacttatacaacgtagcatacaaaatcatgaattatgcagtataaaactgcgcctacttgcc

SEQ ID NO: 246141 - DNA, 313 bp, Glycine max
  unsure (1)..(313): unsure at all n locations
acaatttaaccaatttcctggtatactaaagnaagtactacacgatggtaaccaacattctggacatggctcacaaatctggacaaaaatttcaaacttcacttttaccaatggtcaactcacatcagagagggatttatgtattagtttcaatagctcacagtaggagctgtagcagttcttagatattttgtagccatactatggttcctccttcaactacattaattntattttggaaccatgagtatggacctaactcttgtattattaatacctctcgtacttctatcaatatatatctatgtttgct

SEQ ID NO: 246142 - DNA, 268 bp, Glycine max
  unsure (1)..(268): unsure at all n locations
accaccactttggactaaactctataaatagagatgttatcctttcattttcagagtagaataatatttgaggttaactccatcgagtgagtagagcataggctcctcttnttagctcttggattagaacatcctttgaatcttatcaaggttcccatacctttgtggtgattccacgcttggtttatcactctcctagagtgnggcgccttcttttacattccctgactttttcaatctttctaattcttatcattcttcaatcatc

SEQ ID NO: 246143 - DNA, 348 bp, Glycine max
  unsure (1)..(348): unsure at all n locations
ttagcgcatgaacagagatgcgcttagtgcgaggcttacgctttgtgaaaggactatnttttcaaaaaaaatgttttctaagttatttttctgtcccttttccaagaaattgaaacccttatgttaaacattcaaagataggctgatatagtcctatgtacagattatacagcaagttccaaatgattaaatgcatgataaacaaagataatagaaattaaaactgggttgcctcccacgaagctcttctttaacgtcattgcttgacgcatagcttaataccttcaggtggcatgaaagcacatagacacatttccttgaagtttgcctttagtaaaattcatgacc

SEQ ID NO: 246144 - DNA, 340 bp, Glycine max
  unsure (1)..(340): unsure at all n locations
ttgaacaataccttgttaggcagcagaattagtttagcttatgtatgataataggctttgagggcaccaaaatctctataaaaagtaatcttgctacaatggtttattcagccgagaactcctcatgaaaaatgcatttcagccctttattcacaaattttccaaaaatctaaggcagtttgattcttgaacctgaggcatacttttcatgctagtgcctgaatctggaacttgtcactgattaacagttgaaagattttgaatgttttattcccatgtaataatattgtctaccttccattgtcacacatgctctcggattacancttttctcttatct

SEQ ID NO: 246145 - DNA, 243 bp, Glycine max
acttggaggagcatctatgcccttgagagaacttctcttcgcaattgaagcacaaccccttttcccggtgtattgccatttcttccggggagaggcgtttgattggaggaggtggaggttttgctgagggtggcacaagagcacggaccattggtggcgcgacaaacgtggatggcaccagtgtccaccgaagtggggctggggcattgaaccctccgcggtttagagttgtgttggtccgtc

SEQ ID NO: 246146 - DNA, 386 bp, Glycine max
  unsure (1)..(386): unsure at all n locations
ccgctgcatctccatggtggaaaatcatcattgaagctcaaagatctagcctccatagaagctccacaagcaagcttccatcaacatgacttgaaaatggggtattttccttttttatattttntttatttttttagggtcgacaagcaagctccacaagcaagtttccatcacatgtagatgaggttcaacaatatattgatgcaagatggatttttgctctacaagttttgtggaagatatttagatttaccctttacagaatatatatgtgtgttgagagattacaaattcatttactgcatcgtcatcaagtgcaattctatagacattaaagaatcactaatgtattgaacgatgattggtactccaaatcatgttgatat

SEQ ID NO: 246147 - DNA, 264 bp, Glycine max
aatattgggtcgatttgtgactgttttactttgccttgaatattcgagatcgtaactcgagaaagtatgtcttaaattgttaactaatttcatttgagctaaatatgggactgtcacttcaaaaagttatgtgttgaatgatcacttcgtatacttgacgctcagttttggataatccctcgattaacgtttgcgttaatacttgatttatttattcagttttttatttggctattgcatcggaaatatgcagaaattttaaat

SEQ ID NO: 246148 - DNA, 177 bp, Glycine max
aacttttgagtttgtactccccccttctactactatcttggaactttagagatctaaaactggctactcctacctttatgtactactctggagaagtggctactccccccttatactactcccctgaaaaactatatacaaaaatctctcagatcttaagccgatcaagtaaccttc

SEQ ID NO: 246149 - DNA, 141 bp, Glycine max
acaccagggttgactattatgattcactatgaattagggattgggaaggcttgctgtctattggaaaaccacttatcactagctgagagacgttcagacacaaatttgagtttacctatgtatgaaaatttatgagcagaa

SEQ ID NO: 246150 - DNA, 374 bp, Glycine max
  unsure (1)..(374): unsure at all n locations
tgcagcttaaaatcacccgtactaagttttttttttaattttcaagtattattgtccctattttctaanaattgcttaggtagttttcatagttaagctttgaatttctttttgaaattatttgtgctatcttttcatgattatagggtgtttctcacaaaatttcaactcattttgatatcgtctgagtatagttgtagttttaccccttgttangtgcttgttgagaaacacactatttgctacatatagtgcatgactaggggcaatccaggtgatttacaaccctttgatcctgaaatagatagaaccttccatatatgagttaagcatagtgtgcatcctgtgcattttgagcattctgagcattctgt

SEQ ID NO: 246151 - DNA, 371 bp, Glycine max
  unsure (1)..(371): unsure at all n locations
actattataggcatcattggttttctctgtcattgaagtgctacttgagctggccagtctcttcacctttgggcgtatcctttgaaagatctgtgccctctttttgcacatgttctgtagttgcatcctatccgaagccattatactgacactgcctaacgaaggcaaccactaggtccttccaagaatggactcgggaaggttccaagttagtgtaccaggtaacagctaccccagtaagactttcttggaaggaatgtatcagcaattcctcatcttttgcgtatgcccccatcttccgaanatacatctttagatggttcttggggcaagtagtccccttgtactcgtcaaagtccagcaccttgaac

SEQ ID NO: 246152 - DNA, 437 bp, Glycine max
  unsure (1)..(437): unsure at all n locations
gtcataaattcatattacagacaaaattggggtatggggctcaatacaaatcanaaacaggttcttaatatgtattagactaacaacgaccaccaattagacaaagagagacttagtgctctaagaatcaaattcgcatgcaaattgaaaaatataagaataggaaaatcctcaccttttcccacctatctttactcttcnaaaccgaaaatgattcgaactcttgtcttctccttatagagaaatacatgaagaaaggatggatgaagattattcctgcacccaaatggagattctaggagcctaaaaattcactctttatagtatcaaaatacaaggaatcttaanaattactgcctagaacctatatggatcacaacaacttgtcagaanagaaaaaaagaataaaaggagagaagaataaatacagtcgattg

SEQ ID NO: 246153 - DNA, 382 bp, Glycine max
tttttttgttgcttaatatggaaagtagatgcctcattaagaatagttccctgcgttctttgtctaatgttcacaggaagtgaaatatacctcgctacctcttaactatacttgctttctaaggtgtggaaaggttttggattgacgaaatccttcttatattaattccctaaggattgatgatttaaggcctatggcccctcttatttgaatggaggtatatgttttttaaaaaatgataatttgatatttggcatcacatgtcctcctcacattcctagatcacctaatattgatatttatctatctgtacacatttccaattcctaagactggtggagggattacaataagacatttttgtagagttatcttaacatta

SEQ ID NO: 246154 - DNA, 346 bp, Glycine max
actactcataaggaaggaatgagccttgattagagcatctaatctacctaattaaactgatcatactaaacaaagccgaactcgcaacccaagtaatcaattgcatacatcttaactttcaagcttgtcgcgacctacccttctgcgggagggcgacatgtgactcgcgggatgcgtgttccacgaatagaatatgcacggagtcgccaccaacgtttatttgaggaatacgtcggaaaaaccggaaaagacgcgatctacgaacttttaagtgaaaagctcgggagttgtttaacgcgcggggaatgtatatcaccccacacgtacgtcacaaggacgggaacct

SEQ ID NO: 246155 - DNA, 363 bp, Glycine max
  unsure (1)..(363): unsure at all n locations
gacacatcaacaagaatcaagccaaggctattgtgcaagctatcaatggggcataacacaccaaatgattatgatgatggatggctcaaattctcacaaagggtaactcatcactttcaaattgggctttcaaaactatcatgacatgcagaggagaatcaaggatttcaagtcacaaaatgtcaaaaacttttattttcaaacaattacccatttcttgaacatatcctataattcaaagaanaacatgcaaagntgtacatgcacacaaaattgacccaaaatattaaactaacaatccgacgaaactaacaacattaacagattaacaaaaccaacaaaactagcaaaaccaaagaacac

SEQ ID NO: 246156 - DNA, 328 bp, Glycine max
gagcagcaaagctatttatccaaactcttagggtacgactacactatccattataagttcgacaaatccaacgtcgtcgcggacgctttgtcgcgagttcaccaccaaccaagcgcccagtatttgctgctcttcattcccaacttcatccttctcaacgaaatgtgcaaacactttgccgctgttgaaacaagtggcctcggaataattaagaatggggggttgaattaattatgaacgtgtctcgactaaataaaaatttatccttcttaatgttactagattcaattagggcttactactaatgtttgagaaagttaagaacaga

SEQ ID NO: 246157 - DNA, 338 bp, Glycine max
  unsure (1)..(338): unsure at all n locations
ttttgctctaagagaacataccattgggttctggcaattctaagaagattgtctgcacatgggagtgtctaattatatctaataacattaagcaaacataccatngagcaagctctgctataaactcatatctaataacgtcgagagaccaaagcatgtgtgctctaaaacatgagagtgtctaattgagggtattctacatgattagagaaggattacaaacataccaagtaatgtatatatattcgatattaatctcatctgaatttcctaacatagatattcgatgtgaatgtctacacttcttgtatgagtgccaacttctgttgagaactaaa

SEQ ID NO: 246158 - DNA, 343 bp, Glycine max
caatggctctctatgcttgaagggggaatttaaatgaagaaaattggagcaaactctcacctcacaccagtctatgacatcaatctaaacttgctcaaactggatttacacctaaatttccaccgaatctaaaattgactcctcaacacccaattttgccctacaaatggctcttggttcactttggtcatttgtttttctctctaactcaacctaacctttctcacatgtcctaaatgacattgtcagctattattaactcactgtaacctccatttaccacagaattcagacttaaccttccaactctacaagtctcactcttttttcactcataacatca

SEQ ID NO: 246159 - DNA, 331 bp, Glycine max
cttgagaaagctaaaaaatttttttgttcattttataaacaaaccacatcatctggatgggtataatccgctatataacttaagaaattcattcctatgtaagtccctaattcacccaaagggaataactcatctgccaatttacttgacacttaactaattatttatttacgggatcatgaactgtcatataacccacaaatgtttacacctttaaaaacctaccatgatatatagtcgaaattgtcttaaaaaagggacctatcttttaatttacattcctccatcttatgttttattgaaacaagttttgcaaatgtacctaagcctc

SEQ ID NO: 246160 - DNA, 329 bp, Glycine max
  unsure (1)..(329): unsure at all n locations
attcgattgatcctgaactacctgaataggggggtataaagaataaatccttcccataactcctctctttttctgaaacttgtctttcataatccaaattcattggatatgcaaagttatagaacataaacatatggtcaggatccaagctgtaattgaaatcacacagaataggtatntcaatatcattgatttaaacaaaataattatgttcaagaagagaggacgctccatattcttcctatcttctataaagactcacacaggggtgaggggagttctcttgaaacataaacataatagcttcctctctgagtgtaaaccctctg

SEQ ID NO: 246161 - DNA, 299 bp, Glycine max
tatgttcagtggtcataatatgatacgataggatagaataatattaatttgggttatgttgtttgcagtttcaatagaatatgaattacttatctttttttttggctattttattattctggtggagtatatttattatcctctatttttccttcaatgggatatttattgtccatgcctcaatagaagaaacctcagttaaaaaataacatgataatcatttttacctttacttctctccaccatctctcacccattttcagcacctcttatactattcaatgtactatcacataaat

SEQ ID NO: 246162 - DNA, 330 bp, Glycine max
tactatcaggagattctataagctttattgaagcacctagactataatagaacacgtgaacacttgttgtacttagatgaatgagagatttgtgagacacaactcaaagatcaattcctctccctttttcttccttcagagtcgtgctccccccactctacttctgctcctctttctattcctccaattgagcatcctctccaagcttcttatctatagctcatcttgggggagaagctccttctctcatggcttattccctagtggatggtgcctcctctcacctcttctcctttgtcttccgctgcatctccattggggaaaaacacc

SEQ ID NO: 246163 - DNA, 319 bp, Glycine max
  unsure (1)..(319): unsure at all n locations
tgtttatgtgtgtatccctacaatgccataatcaagaatcaccaatcttacttactaaaccactaagttcatgaaatgatgcatgtttaatgttntaacatatagatatcacctatccttttgctaatatggacaattgtcacaaagttgactaatgctcaagaggttatgctntagtccatcaacatataaaacattctttatttgtgtcttgtactgattttcaatgtttccttctcccataatattccctttattggtgtcttcaaaagtgatgtatcctctttcttttgatacacagtcagtaagtntgaacttg

SEQ ID NO: 246164 - DNA, 325 bp, Glycine max
gaaaatatgacctttcggcacagaacaaccctaaaggggaatcccctaatctagatgggtagccttaaaacaacaaaacaagctactccttacttccaaaatgctgctggcccaagcagaccatacattcctccaccaatccaacaatagcagcagccccagaaacagcaaacaagtgatgctcctccgcaccttccctccaagaacttgggaggcagatgactatacagaacatgcagtttcaacagagacaaagcctccatctgagctaacctataagagggacaatgggctcacaattaatcaacacagtccaaaatctgaa

SEQ ID NO: 246165 - DNA, 328 bp, Glycine max
  unsure (1)..(328): unsure at all n locations
ctttctatgcttgaacaaaattgattggtcttgaatgtttgaaaagcatgtatgaaaatgatgaaacctttagagaaatttttaaaaattgtgaaaaattttcagaaaatgggttctttaaacatgaaggctttcttttcaaagaaaacaaattgtgtgtgcctaaatgttctactagaaattttcttgtttgtgaagcacatgaaggaggtttaatggggcattntgggatccaaaagactctagaaacattacaagaacatttttattggcctcatatgaaaaaggatgtccagaacatttgtgaacatngcattgtattgtaaaa

SEQ ID NO: 246166 - DNA, 162 bp, Glycine max
tgaaaccccccccaaccaaccaccacacagattttccaactttccgaaaagcgcgaggaggaccgggcgccagagcgcacccaacaaccaacatccgccgaccgcgaccgccggaagcaggcaaccaagagcgacccggagaaacacaagacaaaccccacc

SEQ ID NO: 246167 - DNA, 326 bp, Glycine max
aaaggattcgaactttgatggtcaccagccctcgattcactgggaatggcgagggagaacccccgcataccacaacatatggaactttacgtttaaacttatattgggctagctttaaggtcatttggaaactttgtgcttttgatttgaatataaacaagatcttttcattgcctggctgacccttctattattgcatgtacttcttgttaagcgcaattcatacaattcccaaggtctataccggaccgttacactttgcagaatgataacgtaataagaatagaggggcttctcgactaaaaaggccctagccagaatggcta

SEQ ID NO: 246168 - DNA, 387 bp, Glycine max
  unsure (1)..(387): unsure at all n locations
gactcatgctgtgaaatatgtggacccgattattctcggttattactattggaacttggcaaattagcatttgaccaaaacacaaaatcgatataattaggaaaaaaaaagaagaaaattattttgcagttaattttattgtccccacaaattcaaaatataaaaataaaaattatcatgacatctaatatggctttcagaagaaatatttntatcactgaatcatttggttttagatgttaaactagccgcgcgttcacattgtataaatcacaattagtttaggaatttttttagaaatgtttttgttttggtcgaacaattttattaaacacacgaatcgtacaatgttctattacagcctactttattttaccctctattgtg

SEQ ID NO: 246169 - DNA, 401 bp, Glycine max
  unsure (1)..(401): unsure at all n locations
cttcgtggagcttctatttaaattcgagcgtctcgatatattacacgagtcaatcggacattcaagttaaaagttattgtctgttgaatatgatacgagcttccgtttgaaaattggagcatctcgatctattacgggactcaatcagacatacgattaaaatgttattggtgttcgaatttgcccagagcttctatttttaatttcaagcgtctcgatacattacgagatgcaatcggacattcaagttaaaagttatggtcgtttgaatttgataccagcctccgttttcaatttggagcatcttgatatattacgggactcatctgacatcagagtannaaattattgtcatttgaatgtgcttggagtttatggttttcaatttcgagcgtctcgat

SEQ ID NO: 246170 - DNA, 339 bp, Glycine max
  unsure (1)..(339): unsure at all n locations
gtaccttggatttggtccgaccatgccctcctgatttccggctgggaaattggcgggtggaggaacgtcccggcatttacgcaacaagcataatgtaaacctttacggttttaaaagctctatagttgggcctaggctttagagttttcattttgttaaggctttgtgtcttttgtctttgaatttataatacaaggatctttcttcatctgttcctggtctctacccattctcattcatttgcatgtttacttctttntctgaaacggcagattcgatgacgagtcccccgaaggtactaatacctgngacccgtctatcaacttcgagcaagaaatg

SEQ ID NO: 246171 - DNA, 257 bp, Glycine max
actcatccctatgagatgttgtttatgtattggcgatcacaatcgccattccttggattatatggatgaaccaagctcatgcttttacaaaaaggttcatcaagtcaagttgaaatatggaagtaaccgccttgcataattggggcaaaagacgaatcgagtcacatcactgctttctgtgctgccaaacatatttaggattgttgatgtccttgttacttccagtttcactttgactaagatgtcatggaccttgt

SEQ ID NO: 246172 - DNA, 393 bp, Glycine max
tacttttattcttttgtcacaaagtggtacctggagatatgtcgcgggggtcaagagaccttggggacctcatgtgaggtgctattgcccaaaaccaagcttgaccaatcccgacccaacccgggcatagtcagtcagtgagaacctgtgacgtacctaaacaggcgagctcctggcagtcaaccgattaaagaacaaagaccacaaagcaaggaggcttgtgtggtggctggccaactatgaatcttgagtggtagttggaatatgacctctagtattcgattaccaagggtgtgtaatcgattacaaggattaaaaatgaagacagggaagttagatggtctcttgtaatcgattaccaatgggtgcgtatcgattaccacgctttaaaat

SEQ ID NO: 246173 - DNA, 245 bp, Glycine max
acatccatgcacaccaccacctttaacataacgagtccctgtaaccatatcagcaccaggctccgactgctttctaaaatgcaaaaaggaacgactaaattgtggccggtaacaagacaacaagaaagaaataactagaaccttcctttacctaatgaagcctggcaaatattctggctgcagaagacataaatagatcagacaaagacaaataaataaataagagaaaaatatgattcagcaac

SEQ ID NO: 246174 - DNA, 335 bp, Glycine max
tggcaatggccccacataggaagaccgttaaaatattcacattattcgaatgtgcttatgaatagaggaataacccctcgaaacgtacttgagataaatggaaatatttgaaaaattaaaccaacttgctcgaagtaaaataagttagaattacagaaataatggaacataaaatggcgaaacagtaaatgcccaaaaggctgttcatattcatcaaagaaatcaaatacaattcaacaaaaaatataagtctactaagctgatagcctcttagttcttaagtgcatctttgtcaaactgtcacattcatagttcctattgtacgtgaatcataa

SEQ ID NO: 246175 - DNA, 274 bp, Glycine max
tgataatatttggatgcactacatgagtacatttgttgagaggaagataatatatggcatctatcggtaaagccttaaaggcctcacacgatgtgtgctcatagtcacttcatccatgtagacacttggacactaatggtttttattttaacaggtttcattcaaatgaatgccgagtatatggtttcatgtgtatgattaccattaacgaatgctacaggagaactctgagcattttttgattcaatcctaccctccaagggcattgtttata

SEQ ID NO: 246176 - DNA, 429 bp, Glycine max
  unsure (1)..(429): unsure at all n locations
agtcttgaaatggtgctgattccatcttgaacaatttgaactcattctatgaatgacctttgagctttntggcatcacctttgtcaacatcttttggtatcatcattggtatcatcaaaacatctttgaatcattcttgattctccatgaagcttntcttctacaagaatatataggtatatttcctctaaagaatacactggtgggatcaacacttaaactaaaattgttaaaataacacatgctgactcttccagtagaacccacaccacaaaaactagcatgccattgtanggcatacattataggctaactggtagggtggtgatgctatacaagtcagggaaacagagtcacttgatgtatctacccctattaacagattttgatcgggctagcccgtatagctggggtccacatgttaacaca

SEQ ID NO: 246177 - DNA, 425 bp, Glycine max
  unsure (1)..(425): unsure at all n locations
cttattctcacctgaagataatgaattctttgctacttcatgcactctgttgggagtngagacgccatcttctcaattaaatttctggcttcagcaagggtcatgtctccaatggctccaccactggaagcatctatcatacttctctccatgttactgagtccttcataaaaatattggagaagaagctgctctgaaatntggtggtgagggcaaatggcacataattttttaaatctctcccagtattaatataagctctcttcactaagatgcctatgcctgaaatatcctctctgatggtctgtgccctggaacaaggatattatttttaaaacacttcttgaggcatcccacttgtgaggaccaggagcaaggaataaaccatcctttccactcctctaagaatatgaaggccttaaaat

SEQ ID NO: 246178 - DNA, 233 bp, Glycine max
aattatgttcatggcaagcatggtgaccaagcatcaagtttcttaaacttttattttcagagaaaggatgaaatctgggccacctcatggactcctctaagaacaatagcatcatttcttgcactgaattgttgggagttggaagccatcttctcaatcaaaatcctaaactcagcaagggtcatatcaccaagagatccaccactggcagcatcaatcatactcatatccat

SEQ ID NO: 246179 - DNA, 379 bp, Glycine max
  unsure (1)..(379): unsure at all n locations
tgcaagctcggagggctaaagactcacgaagggcttttgctcatgcaacaatngnnagccgcggctatacgagacatcttgccaaacaaagtcaggttagcgataactcggctgtgcttattcttccatgctatatgtagcaaagccattgatcctgccatagttgatgagttggaaaatgaggccgcaattatactgtgccaattggagatgtatattccccctactntctttgacatcatgattcacttaattgtgcatctggtcagagaaatcaaatgtggtgatcctgtttatctaccgtggatgtacccggttgagcgatacatgaggatcttaaaagggtatacaaagaatctatatcatccatatgcatata

SEQ ID NO: 246180 - DNA, 331 bp, Glycine max
ccatacacctgtggatgcgccattttttttgttggctacgaaagaactaagtagatgcgcctttattacctctacctgtattgggcaccctcagtcggaatgcgttatttaacttcagattagcttttggagttgaacagctgtacatgtaccatagccacacaccttatttaatctataaatcagttagcttctactctaaactattgaagtgaatgccctttccatattatggtttctcacagttatatttgaggtactattacatctaacacaaacactgagctaacgatccctcaacacggttaaagaattaaagaattagtggcct

SEQ ID NO: 246181 - DNA, 289 bp, Glycine max
gcatccttgcaggacggatgtgtgtaccacatgtttgagtagcaacttgggggggtacccttataaaggcaaagctacagcaagctgactatgaatgaactatgcggaaggggggagtgggaatgcgtctcgggagctgccctcttcctcgatgacttgtgagtgattttattattgtggcaaacgaatcatcgactggtctgactaataactctattgctgactaccacttctcgagtcgcaagtaatgtatttttgatagtttaccaacttagcctacctgtataat

SEQ ID NO: 246182 - DNA, 406 bp, Glycine max
  unsure (1)..(406): unsure at all n locations
tgaaagttntatgagacacacttcaaagttccacttctatccctcntttattccttcaatttcgtgctcccctcttctctctttcggttcctccattaaagcattctcttcaagcttcttatccaaggcacattcttggtggtgaagctccttctttcatggcttattccctagtggatggtgcctcccctctcatcttctcctttgccttccgctgcatctacatggtgaaaaatcaccattgaaggacctcattgaagctcacagatccaacctccataatagctccacanagcaagcttcatcacttacataatggattaagtaactttccttgtttctaaaccatgtttcttcctgaactaacatattgtgcaattcaggcacatagcatgtatctttcatg

SEQ ID NO: 246183 - DNA, 239 bp, Glycine max
tgcgcctctcatatagagacgcttataaatgaacaaccgaagctcttcacaagttataaatggtcataaagtttcacactgatgtgcgattccggcttatattatattgagacgctctaaattgtacaacgaaagctcttgagaaattcaaatggtcctatactctttacactgaggtccgattcaggcttataatatatcaagtcgctcgaaatttaacatcggaagctctcgagaaa

SEQ ID NO: 246184 - DNA, 155 bp, Glycine max
  unsure (1)..(155): unsure at all n locations
acgccggggccncatcaatcccctcaagcttccacacattcaagtaatacaacacgcaaccatccggaactatcagaaccaagaaaaagggcaaaggcagaaaactctgcccaaaaacacaaccactatcacagcctttctcacttaaaaacccc

SEQ ID NO: 246185 - DNA, 237 bp, Glycine max
  unsure (1)..(237): unsure at all n locations
gacagtcaccgctataggagcattgtgcaccaacaacgcttcgaagccatcaagggagggtcggttctccgggagcgacgcgtccagctcagggacgacgagtatactgatttccaagaagaaataaggcgccggcggtgggcaccactgagtactcccatggccaagtttgatccagaaatagacctcgagatntatgccaatgcttggccaacagaggagggcgcgcgcgacatg

SEQ ID NO: 246186 - DNA, 270 bp, Glycine max
gagagtttattgggtgacaaccattgtggtaagcaagatgacagcacacacaataatctcaagaagcagcaagaaaaagctgcttaaaaaaagagggaagattcaagaataaaagcttagtgtgtgttgtcataaaagctgttattgaaagctaagtgttataaatatgggaaagccagtaataaaagttggaataaaagaaaaaaagggtttatctaaggatgaatgctctcttaaaacctaagaattttgcatcctagaaaaaccata

SEQ ID NO: 246187 - DNA, 314 bp, Glycine max
ttttatgacaaccaccacaagtatatttttaacttcttaacaacataaatatgacaagatcatttacgacctattgaatctctaaataaacagctctgaaaggctattactattattatgcttataattgcatgcctttatcttcttcttttatactttcggtggaaacaataggtgtaccaacactgatcaaacaaaatagaatatgtatcctataatatctatatcctgtcacctactagtctttttctatgaaataatgatttaagttataacctttcaaaagcttctaaacaaacattatattcatcctt

SEQ ID NO: 246188 - DNA, 411 bp, Glycine max
accacagcagaaccaatatgacctctccagctacagatacaaccctggatggaggaatcaccctaatctcagatggtccagcccttatcaacaacaacaacagcctgctccttccttccaaaatgctgttgtcccaagcagaccatacattcctccaccaatccaacaatagcaacagcctcagaaacagccaacagttgaggcccctccacaaccttccctcgaagaacttgtgaggcaaatgactatgcagaacatgtagtttcaacaagagaccagagcttccattcagagcttgactaatcagatgggacaattagctacacaattgaatcaacaacagtcccaaaattctgacaagccaccttctcaagctgtccaaaatcccaaaatgtcagtgccatttcattg

SEQ ID NO: 246189 - DNA, 386 bp, Glycine max
ataaaaaggatgccccacattatgtccatgacacaaatgctaaaatgatgatctggaaactttatgcaaaactggtcatgcatgcccctatgtggacactcaagtgtcaaatttttatggtcatgtgattctagggctcatgaatcatttcctctattatagtcaacccaacgcttccaaaatatgttctattatcaattggtgcattcatccgagtccattttgggcgtccgggaaaaatttcacagcattcacccttcaggtgatacacattttattttcaaatatcgattatgatcaatgaattttttcaaagaaagttggaggtcatctctttcaaaagcatgtggtgtttaactaacaaccaattttcccttttctctact

SEQ ID NO: 246190 - DNA, 438 bp, Glycine max
  unsure (1)..(438): unsure at all n locations
atcgattaccaaaacattgtnatcgattatagctccttgaaatcaatcggaacgttgtaaattcatttaaaaactttttctaatccattttgctactggtaatcgattacaccaatctgttaattgattaccagagagtaaaaactctttggtaaacatgttttgagaaaaatccatgtgctactcaatttttgagaaaaccttttcatacttatgatgattaagccttctcttgattcttgaatcttgagtcttgaatcttgatctcttgaatcttgattcttgaaatcttgatctcttaattcttgaaatcaactttcctcttgaatcttgaagtattcttgattctatctagaatatcttgaactcattctttgattgacctttgagctctttgtcatcacctctgtcatcatcttttgttatcatcacaacatc

SEQ ID NO: 246191 - DNA, 235 bp, Glycine max
ttgatgcccatgtcggaaatgatataattaaaagaaggtggaaaattgaaaaggggcaaaatggttgtttaattgagtgcctccactgcaacatgctgtaatggccatgcctgtatacaatcatgatatacataaaacttgttattaacctttgtgaaatctctattaactcattaattacgtgagactgttaccgttcctatgcccacggactatcggttgctttattctgcat

SEQ ID NO: 246192 - DNA, 339 bp, Glycine max
ccggatgccttcattaactttgccgaatcgcacaagatgattgtgccgctgactcaacacctgtttgagttaattgcccgcgatggcgcagaattaaaaaaagtgctgccggtgggcgtcaaatttggtattaacattgcgccggaccatctgcacagcgaaagctttctttacagaggcattaaaattaacctttatcattccatcaatcggcgtcttccataagttgttatgtttttgggaaactcgagaatattgaatcactctgttcatacccattgagttcatgcaattcattatatgtcttaggttcaattctctatgtgagaaaacctaagt

SEQ ID NO: 246193 - DNA, 346 bp, Glycine max
  unsure (1)..(346): unsure at all n locations
catttaaataagatcttacgacatgaagagttggatgatatttctatcaattattatagatatttatgaaaataatacgagtagcatgatatttatactgttataaaaaaaattaaactcaagaaagtaagattttcacttctttcatagtgaagtttttagaaatagataccaaacattagaaactaatgattctcaaaaactcaacttctttcctaccaaacacctnctaagatgcatggtttggttattatgcttatatcctttgtcaaatttatggacctgcactacatatggccatatgatggtgtatccgtgcttcaagctctaaacttaagtgccttta

SEQ ID NO: 246194 - DNA, 287 bp, Glycine max
gaacttatattcaacatctcattggtgtattcaactagtaccccttagttatgaataaaatatgagtttgtttccgtaaatataccttaaaaggaagataatctttaagtgactaatctctaatgaatgataccattttatttatattatgtataataaaaaaatcccacttgagtgaaagtttatactcataaatgatcatctttctatcaatatattataactaatatctttgcctgccccttaaagagaggaaatgaaaaacctcttcttaggtggctgtcata

SEQ ID NO: 246195 - DNA, 377 bp, Glycine max
  unsure (1)..(377): unsure at all n locations
aataaaaccaactttacacatatttttgggccaaatgctctacanaccataaacgttaaaggggatcccttgaaatcaaacaataaaatgaaaaaggaacacaacacactactaaaaaagggctttttacgacgggtaataagtgtatttaacgacgattntcaatcatcgttggttaaaacatcgttaaaacgaaattcatttttacgacgggtattataataaccgtctttgaatgtatgaatctttcatagaacggtattaactaataaccgtctttgtatactgtgtcagcatttacattcaaagacggttatttcataataaccatctttgaagactcatacattcaaagatggttattcataataccgtca

SEQ ID NO: 246196 - DNA, 400 bp, Glycine max
ttggactaatggaaagggatggaatgaaataacatgatggcataatgctaggttccacttattggattgtttgagaatggaatagaacccgatggagtgcattgctttccatccattagcccttttttcttcccctgccttgttctggtagtgaataatatagctaacttggatctttaattatttttttagtcaacatttctttttatattattatcttaatttattcttaatttcatgtatttcggctctgaagatagtaagttgagcttgctttttctgtttaattaatttagtgggaaatggctgaaatgcaatatagcacaagcatgaattctcgtatatacgtagaactagctagtgataatgtgaatacatgtatctcaagagagcataaaca

SEQ ID NO: 246197 - DNA, 156 bp, Glycine max
ctatggaggtaaaacacacttaacctgctcatatccaaattgaagaaatttttaagacacaaagaagtgatagtttattccttctttcaatgtatttcacactcaataaataatcgtggctgttcatttccagttttcacaaagtaatgattctta

SEQ ID NO: 246198 - DNA, 296 bp, Glycine max
tccctccacccctcttaaacaacgcgaacctttatagctggatagactctacaaataaccagctttggagcataatggctacacccttgaatagatgaggtctattacaagaacttactcaaagaccttacttatactgtagaaacaagatatgcacaagcaaattttattaaaataccatttgctatcttataaaaaatgcagcgactcccaatgacattaatacatcgcaatcacttcatacaacacactcaaccagaatccctataaccaatgctatgccttaaataaacata

SEQ ID NO: 246199 - DNA, 349 bp, Glycine max
  unsure (1)..(349): unsure at all n locations
atttggtacttacaatacacacatcttctttgctgaaatcacatacacgcctacataaagcattttggggcaccaaaaaatggacatgtgcacatcttggcgtttctaatacctatacatacgcagacttcatgatgagatttgactatccacacaataaggtgctacatttcatgctctttattgttcaagtttttactacctaaagccgcatgcaaaattaagcatattttcctttgctgactaaaattggattcgaattaaaaggtatatgtcttgtaatatgttttcttcacataacatgcatcgtatntatatatatgatctgtgagacattttgactaccaaa

SEQ ID NO: 246200 - DNA, 203 bp, Glycine max
ctcgttaggcgacatctgcgtgaagaacgacgaattttcaccgcattgccaattcttttagaaagctcgctggcgaaatggccttttacggagagaagtttcttgtttggggtgctaaaagtacaagactcggctagttttcggcgagtcaaccgacatttgtttgggcggaaaacataccccctctgcaaaaaaatttgcta

SEQ ID NO: 246201 - DNA, 276 bp, Glycine max
tattacctaaggaatgtattagcttgaaattcaagaggaagaataatgaaaaggaaatgaaatagagaggatattacttactattacaaagatgacctgaaagatggcacaagttttgtatcttccccaataagaatcacttatgaaagcacccactaaagagaagatgtaaactgtgccagtccatttgctcacactgtttgcagctgcagcattcatttgccccatcactcttgtcaggaacagcactaggttaacccctacttcaaagaatgc

SEQ ID NO: 246202 - DNA, 288 bp, Glycine max
  unsure (1)..(288): unsure at all n locations
gaatgtgagaaaatgacgtccaaatccggcgtcaaattgcatgatgatccacaccgttaacaacgcttgagatcataactttactatgaccaatttgagtgtatgccgagaaaaaaacaggttttaaaaaaacacaaacgaacatgaattngataggaagaaagcgtatatagacgtattgtagattgtaaactgacataatatatctttatttataactatgatactatcacccctatatttattctatttttaatttataaaagaaactttatttactccctatca

SEQ ID NO: 246203 - DNA, 390 bp, Glycine max
cgagcagggttgcttctcatatttacagccttctggaggaatcttctgtagggcccaagtgggcctagttgctatttgcacccccatttttactaagtacaccccctgccttttttttggtgattctttttcgtaaagttacggaaacttacaaatttcgtaacgatacttgttttctttccgtaatggtacggaaccttgcggattacataatcatcccctttttgacttacggaatggtacggaacctcactaattgtgcaatgatgcttccatttcatttccggtgtgtcacagaaccttacggattgtgcatcaatattttctttttgtttccggcatggtcccagaattcacaaattgcctaatgatgggtgccaagcacctcac

SEQ ID NO: 246204 - DNA, 360 bp, Glycine max
  unsure (1)..(360): unsure at all n locations
aattctatcattagacctccaatcttttatggagagggttaccactactggataacccgaatgcaaatctttattgaggcaattgaatctaaatatctgggaagccatacaaatagggccttatatacccaccacagtagaaagagtttcaatagatggtagttcatcaagtgaaagcataactattgaaaaacctacagaaagatggtctgaagaggatagataacgagttcaatacaactttaaagccaaaaacataataacatctgccctgngaatggatgaatatttcatggtctcaaattgtagaatgctagaaaatggcgacactctctattacacttaggaactcagatttaa

SEQ ID NO: 246205 - DNA, 347 bp, Glycine max
gtatttacatcacacaacgcctccttgggctgaatttacatacatgcatactccaagcactttggggtgccaaaaactgcacatgcgctcatcttggtatttctaatacccctacatatacaaacttcacgatgaaatcttgactacctacacaataaggtgctacatttcatgcttgttttgttcaagtttttgctacctaaagccacatgcagaatcgagcatattttcccttgctgacgtaaattgtattcaattagaaggcatatatctttttgaatatgtttcttcacaaacatgcacatattattttatttttgtgaacattttgctaccaaaatatttta

SEQ ID NO: 246206 - DNA, 115 bp, Glycine max
tttgcaaagatttaaggggacttactgtcaatgacctcggacttgatcagatctttttgggacatgaaggagggaaattctaaattgaaattgaatgtgagccattgattcattt

SEQ ID NO: 246207 - DNA, 388 bp, Glycine max
  unsure (1)..(388): unsure at all n locations
ttatacgcctagtgatggttcagatttcaattattaacatctaccatcaaatttcatggtaaactggaatgctgaacaacaataggcgttggcttgggttcatgcttttctgatagaacaagtactttgaaccngaagacatgttttaataatatntttcataattttgaaagtgttttctttaagcttcagcaagtgttgcttcctagtactcatgctacttattttgaggagctttttcacatctatgctctctttatccagtatttgaagttaagagctcttcaaggcaatcctatacacattacttctatgaagcaactgttggagctggtcttccaattgttagcactttacgtggcctncttgaaactggagacaaaatact

SEQ ID NO: 246208 - DNA, 299 bp, Glycine max
  unsure (1)..(299): unsure at all n locations
atgagcgtagacgactactgcctcagtctgattacgcaagactctctcacacacatcaactctaccagatacagcgccatcacagattgagtttatacgaccccacacctgaggaaaccccgntgtatctccacttttacattgcatatatctaagataacaaattgtcatgataaacataatattatgttataccaaacatttattaagacacatacatttggtaaaaaaacacatactctttaagaaaatagtaacactaaaccgggtggaaaccactccgaaaacaacatgaactg

SEQ ID NO: 246209 - DNA, 308 bp, Glycine max
ttttattggtgattgtgttttacacggagttctaagaagaaacgcattgtgacactctctactagtgaagcccagtatgccactgcaatttctcgcacatgtcatgccattcggctaagaaaattgctggaggaacctcagttggtgcataagagaagacaaagatctatgttgtatatatatctgcacaagagcttgtcaagaatcctgggtccatgaacgaagaagcatataaaacaaggatcattcattaagagtgcttccaaaaagaagaaattgctctgtaaaatcacacaagtgggatattt

SEQ ID NO: 246210 - DNA, 364 bp, Glycine max
aaaaaatatactaatacgtatgttatcccttgtgtgcatagtgatgacatgttgattgcaggatctaatatggcagaaattaacaggttgaaacagcaagtggcagaaaacttttgaatgaaggatcttgtgccagctaaacaaatccttggtatgagaattcttagaaacatatcagaaggaatttgaagctgtctcatgagaaatatatacacaagttgcttgacaaggtttaccttggagattctaagaccaggaatacccctttgggatctcattttgaagtttcaaagaagcaatctctgcagacagatgaagatgacatgtacatgtcaagagtaccatatgcatcagcagttgggag

SEQ ID NO: 246211 - DNA, 283 bp, Glycine max
  unsure (1)..(283): unsure at all n locations
ttttgaagtncatgatgtcgcacttcatttggctttgaaaaaaacatcatggatcaatgtttataccaaaaggtcagtgggagaaagatatttttcttgtgttatacgcggatgacatcttgcttgcaactaatgataaaggtttgctatatgaagtgaaataatctctctcaaagaactctgatatgaacgatatgggaaatgcattttatgtcattggcattaagatccatacggaaagatctcgacgaatcttgggtctgtctcaagagacttatattaa

SEQ ID NO: 246212 - DNA, 352 bp, Glycine max
  unsure (1)..(352): unsure at all n locations
acactcccctgagtgtatcattaagttccaggaccactgaaatcacgcacttgaatgtaaggaagaatctggcaaaatattggtggtacttgtcaacgggggacatcaacataagaatatgtttaataagcagcccgttatgaatgaaaatacttanggtgtttggtttgatggtttttttattcattnttacttaaattaaaaaatagtgataaaaatgtgtttggttcgaaattttaaaaatattttttattcaaaattctaatcttttataaataaaaacctttcaacaaatgaaaaatataanatgaaaacacaaaataaaaatggtaactcagcgatttctcaatca

SEQ ID NO: 246213 - DNA, 378 bp, Glycine max
  unsure (1)..(378): unsure at all n locations
aatctatcagggaaacaggaaaaaaaagaagaagtaaggattgaatggcgtacccatgacatcactgacaacactgcgcactgcacaatngttccaaatttcttgaccatggatttcctctactgagggcagtcatatgggctcaatatgagggttctctagtngtgttgagttcaaagaaacattttcaattccttcatcacagtcaccagccattggtaaagctcaaatctaagatatgctacagctatgttatgaagaaagaatagttattataaagcacaaatactcaaaatatctatctatacagatatgtagaaacaagcttcataatgatgaatcaaagtgattcaagtagtttgatgatgacaaaatgat

SEQ ID NO: 246214 - DNA, 319 bp, Glycine max
  unsure (1)..(319): unsure at all n locations
agagtatactctctaagctcatttgtgcttgtggctaagcacgatgtacccacgctaagtgctattcctcacagtcaaattactagtttaattgaactaaacacgatgtacccacgctaagcactattccttgcggccttatagcgctaagctagcaaccactagctaagcgcacgcccncctgtatataggatgcattatattcgcttagccgacattgagccaggcttagcgagcgttgcaggtttccttatctgcatagttcgcttagcgcgctgatttgactaagcgtagttcaaaaaaaattttaattaataat

SEQ ID NO: 246215 - DNA, 405 bp, Glycine max
  unsure (1)..(405): unsure at all n locations
atcacaagagctncaagtaagggctcctctacaccctcactatatttcagctttactttctcctccactgatgtttctccgtctctctccatgtatctccacacggtcttgcgctgaatgttgctaacataattatttagaagttccaccatataagcttgctatataagctaaatttgactttctatgggtcacactccttgctcttgttcttgaaccatgaattgtgttgagtttaggttcctttgagtttatattgcacattttttggctgaaacctaaccataaattctagaaaacattaagtagaaaaaacctcaaaagctagaatgaatattccctattgagtttgcataaagcatgctatcatgaactgtccgtaaaactttgtggtgaattatttct

SEQ ID NO: 246216 - DNA, 372 bp, Glycine max
  unsure (1)..(372): unsure at all n locations
attttttggagatgatcaatacaatgcctataggttggacctcccagaagagtatggagtcagcaccacttttaacatttctgatttaactccttttgcacgtggagctgatattgaggaggaagaactaacagaattgaggtcaaatcctcttccaggggaaggggatgatgcaatcctccctatgaagggaccaatcactataaccatgagcaagaggctccaagaaaaatgcgctataactgctgaagaggccctagggttctcatgaaccttatgataaatttctaagcccatgggccaaggttgggtccaattatctttgacatatacactangatgcattatatttggccttgatatgggcttcat

SEQ ID NO: 246217 - DNA, 427 bp, Glycine max
  unsure (1)..(427): unsure at all n locations
cacaacaagttttccacatccacaaagcgcgcataaacccatcatcccctgttgcccacctncaactgagctcacgtactcccacatagcccatatcctcgtttctctcaacaccgggtccccatcaatcctcccaagcttccccaacatcaaagtaatacaacattcaaacagcacaaactaccacagccaagaaaacagggcaaaggcagaaaactctgctcaaaacaccaaccaaaatcacagcttttctcacttaaagatcccagtaacaattccttcgatccaattcgttaaccgttggaatcgactccaaaatttactggaagtctatagtacataagcctacattntgaaccgtgggatctactagcaaacatccagaactcattctgcagtactctttccacagccaaccacacacaag

SEQ ID NO: 246218 - DNA, 318 bp, Glycine max
gggaagacctctgacactatgtattagccaggaaaacgagcgaaaaacgacacatcatcacaacacatgaaaatgtgtgacgcatattctaatactcttatccaaaatgcagcggcttacaactacaatcactttacaaagacgtgcactgaaacactgaggcctcctgacgccaagagagattgagtacaaagagttgaagtcaggagtgtctgacagaacaaacagttccacacgagagaaactaacttgagccatctaccacaaatgatgtacgaaacctgttaagggaatatctatacttgcatagactctcaa

SEQ ID NO: 246219 - DNA, 410 bp, Glycine max
cctgcagcctaattagcagatagcagttatgcaaggttaagagcagtgtggggagatgcatacatatgcgaatcagatacattatttaaataaaaaaattaatatcctgtatatataatttctttatttttcattttttatttgtgtgtacatatatttatcttaaaattaatctctcaatttaaaggaacgcatttttattgtcccatttttatgtttgtgaaacatattcctttgcaaaaagaaaaactgaacctctgagctagcggacaagtcaattggtgtcagattaattagtttaatccagtccttttaaattcaagggttaactaagaggttatgttaaatatttaaaaatatatatttcatggtaatgatgtctgtatctatgtcaaaaaagaaagtgggag

SEQ ID NO: 246220 - DNA, 289 bp, Glycine max
tgccgttgaagcctggatgaaagaggcatgcctatgttgttgtggatgacttctccacacttacctggggttactttatccgagagaaatcagaaacctttgaagtattctatgagttgagtctaagacttcatagagaaaatgactgtgtcatcaatagaatcaggagggaccatggcatagagtttgaaatagcatgtcacttgattctgcccattgatagatcactctgaattctctgagccatacaccacatcgaatggcattttgaaagaaaacagacttgcag

SEQ ID NO: 246221 - DNA, 368 bp, Glycine max
  unsure (1)..(368): unsure at all n locations
cttttacaatcacaaccagaaacttggatttctatgcgtgagtcatccttttggcactttagtctagcttccacaaactacccacacactcacaatgtgcacaatttatttcgcaagcttagttccacaaaatcatgcgcaaatgccattgaggcatttcaccgaacacttggtgggcgcatgtttaagcatgaaaatcaagggaatgggggcaatgtggcatgcccccattatctcagaatgcaccctaggcctaagaccatcccctaccaccccacgattcaactaaaacaagcaataattcaaggataatccctcacgttntaagccaacacatgctacttagagcaccaaaatatatcaatgga

SEQ ID NO: 246222 - DNA, 332 bp, Glycine max
  unsure (1)..(332): unsure at all n locations
tttctgcctaccgtgtcctccttctaatagttattggntgtgttctttattctggagatctctntcattggtttcttccattgccatgacatcttcggatttttatctcctcaactacacgttntttcttagcttgggtgtattcttgattctggccattcttctttcattgggttcttctactgctgtgttatatctggcatgccatccctatttctcttcaggttcttgtctcctttgacgtgaatatttccgatgtgtttcacataatttctggtcattgctgccagtcctccaatgtcatgtcatcattccaacaagttcagatctct

SEQ ID NO: 246223 - DNA, 335 bp, Glycine max
  unsure (1)..(335): unsure at all n locations
agtattattaaactttaagtattttatccttatgtaaagaataagcgttttctcagaactagaatgacggttagtaatctttatatttttaaatcaaataatcttaagatgctaatctgagaattaaatacaattattattagtcccagattttggatttgggccatttggccattctcccagtccagtttggaccctggagctgcttttatgttttatgtaatcttcttcttatcatgcataaacaataattttcagttattttcagtntggtaaagaaaataaattgtgttactaaaggatatatatatatatatatatatatatatatatat

SEQ ID NO: 246224 - DNA, 400 bp, Glycine max
  unsure (1)..(400): unsure at all n locations
tgattttcgctttattttacctaaaggggatttttttgaatattatattataatttaccctctttttgatttccaaccgggttacggcaccaccgaaccggccggattcattttaacccgaaataacggatgatacaattcatacgatcagtggaaatttattttatttttagaatangcgagaaatgacttanataaatgactaaagcatgtcaaaagggggtatagaaagccaatgaaaacgaaaataaaaatacatgagacaaaatgtggaccaccacgggtacatagaatgaattgaaaagctctgtttgaagtacttacccgttgaagactgaagaatacgaagaacgaacgacgaatgtngaagaacggtcgacaatcttcgcgtaattactca

SEQ ID NO: 246225 - DNA, 379 bp, Glycine max
gaagtttcaatggaggagaaacctctttgaccacgaagttgatatggcagcagcctttatggcagacattgctgagtttcaaattcaacctgcaagcagggaccttctgctttgggggcctgattctggtggaacctactccacaaaggcagcatatagcttcttgaaggatggtgacagccaggttactgaagatagtgacttcaagacaatctggaatctcaaaattccacctagagcaagtgctttttcttggagaaatttcaagaaccgaatccctaccaaggttaacttaaggaggagacatgtggagctgccttcctataattgcccgctgtgtgatgaggaagaggaaacagctggcatgtcatgtactcat

SEQ ID NO: 246226 - DNA, 389 bp, Glycine max
actacacgtcctcacctttagagggctgcacgccctcgccttctgaggactatacgtcctccccttcagaaggctgcacgccctcacctttagaggactatttgtcctccccttcagaggactacatgtcctcgtcttcagaggactacacgtcctccacttcagaggactacacgtcctcgccttcagaggactacacggccttcacttcagaggagtacacgtcctccccttcagaggagtacatgtcctcgcctttagagggctacacgtcctcgccttcagaggactacacgttctcgccttcagaggactacacgttctcaccttcagagtgctacatgtcttccccttcagaagacaacacgtcctcaccttcagagggctac

SEQ ID NO: 246227 - DNA, 364 bp, Glycine max
  unsure (1)..(364): unsure at all n locations
ctgagcaaaagcaggagcataaccatgagctgcaggaatggctgagtcaactaaaaagtgtcttctatgatgcccaagatgtgctcgatcgaattgaatgccaaacactgcgaaagcatgtgctcaaagctcatggtaccatcaaagacgaggtaagccacttcttctcaagttctaatccacttgtttttcgttccaagatggctcaacaaatcaaagatgtcagcaagcggctagacaaggtngcagcagataggcataagtttggtctccgaataatgatgttgcacacgagttgtgataggagagaccaagtcgatgacacactccgtgtgatgactcgatgtgtaggaggaacatgata

SEQ ID NO: 246228 - DNA, 325 bp, Glycine max
ttggatcaaacatatggcatataagaatgaaatggagaaggatctaataataagataaaatttcttatttgagtacatacttgtcgttctttttcaatagcatatatattgtgctccctttattgtgacattctttcgctgatcaaaacaagtatgagccagatacagttcgtgatcaaattcaatggcatattcttcttccggagcttctcaaataaaatatgtttttcttcttctttgtgatctcttgcttgtctcgggattgacgggtgaaatatcagtgcaaatatcagataatattcctcgaataaagtatgatgttttt

SEQ ID NO: 246229 - DNA, 316 bp, Glycine max
  unsure (1)..(316): unsure at all n locations
tctcacagnctttagagttgggagccaatccaatccttgtgtccggactctcagccacttatgatagccgccgatggtcccattactgcttcccctaagctctctgtcctttcttcacgccgcatcccatgccttgcgaactccttggagtacctttgcattggggtcactgaaaccccgtgtaatgaaaggcgtgatgctttcgtctaatggcattcctctcatggngtagccaagctgtcttatggcgaggacgggattataattaatacaaccccatgttctcatccagggaacatntggacatccttcgcat

SEQ ID NO: 246230 - DNA, 449 bp, Glycine max
  unsure (1)..(449): unsure at all n locations
tccttaccctcggaagcaaaanagaatagaagggaaattttcaatcaaagaaaagagaaggaaaatttccaatgaaagaggaaaaaagaaaagaaaggaaattcccaatcaaagagtgggagaaagataaagaaaagaaagaaaattcccaaccaaagaatgggagaaagtaaaaagggaaggaagctcctggtcaaagaaaccagagaggtctttggaccagataatatctgaacagtacagaattgtcaccaaatgaacaaaaaggaaggaaaggaaaccacgacctaaaatggtcttctccctttaattaccaaccaaaatcccgtgcgctagcgacccttttttctcgccccgcactaaaaanaaaaaaacagaaaaaggaaaagccaggaaaatcaaaagccaataacacacataagccgatagaagagaccaccaaaagaaca

SEQ ID NO: 246231 - DNA, 350 bp, Glycine max
  unsure (1)..(350): unsure at all n locations
taaccaaagcatacaattccttatcataagttgaatagttaagggcagcggctcctaacttttcactaaaataagctatcggatgtccctcttgcaataaaacagccccaatgcccacatttgacgcatcacactcaatttcaaatgatnttgcaaaattaggcatagcaagaatgggtgcattagttaacctatgtttgagggcagcaaaggcctcttcttgtttcttaccccatttgaaacccacattcttctttacaacttcagttagaggagcagccaatgtactaaaatccttaacaaatctnctatagaaaccttgctaacacatgaaatccctcacctcactc

SEQ ID NO: 246232 - DNA, 401 bp, Glycine max
  unsure (1)..(401): unsure at all n locations
gattgaatagaataaacaatggccggtgtcagtcgctgtatggccccgactgatatccttcagccgacattgcacaattacttttacaaaggctggccgataatgtntttttacggtaggggaagttttttgtaatggggttgcctaacaaatttacaatgaaggtcggctaggtttttccgtgcgagctcaacccaggttgtgtttcggccgacactagcatgttatcatttagtcggccaagaaaacgtaagcccaccccggcacaaaaaaaacatcattcacggaaattgatcgataaaaatgatagctgacgtcgtcgtggagagatgaccgatcgaggtctaaaatggaagcatcaccggatgatgccgatcgaacatttcctaatcgacatcatg

SEQ ID NO: 246233 - DNA, 470 bp, Glycine max
  unsure (1)..(470): unsure at all n locations
ccgcggctgcagctgangatatggggacccatatatgttttactatgtggggtcgggcgatggtgcacaacanagttttccacatccacaaatcgcgcataaacccaccatcccttgttgcccacctccaactgagctcacgtactcccacgtagcccatatcctcatttctctcaacaacgggtccccatcaatcctcccaagcttccccaacatctaggtaatacaacattcaaacagaacaagctatcacagccaagaaaacagggcaaaggcagaaaactctgcccaaaacaccaaccaaaatcacagctttttctcacttaaagaccccagtaacatttccttcgttcccattcgttaacccgtggatcgactcgaanattttactgaaagtctctagtacataaatctacattttgaccgttgggatctactagcanacatccagaactcattctgtattactc

SEQ ID NO: 246234 - DNA, 447 bp, Glycine max
  unsure (1)..(447): unsure at all n locations
acaaggcagctgattgtatantttccgctccggagtatgatagtcaccgctttatgagtgctgtacaccagcagcgcttcgaggccatcaagggatggtcgtttctccgggagcgacgcgtccagctcagggacgacgagtatactgatttccaggaggaaatagggcgccggcggtgggcatcactggttactcccatggccaagtntgatccaaaaatagtccttgagttttatgccaatgcttggccaacagaggagggcgtgcgtgacatgagatcctgtgtaaggggtcagtggatcccgtttgatgccgacgctatcggccaactcttaggatatctcgtggtgttggaagagggccaggaatgtgagtatgaccagaggaggaaccggtctgacgggttcgatgaggaggccatcgcccagctgctatgtataccgggac

SEQ ID NO: 246235 - DNA, 336 bp, Glycine max
tttgctttatccgggtgcaactattggcattgtgttcattcaacgttagcaagatgttttttggtttcaccatcgactttgtcatatcagcaataattttcttttcttccttagtcaatccccgacgtatggatgtccaactaaggacttggccaattcatgattgtgaatcccacagatcaacttcaccatccaaccttcccctccatgcactggtttcccatgaaacctgaagggacaaccacatttcctactcccagtgtcttttctaacgaattctttattactacatttgtacgtaccactcctttcacacccaattaagaacaatgaact

SEQ ID NO: 246236 - DNA, 434 bp, Glycine max
  unsure (1)..(434): unsure at all n locations
ttattcatgctcatgcgcttagcgcaattctgaaccgcttagcgcacattagtgaatttcggattagcgcgtgcttttctcgctcagcggatggactgaagcggtgtgcttagtgagatgaagcggtgtgctcagcgaacttttacagctcatcttcttccaaattcttcctcgcgcttagccaatgagttttgcgcttagcagacgctcgctgagctagtagattggcttagcaagaaggtgaaaaacaacacttttcaaagtcgcctaattaacctgaaattgagagaaaatgattattaaccacacaaaatggaagtactaagtatttattacctatacttaatagaatgtacttataacactacaaaataaccataaactggggaagttcgatacaatntacacaggttntatacacaaaagttagtcgt

SEQ ID NO: 246237 - DNA, 427 bp, Glycine max
aaaaagaaaacaaaattggagacaagaaaaatattacaaaccattactagatacaaacgtgagtcacaggacggcgcggcagcagcgagcctatgatggcggcgtgggtggttgactgtgtgtgacacaggagttactaccagatacaaatgtgagtggcagaaggctagtgttgagttccttttgtttggataaaattttaaatttcgacgatgcatatttcgtcagcaaaatccatcaaatttttttaaatttttgacaaaataaaatctgtgggtaaaaatctgtcgataattgatactttccttcaaataaattatctgtcgttaattcaaaaatttccgacagataataatccttcgatagattccatcggtaattcaaatacttctgacggaatacatttcatgggaaatatatcatcgat

SEQ ID NO: 246238 - DNA, 322 bp, Glycine max
  unsure (1)..(322): unsure at all n locations
ctcaagcagtcttctacacttatcttcataagggttatgtgtactatgtgaggtttttatcctctcttgaatcaacttaatcttctttttggtttgttgcaagaatttggggtcccacgaccatatttgcaccatcttggtaacaacaaaggggtgttctacacctcctaccatataaagnttcaaatggtgtcatgccaatgctagcatgaaagttgttgttgtaggtgaattccaccanaggcaaaacctcatcctaactacctagatgatccanaacacatgcttgcaaatttttttctaatgactagatcgtcctctc

SEQ ID NO: 246239 - DNA, 289 bp, Glycine max
gctctcagccacttatgatagccgccgatgatcccattactgcttcccctaaactctctgtcctttcttcacgccgcattccatgccttgcgaactccttggagtacctttgcattggggtcactgaaaccccgtgtaatgaaaagcgtgatgccttcgtctaaaggcgctcctcttatggggtagccaaactgtcttatggcgaggacgggattataattaatacaaccccatgttctcatccaaggaacatttggacatccttcgcatgaagatacaatcctgattc

SEQ ID NO: 246240 - DNA, 278 bp, Glycine max
  unsure (1)..(278): unsure at all n locations
cggagtatgacactcaccgattcaagagcgctgtacaccagcagcgctcctaggccatcaagggaaggtcgcttctccaggagcgacgcgtccagctcagggacgaccaggatactgacatccaggaggaaatanggcaccagcggagggcatcactggctactcccatggccaagtnagagccacaaatagtccttgaccttatgccaacgccggccacagaagaaggcgtgcggacatgagaacatcggcaggggcagtggacccgttgatgccac

SEQ ID NO: 246241 - DNA, 372 bp, Glycine max
  unsure (1)..(372): unsure at all n locations
aaccaaattattaaaaaaccattattggacctttgcaacaaaacttaagtgtccatgttcggcattttttttaaaattttgtccgacacattattaatatccgtgacacattttttccgtagtttcagcgtcaaaaaatcccaagaaaatatatcatgcaccagttccatggacaaccacctaanaatagaagaacaaaatanaataaaaaaactatgatttggaccttntcaaagcttaagggcccatgttctgcattttttttanaattaagtccatcacagtacgaactactaatattcgtgtcacattttttcatantttaaacgtcaaagaaatcaaaaaaaaatatcgtgcaccagtttcatggac

SEQ ID NO: 246242 - DNA, 452 bp, Glycine max
  unsure (1)..(452): unsure at all n locations
acttaatgccattaacctanggaattaaaaaaaaaacttaatggctgagtgtaactgaaattgtggcaaccaaaagtcacccccaacagccaacaagtcagccaccatttggtctcccaaaagggtgatgcctangttgccaattgggcccttattacaacttgaactaaacctaactaaagcccttntagttgattaacccaaaacatatttttggttagccaactctacaaggattgggccattatttagacaaactaaacactctaaaattgagacaaagtggtgtcatttagtcctcctccatttgggccatgatacaactcacaaccttggactnttctccttgaaacttgngcttgtattcaaatagtatggaccagcacttgtgaagaagcttcttggcttccatgctctagcccttgcatanngtctcaagtcttcaagtggat

SEQ ID NO: 246243 - DNA, 302 bp, Glycine max
atcaaaacgtcaaaaaccacataatgtcaaagcagaaaaagctgaaatccaaataccacaagataaataaagtacttaacataataatttaaaagacatataattagaaactaaagtctaagaaggcggaggtggtggtggaagatcgaaactctgacgaatgtaacctacatcctcttcaagctgtgtgaggcgaatgtccataccggcaaagcgtgtatctaacgagtcaaagcggtcaccaacataagaacgaagaccccgtaattcggagaggacttcattcatgagtgctgaatcat

SEQ ID NO: 246244 - DNA, 288 bp, Glycine max
  unsure (1)..(288): unsure at all n locations
cgtgggtatggcttttgaaaggggggaaaagaagtttntgaatgcaaaaaccgtccctctttcgtcattcttataatatggtgcaggggtggctcgcccaggcgagcccagctcgcccaggcgagctaacctgcacttttttttttttttttcttaaaaaaaacaaacaaatcgtaaaagaaagctgccaaatacaaaggatacggcgctgccttgcaacgacattctctgcttgtttccacagagaaaggaacgatcggtcggtcgtgaccccatcccccttgcgtt

SEQ ID NO: 246245 - DNA, 341 bp, Glycine max
  unsure (1)..(341): unsure at all n locations
acagaatggtacctggagatatgtcgcggaggtcaggagaccttgcggacgtcacgtggggtgctatngcccaaaaccaagcttgaccaatcccgacccaacccgggcatagtcggtcagtgagaacctgtgatgtacctaaataggcgagctcctggcagccaacagataaaaggaacaaagaccacaaagcaaggaggcttgtagtggctggccagctgtgaactatgattaatatgtgggttatggcctccggtaattgattaccaagggtgggtaatcgattacaaggctcaaaaatgatgacaggaggctcagatggtctctgggaatcgatacca

SEQ ID NO: 246246 - DNA, 399 bp, Glycine max
  unsure (1)..(399): unsure at all n locations
actacactgaaaagagaggggagagaaaggaacatttccatgaatggtctgacatttatgatgggcataggaaatgactattattccatctgaatgttatgcatcacgctatgcaaattgcttatatcattgtctgttgcaacaatggttgcttgctttctactnggggaactttatattaaatgttcatacacagttcacctgctaatcgtgcatctcatttgtattttttaaatgagaatgctntctttatttattgttggcatttgtttttctgcaaaaagaaactaattgatccaaacaacatgctgtgttattttacttcgcccccttactttctgctggtgcttcatatatactacagcgttctctcaactcgtgtcatgctatagaacttgg

SEQ ID NO: 246247 - DNA, 465 bp, Glycine max
  unsure (1)..(465): unsure at all n locations
ctcatgcataaactttgtactcttatattgtgagtatgatatcctcccaactaatatatattttttaaaaaataatgtattaaaatttatttaaaaataaattatgaatttaattcctctaacatttatcaccaattttttcactcgaacattaataatatagttctgtaaaaaatacatttataatatagtaaataactgttttatagactacaaaaaataattttacgttttgtaatatataagacattacttagttttataaaagttcagaagattgaataaatgtcacataaatcatagcatgtgatgactgaagcaccttttacaacatcttctggttgttctgctnttttatttttattcttaaaacgcttgttttatatatgaaaaattgaaagtagtgtaaagtcattctagaaattgttctattaaanaagaagaagtgagaagtaaattaaatag

SEQ ID NO: 246248 - DNA, 320 bp, Glycine max
cgtgaaaagacgatcggaaacgacgaaggaacggtctgaagatcatgttcatggttgcctgaaacgatgagggagcattgcataaaccaaaaggcattaccttgaattcgtaatgcccatggtgggtgcgaaatgctgtcttggcaatatcggaggaatgcatcctgatttgatgatagccctgcaacaaatctaatttcgaaaaccaacaagccttacctaattcacccatgagctcatcgatggtgggaatgggaaaccgatcacggacattcatcgcgttcagagcctgataatccatgccaaaatgccatgaacta

SEQ ID NO: 246249 - DNA, 423 bp, Glycine max
  unsure (1)..(423): unsure at all n locations
aattctatctcctttttatgttntttttaagacttcggagtcaggtagcaagtagataccatatcgtatggtggaaaatctcacattcacatggacaacaacatgaggaggacagaaatcataatggcagatacggtggtgatattccaacccatgctttgatatgtagccatgtgtatgtgcggtcatgaaatctcccggaggacaatatgtttgattctcattcactcccaaccttttattgaactaacatataatacccaagccaccttgaaaaaatatatatgttgttaatttagcatatcttcagggatgaaaatgatagtaactggttaaaatcagttatatgaaacagttagcagttnttcagggctttatttggatttctctagcttcagggacccatgtgataacatttaacac

SEQ ID NO: 246250 - DNA, 384 bp, Glycine max
  unsure (1)..(384): unsure at all n locations
atcgttcgcttactcgaaacccctcatggtagattangcatctaatacttactttatagacatgacaacaataattactggagattttaaggatactgggcttgctttgcagcgacgctntccgtttgtcccgggctaagcaaaggatgacgacctattggttgtgaccctagcctctccttgcgtccgtccctaagtacttgaaagtaggaaacaacaatgcgtggcaaatcgtgactgcgtcgtcgtcttaccttgattggtttctgcctttgaccttgtctcgacctctgaccgttgcctaagatgattctgcccctatttatcacaaattatgcatgcgtatgcgtatgcatgaatgttntcaaatgcaataatcttctt

SEQ ID NO: 246251 - DNA, 316 bp, Glycine max
  unsure (1)..(316): unsure at all n locations
tttgttattaaatatactttgtgcgtttagaaatgattaanaatataaaaatttcttatgggtttgtattcggtggtaactttgtgtatcttagttctttttgttgattggtaagttggtattaaatgcatgcgtgtcaattttgattgatgctttgccaagtgattcagcaatattactgccaatacagtaagatgtggactgaatggttaccatggngttgattcagcaatcttactgggcatacagtaagttggtattaaatgcacccatgtcaatcttgattgatgccctttcacctcaccaaactcaacac

SEQ ID NO: 246252 - DNA, 443 bp, Glycine max
  unsure (1)..(443): unsure at all n locations
tttctctcttntctctcaatggggcttcattctttcttctcctttnacccccaatcttccattttcttacacaaatttcattgctcttccactggtgatgataatggaaggctaagcacttcatcaatcccaggatctactcaaccaaagtaaatttcaattattggttaagaatttctattatttgngaatcgttatctttntcttgaatcctatnttttatttcatgattatgaatatgcttaggattgaaaatgaattangttattggattcatnctccttatttcaaaatttaatcacaaattgtttggatgatactctaacctaatttgtgatctcaatgaatttagggaataattcatttgaactatctctaatgacatttattgaactttcacaatcttaacatcatttgtagaaactatgataattcattttgca

SEQ ID NO: 246253 - DNA, 408 bp, Glycine max
  unsure (1)..(408): unsure at all n locations
tctagtccaacaagagggatctgaggatgaagcttagtttaagttagtctaaacctacgagggctatctaaattgagcctagtacaacaagagggatctgaggacaaagcttggattgatttagtccaactagggatctacgtttagtaatttaggctatagcatagaacacacaagcatgatcgattagagaaacatccttatatgcatcagctggtctgttagaaagacctaacacttctacctactgctgtcnaatttaacttacttgcattttactgtttttatcctagacctagtttaattatgttttaaaccatcaattatcaatgtttctttcaacaatgccttatttctgaatttcatccagtcttggtctagtttccctgagttcgatactcggattca

SEQ ID NO: 246254 - DNA, 323 bp, Glycine max
  unsure (1)..(323): unsure at all n locations
actcacacagagacaaattacactatgactcaatgcaaatcgcaactcttgcgcagacggaaatctagcttagataattgttatgtctttgtcaagctntaataaatcaatagcacgcacacacacacacacatacataacacgaaatttatgattaagaacatatatctactgagattaaattatacatgcacaaacgacacaacatagagttgtctttgtcagtctaagttgtaattttagagtgtacaaacttaactcatttaatatttatatatatattagacacttatagtcccactagtaaataaaattattttaac

SEQ ID NO: 246255 - DNA, 438 bp, Glycine max
  unsure (1)..(438): unsure at all n locations
ggagaacctngacagcaatcctctcttcaatataagggccctcataaggagaactatggcaacgccactatatgcttcttgcctcctcctgagttacacaccttcgtagaagattgtctgctccaattctaaatagataaggatcatcccacacaaaatatttagcatccctgaaaaacttcttcttttggtgccaagttagatcatcagggagtgcaccaaccgctcttaaattagaaatctcagcaaaccatggccttattgaaatgttaaatagcttctcgtcaagaaactcttcttgaatctcaaatccttgtgtggtcacctcatcaatagtcaacctagacagatgatcagctacatgattttcacttccctttctatccttgatttccaaatcgatttctcgcaacaatagaatcaagtcgggtttagaat

SEQ ID NO: 246256 - DNA, 366 bp, Glycine max
atacttctcttaatatggatgattacaaatctttgaaaatgagtttgaaaagtttaaacaggatcactatgaagaacgtatgaagttacaaattgagctttcctatcttaaagaatcttttgagaaaaaaaagatgatggaactcaataaaccaagaggaggagagggggtaaattggttttcaaaacaaaatgtaccattcaaaaataaagttacaaaaagactcttgtatggatcgtatcacacacacatatttgaataaacgtaataatacttaataatccttcttaaacatgatccttattaacatcctttcttcacaaatataaaacttgaactttcatgtaaacttgataatacttgatg

SEQ ID NO: 246257 - DNA, 383 bp, Glycine max
  unsure (1)..(383): unsure at all n locations
aaatcattggtttattaatcattggatgacaactcttgttactggacaatcagggtaaaaacatatcttattcattaactactttcatcttgaaaagttctataaatttatctaacacattattcaacccccttcttctagcgtgatgtatngtactacactaaagaccaaaaccaggaataattaaggggctaaacacatatttttcctcaattctaaaactcaatatttctataagttgaaatttttttaaaacgctcttgatcacgaaactagtatcatacagcatgagactatacatcctctatccagatctataagctaatatacaaaagataaaacaaaagtgaatacataatatcccatgaccccattcctatcat

SEQ ID NO: 246258 - DNA, 383 bp, Glycine max
ctgcagcttgcaactttgcccgacctttgttggtatttactatcctgcctggacagtcaaccaccatcccaacaagtatattcatcactttttggcattaaggcatcattgagcgttgcattttgaaacccattgtgaaatcgaggaacatggtatatggaagatacaagggacgttgtaattgcagtgcacaagatggcgctaacaacatatttccattgcatttgccattgcgagggtagacagcgatgggtgacactctttttgcaaacttgaaaacatgtgacaccacaacatggatatgctaacctctcattgcatgagtaatcaaaagtcatacaaccacctgcagtgggtggaaacacacactcgcacatgtgttt

SEQ ID NO: 246259 - DNA, 440 bp, Glycine max
  unsure (1)..(440): unsure at all n locations
accatctatgtcaacgagaagatcttagaatgtaacatcccattttttcgtatataaattaaaaaaaattattaaaaaataaatagagatttataaaaatattgagtttttataaataaataaataaggagaaataaatttattaaaataataatttgaaggaaaataaaaatgatattttatttattcatttgataggaaataaaataaagtatttatttataaaatggagtaaataataggctgtgagtaccctaactataaatagaggcatcttaagttagttntgagactaacgatgcttcctacgcgtcctcttcctctcaatttcgttttcctttcttctcatcccaaaaccctctctttntcccgcatactacctgaattgtctcagaaaaactacaatctcngactcattcaccgttggatcgtcgtgaaat

SEQ ID NO: 246260 - DNA, 235 bp, Glycine max
caacatgtgactggtttcacacactcttaggtactgcgctgagcctctgaataaccttggactcctgtttgagtccggattcccaaaaaacgaattcatttattaaactcttaactaattggaaaatactgataacaaatataccgaataaatcgatgaaagaaacaaaggtctcatctggaacaaagcgacctgcggagtaactggaataaatcgcgcctgccttatggaactc

SEQ ID NO: 246261 - DNA, 357 bp, Glycine max
cgcgactggtctctctcttcccttcggagcttgagttcatttttgctaccccacagagctccgcgaaatttattccggccatactcttccttgcgagccctcttggtctcttgttcaagggctcttgcggtagttgcattctcttcccgtaatccggcacactccttccggatgtgtgtagcggccaacttgaacttctccttggcaagtttcgcctttcctaactcgcttttgagagcttggacttcttcgtcctcttccggtgcttcaaaactctcttcgctgacgacttttaacttggcgagccaatctaaacctcgtatatgaactttcagccattcatggtacccaccaatg

SEQ ID NO: 246262 - DNA, 392 bp, Glycine max
atcatctctcaacatctttgaactctttctacgaattttctgattcatttctcttcatctttcttaaagtttttgttcaatactttttctttgaagaaaagttctttgatcaaaaacttgtgttattcatctttttcattctcttctccctttgccaaaagaacagaaggactaaccgcctaaattcttttgtgtctctcttctcccttttccaaaagaatagaacgactaaccacctgaattcttttgtgtctctcttctcccttacaaaagattcaaaggactaaccgcctaagaattctcttgattcttccctttccctttaccaaaagagttctaaggactaaccgcttaagatatcttatgtcttcccttacaaagactcaatggac

SEQ ID NO: 246263 - DNA, 299 bp, Glycine max
aactccatggatcaatgcctataccacaaggtcagtggaaggtaaatatgttctcttcttttatatgtagatgataacttgcttgtcatcgatgatcgaggatcgctacatgaggtgaaatagttctctctacaattatgacctgaaacatatgggtgatgcatcttatgtcattgatcttaagactcataaagatagacctcgaggtatcttaggtctatcatagacaacctatcttaacaaacttctggacagctttcatatcgaagatcgctcattcagtgtccttcccattgtga

SEQ ID NO: 246264 - DNA, 236 bp, Glycine max
  unsure (1)..(236): unsure at all n locations
atgttcaaaggtgaatgcacacataggtgcacaattactcatgcaaagtngataattaaagagagagagagagagagattctcangagtaataatagagaccgagagagcaaactacaatatgtngctggttgataatatacatgcatttgtgaactattaattaggtggngtgttggcaatntcaacattatacaaacatgaaactgattttatcacactcaattattgaataaa

SEQ ID NO: 246265 - DNA, 307 bp, Glycine max
ggagaatgtctactactacattgcttcttcaccacctgaagcagggagggagagatataaattaccaaacatcaccaatataataaaaaagtcaatatatcttattaatataatatgctaaggtactgaatgtgcactatgcagcaaattaattaattgcaatggtagtattaccaatggttgtaatgcaattttttatgcttgtgaaaacatacttccctacacaatatcaaagttaggaaaataatttgatgacttgctaaacacatcctgaaaagtgttttaaggatttatttggagtatgcgt

SEQ ID NO: 246266 - DNA, 231 bp, Glycine max
  unsure (1)..(231): unsure at all n locations
cattcaaagttctaaggcaataatacatttcccaatgttaaaatcacctaactangcacacaaatggttgatcggaccaagagcatgcaaaatttaagcactgaaagaagcattgaacacaagaaacaaaatcaattaaatatgagattaattacatcagttgtacattagaaatccccaacaagggtgtttagccagccattacagacgaaaccctaacaataataagct

SEQ ID NO: 246267 - DNA, 327 bp, Glycine max
  unsure (1)..(327): unsure at all n locations
atcgtgggatgtatgggttaggctataagcccactcaggccgatataaagagaagcatcgcgggaagggaagagcggtagtcaaaactcgcggttgagacaagaaggtgaaggaagcccaccctgccacataagtaggagctttataagcgcgggtctgggggacgaaggtcaagtggtcgcgatatacgaagatggtgttctgagtacattggatttggtatgaccatgccctcctgnattccagctgggaaattggcgagtggaagaacgcctcggcatttacgcgacgagcataatgtaaacctttacgggtttaaaagctcta

SEQ ID NO: 246268 - DNA, 221 bp, Glycine max
  unsure (1)..(221): unsure at all n locations
aatcgaacttttcaattcattttatgtacccttagtggtcctcatttgtttcgcgtgcttttatttttatttncatttacttttcgtacccccttttgacgtgctttagtcatttatttaagtcattntctcacctaatcaaaaaatgaaataaatntccaccgatcattcgtattgtaacatcttttaatttctgggtaaatgaattttgaccgttcagt

SEQ ID NO: 246269 - DNA, 259 bp, Glycine max
acaccccaaacatcctttcatagatagaaatatatttaccttgatagggaaaaatcaacagaggatttagcttttcatagtccgaaaaccttcttttctaccaaaagaagaacaagatgaaagacttcccaaacacacgtggtgaggatatcttcttcacctctaggatctcacaatcactcacaaactcatctcaagttctcagaacggcttccgctttgaactcgcatctctgtagatcttcacacagcaaaatctc

SEQ ID NO: 246270 - DNA, 377 bp, Glycine max
  unsure (1)..(377): unsure at all n locations
aagagtctgactctctagttggggtgaatttcatcaacaatgggtgtccaaattcctactcatgtnttgattaaatagaagaaatcaagaggatcaaatctagctttcagaattgctccttctcccatatgatgtgagaagctaactagttaattgattcctttatccagtatggattctctcaatacaaagagttttattttttatttcttgctagttnttgcgcgagatccctctttgggtgacttanattgtattcgcttattgaagtaataataaatttttgttcaaggctttgcctaacccgaaaagaaataagctaactgaaacaggataatcttaaaacaatttcatactcaaactactttatcaacaag

SEQ ID NO: 246271 - DNA, 419 bp, Glycine max
aacttagtccgcacatccctcttgtaagactaagtttcaatcctgcttcaatcaagttctaaggcaacaatacatttcccaatgctaaagtcacctaactatgcacacaaatgggtgatcagaccaagagcatacagaatttaagcattgaaagaagcattgaacacaatgaacacaatgaattagatattaaagtaattacatcagctgttctttagaaatccccaacaagggtgtttagccagccattacagaaaaatccctaacaagaataagattacaaaacctatgtatctctgcaaaagctgctcctcttactgcctccagagcatttttccccagataggcactatggagtgctctggaatgttgtaaaattcttctgtaaaattctatgtcaagctgaccttaatttacac

SEQ ID NO: 246272 - DNA, 362 bp, Glycine max
ctaattatgtgggccatcaaatctatcatgtgttgacagtaattgattagcccatgaatcttcctcggggccatacatactttggccatggcttttgctttggctaatagacgcgggaggtcttgacttccattcaaggtcaaggcgaacctatccatccacatagtcgcttcttgatgcaatgcatcaatcaccctccctcttgcttctttttcggcgtacacttgtgcaaaatcctccactagcttttgttcatgggccacagactggttcaactcttccttgtattgccctatgatagctagcatgctttgctccgtggcttccaaatgttgagccaaactcctcttcgatcttgcgta

SEQ ID NO: 246273 - DNA, 268 bp, Glycine max
  unsure (1)..(268): unsure at all n locations
tgacgatattggtacgagacataagtccgctagatccgagaatgggtaatngccgaggccctcgactgctctcaacctctcttcaagcgcctcaatctttcccttatcttccacaaagggaatagattcttttacgggtgtgggtgaaatcgggatatggcggactattgttggttggggtagttcatggnggggacgaatcttgatgtggagcangggaccgagatgggtatctccttcctcatcgtcttgcccaggatagtcgtca

SEQ ID NO: 246274 - DNA, 345 bp, Glycine max
  unsure (1)..(345): unsure at all n locations
ctcaccctctagattctagatcgaaaagaattccctggttataaaaatgactgatcctacacgaaccttgatttgccacacaaccganatggcttttagcataatntatcttgagaccaganaccatctcanaacacctcaggataatntttaagactttaatattatccttagtggcagccccaanaagcagagtatcatctgcatattggagtatgttaacttcctccttttgacttcccacttggtagctgatgaaaacgctcttacatatgcgtgtcctcatcaaacttgtaagggcctccactactatattaaaaaacaaaggtgggaggggatcaccct

SEQ ID NO: 246275 - DNA, 406 bp, Glycine max
tacctgcagacatagtgttttctctttgggtcattgatcacgttctcattctcttttttgaccttatctgatttttgttttcccttgaccaaatgtcacttaaacgaataacaacatcatatgaattacaattctttcaaacttgtcataggacataaaatactgcataagttctcatgttcccttttcaaatatttgccttgtaataaccttgcttccatcatgtaatatgtggttcacaagtttaatatattttgattattgacaaacaaaacccttgtagcttaaacatctttttgcatattatctagttagattcatctaatatcatatgtaagtctgaatgggaatgcttttctagtctacttcacattctgttatggtacatgtgcactttatctatatt

SEQ ID NO: 246276 - DNA, 420 bp, Glycine max
  unsure (1)..(420): unsure at all n locations
cttgacacggggccactattgtgcaaagagagagagagtggggaccacaaacgctctctgtagcatatcttcaaagaagtacaattggccagtgttgcctagtgctcaaagatgacttccattgtatgaatcgaaggaaacgttaacaacataagacaagaggaattaagaatgtcaagacaagacaatctaaatcttcccttntgtacgctatggcgcaagtttcttattgagcctatgaacgttactttcttgtgaatgttnttggtacttggatcaagtaattgttccattgctgttgtactgtgagccaagtgctaaagcacttgtcttctcaaaggctagatgttgaagcaatattggccaatgattgatactttgcttttctgcaaagcctttagctcatgttatttgcttgat

SEQ ID NO: 246277 - DNA, 401 bp, Glycine max
actcggatgtatgattgagtcccgtagtatatccagacactcgaaattcagaatagaagctctaagcacattcaaatgacaataacttttaactcggatgtccgattgagtccggtaatacatcgagacgctccgaattgaaaacggaagctctgagcatattctaacgagaataacttcttactcggatgtccgattcagtcctactatatatcgagacgctagaaattgaatatcgaagctctgagcaaattctaacgacaataactttttactcggatgtccgattaagtcctgtaatatattgagatgctcgtaattgaacatggaagctcgtagcatattgaaacgtacataattttaactcgaatgtccgattgagctcagtaatatatcgagac

SEQ ID NO: 246278 - DNA, 413 bp, Glycine max
  unsure (1)..(413): unsure at all n locations
cttctggagggacatctcgacttgctttccacactgatcttcctcatatattctgccttcctctattttcagagcgcggatgcctctaacagcacctttgtcaatgattntcttcatgcctcttaagtgcagatgtccaaatctttgatgccatattctgacttcatcttctttggaggatacacatgtggaggagtacctggttccttgaggtggccatatgtagcagctgtcctttgatctgctgcccttcattagaactctactcttctcatttgtcaccaagcatcctgactttgtgaagtgtacattgaatccttcatcacacagctgactgatgctgatcaagtgtgcagctcagcccttcaccagcagtacttcgttcacactacgaagccatcatgaactacctt

SEQ ID NO: 246279 - DNA, 311 bp, Glycine max
ctgatgccttctgagatgaaccttctggactcccctgttttgagtcccgtgacttcaccagaagaaacggaatttccattttatttcaaactcattaactaatttgtgtaataatactagataaacaaaatagtaccgaatcaagatcgatggaagagaaatcgaaagtgtcgtcatctggaagcaaaaagcgagccatgcggtgagttaactcggagatgaaatcgtcgtcgttgtccttcatgggaagctcggggagcgggtttaaagctgaggcgtggtggatgtcgtctttgtggctatgctgtgac

SEQ ID NO: 246280 - DNA, 481 bp, Glycine max
gcttgaccaacggaatgcaaatgacttactcagtcagatttgttacactcttcagcttttggggatggactccagcgtttggctcattactttgccaatggccttgagacaaagttggctgctgggaccccatcatacatgcccctagaaggaacaacttccgctgatatgtggaaagcttacaaactatatgttacatcctctcctttgcagaggttgacaaattatttggcaacccagacaattgttagtcttgtggaaaatgagggcagcgttcatattattgattctggcatttgctatggttttcagtggccatgccttatcaagaagctctcacaaaggcatggtggtcctccgaggctctctataacaggaattgaacttcctcagccgggatttctgcctgcagaaagggtcgaggagactggacgactgttggcaaactactgcaagaagttcaatgtccctcttgaataca

SEQ ID NO: 246281 - DNA, 244 bp, Glycine max
gggcaactggggatggtgtgcttatgcttgacttgtggaagtgggagagttgatttgcgccatcgcccgattgccacctagtaccacatatgacgggtaccccatgatccaatcagcttgatgtgagaaaacgtggaagagttagtcttcctacttttgtttgttgaccacagagtggtacctagagatatgtcgcgggggtcacgagaccttgcggacgtcaggtggggtgctattgcccaaa

SEQ ID NO: 246282 - DNA, 365 bp, Glycine max
  unsure (1)..(365): unsure at all n locations
gttcagccccttaggcacttctctctctttcgaatttgcttggaaaacatgtttccgtgaagaaaatctaagccgaggcgcttccgaaacgtttccgtaacgttttcgtaaggaatttcgcgaaggtttcgaccattcttcgacgttcttcattcgttcttcatcgttcttcgatcttcaacgggtaagtacctcataccaagcttttcaattcattctatgtacccgtggtggtccacattgtgtttcgtgtatttctattctcgtttcatttactctttataccccncttttgacgtgcttaagccattctatttacaccatttctcgcttaacctataaataatataaatttccaccgatcg

SEQ ID NO: 246283 - DNA, 192 bp, Glycine max
aagttctcacttttgttttcctcacttcaatgccgcgtctgaagttggatcacagtagaaaccgtagagcgccgttccagcgtattcttttaactttaagttcttaactcttgtttgaactttaagtttgaactacttttcccttttataatctcgaattcgtaatcccattcctattctttttatttttgg

SEQ ID NO: 246284 - DNA, 413 bp, Glycine max
  unsure (1)..(413): unsure at all n locations
tgtgacttttggaaatgtatttttcgaaatcaatcactggtaatcgattaccattaaggtgtaatcgattacacatcaataaatgtgactctttattttgaattttgaaaattaaaacatttagaaacacttgtaatcgattacaagtattgtgtaattgattacacaagtttaaacacaagttgtgactcttgaaatttgaaatctaacgttttaaaaacactggtaatcgattacgagagagtaaaactctttggtaatgatattgtgaaaacttcttgtgctactcaatgttttggaaaancgttttagtacttatcttgattgagtcttcccttgtttcttgaatcttgagtcttgaatcttgatcttgattattcttgaatcttgattcttaaaacttgaatcttgat

SEQ ID NO: 246285 - DNA, 356 bp, Glycine max
  unsure (1)..(356): unsure at all n locations
attggcatggcgaagtatgtagatcccggatgttgagacgttccaacaccaaagacctttgtgcatactgctatattcaagaaagatacatggaatacttcgtggtgataatttatgaagagcctaatctcgcaacaagataacccgacacccaatgggtgaaagtgagcataatttggagaaacatcatgtcagagctcaaaaggagatataccttttaacaagggagtaggtgaccgatttataatataaacaacacaacaaaaagcatctagccaatacgtagtgggcatgtgggaatgaanaagcattgcaagacctgtctcagtaatatggcgatgcttgcatttggccct

SEQ ID NO: 246286 - DNA, 432 bp, Glycine max
  unsure (1)..(432): unsure at all n locations
atagtgatacactttcatttaacatattggcctctcattgaaagttgcatccccgacaacaaagaatttcttactatcatcgttcaggtatgtatgtgattctcacacttatgtgcttaagtattataggcaatggttgacatgttactattctntagtagtacattgtaattcattgagtgagccatagttccccgtttaagattgaatacaacgattaatacggacagtttggattaattgttgtattcaatcttgaattgtccgtttggacagtttgggaagacaaattgtttttacttcattntgacttataagttaagtatgttgtgttattnttgactaaatctcgagcaatgcatcttggctttgtctctgggtgcatacatgataggcgtgaatngatgtcacccttttcatgttgtgtacttg

SEQ ID NO: 246287 - DNA, 345 bp, Glycine max
  unsure (1)..(345): unsure at all n locations
gcttcaccaccaaaaatgtgtcttgtataaaaaagcttgaagatgatgctttaatggaggaaaaaaaagagagaaaggggggagcataatatttgaaggaataaaagagggagagaagtggaagtttgaagtgtgtctcataagactttcgttcatcanagttacaacaagtgttacacatgcttttatttatatactaggtagcttccttgagaagctttcttgagaaaacttccttgagaagctagagcttagctacacagatcccttcataactaaactcacctccttgaaaaacttncttgagaatattcctagagaagctagaacttagctacacacacc

SEQ ID NO: 246288 - DNA, 387 bp, Glycine max
  unsure (1)..(387): unsure at all n locations
gcattaagaactagcttctttcttcctttattgactttagttgaatacacccttggttggttctctatttggttcttaaccctctatgcaacttcttacaaactctgacctagattcctcttctttatgtataaaaaaagtgtcaagtgggaggggaatgaggtcaaatgatgttaggggattgaactcatagacaacctcaaaaggggattgcttggtggttctatgaaaccctcttgatgtgtcattattttctcctatttcttaacccttcttgtcaccaatntaattactgatttactctaattgtcaaatctattattcagttttatcaatggggcccactcaactaatttggtggttttaattcaatttcacgataattat

SEQ ID NO: 246289 - DNA, 316 bp, Glycine max
  unsure (1)..(316): unsure at all n locations
tagctactcagtnggccaatctccctcaaatgctactacaaaacctacaacaagctcagcaaaacatgttgggtgtcgtcatccaaccacctcccattatccaacaacaaccaactccaagtatattgcttgcacctgctgaaagaaaaccatcatcacccacatcaacaccaccagttcagccaccaccaccaccaccgaccaatcaagagtgacaatgatgtcccatcataatttctttctgccaatgacaaaaggaggagaagggcatagaaatttgatttatgtaaataggacactcttaaaaaatacaagc

SEQ ID NO: 246290 - DNA, 454 bp, Glycine max
  unsure (1)..(454): unsure at all n locations
agcttatgtngcanatatttacaatagattcttctatcctcagcagcaaaatcaaccacagcagagcaattatgacctttccagcaacagatacaaccctggatggaggaatcaccctaacctcagatggtccagccctcagcaacaacaacagcagcctgctccttccttccaaaatgctgctggcccaaacagaccatacattcctccaccaatccaacaacagcaacaaccccagaaacagccaacagttgaggcccctccacaaccttccctcgaagaacttgtgaggcaaatgactatgccgaacatgcagtttcagcaagagaccagagcctccattcagagcttaaccaatcagatgggacaattagctacccaattgaatcaacaacagtcccagaattctgancagctgccttctcaagctgtccaaaatcccaaaaatgtcagt

SEQ ID NO: 246291 - DNA, 418 bp, Glycine max
  unsure (1)..(418): unsure at all n locations
acgactgagaaaactggggcaaatgaagagggtgagaaagagggagaaacccatgctgtgactgccattcctatacggccaagtttcccaccaaacccaacaatgtcattactcagtcaataacaaacctcctccttacccaccactcagttatccacaaaggccatccctaaatcaaccacaaagcctgtctaccgcacttccaatgacgaagaccacctttagcacaaaccaaaaaaacaccaacaaaaaggaattntgcagcanaaagcctgtagggttcaccccaaattccgttgtcatatgctaaactngatcccatatccactcaataattcaatggtagccataaccccaaccaaggttcctcaacctccatttttctgaagatacgactcgaacgcaacgtgtgcttatc

SEQ ID NO: 246292 - DNA, 344 bp, Glycine max
aagtacatgttttcgacttaaaaaattctggctcttataactcttatatttttataaaatcattattcacatatcttaaagtaagtcaaaagtatctacatctcgtggaagtgtaactcataaaagtataattcttagtaaccaaaaataaaggtatgagttaccatagataatcaaactcgtagaaaaaataattccttgaaaagaaggcgggaaaagaagctaatttatttgtgttccaagaaaaaagaggataaattcaagtttttccatgtaaacaaaatctgaactattgctaatgacaataagagtgatctttattttgaattaagagaacattactg

SEQ ID NO: 246293 - DNA, 434 bp, Glycine max
aaaacatgtccctcgtccaaggctctgttaaaccaaaggttcacccttggtgagctactctgttgctaagttccgtctccacaagaactcaaggtaagcaaggtctacccttgacaattttttctattcctaactcttatttgtgtaggaaaacaagtctgcatgaacattgcaaacccaaggtccacccttggtatgcacttctacaaaacccaaggcacccctttggtcaactcactccttaagaaacatgacgatcacaatcaaaggtctaggttccataagacgaactaccaccagaatggtcgacaagactcttaatcacgtgaaagtcatacttacctctcacaaccattatgggggaaagctccataagtcaagacgacctatcaccataatggttgacaagaccttcaaccaggtgcaaatcaaac

SEQ ID NO: 246294 - DNA, 422 bp, Glycine max
ccttagcatcaaaggccatagcatcaacaagtagtcaacgggcagctgtagctgttgcaaaggaatgtggggatacggataatgctactgtcaagccttataaggagcctcacaatccagctacagaggatgtagttggtgattcacatggttttccaaacgggcaccaagatacatcaatgttgacgaattatgcttatcatgtggcatccacaaggagagttgtcaatgccaacataattcactcgctctaactcaacaacaatctggtttaagcatatcttgatatcatgttaattagtctcttgtataaggtaattttaaaaacatgtctgaccacatgtgtgcttgtctcgaaatatgccttaatttcagtatgttgcagagtgatcatgctgttcatgggcttctaaacactacat

SEQ ID NO: 246295 - DNA, 403 bp, Glycine max
  unsure (1)..(403): unsure at all n locations
gaccagaacacatacggctaagaatgttcaagagcgcgagaggaatacatgaagtgcgcattnttgttttttaatccaaatgaattaagacagtcttcttaaacaacccgccgtaattttaattttatacaacattctaagacggtttttactaaccgtcttaaaatgaatgtcgtaaaaagctcttattcttactataattacaaaaatgacaccgcactactttctacaccggttcccaaacaaccgccgtagagtccctggtcgaaattattggatttctagaagcgttctctctgtcttgcacgtaagtggagccaatggaaattggtatggactgtgaattggctttgctatggtggccaggtgtacacgcttaaattccaaaataacatattgcatg

SEQ ID NO: 246296 - DNA, 422 bp, Glycine max
  unsure (1)..(422): unsure at all n locations
ctctcaaatttgggccatatttttttggttatgcaaaatgaaaatatatggtccttcccaccattctggggttcagtacatgactcttccggccactgaagccaaccaattcctttttactaactaccctaataaatgacacgcgagaaaacgccaaaagaggggattgtggtgaaagccttaacatgttcaagcaactntgtgcttgcagcttcacctaggattcagtctctttggtagtatacaatggctttgcttgatccatgtagcattgtaggagaaatgactttgttgttattctttctaaaataaaagtaaagtatatatgacaagatttatataatttgacatgaatttgaatctacgacctgtatataattactatactacatctagaattcgagagcctgaatctaaatgat

SEQ ID NO: 246297 - DNA, 372 bp, Glycine max
  unsure (1)..(372): unsure at all n locations
aaacacacaactcctaatttttctcaaaataatttatctccgcggcttggataaactcactgagtccccacagtgggtcccaatacaatactcgtcgcgtattaacttctcgtccttaaagggtcttataatcatgtgattgtacgattcataactctcaacttagtgcacacaacatctcaatgcacatatatattacaagtcaatacatactcaatttatcacatacaatcgggctcaatcacaatggtataacnncccattatcacacctcatgaatcatatacactctacctatgaactatgtagtacacacaactactcaagtgtntaanaatcatnntactcgtcgatccatcataatactcattg

SEQ ID NO: 246298 - DNA, 273 bp, Glycine max
atgtcttggatataagtttggagacgatgcttcaatggggacaagaaatatggagagatagagagagggggagaccgacattgaggaagaaaacaggagagaagtgaactttgattgtgtctcacaagactctcattatcaaagtacacaagtgtcacatgctttattatacctagaacttcctgaaaacttcttgaaactttttgaaactcctgaaacttctgaaactccttgaacttttgaaacttcttaaactaactactacccccctta

SEQ ID NO: 246299 - DNA, 105 bp, Glycine max
aaaaccttcaagaccaagacgctgacaccatctgaaaccaacctcgccgaaaaactcgaaccaggaaccggcacacaactcactgacctttcacacactggccaa

SEQ ID NO: 246300 - DNA, 310 bp, Glycine max
tatcttgatgttacctgtttactgtttttactgcaagatattatattaagaggaaagtccacagtctgcagatacatagatataaatctgtagaacaaaaacacccacagaacccaccctccctacagaaagcttactaaactgagcatgtggaaccaggcgcttatagctatcatcaattcagcaaaataagttagggatttattccaagtgagggcccaggctgcttaggtgtacttatgactatacaattataaaaatcattcttacttcacccgtgtctagtgattactgtgtaattacatattga

SEQ ID NO: 246301 - DNA, 414 bp, Glycine max
  unsure (1)..(414): unsure at all n locations
atggcttattccctagtggatggcgcctnctctcacctcttctcctttgtcttctgctgcatctccatgggggaaaatcaccattaaaggacctcattgaagctcaaagatccagcctccatagaagccccacaagcaagcttccatcaagtggtaatcagagcataagagcttcaagtaggtgctccttaaacctccattaattttttactttaccttctcnttcattgntgtttcttcgtttttatacatgtatctcctcacatgtcttgcgctaaatgtttataacatgattctttacagtttccaccgattaaacttgctatagacgctagactttattttctatnggtcaaatctcttgttcttgtcttgaaccatgaattgtgttgagattacggtcctttgacgttt

SEQ ID NO: 246302 - DNA, 416 bp, Glycine max
  unsure (1)..(416): unsure at all n locations
agaaatacgatagggggttgaagatggtacctcttcatcactttcngaactcttgcccataggcaaagattatctcttattttcagaatctgcagaggaatccaaatcattttcatgccatgtgatgtatgctgtcttcagtttctttcactatgatttttctttcagatatttccatctttttcttgaagatgggataatcaaccctcagatgtccaggttgattgcattcaaagcactttagagtagaggatgaatnttctgtccttctctttgatttaaaattaggtcgcctctgatttcctcttactttaagagacttgttgaatctttntacaaaaagacttagatcatcatcatcatctggatcattatcctgatcactttcttcttgaattgaggatgatgctctaaga

SEQ ID NO: 246303 - DNA, 300 bp, Glycine max
acgtcaggtggggtgctattgcccaaaaccaagcttgaccaatcccaacccaacccgggcatagtcagtcagtgagaacctatgatgtacctaaacaggcgagctcctggcagtcaactgataaaaggaacaaagaccacaaagcaaggagacttgtgtggtggctggccagctgtgaactatgattgatatatgggatatgggctctggtaatcgattaccaagggtgggtaatcgattacaaggcttaaaaatgaagacaggaggctaagatagtttctggtaatcgattaccaaggg

SEQ ID NO: 246304 - DNA, 471 bp, Glycine max
ctagctgcttggggctcttggagctggacttattcttattgatgtcctttaatggtgatcttccaccatgaagatgcatcggaagacaaaggagaaaaggtgagaggaggcgccatccactatggaataagccatggaagaaggacgttcaccaccaagatgagccttggataagaagcttggaaggatacttcaatggaggaaaagaaagagggagagaaagagagaggggggagcacgatattgaaggaataaaagagggagagaagtggaactttgaagtatgtctcacaagactctcattcatcaaagttacaacacgtattgcacatgcttctatttatagactaggtagctttcttgagaagcattcttgagaaaacttccttgagaaacttctttgagaaaactttcttgagaagctagagcttagctacacacacccctctcataactaagctcacctccttg

SEQ ID NO: 246305 - DNA, 373 bp, Glycine max
tatatagaccttgatttcagcctgtatctggctatattattatgggatttgaaccaatttccttatttgcatgggatatggtatttgaacacattactatttccttatttgcatggtatgtttgaacaaatattaagtatgttattcgactatatgggttttatagctcatctatctatgattgttacttcatgattcttgcttcatggcttggttgatatttctccatgaagattgtatagatgattaatttatatctgtatactttaagtttgatacgcactttggctttttgttgatgccaaagggggagaaaaatgggattaaatcaagacttcacatgagtaatcaacttaattttaaagataagcat

SEQ ID NO: 246306 - DNA, 404 bp, Glycine max
  unsure (1)..(404): unsure at all n locations
tattctcaactggcacatctttctatgtggttcttgaatggctatcaaaggcctatatatatgtgacttgagacacgaatctgctaagagnttttcagaacacaaaggtcttatcctcttataaagccaaatcattttatcctcttacaaattcctttgccaattacttgtgattcaataacgaattatttgagtgttcaaattgttcaatctatctctctcaagagagaatgcttcttttcttcttcttcattctgaaaagggattaagagactgacggtctcttgttgtgaaagaattctaaacacatacgaacggttgtccttgtgtgtttagaacttgtaaaaggaatatacaagatagtggaactcttaagccggttgcttggggactggacgtatgca

SEQ ID NO: 246307 - DNA, 404 bp, Glycine max
aagcacatctatcctgcgcttcatatatctgaacgggctatccgaaaaacataaatacgtaacaagttaattcaagaaatttggagaagtgatcctgttacaacttacctagttcatgctaattagattgctaacctccattgaaagtaacttggtcaatgcttccagcttcaccatcaccctgcatgacatacacatcttttacaaactgaggtcagagctctggaagcaaatttctggagtctacaatcaatgccttgaacatgcgtgatggcgcaacagaggaggagtattcctgcgaaagggtggattcccatagtgaattttgagattgagaaacctcgggaatcaaagagtgaatgagatatatgtagacaaagggaagacttggcttatatgccaca

SEQ ID NO: 246308 - DNA, 364 bp, Glycine max
  unsure (1)..(364): unsure at all n locations
acttacttgaatctttaacagtagtcgaagatgcgtgaagatgcagaaaaagcaagaatgcacgaagttgggtgtgagagagaattcagaccatgtttagtaaatctgggccaatgtgagtgtaactaacgttacactcccttaagcaaatttcgaccctctcgcttagcggattgcctcgctaagcgagctagagagacgtttggttttttaaagaggctcgcttagcggatctgcgtgcttagcggatnttcgcgcttaggccacatttgaaattaaaaattaatattntttttaacacanaaaaagattggcttagcgtgaagatatggccgctgagagagttctgcagaacaaaatacct

SEQ ID NO: 246309 - DNA, 302 bp, Glycine max
cacggatggtccgattcggcgcataatatgtcgagaggctcgaaattgaacaacggaagctcttgagaaattcaactggtataactcttcacacggatgtccgattgaggcaaatcacatatcgagacgctcaaaattgaacaaccggaagctcctgagaaattcaaatggtcataacttttcactcggatgtccaattcaggcgtatcacctatagagacgcctcgaaatgcacaacggaagctctcggaaattcaaagggcataactattacactgagtctgatcgggcttatatatatc

SEQ ID NO: 246310 - DNA, 236 bp, Glycine max
caaaggctgatgcctaggtctccaattgggaccttattacaacttgcactaaacctaactgagccctcctagtggattaacccagaacatatttttgtcaaccaactgtacaaggattgagccattatttagacaaactatacactctaaaattgtgacaccagtggagccatttaatcactcctccatgtgggccatgatacaactcacaactcttggactcttctacttgaaac

SEQ ID NO: 246311 - DNA, 357 bp, Glycine max
aaaattgttttcattctagaagtttcgatataaggacctgagcccctttgtccatctgaatcatttcatgtaacttagtcaaggtagggggggtcttttcacttgaacccctaaccttgtttctttggaagctaggtttcattacatgttattttgatgttcaagtattcatagccactaccatgactggaattgataatatgttgttgtatggaaattctaagttaagaaatgagtatttgggtgttaaactacaaaagttatgaataaaaaatttaaacatttactggaaaaatctgcacgaaataatctggagtgaagctatatggactggtttattaagtttgactcaaaatg

SEQ ID NO: 246312 - DNA, 194 bp, Glycine max
tacagggttttgtgcgcctcgaggagcgcaactcagcgcaactaaccgctgggccaggagcttccccacgcgccgtcacgcaccatcttcgtgcgcgccaaacgccggcgcgtgaccaccacgcgccgccctccccttgccggaaacgcgcgcgtttgcttccggccgtctcgtcgggctctcctgagtccata

SEQ ID NO: 246313 - DNA, 263 bp, Glycine max
aactatacctcaaaaacctaatggaaattgatcattacacagttatcacaaagtagcgatcactgctaaactcccaattacatttgttgcctcagcaaaaaacaactatgtctcagtgaaaaacagcaggactttacaagtgatgcaaaagtactgatgctgaaaaaagaataaagcctatactattttaaaaatgcgtatcaaaaaaataagtaccaacaataagagtagctaaaaattaagaagactaaccattacgtatg

SEQ ID NO: 246314 - DNA, 394 bp, Glycine max
  unsure (1)..(394): unsure at all n locations
gctccaacaggcttcttttggttgggatgtgtgctctatctcgcaagaatgcatggtcactagcagtcatattctcaatcaattccatggcttcttcaggggtcttcaattttatttttccccctgtagaagcatctaaaagttgctaggattgtggccttaacccgtcaatgaaaatatggagctggattggttntgaaaatccatgagtaggcgtctttcttagtaacccacgaaatctttccaaagcctcactcaaggactcgtctagaaatcgatgaaaggatgagatgacagcttttccttcagcagtcttggactctgggaagtatttcttcaagaattnttcaaccacttcatcccaagacttaagactattatctttaaatgaatg

SEQ ID NO: 246315 - DNA, 415 bp, Glycine max
  unsure (1)..(415): unsure at all n locations
gaagttaatgagtttatgagccacttaggattcgatagatgtgacatggaccatngctgctacgttaagaaatatactaatatctatgttatccttgtcggctatgttgatgacatgttgattataggatctagtatggcagaaattaacaggttgaagcagtagttggcataaaactttgaaatgaaggatcttggttcagctaaacaaatccttggtatgagaattcttagaaatagatcagaagggaatttgaagctgtcttaggagaaatatatacacaagttgcttgacaggttntaccttgaagaatctaagaccaggaatacccctttgggatctcatttgaagttttcaaagaagcaaatcttgcagacagatgaagaanaatggtacatgtcaagagtaccatatg

SEQ ID NO: 246316 - DNA, 417 bp, Glycine max
  unsure (1)..(417): unsure at all n locations
aagagaagatgatgaactaagggacgtcaatatggccaccgatgaagcctcggaatgagaaaccaagaaggcccgaaaggaagaacacgaccaatacaagntttgaggggctttatagggcagcaatagtgagctcaaactccgaagaggtgaaaggaatcatcacgggtcacaggcatgatctggaaggacgagctaaaggcttgccttaggtcgaaaagaaatttgtcccaacagttaaagcgagactgaagggaatatgtgggctatcatcgatgagtgcaaagagaagctaaatctagcggcgactcacgagcaaaggctagaggatgagtacgcccagatatcagcagatagggaagcaagggaaagggtaattgattcattgcaccaagaggcaacaatgcggatggaccc

SEQ ID NO: 246317 - DNA, 88 bp, Glycine max
ggaacaaaaacgacaaaaaaaggaaaaataacgaacacactaaaaaaaaaatcacatctacagaaaataagaaaaatttcacaaaaag

SEQ ID NO: 246318 - DNA, 401 bp, Glycine max
tgttataagatgttgaaccttgtaataattcctgacttctagataataatccggagcttatagatgatgttagagacaaacatttgaattataaataaagggagaagataatcataccctatagataatgtcgcgctatagataatctaatacttgtcaataaataatatattcaaatataattgaatattagttacgtcagagataacttatttgttggggagcccaactgctaagggtcaggcgttcgcgctcctgtagcaggactaacatggaggctgaacatgtgtctctaagtgccacgtaggattttttggtcctgacagtacaggtgggctcctgtcttgtggaggttgcgatcgtgtctcaactaagatgtcctttccttctcagcctccact

SEQ ID NO: 246319 - DNA, 247 bp, Glycine max
  unsure (1)..(247): unsure at all n locations
caaatgctatcttaagcctcattgatccatgaagtactcttttggtaaaatgtatatgtatatcgttgagctattagtgcttaacatgtgtgtgtaaacaattgatntgtttatatggcattcttcccccctgcaaatgagaaatacaattagcttggaaaagattcaccacacgaaatgatatcttgtaaatggattactagaccataattcatntaaaaanagagtttagctatcagcaaaaccc

SEQ ID NO: 246320 - DNA, 437 bp, Glycine max
agcatgcactaaatggcctatagagtcaaaagcgtgtttaattgaatttattttacactctgtcatatgtgtttgattacaattatgaggcatctcactgctgaatatggttcatcctggtccttctgtccttgctgcaaatgacctgcataatggtagtttagtgcagtgtctattctcttctagggtcaatctctagtaggactctaacgtttttatttcttatttatgacatacaggttgattggattaagatatttgaaaattggaactccaaaagagtcaaattactcttcatgccttattctggaataggatagtttcctttttcctgaatttttatataacctaacaaataaatgtagatggatttggttcattcagtcatatggtttggactttaatcttagttaatgtccttagcatcattttcttaa

SEQ ID NO: 246321 - DNA, 416 bp, Glycine max
  unsure (1)..(416): unsure at all n locations
agcttcattctacagctgacattgttgatgagttatctgcacaaaagagaaagcttcctgatcataagggagctaacaaaaattttcatgcaagtggaccttcttctagtagttctaacttgcagcagcctcctatccctcttccatttccacctagagcaattccaaacataaagatggaagaagtggataaggagatcttagagacctttaggaaagtagaggtgaatatacctctgctagatgccatcaagcaaattccaagatatgccaagtttctaaaggagttgtgcacccactaaaggaggcttaaggccaatgaaaggattaacatgggcagaaatgtgtcagcattgatacgtaaatctattcctcacattcctgaganatggtaggacccaggtactttctgtata

SEQ ID NO: 246322 - DNA, 465 bp, Glycine max
  unsure (1)..(465): unsure at all n locations
cttgaacaagcaatcaacttctcttttatattcatgctatgtgctcgcgactggtccctatcttcccttcgcaacttgagttcattattgctaccccatacagctccgcgaaatttgtntcggccatactcttccttgcgagccctcttggtctctagttcaagggctcttgcggtaatcgcattttcttcccgtaacccggcacactccttccgaacgtgtgtagcagccaacttgaacttctccttggcgagttttgcctttcctaactcgcttttgagagcttggacttcttcgtcctcttccggtgcttcaaaattctcttcgctgacgacttttaacttggcgagccaatctanacctcgtatgcgaactntcagccattcgtggtacccaccaatgatgccattacgaatgcctctaagctcttgatctttcctaacggggtttcccatgcctatggat

SEQ ID NO: 246323 - DNA, 378 bp, Glycine max
  unsure (1)..(378): unsure at all n locations
attcccacctaaagtaattccaaacaaaaagatggaagaagtggaaaaggagatcttggagactctcaggaaagtagaggtgaacatacctctgctagatgccatcaagcagattccaagatatgccaagtttctaaaggagttgtgcacccacaaaaggaagctcacaggcaatgaaaggattagcatgggtagaaatgtgtcagcattgataggtaaatctgttcctcacattcctgagaaatgtaagtgatgtgtcattattttatcccattntcttaaccctttttggcaccatttaattactggatagtcttaattggtcaaataattanggcagtttattattggggctcattcaactaatttgatgtttta

SEQ ID NO: 246324 - DNA, 440 bp, Glycine max
  unsure (1)..(440): unsure at all n locations
cacattctaagaggtcatgttcttattgtgtggcgtccctaaattaatgactggtttaatagtaataatttaaataacaaaaaccatggtacatttttttttctttttctttttcatttctttctcttttcaccataactaggtttagaaggaaaatcctcactataaagtcctgaatggccagttcacaactctattcggagtcatttctttcttaccgctcataattctctaaattattttgctgtttcaaaaggaagaatataccagtcattactttaggtcgtcacgtgaaaataaaaggataaaatacagtcaataaactcttttacaaataaagttgctaatgctttcttttcaaataacaagaatgatcataaatgctntcattcattaaagctgtccaaaatatgggaagtttacaaaaaaatatagtgtca

SEQ ID NO: 246325 - DNA, 405 bp, Glycine max
  unsure (1)..(405): unsure at all n locations
agcttataagcgcggggtcttgatacatatgtcatgcgttcgcgatatgcgaagatgatattccgagtactttggatttggtacgaccatgccctcctgatttccagctgggaaattggcgagtggaggaacgccccgacatttacgcaacaagcataatgtaaacctttacggttttaaaagctctatagttgggcctaggctntagagtttttccttttgttaaggctntgtgtcttttggttttgaatttataatacaaggatctttcttcatctgttcctggtctctacccattctcattcatttgcatggttacttctttntctgaaacggaagatccgatgacgagtcccccgaaggtactaatacctgngacccgtctatcgacttcgagcaagaaat

SEQ ID NO: 246326 - DNA, 425 bp, Glycine max
  unsure (1)..(425): unsure at all n locations
gaggttgtgccatgttctcagaatgtgcaaaatcagaatgctcaaaatcagaatgctcaaaattataatgctcaagatcaggatgttcaaaatcaccaataacagaatgcacagattcaccagttatggaatgctcagaatgatcaaaaggtataaaatgatgcctaactaatctatgaaatgtcctatctatctcaggatcaaagggttgtaagtcagatggattgcctctagtcatacactacattcagcatgcacacaactagttgccttgtcatgtaaataaaggtgtaggtctgaactacagctacnctcaaatgatatccagatgacttgaaatnttgtgagcaaccctataaaatgatgagaagatagcacaaaaaattctagacaaaaattcaaagtctaactatgaaagctaaaat

SEQ ID NO: 246327 - DNA, 286 bp, Glycine max
  unsure (1)..(286): unsure at all n locations
atatatatatatatatatatatatatatatatatatatatattaatttttggggacccatatataatattattttttggattggatacaaataattttttttttaaactatcaaactttgattacataataagtgtccataacttctatttctataatcaagaactttaattacaatttaggtgtgagtcatgtgcccttttatattcctcattaatttgagngactttcctttttctttaactctcctattacgcttctactccataaaatattaaatatttatt

SEQ ID NO: 246328 - DNA, 245 bp, Glycine max
  unsure (1)..(245): unsure at all n locations
tacatttatccaacccaacaagaaactccttctccaaaatagtgactaagatggaatctccctttagacagggtataggaagccgactaagaggaatcatataagcatggttggnggaagggttttgttgattcttgcgagtgggatcttttntgacaagggacccatcacgaaaaagattgaaacccaacaacgccaaatggactacaaagggttggggatcaatcacaacaacaactagcatt

SEQ ID NO: 246329 - DNA, 225 bp, Glycine max
  unsure (1)..(225): unsure at all n locations
cattttctgactttggaaccaccatngtatgttttacgcttccttcggaaaaccctagagaaagagactcttgtaaaagtattcttttctaaaatgggtgctattttcgtgaccttcattgaaccacggttgcattggcatgaacaaaatttcaaaatgatgctccttttgtagaacctgaaataccccttagccttttcatgtagtgacatgagtatttgactc

SEQ ID NO: 246330 - DNA, 278 bp, Glycine max
  unsure (1)..(278): unsure at all n locations
caataaatacaacatcatgaatacccttcaacatatgaccatggtagctacaacataccanacgtcccatgattgtctagaagaaacaattgttgacattcttgttgcacgattttctggttggctaaaaggatggtgggataattatctcactaatgatgaaaaatcaacgatctatagcgctattaagaaggatcttaatgcgaaagtcattacagatgacgggaatgaaagggatcctgatgctatcaatacccttatttttacaatcaccccac

SEQ ID NO: 246331 - DNA, 466 bp, Glycine max
  unsure (1)..(466): unsure at all n locations
ttcatggggtggtactactttcatccgggtatattatatcttgtgctngaactacgaagtcagtcttacttattgaaacgatgttttgatttttgaaaagtggagagaatcgctaaggtgttggaccttgaaacaacctcttgatttttgaaacaagagaatcattaaggcgtcggacctttgaacgatctcttgatttttatttttttgacgaaatgaagggttatgagttggctttatttggctttggctcattaatcttcaatcctttcttaaagataacttacgggactaatgatccggtaaaacttactttataaaagaaaagtgcatactgatgatcaaagaacgagatgaatatgcccanacaatcagaggactctaagggtcataatcacatcaattcttaagcagcactaccggatgagaacaaaaacaccgataacgacgatcactatgttaaatc

SEQ ID NO: 246332 - DNA, 320 bp, Glycine max
  unsure (1)..(320): unsure at all n locations
catactctaatanacgtgaagccttaataattnttagcagagcaccttgtctttattgccatttaatgtattttgctggtttactagcccactcaagttgcccattaactcattcaatctatcattgctgggtaagtggaaatggaacctgtttcatagccaaggagagctgtgggctatggtactagaatcgaagtatgtgggctggaggggtttaagcgaaataactagagggaagggtgaatcggtatggtggagggatctaaagctcgtgcttaatcactcgcatcatggagcgataatgaagaatacaacagcat

SEQ ID NO: 246333 - DNA, 226 bp, Glycine max
  unsure (1)..(226): unsure at all n locations
actggcagcatctatcatacttctttccatgttactgagtccttcataaaaatattggaggagaagctgctcagatatctggtggtgaggacaactggcacatagtttcttaaatctctcctagtattcatataagctctctccactgagttgcctaaatcctaacatatcttttctgatggtcgtggtcctggaagcanggaaaaatttntctaagaacactttc

SEQ ID NO: 246334 - DNA, 353 bp, Glycine max
  unsure (1)..(353): unsure at all n locations
agctcgcttctacagaagactctttatccatttttgtttctctttaaagggatgtntatatgcatgtattgagaagatttaagttactatgatgctgtatatatatatcacgtgatgtttctttctggtgttgtgcattattagcctttggcctttgagacgcgaaaagtttacaaatactttcataaataaattaattgaagagttttaaattgattaaaataaagtcttccgcttgagatagttcataggtccatgtaacaatgttggatcttacatatatcctattagaatcaattatgtcttttgggaacaaacctttgggaataggtctgttatatcttctattggat

SEQ ID NO: 246335 - DNA, 396 bp, Glycine max
aagtcgatcacgtagttgcaataatctctttagtgtatcgggatccttaggatcaacctcgtagtgcatcaccgctggtggaggtctaccaaaaactgcttgaaatggtgtcatgcccaagctctggtggaaggaagtattatactagaattaagcccaaggtagcatagtaacccaactcttaggatgttcaaatacaaagcaccttagatacatctcaatggtcttattaagattctcagtctggccattggactgagggcgatatgaagagctcatggtcaatgttgtgccttaagctctgaataattggtgccaaaaagtgctgataaatattctatctttgtcagaaacaattgttctcggaaaaccatgaattttgacaatgttggcaat

SEQ ID NO: 246336 - DNA, 324 bp, Glycine max
  unsure (1)..(324): unsure at all n locations
actcaagtgtatcacacaattatggcttttctctaatgaaacactcttgccttttaccactctaattccccttgagttcttaggcaattcaagagattatggccacaacanagaacaattcaccaatatgtgtaagggaaggctagacaaggaaaaggttaaccaagaaaaaggctaacaatgtttttaggcacaaatgaaggaaataaaattcagaatntaggaattcaagtaacaatccttcatgcaaccaatatattaccttaaagagntttttttntagttcttcagcatgaaccatcagcccantnnttttttttttaa

SEQ ID NO: 246337 - DNA, 411 bp, Glycine max
  unsure (1)..(411): unsure at all n locations
ttgctcagagcttccattttcaattacgagtgtctcgatatattacgggattaattcggacatccgagtataaagttattgtcgtttgaatttgcttagagcttttttctgaaatttgagcgtcttgatatactatgggacacaatcggacatccgagaaaaaagttattttcgtttgaatttgctaagagctgttgttctgaatttgcagcgtgtcgatataccactggccacaatcggacatccgagtaaaaagttattgtcgtttgaatttgctcagagcttttggttttcaatttgagcgtctcgatatataacgagactcaatcagacatccgagtaaaaagttattatcgttaganattgctcagagcttccattttcaattacgagtgtctcgatatattatgg

SEQ ID NO: 246338 - DNA, 323 bp, Glycine max
gcttccagactcatgcactccatgtcccagttagagaagaagctcaacacgctcgaactctattgccacaccttgaaatctggcctcgaacaatgcaccagctccactacttcttctacttctccttccctcttcaatcctcaaaccctccaacatgactccgttattcagcacttcttggtctcggtcttcgaagcaagatcaagtgtaaggcttttgtctcgctccttaaccatgcaactgaggcacatgggaaacaaggtgtacgagaaagtctccttccttctccaaccctacgacgtgaaaatatctttctcaaagag

SEQ ID NO: 246339 - DNA, 427 bp, Glycine max
  unsure (1)..(427): unsure at all n locations
taaaagataactgaacacaaacaaatgtaaattatcttcatactcagacatcaatgatgatnntaagttagcctcgatcttacgttttcctttagaagatgcccaaaatcatngcaatgtccttatcataattatttttaaaacatggcaaacgattgacttgtactgatccactgatatgaacaagacataacaatatatggatagtgtaaacaggctctgttaataatagaagatattgcgatgaggacaaaaaagtanggtcgtccagctaggtagcagcctagaaatccaagacaagtttgattgtaactccataacttgatcgttaatgaaaattctaaactttnttttatcttgatcaaagactaatcatgctcacatacatgattattgatagttcaaaannaaaatttatatgatggga

SEQ ID NO: 246340 - DNA, 461 bp, Glycine max
  unsure (1)..(461): unsure at all n locations
tcaagcgnagaacaatatactgggccttcattacacagaccttgggctttggtaccacaatcaacacagcactttcggcacctactatatgttgacttgaccaatgctgttatcggtatgtcgcgacaatccttcaacaccttattcacacattatgagaggttggttgtcatgtgaccatatcttcatccttctttatcataagccatgctccaattttcctttgaaatgcgatcaatccatgttgtgatggctagactcaattgacgaaaatttctaagtttgatcaacacatgcttgcaaggagtgtaagctgcatcaaatttgttaccaacaacatttgaagtacatatcaacttaataactcatgtacaagtaacctacccaatcttgaacattcttttgttggcgtgttgatntgcgatgaaatgcttgtatgtgtcgacgcacaacatgatacc

SEQ ID NO: 246341 - DNA, 181 bp, Glycine max
  unsure (1)..(181): unsure at all n locations
gagatgcatgtatgtagcaaaaatacttcacaaaatatatatgtatgtttaggtagcaaggtaccttggatatgcatgtatatagcaaaaatacctcacaaaatatatatgtatngttaggtagcaagataccttggatatgcatgtatatagaaaaaatacctcaccaaaatatacacat

SEQ ID NO: 246342 - DNA, 469 bp, Glycine max
  unsure (1)..(469): unsure at all n locations
ggacttaccttgaataatttctttgattctctctttgagccttgtttcccttttccttgttttgaagctcactacaagccttaagtganaaaccatgatattaccatatccttaaggaattttggagcttttgaattgttctgggaataagtgtggggggtttttgtttcattggacaacttgttttgttggctatgcttcatgatgtattctgggccatacttgatgtacaatgtacattgtatattggttaaatgttggacatgctgaatgaaatgttgtttctcaaaggctaaagagtaaaaaaaaaaaaaaataatcgaacaatgaacaagaaaagcaataaagttgagtgaataagatcttaaatggcacaagaatgatgaaactcttggttctactcttcatgttaaattttatcttacttcttctatctcctattgtttccttaatatgcctcattcccttc

SEQ ID NO: 246343 - DNA, 357 bp, Glycine max
  unsure (1)..(357): unsure at all n locations
acatccacaaatcgcgcataaacccaccatccnctattgcccacctccaactgagctcacgtactcccacgtagcccatatnctcgtttctctcaacaccaggtccccatcaatcctgccaagcttccctaacatccaagtaattcaacattctaacagcacaaactatcacagccaagagaacagggcaaagggagaaaactctgcccaaaacaccaaccaaaatcatagctttttccacttaaagaccccagtaacatttccttcgttccaattcgctaaccatgggattggacgtctaaatttactggaaggctctatacactagcctacattnttactggtgggatctggtag

SEQ ID NO: 246344 - DNA, 295 bp, Glycine max
  unsure (1)..(295): unsure at all n locations
agcttgatgactatggatataccactcatggacttattatgtattcgatcataagaaattaaatcacttctttactttctgttcgatacggggccttcanagtgagcgaatgggcacacctctcatcttaccatgagggtattccatctggatcaagcgcatcccatattctggaatacaatatatgccactaatctccttctccttcattcaacaactcaatcacatatatttatctgatggatcagacatgagtgcatgtcccaagctatatcaggatgaacaggacctcacg

SEQ ID NO: 246345 - DNA, 387 bp, Glycine max
  unsure (1)..(387): unsure at all n locations
attatttatttggacagagtgtaaatgtggctatttaacaagtgattttttgcttcccatcttttattggaaagagtaaaagtttcctaatgcattttagttcatggtttttttcaaaaggcattccttgacagactcacacacataggatatcgaaatttctttagagctaactaaatattactccttgctgcaatttgacttgccttttttctttctttctgtttttcttaggaggttctgttgttccccaacttattttgtttatctatcttaaggaattattctttgaccaatagaanaagacaagaatttcatttgatctgagattacacccagtcagagagtgctaaaataagcaattctgaattaaggatcattaaaaat

SEQ ID NO: 246346 - DNA, 374 bp, Glycine max
  unsure (1)..(374): unsure at all n locations
gaagatgagaagaacgaagagaaagaacaagagaanagaggcgaagaagacaacaagggaggagaagataacaacactgcaatcaaacgaagagaatactgggcatccaaaaactacatcgactatgcttatgaccccgagattttcaccgaccagaacccaaatgcctgctctgttatgtaaaccaccacagaattccgtatttcagttggaacagtaatcagctgaagtagctttcttttcaatgttcctctaagaatatgtaccagtgtgagcatgttaagggtacattggctcctttacatagcgcacctcanaggtagatgtgttattacttgtgcttttgagggatcaacgcggatattcgctgccat

SEQ ID NO: 246347 - DNA, 318 bp, Glycine max
cattgaaaaaccaccgaccactccgctacaatctatcatcactacacacatgtcctccatcaagttcgaaacaagacaaccactactctccaattagatgaaacaaaccacacatcctgatctagtatggctccaaatcatagctcattataccaatactctatctttattaaaagacaatacataacacaaaatgtcgtacaaaaacatcgtaagacaaaaaacaccacttgggttgctggatggcaaacaaatttaatactttactattaaccttaaaaaaaccaacacaggaacttctgaaactgaccaacacga

SEQ ID NO: 246348 - DNA, 315 bp, Glycine max
agtcaaattgcaaacaaaggggaatgtaaaaaacatcccagtttaaacattatctgtctgtcaattctgttctccgtgatgcccatactatctaaaaggaattcagttcaaggagcccaacaagttaagttcttcagtgtttgactacaatgatgtttacaaaaaattgtgcccatttttggtcagccagaagaagcgatcagcatctatgcctagtctattcattggtaagtgtgatgtgttgaaagcatttgattcaattaatcaggacacgcttctcgacataatgaaagaatttctactgaaagatgtgta

SEQ ID NO: 246349 - DNA, 296 bp, Glycine max
  unsure (1)..(296): unsure at all n locations
aaccagacgccaaatgatgtgagccccgaccatccaacgacaaaacttttactcggatgtctgattgaggcccgtcatatatcgagacgctcgaaattgaatggtgaaacctctgagccaaatcaaacgacaatatcttttactcggatgtctgattgaggcccgcaatatatcgagacgctcgaaattgaatgttgaacctctgagcgaattcanacgacaaaaactttgtactcggatgtctgatagaggcctcgaatatatcgagacgctcgaaatgaatgttgaagctctga

SEQ ID NO: 246350 - DNA, 299 bp, Glycine max
ttttttgttttcaagacggaacgacagagatgggaaattggacaacccatctcacaagcatacataattaactcgccaaacgggtacatgaaacccccgataagatggatcctcacaccattaccctaaaaggctatgcttacttggcaccattgtatcttgacagccaacttccacaaactaatgaactcactagataactccttaacccataccctaagcaaatcactttcaccctcagctaaactttcaccataactacatccacttcaccctagaacttacctctcctataggtt

SEQ ID NO: 246351 - DNA, 259 bp, Glycine max
  unsure (1)..(259): unsure at all n locations
cctagttgctatttacaccccnctctctactaaatgcacccccctttttatttnnttgaattctttttccgcaacgctatgaaactgtacgaatttcgtaacgaaacttattttttcttccgcaaggttactaacccttacgaattacgtatttactcttttttagctttcgaagaagttacggaaacttacggattgcgcaaaaacatctcttttcgacttccgccacattacgaaatttcacggatcgtgcacgcct

SEQ ID NO: 246352 - DNA, 312 bp, Glycine max
taaccacacttaacatcgctccaggaattctcgcaccccggatacaaacgctcctctgaatcaatttccaacgtatcacacatacgggcatgtgcttgttgaaaacactcctatcccagatcatgaatcatatcctccaagcaatcttccactcgtacatcaaacggcccagattgggacccactctgcatgtctgtcaatccaccctgccatacccatattggataattcttctcaatcctaactcataacacacgctccatatgccatccagtattctctatcccccggtcaaacaatttatgcatggac

SEQ ID NO: 246353 - DNA, 286 bp, Glycine max
cccctcacgcacttctctctctttcgaatttgattaagaaaattgtttccgtgaataaaatccaagccgatgcgcttccgcaacctttccgtgaggaatctcgacaacgttctcgactgttcttctacgctcttcattcgcttttcatcgctcttcagccttccacacgtaagctcctcaacaccagctcttcaattcattctatgttctcgcggcggcccacactcgggttcctgtacttatattctccgttcattcactttctataccccttttgacgtgcttc

SEQ ID NO: 246354 - DNA, 291 bp, Glycine max
cctggcagcggggcagctctccttttgctaaaatagggaggaggaaaagaaagttcacttcttagcctctctctcttcgaattgctggggaaatattccggaaaaaatccagccaggcgctccgtaacgtccgaacatttacggagtattaccgaagatctcacccgtttcaagaccatcgtcgtcttcgtgctccatcttacgggaagacctcaaccaactttcattcattcatgacccgggggccacacttgttatgtttttatctcgatcatacttttcaccccctga

SEQ ID NO: 246355 - DNA, 320 bp, Glycine max
  unsure (1)..(320): unsure at all n locations
ctcacctccttgagatgagaagctagagcttagctacacaccccctataatagctaagctcacccccatgagaaaaaacatgaaaataacaaaaaaaagtccttattacaaagacaactcaaaatgccccgaaatacaaggctaaaaccctatactactagaatggccaaaatacaaggcctagacgaaggaaaaacctattctaatatttacaaagataagcgggctcatacttagcccatgggctcgaaatctaccctaaggctcatgagaaccctanggcctttccttggatctctagcccaatctacttggagtct

SEQ ID NO: 246356 - DNA, 161 bp, Glycine max
  unsure (1)..(161): unsure at all n locations
ggggggggttttntaagggggggggggggggnagaaggggggtgatgctgatacggggggggaggaaaggggaannnnnanaagaaaaatttaatttgagcgagagagggggtcaaagaaaggttgaaagaaaaaaggatgggaaaagagaaaggggtaat

SEQ ID NO: 246357 - DNA, 375 bp, Glycine max
  unsure (1)..(375): unsure at all n locations
gaaaaaacgagggagagaaagangaagaaggaaggagggttttttttttatgggngaaaaagggggaaaagagaaaaaagttaaaaataaaaaagaaaaaataaaatatgagagagaaaagaaggggaagagaagggaaaggagaaaggagaaagaggaaaaagaaaaagagaaaaaaaaaaaaagagggaagaggggaaagaaacagaggggataggggaaaaagtaaaaagtgattaagagagaaggagagaagaggaggaggggaggttgtgagaagagagaagagataaaaggagaattttgaaaatattaatattttntttttntnttttattataaatgttttngaataaaanaaaaaaaaaaaaaaaa

SEQ ID NO: 246358 - DNA, 334 bp, Glycine max
  unsure (1)..(334): unsure at all n locations
tttaacataacaaattagcaacaacctaagataaagatcataatcttaacttaataaattaataatactggcgcattaaacttagacgagttacgtgggtaatgctttagtcgacaaataacgcttgtgatgtctctcaaacttgatataggtatgcagatgttgaaaaaagagatccattatcggtcaggcntcttaattagttgatccacggatccaagtccatgtacctacccctactcttaggggccataagtgtaatcnttgttacacattatgacacagaatgagtcaacgtatggaaatgttgtagactatgagcgactagaacata

SEQ ID NO: 246359 - DNA, 374 bp, Glycine max
ctcctttcgtaatgagtccataaacctgcaatcaatcaaacaaatttacaacaatcaactatagaatcttcttcttatacctcttttcactttagttacataatgagctattaatagcgtttctcataagtcacaacatgcctctacgggaccatgctagttatgcttctatattttgtggtccatccttcattgtctactctcacatccttttcaactgttttattattgtattcctaaaatacccttctttatgcataaaactggaaatacctcatgtttgtaatctcttgttcatttgacaaaatcatctcacatggtatccataaaacctatgttttctctttctctacaagattcatgaaaaccacata

SEQ ID NO: 246360 - DNA, 158 bp, Glycine max
cagccaacgcgaagacaacacacccacagaaaaaaatcccaacatgacaagaagccgcccccctgaccccaaagcaagggacccgacacggcactccacaaacagtaaccgaaacagtccgaaacgacaagcggactaacccaaacacaaaaaaaaac

SEQ ID NO: 246361 - DNA, 358 bp, Glycine max
catacattaaaccaaataattgccaaccattcttatcgccagggcctttttgagataggagaccattctatgagtgtggctggagagctagaatccgcagccattatgaaatctccatttctggaaatgtatcaaatacttgaagccatgcagaatctgaacctagagccagccctcaactgggctggcactaatggtgacaaacttgctcaaagtggatctgatattgtgttgaaacttaactccatgcaatttgtgaaaatacttcaaaatggaagtagagaggaagctcttcattatgctcgaacacacctttctcctttgctaccagtcacatgactggaattcagaaacatat

SEQ ID NO: 246362 - DNA, 387 bp, Glycine max
aaccttgggggggatccaagtgctccaatcattcatttgcatattcatgttttggtggcatactcaccgttgtttatttctttaggaatttcatcataactaagaaaacaccaaggcacccctataacactcgatccagaaaaatggataatgaagagggcctgcaggaacagatgaaggccgatctatcggccttaaaagatcaaatggcttccatctcggaggtcatgttaaaactccagaaaactatagaggataaagccacggcaaccgcctccagtacagttagggaagcggagccggtgctgtagcccgccttatattcgggccgagacagaaacacgacagtgtttggtcggaggtatagtccgcaagcttacacctatg

SEQ ID NO: 246363 - DNA, 377 bp, Glycine max
  unsure (1)..(377): unsure at all n locations
aaaggaacaatcaacctccaacacactcaaattcaaaacgaataacacaaaacatgtgatcacatcatggggaacaaaacaccttcaatcaattcaagaacacatgcaagaatcaagaattctccaaattctaggtttctaacattcaaagccaaacactcaattaaatcatccaattcacatcaaggcattaattgacccgttaaacacgagcaattcatagttatcattgtataggaaaaattaaaatgaatgaaacacctcanannataactcaatttgatcctctaagggtccttacacatgttcactctaaccccaattgtgataaactcatcccttacccctaagtggactcacatgtgtagttcagcagt

SEQ ID NO: 246364 - DNA, 418 bp, Glycine max
  unsure (1)..(418): unsure at all n locations
actgatgagcaaatatccacgttagagctgctcatccttcctcgatatgtattatagttaaatcttgatcaactgtaggtgtacaaatttttcgtgctatcataattttttggaacatcattgaaagaatctcactctcataaaacctgattagtcaatgatcgtgagatgaaaagattatattacgttaaatgatttttacacaacaagtcggtcacaatttgttgtttctaatataactgttccactgcactaaatcggaaagcgctctctgaaaggaaaatacagatcatgataaagatgtatnttctcttgacttacaagatagaatggtgacatgttttgttctagcttaaccaaacttctagatctgatacttaagagtctccatcactcttttacaacatgctctctctct

SEQ ID NO: 246365 - DNA, 243 bp, Glycine max
atttgcaccatgacctggaagccttttttattatatttggacctgtattaacaaaatcattgcttggtaatagggttgttggccatgttgatcattgctggaaaccgggtcaaaagccatgtctaacatcacttggttttcctggggtgataccacatgctgaaagagatgaaattgcagggcaggcattatcctggatttgatatctaaatgatgattgattacatgattttaacccatata

SEQ ID NO: 246366 - DNA, 372 bp, Glycine max
  unsure (1)..(372): unsure at all n locations
cttaggcggaccaaatcagcctcaggtgccacggtggtgcgctaagcgcttgaactcgtggcttatcgcatgagtgattatgcacttagcgagaagcatgcgcttattgaaaggactaattgtcaaaaagggtttctaaatattaaacttagtcctttaccaagttccaacggaggctgatatgctccaatgttcagattatacagcaagttcccaaatgatcaaatgcatgaaaaacatacacaacaaagattaacaatgggttgcctcccacgaagtgcttctntaatgtcattagctngacgcatagcttactacctncaatgtgcaatgaaagtcacaagaacacattttcttgagtttcgcctttac

SEQ ID NO: 246367 - DNA, 370 bp, Glycine max
gaccaagcccatgccgccactaagaatgggatgacatgcatatatattctaccattttgcttattgtgatacaaagatatatatgactcctgctgaaaattctaactgtttcccacggctagagtgcatattctatcctctatcaaaccagaaatcatgtgatatgagacagcaaagagataatcctatagattgccacgatcatattttgagataaggtgatgcgaagcagattcatatcacattcctcctttgtatatatggattatttccaaaccttcttattaaaattgaaaatgactactaacaagacattgttgtctgttacaacctaatagagttgtcttaattctaagctgaagcactttgt

SEQ ID NO: 246368 - DNA, 304 bp, Glycine max
ccacctctaagacctcacaatcactcacaaactcatctcaagctctcaagatggcttcctctacaagctctgagctctgcagaactgcacacacacaaatctctcaagctctctggaacctggacctctccctctgtagaactctctagacatgcagaaagctcaagaaaaggccaaactcccttccaaagctgataactggccaaaaaggggcttagctaggctcgtgcgccactcaaactaaccgccaacgcgcataggaatttggctagcgcgggcttctcgcctacaaggactgaacggg

SEQ ID NO: 246369 - DNA, 330 bp, Glycine max
ccgctttatgagtgctgtacaccaccagcgcttctaggccatcaagggatggtcgtttctccgggagcgacgcgtccagctcaaggacgacgagtatactgatttccacgaggaaatatggcgccggcggtgggcatcactggttactcccatggccaagtttgatccagaaatagtccttgagttttatgccaatgcttggccaacagaggagggcgtgcgtgacatgagatcctgtgtaaggggtcagtggatcccgttcgatgccgacgctatcggccaactcctatgatatctcgtggtgttggaagaaggccagaatgtgagtat

SEQ ID NO: 246370 - DNA, 386 bp, Glycine max
acttcacatagtcatgtgactctcctccaactggtctcaagtttttctcgaagtcatgacactcctacatggttttcttgaccacacatgaagagtctataaaagcaaggctctgttttgaatttcaaaaatcttgaacacttatgtcatacaatcctttacaagccttgaatctctatgaacttcttcttcttctttgtactgtaacagccgcaattgttaataaataaataatacaggactaagttaataaataaataaataaataaataaaaatataattaggtcataaatctccactatataaaccacatgttaacctagagcagcttttacaaaacacttttgtccctctttctgttctgacgcacaagaaccctaacaga

SEQ ID NO: 246371 - DNA, 277 bp, Glycine max
ttcatggaactcgcttcttttgcgaaccacaaaaataaggcccatgacactcctgatgatcaccaacacaaataagtgtgttaaagtggaactaccaatttggaattgctacctggcaatactatacatgcacctggcatggtgcactgcgccactttctcttcttcatacatctctccttttcttattattatcactcgatcatataattagtctcttggtctgcatttattgatcgagggaaccccgtgatactgagtgaactgaacggtgacga

SEQ ID NO: 246372 - DNA, 315 bp, Glycine max
aaacgaccgagagtgcccaccgcgtcctcccccacataggacacaaaagagcacagcgataaactcacagcacccaccacctatacatggaccacacatgtcacagacaaaaaagaactggtacctaccgtgagcaaagaacatgggtgaaaaaccaaacccgccaaacaacaaacaaatagaagctacaaccatatccagagctaaacgaaccaaaaacgaaaaccctaccgctggctgatatgattaccgtacgcatcatcaacatgggcaggctcaatatagagagcctgagaaagggaggagggagaaaaa

SEQ ID NO: 246373 - DNA, 380 bp, Glycine max
  unsure (1)..(380): unsure at all n locations
taacccaacaacttgaccaggtttgggtgagaaagtcttcctaaaaagttcacttctgactgcattttccaatcaacagaaaaacatgttagataatcaaatagctatgctgaatctatcacatggaaggtaccatgttgtgttgatagcagttacactataaatctaaatgcaatatgctaactgaaatcacaacatgatagaatgccttgtattgattttgtaacagaacgagttcatctaattttgtatgtcctttagaacagaaagagttatctaatttcagattcattagcattgactaatcctgancaaaaaatcttcaacatatatccaattcacatctcagagcaaacatactattattaactatgtttcat

SEQ ID NO: 246374 - DNA, 245 bp, Glycine max
ccgcacgggcggcatccaaagcggcatgagggagaactcgaacaccaagcgtgcacagactaatactaacgaacgcgggcacaccggcgaagggaaaaccgcccggaagccaccgtatcacacgaaccccgaagagagcggcggcctccccgcagaacgaaacaacaccagaaaacccaggcccccacagagccacaaaaaagcgaaacgtgcacgaaagccgaacaaggaacacgaaaccacat

SEQ ID NO: 246375 - DNA, 326 bp, Glycine max
  unsure (1)..(326): unsure at all n locations
ctcggaagcaacaaagganagaaggaaactctccaatcaacgagaacgcacacagaaaagaaaggaaattcccaatcaacgagtgggagaaagcaaaaagaagagaaaggaaattcccaatcacagagtgggggacaagcacaagaacagaaagaaaattcccaaccaaagaatgggagacagtaaaaaaggaaggatagatagatcttgatcaaagaaactagaagaaatgtgcagaaagatctctggaccggacaatatctgaacaatacagaattgtcaccanatgaacaatagaggaaggagaggaaccacgacccaaaatg

SEQ ID NO: 246376 - DNA, 245 bp, Glycine max
  unsure (1)..(245): unsure at all n locations
cccccccccccccnccaagcgcggggtccccgccacccccccgccgccttgatctcagacaccccgaagcccggcggcccccgcgccccaacatttttccccagaggacgggcaagcgacaaggacaccccaaaccccccaccacccacagaacaagcctgaagccgacccgggaaaccggcaaaaaacacacggaagaacggcaacggaacgcaacacaaccaaaccaacccacccccccacca

SEQ ID NO: 246377 - DNA, 152 bp, Glycine max
cggaagacaaacaacacgacgtgagaacagacaccatccactacagaacaagccctggaaggaggagcttcaccaccaagagaggggctcggcaaacaacgccaaagagaaagccccaacggaggaaaaaacagacagaggggggggggggg

SEQ ID NO: 246378 - DNA, 281 bp, Glycine max
aggaatgatgatcggagatgccacttcaaggagaagatgagtcaataagaagctcaccatcataagaagccttggatcagagcttgaaggtatgagaaaatgagtggagggagagggagagaatgagcacaaactcttgtgcctcaaatgacgtatgaactttgaagtgcaactctcaaacgatcaaagttctaaaaaaagcacacacatggcctctatttatagcccaagtgtcacacaaaattggagggaaattcgaaagtttatacaaatttcacttg

SEQ ID NO: 246379 - DNA, 337 bp, Glycine max
cgctcagtacatacaaacaaccataaacaaagtcttaggtcttgacctatatataacgttaagtcttaaataaacctaattctaaccaataaaagagtactctcaatatatctaagtagcgttatcaaaaccaacaacaattacaaacctatgatactatttggttttacaataaacatataattgagcaaaaaaacctttgtcgcacaagtcatacaacaacttttggcgtgaaagacagtctaaatataaataccataaaattagaaaagcaatatagaacaattagacctcataaccatggaagactaatcttcaataaccttatactaacaaa

SEQ ID NO: 246380 - DNA, 236 bp, Glycine max
cccacaaggggccgctggacccgcccccaaaaggcgcaagaaacaaccaacccccgcgaccccgcccccccccccccccggcgcacccgcccccccccgacccagccccccccccccagcgcccccccacagcaccccccccacaccccccccgcccccccccccccacccccccccccccccccgcccacccccccccccaccccccccccgcccccacccccccaccacccacc

SEQ ID NO: 246381 - DNA, 302 bp, Glycine max
cgacccaccggacggggccccccgcaccacacgccgcaaacaaagggaacctgcccccaacggagacaccggacaccacctgccccagccagcaaccacgcgcaccctcgccaaaggccgccccacaaaggagccccgccccacaacacggccgaggcaaggggaacccccaccccccccacccgcgcatataggtcgagaaggccccacacgaccgacgagggacgcaaaccacaaaaacccatacacaacccacatggccgggaagacaaacgaacccaccaacaccgcacaacacgcag

SEQ ID NO: 246382 - DNA, 288 bp, Glycine max
agagagccagaccatgaacagccactggctgatacatggacggagatgacaaagatcatgaggaagcggtatgtgccggctagctactcaagggacttgaaattcaagctccaaatactaacccaaggcaacaaggcggtggaggagtatttcaaggaaatggacgtgctcatgattcacgcaaatattgaacaagatgacggaggaactatggctcgatttcttaatggcctgactaacgatatccgcgatattggtgagctgccggagtccgctgaaatggatgac

SEQ ID NO: 246383 - DNA, 290 bp, Glycine max
tgaaaagctcaagtaacattttgaacaatagctttctgaacacaacattatgagtactgcatccgcataacatagattgggtttttcataataacacggttctgagagacattaggtgctcacaatcgggtttcacataacattctgaacttgagcaaatgtgagtgacattaagtctcacaaatcatatcaaacatctaataatgagtgtaatgactaaccacttagaaagcatagctatctaaggtctggaacctctatgtgaagactctctaaacaccaagggaatc

SEQ ID NO: 246384 - DNA, 303 bp, Glycine max
ccctaagcgaaacgggcctacgaccccaacacgggcggcccgcggtgcccaacacacgaaactaacaatgccgtgtgaaggcccacgctcccccctcccctgcacccgccccgcagaggaaaacgcacggacgagcaaacacgaaaacaaatggcatgccatctcgcagaccaaaaagcgcgccgaacgcacacgcacgatgacgccacgactcatgcacaaagtgaggccggcacacgacaaccgaccaacgcccgacatgcccacacgacgcatgaagagaagccatgcgatgcacgacac

SEQ ID NO: 246385 - DNA, 320 bp, Glycine max
tctagccacggcccacgaacatagaatcgcggatgagtatgcccaagtatacgcggataaaaaggctagaggaagggtgatcgactctttacaccaagaggcaaccatgtggatggatcgggctgcccttaccttgaacgggagtcaagaacttccccgattggtagccaaggccaaggcgatggcagacacctactccgcccccgaagagattcatgggcttctcggctattgccagcatatgatagacttaatggcccacataattagaaatcgttaggaaacctgatgggctctcagaccttgactagatatgactt

SEQ ID NO: 246386 - DNA, 243 bp, Glycine max
aaggaggccaagccgaagtctcggaacacaggctacaaccggaactagtacgaaaagggggaaagacagggtgacacagaaccaagagtcgaaaatctgaaacgatccagcggacaccggccctggaggaacagacgttgagtgtagcctaaagaggagaccaggttgggctaaagctagtatgatcatgccaaaaactgcttaacgggagttgtagtgccgaaatagtatctgcgcgcaaag

SEQ ID NO: 246387 - DNA, 297 bp, Glycine max
taacaacaatttgcttgggtaaacacccccaaacccaaaccacaacgcgtatagataaaaatggcaatatgcagagatatatataatagaaaataaattttcatgccacaaatataatttccagagttcacactctgtctgtcttatcattcaacaacaataaaaataaatatgtgtataaaattatatgtgcgtgcatgcatatcaataattttatcatgagagaatcatcacaatttcaaaacatgcagctcaacaatataataacaaataaatcaacaattctagaaataaata

SEQ ID NO: 246388 - DNA, 346 bp, Glycine max
ctactcagtgagagataaaatacctcaatacaaaatgaactaaaagcatagacttcttagaaatgaaaaataacatgttttaatcaaaaaataaagggagcgaaaatatgatttaataaaaaagaacaaaactatactctaacgcattttatattgcactaatcaatatcttaatttagatcacgcaaatgggcaatcaaatctccaatagacctaaatagggatttaaaagctacttattaataacagtaattaatatttcagataaggtatatggtgactataagaatgaacgtgagagtcggataaaacatatctcctatataattaaatgtatcatctcata

SEQ ID NO: 246389 - DNA, 352 bp, Glycine max
  unsure (1)..(352): unsure at all n locations
ccagatgacgatctctttccttcttggaaggtaccacaggatattgtacttccacaccttcatccacagctttgtcacttctactcttctttgcatacttatatttttcttctttttcatttattttcattctctatttctttatctacttctttgtccttgtcttggtccttcaatactttattctggaccattatttgtttccatttttcctgattgccttcacctctcacatcatttntcttaacttcaatacctctcttttcagacgctttctccttgtggactacactttcttcatactccaacttcataaacctcntactctttgtcatcacagctttgcattcct

SEQ ID NO: 246390 - DNA, 357 bp, Glycine max
cgaccagcacgcctgcaagctcttctgcatcaatcaacctgtctattgcttaacaattctaaccgcccacccacattcttgttctatctttgtctaacacacctaccttctcaaattcatgaaaagaaacacacacctcctcaccatcatgcattccatccaaaatcaattcatacaccaatgttcacaaaaagataaaagtgtctcactgccatatcatcaaagtcaagtcaaactgttccatatgcttcaaaacaagcatactagctaatcacaaacaaaatataagtgtatataaacattacaccaaataactaaaaacgcatgtactgaaactatacatattatcataataat

SEQ ID NO: 246391 - DNA, 339 bp, Glycine max
atgcatgggagatcctgaacaccactcatgaaggaacctcctaagtgaagatgtccagattgcaactattggccacaaaattcgaaaatctgaagatgaaggaggaagagtgtattcatgacttccacatgaacattcttgaaattgccaatgcttgcactgccttgggagaaaggatgacagatgaaaagctggtgagaaagatcctcagatccttgcctaagagatttgacatgaaagtcactgcaattgaggaggcccaagacatttgcaacatgagagtagatgaactcattggttcccttcaaacctctgagctaggactctcggataggactg

SEQ ID NO: 246392 - DNA, 417 bp, Glycine max
  unsure (1)..(417): unsure at all n locations
tcactaatgagaatttgtcattctcgtgcaatgaataatcgctacagatatngtctaatggattctggctatgcttgacccctaagtgaagcangtcctatattggcaatcttctattgcaggtgagcctcttctttctctattggtgctctaatacgtaatgattgagataagagggctntgtgatggccctcttggatcttccttctgtctacacccttgtattgtatggttggacctctgtttctgtctgcacccctgtattgtatgcctgcacctctgtctctggcacaaagtataatgaagaaatttacaggataatcatgctaatgaaatatggattttacgaagtatattctaaaatgaanaatgaaatcctaatcagaacttgtagctttatgaacagtatatatgcta

SEQ ID NO: 246393 - DNA, 293 bp, Glycine max
aagcatattcgttactcgaggtaagaaggaaggctccttgtacatcatgtatggaactatatgcaaaggggagacaaatgttgctcaagatgcagccaaagaattatggcacaagagattgggtcacatgagtgagaaaggtttggagtttctaacaaaggatcactttccaaacatatagtgatgtaagctccatgtggagcttgaaggcctatgatcttcttcatcaatggattcctttgcttcttggaagatgaatggcagccggagtaaagaacgaagagagagaggag

SEQ ID NO: 246394 - DNA, 386 bp, Glycine max
aaaagcccaagaatgtattcaagattgagtcaacaagttcaagatcaagtttaatttcaagtttcatgagaagaaatgaagaagattcaagaattaagagaagtttgatttcaagattcaagagaagatgaattcaagagaagacatcatgaagagttcacaagggaagtattgaaaagattgttcaaaaaacaaacatagcacagttttgttgtacaaaagaatgtttctcacaattctctaagttaccagagtttttactctctggtaattgattaccactttactgtaatcgattaccagtggcgaagtttgatttcataagttttcaactgaatttgcatggtgcaattgtttcaaatggtgtatcaatactatgctctgac

SEQ ID NO: 246395 - DNA, 371 bp, Glycine max
  unsure (1)..(371): unsure at all n locations
ttgggagcccatccaatccttgtgtgcggactctcagccacttatgatagccgccgatgatcccattactgctctccctaagctctctgtcctttcctcacgccgcataccatgccttgcgaactccgtggagtaccctcgcgttgtggtcactaaaaccccgcgcgatgaaaggcgtgatgctctcgtctaatggcgctcctctcatggncgagcccagctgtcttatggcgagaacgggattataattaatacaaccccttgttcccatcaagggaacatctggacatccttcgcacgaagatagaatcctgacctctcctttcttctagcgaggggaaccaataacagacgcccccccatgctaacca

SEQ ID NO: 246396 - DNA, 315 bp, Glycine max
  unsure (1)..(315): unsure at all n locations
gcttcctccaaaatcaacaaccttctggaggaatcttctggagggcccaagtgggcctggttgctatttgcacccccatttttactaaatacacccctgcctttntttggtgattcttctttcgtaaagttacggatacttacgaatttcgtaacgatacttgttctctttccgtaatgttacggaaccttgcagattacataatcatcccctctttgacttacggaatgttactgaacctcactaattgtgcaacgatgcttccatttgattttcggtgtgtcacggaaccttacagatagtgcatcaatattt

SEQ ID NO: 246397 - DNA, 372 bp, Glycine max
  unsure (1)..(372): unsure at all n locations
agtgagaggatgtgactcttcttattttaatttgaatnncaacgttcaagggcactggtaatcgattaccaaaacattgtaatcgattacagccttttgaaaatatttggaacgttgtaaattcagtttgaaaactttctcaaactctcttagctactggtaatcgattacaacaatatggtaatcgattaccagagagtaaaagctctctggtaaacgttttgtcaaaaactcatgtgctattcaaagttntgaaaaaactttttaatacttatcttgattgagtcttttcttcattctcgaatcttgagtcttgaatcttgatcttgattcttgagatcttgagtcttgattcttgagatctgatctttg

SEQ ID NO: 246398 - DNA, 272 bp, Glycine max
  unsure (1)..(272): unsure at all n locations
atttttttcttttttnaaggaacaacacaccaatgcatgtatagaagactctcttgcttgaatgggcttgcctacaagaaaatggttttctaaattcaaagtaactctaggaagaaagcattgctattctttgtacatgatactatagtcccttactttgtccttgatataatttttgcctcaaacttaacctttctcaattctaaccttgtctctaccttatgtaaggtagacaattaacaatattcaagtgaggataaatataatcatta

SEQ ID NO: 246399 - DNA, 406 bp, Glycine max
cccaccacacagaccacttttcttttatcaccccctccccacccgaactcactattgctaactgattcactttcgacgccactaacctacaacaacttcactcacgaactcacaaccacttccgaattgtcgaaatgactcgtacggggaaaagaccctagaatcttgttttgaataccaaatgatgagaatcctttgtgatggatcacaatgcagcatcttaacagactcaattaaacgaacattttgtagaagaacacggacatcagagtgcggtgagaaatgaaaatgaacaacgccacaacttctaacgatcaattagttgaggagactcaccacaaaaataagacttaggattctaacaagaattagatagacaattctctacactagcacaaactaatct

SEQ ID NO: 246400 - DNA, 310 bp, Glycine max
  unsure (1)..(310): unsure at all n locations
ccctcagtgancatggaacctttcgttaatcacatcacgacgccgttcaatccattgatcaactaagataaaatgagctctatgccaaatactcgaaaagtctttttaatcaggggaaaagctctctgaatcgattcttcttttgaggaatctttacaacaagtcttgcttatgctctaatgttgcttctgagtttcttgtttgaaaccattacatcgatggtctacataacggcactaacgaatccaaattggtagagcctagatcatctatcctatacatatacataattgatcctaaactatgttgg

SEQ ID NO: 246401 - DNA, 384 bp, Glycine max
  unsure (1)..(384): unsure at all n locations
caactctgaactccactccctcaagtttgaatttgtgcaaaatgaagggatgaaggctccaaaagattttntttctcacaaagaccaataagctatgatgtaagcttaaattgacagggttttgtgacacttgaataacctccttgacttccattttgaacatgtcaatctataccacaaatgggtagttgtgctctttgcaaaactaccaaatatgaaagagatgagatgtgccacatatgaataattgtgcttttaccaaaactaataaatatttatttaatcgcctacgactatgtgtacataaagtgattctcacacagtgaacattctcacacataagtaaattatactatcatttgattcgctatacaatctcattat

SEQ ID NO: 246402 - DNA, 361 bp, Glycine max
  unsure (1)..(361): unsure at all n locations
tgaagaaacagaattacgaaagaacattccaatgggatcaaataaacatacttggtttgtctgctgaagaggaaagaataaaatccccagcaggactaaaagtagccccataaactggccctgaatgaccttgaaacaatgtgcacagtcttttcccactatcttgcccaatattctgntcattctgtgatgtgtcatctcctccctgtgaaaaagctgatgatagcacaactgaagtattatacaaagtaaacatagaattatttgatcatatcaagttgctcaaaatgacaacttgcttaataatctaaatttgtaaaaaaacctagtttgctttgtaactcagcatcatattttttgt

SEQ ID NO: 246403 - DNA, 195 bp, Glycine max
aaccctcgccatgatgttatgaagccattgctgaacatccactggtaccatctgatggcggcgtcgtcaaggtaaagtgaggctacggtgattctctcttcctcttacgtgttctgatttgaaagagttggttaattttgaagatccatccaagaggatcgcgaccgtcaatacgcgggatatcgagcttaaccg

SEQ ID NO: 246404 - DNA, 349 bp, Glycine max
  unsure (1)..(349): unsure at all n locations
gcttaacatgaggcagaggagatggatagagttccttaaggattatgattttgagcttagctatcacccaggtaaagccaatgtagtagttgatgccttgagtaggaaatcccttcagatgtttgctttgatggttagagagttagacctcttagagcagtttagagacatgagtttggcatgtgagatcacttctattagcattaagttgggtatggtgagagtcaccagcaaactcttgagtgagattcatganggttagaagttggacccattcttatcagcttagttagagtccatagtcgcaaggagaaagagtagttttagagtgagaactaatggagtcttg

SEQ ID NO: 246405 - DNA, 481 bp, Glycine max
  unsure (1)..(481): unsure at all n locations
ctaagctgtaacagtgtgaatatgccgaggcatgtatttgtgnttcatactattttcttccataactacaccggttatgccaagattaatgtgtgtgattcgcattaaaaatgggaaataaggtcaatcattaaaagaaatgcctaaactagtggaggagactgcagtgactaaagagagcacacgactctacagacttgcaattgcaatatatcagactccttataattatatgtttctaatatgatttcacgttgcaagaattcttcattgagtaacctcattgagtagctatatatgcatatagctacaatgttgacatttttggcaagaacacatcttggtacctccaagctaatcaacatacgaacaagagcttgagaggtaaaaccatttttcacataacctagaatgataatgaggttcatatagccctacattatatatcagtcccgtaatactatatcatacttgtacacca

SEQ ID NO: 246406 - DNA, 300 bp, Glycine max
  unsure (1)..(300): unsure at all n locations
agttagttatttactaacactctatatattagtgttaggtaggtagtgattgaacttcacttcacttaacttgaacttctttttgtacaaaacttgttgtgcaagctttcttttttctctctttnttctctcaatcgctccccattcttctttatcttttcacttccattctacccatttcttgcaccaaatgttgtggtttctccattggtgatgatcatggagggctaaacaattaatcaatccaaggatctactcccgagcagggctaaattgagttctggttntgttcttctactc

SEQ ID NO: 246407 - DNA, 409 bp, Glycine max
  unsure (1)..(409): unsure at all n locations
ttttcctcgaataaacgnnggtggtgactccgcgcattttcctttcttggaagacacacccgtgagccctcgcgtcgcccttccgccgaagggtaggtttcgacactcatgatagtctagcctaatcctgatcaagtatcgtccgcagattcctcttgttggactaaactcggccaggaccgcattaagacatacatacaacaactatgttaccgtaccccaattcctcatgaaaatatgacatactagccccatcctatcaagttctaagaatcagaccggtgtacactgttgaatgatcctaaaaacacatgcatctacatgatcaatgcataagcatggcagaatgaagttatgatagcacagtgaacacacaaaacatcagtgaataaatattaaaagatattta

SEQ ID NO: 246408 - DNA, 349 bp, Glycine max
  unsure (1)..(349): unsure at all n locations
cttctagagtgatcctctgtggccgatcctctgccatgatgtattcttcaaagttgggatgtggaaaagaggaagatgatatagaggatgatagctcttgattcctttgctattctctatttttcttgcagggtcatttcttctacacgttgcttcaatctctatatccaatggaacaagattgtttcctcgcatacaagaaagaaaaaaactatcgtgcacattatcacataanataaanattaaagctaaaaattaaaattaagagtgaataaagaaaaattgaaaattgaattctttatttcttattctttattttttgtgaaaattaacgaccatcaaataaaaa

SEQ ID NO: 246409 - DNA, 295 bp, Glycine max
gacacttaaatactcagctgcactatataagagaaaaaactctttgtgctttttttacaccaacgacataatttataacatcatatttataattgctcataaatcagtacttgtacactaatatcataaatgtgtgaaataacaatataacatgtaatggacacgataaaggaaattgaaatgaagtttttaaagcctatgttgtttgtggagactcttcttcgaccaattttatgtcaataactctgtagataatcttgacctacaatacatctaattctggataacgaactca

SEQ ID NO: 246410 - DNA, 428 bp, Glycine max
  unsure (1)..(428): unsure at all n locations
acaattggcaatggtcttcttttttacatgagtgaatttctttttataagaaaattttattaaacaaaccggtgtataaagagacactttcgaccaaagatacaaaacatctgcaaggccatcttgttggggtaaataaaaacatgctacataatcaatgcactattcatctaacaaggagcattggacacagctcatattgcctttaaaccaagtccattatatctaacatttattaggtatcaaacaccattgaaggaaatataaacttgaaacattattgttacacatgcataagccaagtagatcataccacanatgaacaacaagacacaattttgttgtcctgaaaagaaagctaaatcggacataatgagcattgagtagctagaaatatgaataatcaaaacttcagtataaccaagtca

SEQ ID NO: 246411 - DNA, 305 bp, Glycine max
  unsure (1)..(305): unsure at all n locations
tggcataaagactttgttgttgtattaatcacctaattagtagtgtctgacaagtgtaaatgtgtccaacattgggaagaagtgtcagtgctcatatcataagttgcaagattttcattatcaaattttgctagtccaatttgaaaattgtgataaagcanagtgtctaatcattataatctgaattctgaatcatcatctggtcttgtctttatcgtgatgtactcgctatacttcacgtttgccggaatgctgagaataatgaaagtattggggtagctatgtgacactgggatccatacact

SEQ ID NO: 246412 - DNA, 416 bp, Glycine max
  unsure (1)..(416): unsure at all n locations
attcaccacagattctgccttcttctattttcagaatgggaatgcctctcacagcacctttgtcaatgattntcttcatgcctcttaagtgcagatgtccaaatctttgatgccatatcttgacttcatcttctttggaggacagacatgtggaggagtaactggtttcttgaggtgtccatangtaacagntgtccttcgatctgctgcccttcattagaacttcactcttctcatttgtcaccaagcattctgactttgtgaagtttacattgaatccttcatcacacaactgactgatgctgatcaaggttgcagtcagtcccttcaccagcagtactttgtcagactaggaagtcatcatgggctaactttccattccagtgatctttctttagagccatctcaatgtacat

SEQ ID NO: 246413 - DNA, 435 bp, Glycine max
  unsure (1)..(435): unsure at all n locations
gacttttgaagaatcttcagaaacaagtcacttgaagaattgtgacttttggaaatgtattttttgaaaacagtcactggtaatcgattaccattaaggtgtgatggattgcacattaacagatgtgactcttcattctgaattttgaaaatcttaacgttttaaaacactggtaattgattacatgattatggtaatcgattacagctttgtaaatcagtttgaaaaccaatgctggctactggtaatcgattactaccttctggtaatcaattaccagagaagtaaactctttggtaaaagattgtgtgaaagcttcatgtgctattcaatgttgtgaaaaactttgtagtacttatcttgattgattcttctcttcattcttgaatactgagtcttgaattntgatcttgattttcttgaatctcgatcttg

SEQ ID NO: 246414 - DNA, 367 bp, Glycine max
tagtactttcctagtcccccttattttttctttttgggttaaattataaacgagattcagagccttgcgtgtttatatcatcaaggtgtgtgactaataaaatatcgaattgtttaggatggtcaaattttgttgtctctggaaatgctctaaaatttcttattgcattgtaggtgaaatcgtattaaattgtatactatctgctcaaggtgcagagcaagcagtggaaaaagcagcgatgctctgaacatcggctagcacttggttcttcgaatttgtttgattccttcttacgcagactgaaactgcactgccgtggtagggatgaattttgaatgctattgagctctcttctaatttatctttt

SEQ ID NO: 246415 - DNA, 436 bp, Glycine max
  unsure (1)..(436): unsure at all n locations
aagaaaatactttttcttaattgattcttaaaaaatttaaaaggccaaaatgtatcaacacaaataagccatagaataaattaatcagtctcattaataaacctattaatataaacatttttgtaggaataacaaacaaggataatccatcaaatgtaatcgtttgtaagttacttaagacttaacgtttttatttaaattattttttttttcaaaaaacgtcttgatctaacttctttaataaatagaccaagcctatcaagccatatgccaatcatttctcaataggtaatctgatttacttttaccccctatttctagttaagagtttaagataatatcatttntttttcgaatttgtcattaccttcgtttattcacaattattatacacagttatcgtgaaggggagataaataatatcgtattatattaa

SEQ ID NO: 246416 - DNA, 346 bp, Glycine max
  unsure (1)..(346): unsure at all n locations
acacatgancccaagtgggtctacttgatcatgttaatttattcaccatatcaattctttgccatgttctttgttgaaattatggggttttaggcagaggaagaaacaggggataaatagactgaaaaatttcaaattagtattaacttggtatgatgtgattaataacggctaattatgaatatattctggggttaaatcatataggaatttgtaatttttctcttctaatatttccttctagagcaaataattgttacattaacatcatttaagttcttgtgcagagaatagtaaaagcgatgaatttatgatgcttagtgggtaacataaagtttagtaacga

SEQ ID NO: 246417 - DNA, 438 bp, Glycine max
ctttgttttttgaatatacatcatccggccaatgagtagaatcttgagtgcttcgcaaatcttgcgaactctctgattcaaccattttcttttttaattcatcttacataaaaacaccttataaattattatcatacatcaatatcctgaatacttcaatatcactaaacaaaactcatctccacattaggtactccccctcaccccataaccttctattagaaaattaagcaaaacaaagaaaaagtattgaaataaaaattaaaattcttacaattacaatagcagcactttcagtaacaatgcttccatcttttcgagtttgagtgtcaatataaatttctgccctagaaaggtgcactcccctagcacttggtggctaacatgaattagaaaaatcaatcatcctatgtgtattaagcaatgtaataatataaa

SEQ ID NO: 246418 - DNA, 174 bp, Glycine max
tcacaactctgggcgaagtcgagagactcttgctctacctaacttctgattattatagagaattttctcccacagttgaaacacatcagcggaccctagaatgccagatagaactgagctagaaagagatgattgaagccacgtgaggagcatttgatcttggatctcccacgc

SEQ ID NO: 246419 - DNA, 265 bp, Glycine max
  unsure (1)..(265): unsure at all n locations
agaagcgaaagagngaaagaagtttgttctgtaaccaaatgcttaattctcttaaacgaaaccaataatctggtgcagcgcaacacagatggggacggaatatattgtgcctaccaagcgggcctgttctgaatttattaagctggattttcttcctgcacctttcacattttttctacacccaacatatttttgaatattccaaccttacccctgtttacttattcttctgtccttccttctctgatttcttcttacaccactc

SEQ ID NO: 246420 - DNA, 406 bp, Glycine max
  unsure (1)..(406): unsure at all n locations
ctaccattacgatcatcgtctccctttccatcattgggggtaccacctggggccgcagaatcctccaccttttgggcgtgttctttgaaagatccgtccctctttttgcaaatgttctgtagttgcatcctatcaggaaccatatcaaaattgtactgatactgcctaacaaaggcaaccattaggtccttccaagaatggactcgggaagattcaagttagtgtaccaggtaacagctaccccagtaagactttcttggaaggaatgtattagcaacttcttcatcttttgcgtattccccatcttctgacaatacatctttagatggttcttgagacaagtagtcctcttgtacttgtaanggccagcacctttgacttgggaggggtgatgatattgggttct

SEQ ID NO: 246421 - DNA, 449 bp, Glycine max
  unsure (1)..(449): unsure at all n locations
aatttccttttatgaatgatgctctcctacaacctaagacaaggtagaaggagataaactgtacaggctttatgttcattcaaacaatcatactttcagctcaaaatgggtgcaagggataaatcaatcatacacaaagtaagcttttttagctaagtggctatcttcaatcgaaacatggccttcatcatcttcaatttcatgcattcattccatactcagagattcatgcaaaaatcagtactcaatgttagtcattctctcacaattaaagatcacactctcatcgggttgcggctaatgcgttccttcacaatcaacttgacaaactgactatacatttttgtcatgatcataattccatgttctttctcttctaatgactgcatgctcattcaaggcatatgatctatgcatntcaattcactcacatcatacaattgatcaat

SEQ ID NO: 246422 - DNA, 408 bp, Glycine max
attaggcagcaccagtacaatatggacatggctcccgatcggaaccacgcttagggtatgactaaacgagagcatgagtccattaaggaatatgccgagagatggagagatctcgcagcccaagtcgtatcgcccatgacggagagggagatgatcacaattatggtagatacgttacccacgttctactatgaaaagctgattcaagtaaaaggaccacccgcagcagaaagagcgccggcccaacgcacagcttcagccgcaccccggccagttaataatacagcccccggcgcgacctataaatatgcacagcacccgaaagacaactctccttctattcccatggcatactctgagctatgggcttcattattggagaatcacttggtggtggcatacccggga

SEQ ID NO: 246423 - DNA, 415 bp, Glycine max
cctacccttcggcgggagggcgacgcgtgactcgcgggatgcgtgttccatgaaatgaatgcgcgcggagtcgccaccaacgtttatttgatgaaaacgtcggataaaccagaaaagacgcgatctacgaactttttaagtgaaaggttcgggagttgtatttacgcacggtgaatgtattatcaccccacacgtccgtcccaatggacagcatcctttaatcgaatgtgcaaacatgactgtgatttttacgttcccttttatgtccttatatcctttataacccttttatatttttctcttttttgtggtcgacaagggtgtttccctttgctcctacgtattcctcaaatttgggatgagaaaatcagacctacgtaggtctttcttatcaagtgattctgttttacttaag

SEQ ID NO: 246424 - DNA, 362 bp, Glycine max
  unsure (1)..(362): unsure at all n locations
tttcttcanaagaaattattagactacaaaatggtctcattctaaaattcgttttaggtctctaaatacgttggatcggtcctgctaacattttttagaacatacattttattattgactaaattaattaaaaattataaaattaagagagaaactcattaaataagacatgagacacaaaaattttatattttttaataaattctagttaacaggaaaattgtatacaaaggtatatattaaagagtattgttaatattnttcttttattaagtaataagttaacttagaaaattttatctatcaactttgcggttntcagtgaatatngtttttagttatatcttgcaaacataacctta

SEQ ID NO: 246425 - DNA, 309 bp, Glycine max
aaatctagctgcaactgcaatgactgatctttcattattggaaaatgatatattgatttaattctaatccggccccatgcatatagtaagtagctaattaacacagaaatattgaaaatgggatatatggcccggttgtttaaatttaacaaatatttaaaaaaaacacttcttaaaatgtaattcaatttttatattaaactacttttcttttcataacatgaacttaacatcacttgataaataagaacaatcttatataagttgatctaccagttctaaatggcatgaagatcatcatgactatgt

SEQ ID NO: 246426 - DNA, 419 bp, Glycine max
  unsure (1)..(419): unsure at all n locations
tattaattagtgcggtcacattcatttccgtcgccgtttgtctntttttttangttggcacaaactctttgactaggtcaccaatgttgaagttacggaccttacggtgcaacttggtatcacacactcatgatctcggcggcaactatcacgttttcacgtcaaagttcttacacagctatagttgctacgacacaaagaacatgtgcatttccatagcttataagtcgatgttgcaagagataatataaacaacaaaactaagattaagatgaacgacgtataaataaagaacgttaactgtgagatccataacttacctgtcatgttagaattaatattgtattaacccttgaactgggaagatgctatgaagtctatctctggccaattggagcactcgaaagttctggtcaaat

SEQ ID NO: 246427 - DNA, 303 bp, Glycine max
  unsure (1)..(303): unsure at all n locations
tatgataaacatggccctccaaagacttagcatcacactccttttggttctattcatgagtctccattctcaagctagtgttgagtcttctaattggaaatatgcaccaaacattggaagtgttagagctgcgtattggcctgcgggtgatgacctttcaccctcttccattgacacaaaatacttcactcatatctactatgcctttatccaacaagaccctcaactttntcaccttagtgtcacccgaattgatgaataatggataccaaaattcatcaatggactccgctaccgttaccc

SEQ ID NO: 246428 - DNA, 226 bp, Glycine max
  unsure (1)..(226): unsure at all n locations
gagtgcagtggaaaatcttatcgatgattttactgncataatcttctagttggaagacagcttggacttagagtgcagtcaaagttggtaatgaggggaccaaacaaaaaactataaacgtcctaaactatcgcagacctcggtgagatctatgcggtgtgacagcctaagaggttctcatgggaaggacatctgcaatgaatacaccatatttcatccacccatg

SEQ ID NO: 246429 - DNA, 94 bp, Glycine max
aagctgcctccctacaccagtctttcgatttaccgagacacccgaattggctcttattggactttatctttagaccacaaaccaattcaaagca

SEQ ID NO: 246430 - DNA, 419 bp, Glycine max
  unsure (1)..(419): unsure at all n locations
gtataaataacaacatacttttggaggctccaataattgtgtcctcagttntgctatttttgccttgagctgcccgagatgatactctgcacaatacccatactcaatttcaaataccttaaattatcaaagacatagaaagtaaagcccatacaaaaattagaccataatgcaaagcgagaaaaaacaaacatgaaaaaaaaaacactttttgagagcagagaaatcaggtttggaaaaaattagtgaccagaaaaaaacatgcaattcctgtcatcacaacataaaaaaggatcttcagctagagcctacaaaataataataataataataataataataataataataataacaataacaacaacaataacaataaaattaaatagaatcctaatccagcttcctgcaacaacaat

SEQ ID NO: 246431 - DNA, 89 bp, Glycine max
aagaaaacgagctagatggatggtaataacacctattggccctgataagtcagcgtatgttcaacttggttaatggtgagcaatgtaat

SEQ ID NO: 246432 - DNA, 405 bp, Glycine max
tgcgggacaaattggcttctttgttgtccttctcctagctgtccctgtgctgtccatgttgtcgagttaatatttaatttcgttaatacttaattgtgcgattcaaagttaaaaccgcgtggtgttcaaagggcagcacacggacacctggaaaagggacagcagataaaccaggttcattgcgggattgacatttatatatacagatagttctaattacacataattagacgagattaattttcccctaattctgatcctatcacactcaattataataaatgacatttattcctgactctcaacagtattaaatatacccctgacagataacccactcccatgattcatttgcagtcccaagtcatatacatagcatgtaaccctgaaagtataataaaatag

SEQ ID NO: 246433 - DNA, 409 bp, Glycine max
  unsure (1)..(409): unsure at all n locations
ttcctgatagtcggtgtactcatcgtccctgagctggacgcgtctctctcggtggaacgaccatcctttgatggcctcgaaacactactggtgctcgacgctcctgaaacggtggctatcaaactcgggggcggcactggtcccttcagccacggcgtccctcatagatatcttcgcggaaagctctctcggagccatttcctgcggagaatgaacttggaaagttagtttacaagacaacgcttattttaaagcaaaaacggcatgctaatctttccgatctagaacaaacttgcgcacacatttacttaatgtacaacatttatgaacgtgcatatgcctaacatatcctactatntatatcaacatacaaggatattcanaacattctcactaccacacatatata

SEQ ID NO: 246434 - DNA, 283 bp, Glycine max
  unsure (1)..(283): unsure at all n locations
cacacggaggggcgaccgaggcgacaaatacagcgagacgcgcgaaagngaacaacgaaggctctcgagaaaatcaaaaggacaccaaaggccaaacggaaagccgcgccacgcgcacaacacaacaagacagcggaaagcgaaccacgaacgctcgcgagaaaaagaaatgggcagaactggccacacggaagaccaagggacggcagaacacatcgagacgcgcgaaactgaacaacgaatgcgcccgagaaaacgcaaaagacagaaccgggcaaacagg

SEQ ID NO: 246435 - DNA, 365 bp, Glycine max
  unsure (1)..(365): unsure at all n locations
agcaatgncccttatcaagttgtgtgatgccactgtcacgaagtcangagatagccacaagtagcacgccgaccatgctttccgagtcacctcgcatgataagaaaagatgatcctgngtctcatagcactgccgacaaanaggacataacaaatcatcttgattcacattgatatttctccttccaaggttgtctcttgtgccaatgaatcgtccacgaanaaacgcttgagcttatgtagcagctccaaagtctttgaacgattcacaagctttgaaagacaagtgtagacgactctggcctccgtgtcagaagaaagacacagatgttaagggtaggggtgttcatggattgaaatttcata

SEQ ID NO: 246436 - DNA, 303 bp, Glycine max
tttcatcctatgctactctgtttgatgctacccttattaacaaacaaatattggtcattatagataccacttgggctttgtgggcaaaaccggtatataagattttttttcatttccttaaactgattcatctttaagaaaatgacaatttggtacttggtcggttttttttaaaaacgctgtctcaaatgtcaactaactatttttggagtaagtgaactcatgaataattattgcaccataaatactacaccacttaaaataataaatatatttatattacaagtgtgaaaaatgtatgat

SEQ ID NO: 246437 - DNA, 422 bp, Glycine max
  unsure (1)..(422): unsure at all n locations
aataaaactggacgaaataaaataaaattgaacgaattaaaataaagttgtctgctctcttcaagtccaagccggttcagcccaattttggatccaagcccaattgcttataattntcttgaaattaaattaaaaacacaaaattagtcaagtaggctcaaatgataaaactgcataattaattcgacaattaaggctaatcagtaattaaaatggtgacaaaaagggttaagaaataggagaaaataatgacacatcanattcccccacacttagccttttgcactcctgggcaaaatcaaaaagcagagcaaggaacacaatcagagacattaagggaganaacacaccaaaaacatttattatttctcaatgaatccacgaataaaggatgggcacatcaacacgtaagagtaaagatc

SEQ ID NO: 246438 - DNA, 442 bp, Glycine max
  unsure (1)..(442): unsure at all n locations
ctgctatggacctgaggtctgggtaagtgttgttttctganaaagaaggtagggtagcattcaccctcctataataccaccggtgtctccaaaaatgtgttcaacgtttgcgcattgaacttgatcactttccctcagactatgcattgtttcggagagtcgtccttcgggtagtagatgttagaatagaactccttaaccaacgccacgtcaatgtcgttgtctggcagcctggtgagctttctgttctagtgccttctatggagttcatctaagaactcatcatactgtgtgggaaccagctcgacattcctcttcgaaaggatgtttcgaagatgaacgttctcaatgtatcgtatccatgcaacctcagatgtaaacctggtggaatcccaatcttggtggaagagaatggaagaaaatggaatgaaaatggattttg

SEQ ID NO: 246439 - DNA, 380 bp, Glycine max
aaccttagaatggaccacatatagagtcatggcccaacgaaacaaatagatccatggcgtgtacagttttgggatgctttgctttgagattctatgttctaagttccaactggaaaagttcctttccaagataggcatcaccaagggaagacattagacaaggtttgtgctaatgaaatcagggacattcaactttttaaatattggaattttttaatgttttctttctcatgtctattctgggattctgcagtatacactattttcccataattttagcgaaacaattgaaaaaggaaaagcaaaaaaataaaataaagggaaagcatatgtgagaatgaaaatcgatctttatctgaccaagtaagtgattaaaacat

SEQ ID NO: 246440 - DNA, 424 bp, Glycine max
  unsure (1)..(424): unsure at all n locations
ataaggatacatgagtgttgtccggcagttcccacaatggacatgagccacttgattagatgctctacaatgcagaaccaaagcccatcaacagatagtcagtaaacaattaattgaataataagcatagattatgaaaatataacaaggaattcatcattggactgacatgagtataagaaaacagaaccaattagagcaacattgaccgcaacattttgtatcataagcaagtacgattttatgcatataaagagtaaaaagaactgcatttatcaatacaaatagtcgccaacaataaaatggacagaatgaattaacactaatattggactatatgcaagtaactaatatgcaattcaaaattattaacatttgaattggaattccagaatgacaatgaanaaatgaatatgaaagtata

SEQ ID NO: 246441 - DNA, 389 bp, Glycine max
  unsure (1)..(389): unsure at all n locations
accctttgggaataaaacctggattatgcacaacctttccatctaatttggtggtttcggctggtccattcccttctatttgatgcttgactttttcattttttgatggaagtatgggaaaaaagaaaaaatggctgaggtggtcaaatactatggaactctgcaattgtatcgaccccacagtgccagctgatgacttatngatgaaataccaatatatctctgatntcttattgcccttgcttatttctcaatccctttggagcttatctactttngtaagaatcaacagtatttccatatagatgggtccttgttcaggttggtgctttntatagtttatgtggagcaacacatctaaaataattatggacctttagaattcattc

SEQ ID NO: 246442 - DNA, 435 bp, Glycine max
cttcatgagtctggacacatgtacattaaaagatgtaacacgggtaaagtgatccgtgaagtcttatatggtggatcagaagagttcttgtacatggctagaattgatcctgatgggcttttcagactatatcgacaccgcataggtgagaacctatgaagcaccaatattttcatttgccttacgtataagtatcagatatgtatgtgatgccgatactcatggttacttcactgatatgtatcaatgacatacgaacatgagatataaaaacatgtttttagtaatgtgcaagaagtatgttcttaatctggattcttagaactttaattggatgttcactagaatattagaattgatcttacatgtattgtatcttatatattgttagaataactggattaccatatatctgatacatggtatctatctatg

SEQ ID NO: 246443 - DNA, 371 bp, Glycine max
ctaagctctacactaaattgatagtatgttgcagacctattttcatatgtatgggcccaaaaaaagtgggcattgtaaaattaatgtgttgacaacgtcagaatctctttatatcgtcattgtaatgactttccattgaatctgttcgactgcgcttagattgttatgtctcttattagcgagaaattatccaccatccttcagttgtcagaaaatcatgccactagatatttaatggctcttctgaacattctggaggttggtagtcgggctaccaagtatgtgtggagtgattatgatgtatactcgatttgcactatgtccattcataatgtgttgcctaaactttaaattggttacctcttctttat

SEQ ID NO: 246444 - DNA, 378 bp, Glycine max
  unsure (1)..(378): unsure at all n locations
aacaaatccctcttattactagctattttgaattctttagctcctgaatgtacaaccttcaaattggtgctcgttcccctctttcttttctgcaaaaaagaaaatcaaatgctgtccaaacatggatgaagtcctaagaaaatcaatatcaaagaaaacatggatgaaatcacaattaaaaagcacaactacctatctttcagagtcctttggttaatttgtctcgtctncttatgtggtgggggtttgtttaataatcttatacttctgccttccaaaaaaaacttatcactaatcctcttttattaatccaatntgatggtatagataaaagacatgggtctcacctttctcactactactctctctccttttctc

SEQ ID NO: 246445 - DNA, 377 bp, Glycine max
tcaaaaataattgaagattgcttcaacaaacaaatccctgtttcagattcactaaagaccaagccttgccttaaaacaaagtgctttcaagacatgcaaggcttctgtaatcgattaccaagaagtgtaatcgattaccagaagacaggggtgagaaatagttgttgaaaaaaggctctgaatttgaattttcaacatgtaatcgattgccatatgtctgtaatcgactaccagcaatgaaactactgagatcaaattcaaagtcatgaccttcaagataactgtgaatcattcacaacattgaattgattaccagggaaatttcagataattgcaacattacattttcatggattgtgatgacacaatggctataa

SEQ ID NO: 246446 - DNA, 268 bp, Glycine max
gcgatggtgcacaacaagttttccacatccacaaatcgcgcataaacccaccatcccctgttgcccacctccaactgagctcacgtactcccacgtagcccatatcctcgtttcttctaacaccgggtccccatcaatcctcccaagctttcccaacatccaagtgacttaacattcaaacaacacaaaccatcacagccaagaaaacagggcaaaggcagaaaactctgccccaacaccaaccaaaatcacagcttttcttacttaa

SEQ ID NO: 246447 - DNA, 280 bp, Glycine max
  unsure (1)..(280): unsure at all n locations
ttatacgccctctctcgctcgcgggagactctctctctctcctctctctcttatatttttcggttgtagttgtaggctctcttctctttctcttttattgtcggtgtttttacaattccagttcagacttttaggtgtatcaataaaatttcattctctatttgattaatggaaggctaagtccgcagcgttgttttccctggaggatcaagcacagttctctttgaggttctattattactgctaaattctggttagttnttcctctgcactaattact

SEQ ID NO: 246448 - DNA, 344 bp, Glycine max
  unsure (1)..(344): unsure at all n locations
gcataacaaaactttctgtgattggtttaaagatatacaatctttgcagatgagaatgcttcagaaacattaagaaaactagcagatgggcctaaaagaaatgttataacctggcaaggatacgacataaacaggtattcattctacacaaaagcacaagatgacaaaagtacaatgcagaacagcggcgtcaccctaagggctgaatctcaacactttgcaagtgtcaatgacngccaatcctatgtagcttccattccttactttaggttcattgatgaaaattgggagcttaattatgtgaaatttacagtatgtgttttcaaatgtaaatgggttgacag

SEQ ID NO: 246449 - DNA, 372 bp, Glycine max
cctaaaaatgtattctcaacttaagcataagctaactgatgcttttggagaaatctatttcatttatagagaagtgtatccaaacagggcataaattcaattcaattagaactgaaccgacaccaaaaactctcccaaatctatttcactgcttcaattcaacaaacaaaatcaaaccttataatctttccaagtgcagtatgtggcagcagactgaatggtgattcccttctccctctccaagtccatggagtccatcttggcgccgacgccgtccctgcccctgacctcgtggatttcgtggatccgaccagtgtagtacagaacccgctccgtcagagttgtcttcccggagtcgatgtgcgccgagat

SEQ ID NO: 246450 - DNA, 324 bp, Glycine max
cacaatccaaactttccaagtgcttttaatacattagcttattcctacctttcattttacttgatttgaccttataaacaacacacactttcttgattgtttttttttttctctctttttatttttttatttttttaacacaattatttgtggtgtgtgatgtgcttgcttcacttacatgcggtaactccccaattaggaaatttcttgaacatttgatcatcctccctaagacttggtaagactcaaaagatggccaaatgcaaaaggcctaggttatacctaggaaattaaccctggtaatgacccattctgaaattaata

SEQ ID NO: 246451 - DNA, 289 bp, Glycine max
  unsure (1)..(289): unsure at all n locations
aaaaaaaacggattgaccgtgacccnnaaaaaagcacgcaaaacgaagaggaatcttccacaaaaacaaagagaccggcgaaccccaccccagaggcagaagggcaaaccaaaagcaacgccccggcccccaaaccggcaggggcccccgcacaacgccatcgtcgtgaggaccaacagacccccccagaaacacggccacgctacaggaaaagggacccaataccgaaacacaaggaaaaacgcaaacaagacggcgccgacacaccgagccaccaaaggacacgcgc

SEQ ID NO: 246452 - DNA, 333 bp, Glycine max
  unsure (1)..(333): unsure at all n locations
gtggtcacgtttaagacctatctttcacaaaagaaacgtccgaagaaaatcatgtatttgcgcccattatcaatgacaaagaattatttacactagaagaaacccatgatacaaaacataagttctaagcaacaatgctattactcaatcatcttgcttattctactttctaattcacataacacatttttttgtggatttgtaccctttctagctttccgncaaccgattaagccttaagactcgtcatgctcacacacttaagattggaggattatgtatcctttcaaactggccaatgacttctacctttaattccattatgtattggat

SEQ ID NO: 246453 - DNA, 254 bp, Glycine max
aagcaacggcacaatgtcctccagccgagccctctggtctgcttcagaaacattatgaatggccgcacggcttgtatcaaggaagcctgatggcactcatcaaggggagaaaccttctaagataataatatacgagaaatgcagcaacaaactcggatttcattccttgtgcttcattgactataatcagacgcgcgtatatagggggcggcttaacatagacacatcatataaccaccaaccatcacgtggag

SEQ ID NO: 246454 - DNA, 313 bp, Glycine max
  unsure (1)..(313): unsure at all n locations
agagagaagtgcttgtgacattntatntcatactctgcgcaaaaactctgtctatgatgagtcagaatctactaaaaaatatgaatggttataaaaaatggtcacacgcaatataaatgaggagagagaattatgaaaggagaaacaaaactgacaaaaataattataatgtggaataaatggtaatcaatcagaggcgtagacagagagtcttagaaatagaccaaatatgaaaaaaagtgtgactaacactgttcaatgtggaatagataatataaaataacgaagataaaaatatatgattaaatcttat

SEQ ID NO: 246455 - DNA, 253 bp, Glycine max
ttctctaggaccttttggaaaaatcatgattgtatttttctatcattggactgtgagttaccacaacaactagtgaatcaaaactttggagttaaaataaatttcctctacctataggtggcaagtgctgcaactcatacctgctgcgttttatgttgaaaagcttacatatttccaagttgttactactaaagttttatttttcagacttgctgaaataaatgccaaattgatcgatgcagctaattcatca

SEQ ID NO: 246456 - DNA, 416 bp, Glycine max
  unsure (1)..(416): unsure at all n locations
ttacatgaacgacattgtggctgaaacagtgaatctatagttgtagacagatttttgaaacgttgatctgttgactcttttcattttaatttaattcattttactaagcctggtattattaaaatttaaaactaaaactcttacaagctaatcataaactttctctagtttactttgaaatggtaatgctctatcatacaacccctttactttcattnttgtccttttgtgtcatcattntgcttagcgaaattcttgcttagttgatattagtcactggattaagattgcatgccttcaaagatcatatntattactcccgtggctagaagaagcaaatttgtgtgacatggaatgttcgcgctatgatttgacttaccttttattatgagcgctggtctactataaatcgcttc

SEQ ID NO: 246457 - DNA, 374 bp, Glycine max
  unsure (1)..(374): unsure at all n locations
taacttagaaaatttccttcacctaaacaatgatgatgcatgatgcaaaacatatatcaaatgtactaagatccgtcaatcaagataataaccaatacaaatgccactcaaaggaattaggcatgtaaaagccaaaatttctttaataactccacttcaagctttaaccttagggtttttaccatgttgctccccctatctctaacagtgttatggcatataataaatttatgtttgaaaaagctattagtgctataaggaaattgagtaaagaacctgctgattggctattacataaagacataccaaagcatacatgggctatgcacacattngaccctcaatgcaagagtgacaatgtaacaaacaacttc

SEQ ID NO: 246458 - DNA, 342 bp, Glycine max
cactggcgttgagaaacacttaacatcgtggaaagccacagggagcgacccttcaagcggagattactctttcaagatagacactcgtggaataccagaaattttcttatgggatgaccagaacataacatacagaagtggcccttggaatggtgagagattcagcggtgtgccagagatgcaacccaacacagatactattacgttggatttttcttacgataaagatggtgtgtactatttgttttccattggaagccgttctattttgtcgaggctggttttgacttcgggtggtgaacttcagcgtcttacttgggtgccaagtataaacacttggac

SEQ ID NO: 246459 - DNA, 407 bp, Glycine max
  unsure (1)..(407): unsure at all n locations
catgcaagcttaacacaaggcatgcgaagtgtgtgtgtattctagagcaattcccttatgctatcaaacataaaaagggaaaaggtaatattgtagccgatgctctttctcggcatcatgcattactttctatgcttgaaacaaaattgattggtcttgaatgtttgaaaagcatgtatgaaaatgatgaaacttttggaagaaattttaaaaattgtgaaaaattttcagaaaatggtttctttagacatgaaggctttcttttcaaagaaaacaaattgtgtgtgcctaaatgttctactagaaatttgcttgtttgtgaagcacatgaaggaggtttaatggggcattttggggtccaaaagactctagaaacattacaagaacatntttattggcctcatatg

SEQ ID NO: 246460 - DNA, 322 bp, Glycine max
  unsure (1)..(322): unsure at all n locations
tctgtttatggttttagtgatgacgtttgtgatgtttatatgctgaaattgctgatggaaatctgttatagacgaagggtagaactaacctaaggttagaaagtgagaatgtgatgttatgagtggaaaaagagtgagactttgagagttggaaggctaagtctgaattctgtggtaaatggaggttaaagtgagttaatactancttgaaatgtcatttaagacatgtgagaaaggttaggctgagctagagagaaaaacaaatgaccaaagtgaaccatgagccatttctagggcaaaattgggtgttgaagagtcaaat

SEQ ID NO: 246461 - DNA, 353 bp, Glycine max
  unsure (1)..(353): unsure at all n locations
ctcctacatatgagcgctatcttgcntttcattctttacccactcctcacgtntggttttttatggaaaaacaccataactaaacgcgccgcatgggatccctatcgcaccatatccaaatctataacgatgggtgatcaagatgagacgcatgaacagatgaaagccgacatgtctgctctgaaagaacaaatggcctncatgatggatgccatgttatgtatgaagcagctcatggagaataacgcggccactgccgccgctgtcagttcggctaccgaagcaaacccgactctcttggcaactacgcaccatcctccctcatacatagtaggacggtgaatggacacact

SEQ ID NO: 246462 - DNA, 323 bp, Glycine max
cctttgttatgttttgagcaggtttttcttccatacccttacaccagatcagtcaaagtacaatggagactgtttgagaagctttttactgatttccgtgattgcttcaaccatgtagattattatgatatgttgggatgtgccaagagcaggtttcacccaataccatctgcttggttaggttactagttagcaaattctaatgaagcctgccttatcaattctcttgtttaggaaaattgtttaccttccttcatgtgtaactgaagtcaatcaattctcattgtgaaaaatctcttatttctcacatgtaaagaaacatc

SEQ ID NO: 246463 - DNA, 337 bp, Glycine max
  unsure (1)..(337): unsure at all n locations
gataaaaatggtcattgaccaatcccttttccatgacttaaccaaattacctagtgatggtgtaccatttgaaggtacactgaatgacgactagaaatttgatttctctacccatgatgcccgccagttgatttgcaccaacaatgcggatatgaccggacgtcttcttgccgggtcattggcttttgaaagccgcatccttcactatttaattgtgcgtatttttcttccacggtcttncaaccttgccaaggtttctgaagaagatctaattatcatgtgggcctttcatacanggcatcaacttgactgggcacacttagtcagatatctcatg

SEQ ID NO: 246464 - DNA, 416 bp, Glycine max
  unsure (1)..(416): unsure at all n locations
tagtgcanaaatggttggatcctttcatcccccttcccttatttataggagaaaaggggaggtggtttccgcccagagacttcttgaggaagatttttgaatgcaccccccaattgataagttcacccctctctagaatgttgaagttntctgagcgcacccccccaatttgatgagtacactccctttctatgttgcttagtgatgaagtttcctgaatgcaaccccctccaggttgcttagtgatgaagtttcctgagcgcatccnccatattgatgagtgcacctccctccataatgttctatatggtcccaatgctagttacacccacaagcttgataagtgtacaccagttttgtgttttggctgattctttccaaatgtcgtggtacttatggataccagtgatgggtgt

SEQ ID NO: 246465 - DNA, 199 bp, Glycine max
ccacatacttattggaacaaacataatgggagccataaaaaagtctttcctaacacaaagcaacccccttgtatgataagcctgcatttgagaagacacaacaagcactaggtgaacatgttcctattctaccactaggaagtgcttctctaccttgacttgtggaagatatttgttttcatatataggattaacaacc

SEQ ID NO: 246466 - DNA, 413 bp, Glycine max
  unsure (1)..(413): unsure at all n locations
gggttgcctaaagatatcgaattatccatgcatgtgtcccacatgtgaatagggatcgagcttaatttggtcatgaaatgtggaaagactataataataataataataaaatagatatctttaaaatatataaattataaatctaattattatttcagtccttgaatttggagggatgtgtttttagtcctgaaaattaaaattattttatttttaaattatggaagattgttttaaattatcgtaaagaagattgttttaaattatcgacatcttcattttaaatattgaacaattcaatgtacaaataaggtaatctaagatgtttgagagaattnttatatataattacaggaataatgatcgaaatgcatattcaatagaaataagaggaaacatattaanaatgtctc

SEQ ID NO: 246467 - DNA, 243 bp, Glycine max
  unsure (1)..(243): unsure at all n locations
caagaatatgctattcaactagactatacccgtatcttcgtggatgaatgcctcgaanactaccatcgataagttgaacagggttcctacataggcaagcgaaaagaactcttttgaactgtggacaaatatgactcctacnttaacgcacctgtatgtatggggtagctagactcatacaatgatttatcacccgcaagaatgaaaatcgcatgctagatctaccagaggatatttcattgg

SEQ ID NO: 246468 - DNA, 313 bp, Glycine max
  unsure (1)..(313): unsure at all n locations
gaccaccagctcaaagatcattcttagatcgtctcatgtgaatcaagaacatctcacgagttcaagattagaatcaagaagaaaggtttgagtcaagaatcaagattcaaggttcaagatctcaagaatcaagatcaagattcaaggctcaagattcaagaatcaagagaaggcttattcaagataagtctgaaaagttttcctcaaaaattgagtagcacatgattnttctcaaaacatgtttaccaaatgagtgtttactctctggtaatcgaataccagattggtgttatcgattaccaagagcaaaatt

SEQ ID NO: 246469 - DNA, 290 bp, Glycine max
aacaacccaaagaagcccgagagagaacaaccgcaaaaaaaaaacaaagagcctgccacaaaaagggagatgccgagcgacaaggaggggggcccaacagccagccaaaaaaaaggaccacaaagcgggacaccatccacaggtaagaggccagcaaacggtagacctaactgacacacacaaaggccgctctaacggagagttcatcaacctgcttgcataagtgaagaaggaaagactcaaaaacgtatacacagagaaaaaaccacaaaaaaaaggggggaaacagc

SEQ ID NO: 246470 - DNA, 375 bp, Glycine max
gaaccaaagcagtggcatccactctgcaatatgctacacaatcataaatgcaagcatcataaatgcctcattaaggtaaaccttacaaatcgaatttagtgcaccctgattactatgaaattaaaaccagactcacccttcatggctagtatgtataagattctaatccatatgcattaagcagtttaacgtaacatccgaacatttaatataatattatattaatttaatttaaaattataatataagaatttgtcgaatacaatgataatatatatatatatataatatatatatattatatataatatatatatatatattgaaggcgtgattaaatatattaatatcattgaataataaatcacttatttt

SEQ ID NO: 246471 - DNA, 144 bp, Glycine max
gcattagcctatcttaagatctttccttaatcctgtgtagcaaaaatttaaccttgtacccaattttcacctgtaatcaaaattcccatttttcaaccttagctgtattcaaaaaactaccatgtattcaaatctttttttttc

SEQ ID NO: 246472 - DNA, 316 bp, Glycine max
  unsure (1)..(316): unsure at all n locations
atccagagctgaagaacccacgatatattcaggaaaattaaaggatttgcgcccgaatgtgatctcatatggagtgatgccttttgccgcattccatgaagtgttatgagaccactctacccagagaagaaacttgccccattcccttggccggtgatgaacaaatgtgcgcaaacattgctctatgaccctgtttagcacctncgtttgaccatcactttgtgggtgattagcggagctcatncttagccgtgtgccactccgacgaaacaactcctgccagaatctgctaatgaacaaggggtcgcagtccaag

SEQ ID NO: 246473 - DNA, 345 bp, Glycine max
aaatacttccaaagaacacagtgctcctctgtcgataaggatgcacttcaattgatccaaatatccgagtagcagtcgctttagtttctgaaaccctccactttgaaaattcaaagtttcaccttcataagcattgtaacttaaatcgaggaacaacaaccttggcatgatttttagtgatttcaatgcatcattagtcaacctggagccgcgcaaacgcagatgcacaagatttgggaactgtgaaatccaatttggcaaccttgttaatgtcccacttatgacaagcttcctaagtgtagacatatgtgacgtaatgtacaagtcaattacttcagtcgaatc

SEQ ID NO: 246474 - DNA, 171 bp, Glycine max
agctcatcctatttcatggtgaacttgggtacatacaaactgtcgatgacatttctgtaaagaacaatgctattatacaccttgttcctgctttttttaattatctgtaatcttaaatatattgttttgttgtgccctgttttttttacaacacaatgacaatgttttgtc

SEQ ID NO: 246475 - DNA, 236 bp, Glycine max
cggtgttacggattgaacccatagacaacctaaaaggggactgcttggtggttctatgaacccccctgctgtatgcaaattctacatgaggaagatactcatcccaagacttatggttgcctttcacaacagcccttaaaagggtggataaagacctattcactacctctgtttgcccatcagtttgtggatgacaagttgtaaagaaaagaagtttagttccctacttaacccat

SEQ ID NO: 246476 - DNA, 425 bp, Glycine max
ctataaagaggaggagaagcgaagatttatttggctcattcccttatgcacttcgatatctctctcaaaattgcagaggaaactaggtctgtgaagaaaatccgagccgaggcgcttccgtatcgtgtgcctaagtaattacacgaagattctcgaccggtattcaagattcatcgatcgttcttcgttgtcttcagtcttcaacgggtaagtatctcaaaccaagctgttcaattcattctatgaacccgcggtggtccacatcatcggtcatgtattgttattcgcgttgtcatttacttgttataccccactttgacgtgcttgatccatttatttaagtcatttctcgcctaatctaacaataataataaattccaccgatcagttgattgatcatccgctaattgtgttaaaatgaattc

SEQ ID NO: 246477 - DNA, 231 bp, Glycine max
  unsure (1)..(231): unsure at all n locations
agctngaaagagcccgggtagtcgaagagaagttcaaatccatacccatcaaagtcttaaaagagtatgatgaactaagggacgtcaatatggccaccgctgaagccttggaacgagaaaccaagaaggcccgaaaggaagaacacgaccaaagcaaagttttgaggggctttatagggcagcaatagtgagctcaagctccgaanaagtgaaaggaatcatcatgggtga

SEQ ID NO: 246478 - DNA, 364 bp, Glycine max
aatctccttggacgaagcttctctcgaatgaaatgacaatcaatctctatatgcttagtcctttcatgaaagactgggtttgaggcaatatgaagaacagcctgattatcacaatacaacttcatttgcaactcttcacaaaacctcaattcttgtagaaattggttaatccacatgagttcacaagtaaccatagccatcgatcgatattcagcttctacactggaccgagctacaatcgtctggttcttgcttttctaagaaataagatttccttcaatgaagacacaatatcccgatgtataccgtctatccgtgggacagtcagcccaatcagcatcacattatcctgatattgcgtatt

SEQ ID NO: 246479 - DNA, 270 bp, Glycine max
gggtagaaaaaaaaaagaggcgccataagtgctaaggtaaaaaaaaaagttctttttgaaataagggtagaaaaagagaggtgtcataagtgtcaagaagaaaagtgttgttagaggaataaaggctgacaaaataaataagcctaggcaggaaataagtgaaagtttttacaaggatgcctgctctcttataatcctaagtttttgaaatcccagacaaccatgatttttgttaaccaagccccgtacaagccataaagtcctagtgat

SEQ ID NO: 246480 - DNA, 181 bp, Glycine max
aaaaatgaactttgatttataacaataactttaaatatgtggtagaaaggctcagttacttgacacaatcccttagcatgcggaacattgaagactatgttctgcatcctagttctgctccttgcataaaggtattaaataatattcggagattctttggttaaagtattgaagcaacatc

SEQ ID NO: 246481 - DNA, 366 bp, Glycine max
ttattcaactcaagccgagctcgagcctaataaatcttgacttaacttgactcattttcacctctactaacaaagatttgatcttaaaatgtaaatatttagagacaaattattgtgtgagcacaaatctaatattaattaaatacatatattaacactatttaatagtacattgaatgcatagtttgtgtggtaaatgcatacatttagatacatggttgtgggtgtaatattaagtgtaaaatattaattatatgttatatttaaataatataataaatagtattatttaatgatcgaatatatgggtgtgtgtgaatttgaattacatttattcataatagactatattttctatgttcatat

SEQ ID NO: 246482 - DNA, 369 bp, Glycine max
ctaaaaactaaagaaatacatgttacaataactatgattttatttattttttgttctgatcatgcatgttgaaacttgttttttccctccctttttgacacactatttcatccaactaattaaagttgacatagttactttattgctcaatgttggtttattacataatttattatattttaataatagtttgaagttataatcttgattctaatttgttaaatgtacatgctaaggtatctattaatatatatatatatatatatatatatatatatatatatatatataatatgtgtagttaaaatatataatattaatatagtaaaaatggtaccattaacaaaaatatttattctattttgaatc

SEQ ID NO: 246483 - DNA, 370 bp, Glycine max
tctttttttctttttttaaacaaaagatgtgccacatgtcttcttttgagtggagcaaaaagggtccatttttttgtatgtgactcatactcagtcacaagaagagaaaaatctgaccttgttgaaacgctaaaatcttgcctcggttagcgtgtcatttctttggttccagtccctcgcgtttctctgcacccgtcggtgccagttttcgaaagtaggcaatatatatatcataacgctcagaatgaaaccccgagcgtggttcagaggttggtttcgttaatatttaagttgcacgcgaaacgataatgtttagactaattaattgagaatgaacctataactatccagttatggatttctcttcgtt

SEQ ID NO: 246484 - DNA, 359 bp, Glycine max
  unsure (1)..(359): unsure at all n locations
tctaggaccttttgggaataaatcatgattgtggtatttttctatcattttttacttttgagttacttcaacaactagtttaatcaaacacttataatttaataaatcaatttttcaacttccaactagttttccaactactagctaatagctagtttttcaacttctagctagttnttaagcttctaactaatttttcagctagttttgtcaaacatagccaaaatttgcaataaataaatatcccacaatataaataataggtgtattaaaaaaaacatatgagaagttatatgggagtagttaaagggctaataaaatagagaatacgccattactattattggaatatcggagat

SEQ ID NO: 246485 - DNA, 393 bp, Glycine max
  unsure (1)..(393): unsure at all n locations
cgcttgacttaagtcatcaagagattatgaatatgtgaccttggcatgagttttcttaancatcaatcatattggaatcatctatctttcaatctttttcaacatcatctctcaaacatctttcaatcaatctttcaatatctttctacagaattttctgattcatttttcttcatctttctaaaatttttttatcaacattttctcttccaagaaaagttctttgttcaaaaacttgtgctatttatctttttcattctcttctccctttgccaaaagaacgaatgactaaccgcctgaattcttttgtgtctctcttctcctttgcaaaagattcanaggactaaccgcctgagaattcttttgattcttcccttccccttaagcaaaata

SEQ ID NO: 246486 - DNA, 178 bp, Glycine max
gtacctctctttctgcacctctcaatatttgatgaggctattaagctcaccctcgtgcgggaagaagggaaacaccagattcccatttaattcatcagtcgtgtcctccatgatgcccagagaagctaccagatggtaaagaaggtggcattaatgctcataatctcggccccatgcc

SEQ ID NO: 246487 - DNA, 322 bp, Glycine max
gtgatggtgtcgagaagaaatcacatgtttgtcatccttattaggcggagaacgcgaatgcatgtatacatgattgtgatgatgtcaaaagaagaatcagacaaggctcatcttgcttcaagattaatacaagattgtttcaactaacaaagccttgattcatgatttcttcaagatcaagccttgcctcacaatgaatggtttcaagtcattcaaggcacatgtaatcgattaccaatacatgtaatcgatcaccaatggtttgaaagtgtgtaatctattacacatcatatgtaatcgatgaccatagactctgaacgtt

SEQ ID NO: 246488 - DNA, 355 bp, Glycine max
ccttttgaatggtgatataccaatctcaaataacttgtgaacggttgaacccgtattattatgtaacgagcgtgatgttacaacactaaaattagccttcgttagtgcatatattatattatagtgaggagggacagcccacgcatgctcgtatgcccactcataattatgggataacattgaacttctttgattcatattttcctgtattttgttgaataagatccctatcctttctaatggacaaggaatgaaaagaacaaaagttgtctgaatgtacttgtgtttctaacagagattgcattgatataatcgttcggaaataaagtttaaactctaaaggcattataacatt

SEQ ID NO: 246489 - DNA, 358 bp, Glycine max
  unsure (1)..(358): unsure at all n locations
ctacactntctcttaacactgggttcttaattgatcctacactttctctttaacactgcgcatttacactnttctcaagataacactgatcgggttattgtacaattcacagcttacaacacaaataatgtcacatcaagagttaatcacacacttattcacaacaaanactcattcacaatttcacatctcataatgtcacaatccaccatcacatgttttcacgtatctctacgttcaacacctgttctactntacacttttactcaatctcaataacaatattataatctcaaggcaacatattatntcacaattcatcacatatttcatttataagcactgataaatgaatata

SEQ ID NO: 246490 - DNA, 347 bp, Glycine max
  unsure (1)..(347): unsure at all n locations
ttttggcagcgaatggagaaggatgagagagaggagacgccacttcaaggagaagatgagtctagaagaagctcaccaccatatgaggccatgaataagagcttggaggaagaagaagatgaatgaagggagaggaagagaagagcacgaaatnttgtgctctaaaagagctataaaatctgaagtttaattttcaaatgatcaaagttgaataaatgcacacacatggtctctatttatagcctaagtgtcacacaaaattggatgggaaattgaatttctattcaaatttcacttgaatttgaaattaaatttgtggagccaaaatttcactaattatgattagt

SEQ ID NO: 246491 - DNA, 189 bp, Glycine max
  unsure (1)..(189): unsure at all n locations
ccgggtaggcatagagaagttcaagtccatagccatcaaagtctgaagagagtatgatgaactaagggacgtctatatggccaccgctgaagccttggaacgagaacacaagaagacccgaaaggaagaacacacccaaaacaaagttttgagatgcttatanggcagcaatagtgagctcaagctccg

SEQ ID NO: 246492 - DNA, 252 bp, Glycine max
gaatgatggtgttcctaaacaaaaccgaattgatggtatttaactcaacattcctccctttaaaggaaagaatgatccacaggcctacttggagtggaaatgaaaatagagcattgtttctcatgcaacaactatgaggaggaccataatgtgaagcttgccgccacggagtttctgactatgctcttgtgaggggaacaagctcaataagagtatcatgaaatgaagaccatggttaatacatgggcagaa

SEQ ID NO: 246493 - DNA, 366 bp, Glycine max
cgatgcttcttttcatgtctgcctgagcgggcttatagcctaaaccatacttgccacgattaccttgggtatttatcagcctaattatgccaccgttgtttttcctatacccatcccgggctcataaccgttccccaacataactcgtgccatcattaccgctgcatcagacatactgggctgcccaaagagggagtccactgaggaaatgctgaccacctcataagactggaaagcagtttctaacgattattctgcggcttccacataatgcatggaggatgggcagcttaccaatatatcttgctcgcctgacacgatgaccaagtgcccctctactaccaatttatacttttgtggagcgta

SEQ ID NO: 246494 - DNA, 302 bp, Glycine max
aatgaagagggtgagaatgagggagaagcccacgctgtgactgccattcctatatgaccaagtttcccgccaactcaacaatgtcattactcagcccataacaactcatttccttacctaccacccaattatgcacaaaggccattcctaaaatcaccacaaagcctacctaccgcacttccaatgacaaacaccacctttagcgtaaaccaaaacaccaacccagatatgaattttgcagcgagaaaagcttataattcaccccaattccaatgtgctatgctgacttgctcccatatcta

SEQ ID NO: 246495 - DNA, 305 bp, Glycine max
  unsure (1)..(305): unsure at all n locations
tgctctttttttttgaccacanagtggtacctagagatatgtcgcgggggtcaggagaccttgtggacgtcatgtggggtgctattgcccaaaaccaatcttgaccaatcccgacccaacccgggcatattcagtctgtgagaacctgtgatgtacctaaacatgcgagctcctggcggtcaacagataaaaggaacatagaccacatagcaaggatgcttgtggtggctggccaactgtgaactttgattgacatgtgggttatggactctggtaatcgattaccaacggtgggttatcgatta

SEQ ID NO: 246496 - DNA, 266 bp, Glycine max
gcttaagtaggtgctccttaaaccaccattaagtttttttccttaccttctctttcattcttgtttcttcatttttctccgtgtatctcctcacatctcttgtgctaaatgttgttaaaatgattctttagagtttcaaccgattaaacctgctatagaagctagatttgattttctatggaacaaatttatttttcttgatcctgttcttgaaccatgaatcgcgttgaatttaagctccttctgagtttttcttgctatttttt

SEQ ID NO: 246497 - DNA, 326 bp, Glycine max
gatgccccacattatgttcatgacacaaatgcaaaaatgatgatttggaaattttatgcaaaactggtcatgcatgcacctatgtggacgctcaagtgtcaaatttttatggtcatgtgatgctagggctcatgattcatttcctctattttaaatcaacccaatgttgccaaaatatgttcttttatcaatgtgtgcattcatcctagtccatttcgggcgtccggagaaatttcacagcattcacccttcaggtgtagacacatctttcaaaaattggttatgatcaatgaatgtttttcaaagaaaaagtggaaatcatctct

SEQ ID NO: 246498 - DNA, 226 bp, Glycine max
aagacaaatccatcaaatatcatatgcaaaataatatatatatatgaaacatagtaaagatagggcttctaagtggtgtaaatataaaaagttatatataactaattgacatacctttaaaactgtttcatagaaatcatcaaaataagtttaggtatgcctgaaggtccagaccatctatcataatccataagaaatatattgcaatcagctgctagtgttccaa

SEQ ID NO: 246499 - DNA, 319 bp, Glycine max
aacggatcaacactagaccaaccaataaaataaaactacaccaacttgggctaaatgacactacttgaaatgtttgagaatgaaaatatgcacacaaaaaggatcctactttgctgagagatgtgtgtatatatataaatgaggaaaaaaaaaaggatttatgtcatttatgtgtactttaagagaggtattatattttcttttgttctctgaagacctatctacctaagccacaacgaatgggtagtgaaggtaacaaaaaaattgaaagtataaatttcgtttatacgttgtatgacaaatatctataggagaaaag

SEQ ID NO: 246500 - DNA, 156 bp, Glycine max
taacgcgccgcaagggatccctgtcgcaccagatccaaatctagaacgatgggtgatcaagaggagacgcacgaatagatgaaagccgacatgtcggctctgaaagaacaaatggcctccatgatggaggccatgttaagtatgaagcagctcata

SEQ ID NO: 246501 - DNA, 339 bp, Glycine max
agaggacctggagatatgtcgcggaggtcaagagaccttgtggacgtcatgtggggtgctattgcccaaaaccaatcttgaccaatcccgacccaacccgggcatagtcaatcagtgagaacctgtgatgtacctaaacaggcgagctcctggcagtctacagattataggaacaaagaccacaaagctatgatgcttgtgtggtggctggccacctgtgaactttgtttgatatatgggatatgggctctggtaatcgattaccaagggtgggtaatcgattacaaggcttaaaaatgaagacaggaagcttagatagtctctggtaatcgattacca

SEQ ID NO: 246502 - DNA, 245 bp, Glycine max
agcttgaaagagcctgggtagtcaaagagaagttcaagtccatagccatcaaagtctgaagagagtatgatgaactaagggacgtcaatatggccaccactgaaaccttggaacgagaaaccaagaaggcctgaaaggaagaagacgaccaaagcaaagttttgaggggctttatagggcagcaatagtgagctcaagctccgaagaggtgaaaggaatcatcacgggtcaaaggcatgatcttg

SEQ ID NO: 246503 - DNA, 322 bp, Glycine max
tcgggcgatggtgcaagtcgactattcacatccacaaatcacacataaatccaccatccccagttgcccaccttcaactgagctcacgtactcccacgtagctcttatcctcgttcctctcaacaccgggtccccatcaatccctccaagcttccataacatccaagaaatttcaacatccaaacatcatgaactatcaaaactaatcaaaaacagggcagatgcagaaaactctgcccaaaacacaaaccaataccacaacttttcttattcaaataccccaatcacattctttttgttccaattcattcaccggtggatc

SEQ ID NO: 246504 - DNA, 244 bp, Glycine max
  unsure (1)..(244): unsure at all n locations
gtttttatttcattacgctctttcccttntattaaaatgagttatgcnagatgaatatatatgatctgctgaaaatgaataacaaggcattgaaatatcttctcaaaaattccttattcactttgattgtctagaggtatcccttggccttcaattcaagaagaatatcattaactctctccattttatcacctataaacctaggtgcttttattgaccctcccatggctaacaaccctcatgc

SEQ ID NO: 246505 - DNA, 209 bp, Glycine max
gactattaaagaaaagcaaggaagaaactcaaatacccgaatatccttccatatcaaatccttctgaccagtagggacttccttgcatgtgtcatatgtcacgtcgaccttatcacgagcgactatcaccaaatatgtgcttaatttcttcttgtggggaccagcgaccttgcctgtagcagaatcgacgctgaccatatgtctttttg

SEQ ID NO: 246506 - DNA, 381 bp, Glycine max
  unsure (1)..(381): unsure at all n locations
atggggcaaaacacaccaaatgattatgatgatggctcaaattctcacaaaggtaaactcatcactttcaaattgagctttcaaaactatcatgacatgtagaggagaatcaaagatttcaagtcacaaaatgtcaaaaacttttatttcaaaacaaatacccatttcttgaacatatcctatgattcaaagaaaaacatgcaaagtcgtacatgtgcacagaattgactcanaatattaaactaaatatccgaccaaactaacaacattaaccaaataacacaacttacaaattaaccaaacccacataactaacaanaaccaaagaacactcccccccccccatacttaaacaacacattgtcctcaatgaacacaaat

SEQ ID NO: 246507 - DNA, 330 bp, Glycine max
atttttttcgtcgaagaacggatgaaacctttgcgagattcctcacggaaaacgctacaaaaacgattcggaagcgcctcggcttatattttcttcacggaaacgatttttccaagcaaattcgaaagagagagaggtgccaaaggggctgaaccccttccttcttcactgtctcccctatttatagcaaaataggggaggtggttgccgcccaactcgcccatgcgagccatgttgcttcctccagaagcaatagccttctggaggaatcttctggagggcacaagtgggcctgggtgctatttgcacccacatttttactatatacac

SEQ ID NO: 246508 - DNA, 341 bp, Glycine max
  unsure (1)..(341): unsure at all n locations
ttgcacgngaattaagaagcatcaacaagaatcaagcctaggctattgtgcaagcaatcaatggggcaaaacacaccaaatgattatgatgatggatggctcaaattctcacanaggtaaactcattactctcaaattgagctttcaaaaatatcatgacatgtagagaagaatcaagaatttcaagtcacaaaatgtcaagaactcttattttaaaacaattacccatttcttggaacatatctataattcaaagaaaaacatgcatagtcgtacatgcacaccacattaacccataatattaaactaacacaccgacatactaccaacattaacaaatt

SEQ ID NO: 246509 - DNA, 242 bp, Glycine max
aaaaaacaaagaagagaggagagaaaaaagcgacaagaaagaaaagaaggaaggaaaaaaggagagaggacgaaaggaagagaggaaaaagaagggaagcaagaaggaacggacgagaaagggggaaagacggaaggaagagaaaagcggaagagggaaaaaagaagggaggaggacggaaagggcaaaaagacgaagaaagaggaaagagagaaggaagggagagagaagaaaggaggaac

SEQ ID NO: 246510 - DNA, 238 bp, Glycine max
agataagccagagctaaggctaataatcaagagcgagcaaaggctactgcgtactatatagatgcagttacatcccctatcctgtgatttctgaaaataagcaaaaggaaaactggttatactcaaattgagccagtttcagaagatgtgggagtacgaatctgtgtagacaagcgagtggacgctgaataaatgtgaaagatggggaacccaggcttatataacgtgtgaggcttat

SEQ ID NO: 246511 - DNA, 356 bp, Glycine max
  unsure (1)..(356): unsure at all n locations
tcgngttatacacatacaataatgtatatattattatttttgcgtaattctgttttctacaagtttcaatttatcgctacaagtaacattttgctatatgtaatttcaaccaggacaagtcattatcatagaaagtcattgggtcagcatatgaacttcatctgcgggttcttttctatttaaagcagagcataattatgcaaggcagcttgtgtgagctaattccaatttctaaaaggctcagtttgctcctggctatcatattaatctggatggtcatgtttgatggcttatatctgcatccgtttcattattctcttctacacaacaaaaaatatgtntactcattcaccatt

SEQ ID NO: 246512 - DNA, 323 bp, Glycine max
gcgctactacggtccttatcaagtgatcgaacgcatcggctccgtcgcttatatactccagcttcctccgtcgtctcacatccatccggtgttccatgtctccctgctgaaacgtcaccagggccctctttcccttacctccgctgccctaccaccgtccagcgtggaacatcatcccctcgtcactcctttggcgttcttagattggcaatgggacacctcgggtaccccggcggctcgcaaggtgttggttcaatgggcgggtcttcctccagagaacgcctcatgggagtcttggtccgatgtgaagcacacttttaacc

SEQ ID NO: 246513 - DNA, 256 bp, Glycine max
ttctctaggaccttttgaaaaaatcatgattgtatttttctatcattggactgtgagttacttaacaactagtgtaatcaaaactttggagttaaaaaagaatttccactacaataggtggcagctgctgcaactcatacctgctgctgatttatagtgaaatgcttacatatttccaagttgttacttactaaagttttatttttcagacttgctgaaataaatgccaaatttgatcgatgcagcaatttatcat

SEQ ID NO: 246514 - DNA, 289 bp, Glycine max
  unsure (1)..(289): unsure at all n locations
gaggaaaancgggcatactgcagattgtaactttgtatatctgttgtaatgttatctttcagttgataatgacgaggaatgttattaatttctccagaggcctggacataattgtattattattctcccttgcatcttaatgttgaaacgaaaatttcctgtctcttgtgttgaattctatttgaatcacgttaataaagataattatgtctttcttctaacattaaacantaaataaaaaaaaaggccattttgcgtgggtttatacacctgatatattctattatca

SEQ ID NO: 246515 - DNA, 329 bp, Glycine max
tactacactaccaacacaatcatattacgggaatcatgcatatttgtactaaaaatagatgcataatcgtctaataccttgcagaattgcctttttcttttttattcttttcacacattcaaacactacaactcaattgcagctgaacatagaggtaacattgaagccggagcagattctaattcaaaagagtttgcaagcatttatctataacaatgcactcttcagtgcctcgatcgctagcgatatggtttgcattacaagtccctcaactcctgtatttcttttttttactgaaacggagcgaccaccactgctttttatcgcct

SEQ ID NO: 246516 - DNA, 214 bp, Glycine max
ccaggacccaaccaacccggtcaacacacttcttctgcttcgtggcccgccttgcaactcccatttttcctttgaaatagagccctcacctgctcatgcagcctcttcacatactcagccttagcccgtgcgctcctatgcttaaacatagcaatgttaggcatacgcaacaaatcaagaggagcaaaggattaaatcccacaccatctcaaat

SEQ ID NO: 246517 - DNA, 313 bp, Glycine max
caatcgagcacaaccgaaattgtatttcagccgacaccggcatgttttcattcgcttggcaaggaaagcattaaccacctcggataaacattgttgattcaccgatactgatcgaaaaaaatgctatccgacatcggtcaggaaagatgaccgaccgaggtttgaaaaataagaatcatcggatgacgccgatcgaacatttcctaatagacatcattcaaataatattcagggattgaatggacagtacaataaccaacatcggtcgttgtatagccccaactgatattgttcagacgacattgcgcaatta

SEQ ID NO: 246518 - DNA, 259 bp, Glycine max
tgaccatttgaatttctctagagctttggttgatcaatttcgagcgtgtcgatatgttatgcacctgaatcggacttccgtgtgacaagttatgaccatttgaatttctcgagagcacttcgtgttcaatttcgagcatcttgatatattatgcgtctgaatcggacttccgtgtgacaagttatgaccatttgaatttctcgagagctttcggtgttcaatttcgagcgtctcgatatattatgcacctgaatcggac

SEQ ID NO: 246519 - DNA, 362 bp, Glycine max
  unsure (1)..(362): unsure at all n locations
tcacgctttaattatatgcgccggaattgttttcgntttttannaggccaagaannctcgagagcattcttgctcatttcgagcgctcgattatctgcgcgtaatcggacttcgtgtgacagtatgacattgaattttcagggcttcgttttcaattaagctctcattatatgccctgaatagacttccgtcaaagtatgaccattgaattctcgaagcctcgtgttaatttcacgtttgattatatgcgcctgaatcgacttcgtggaaagtataccattgaattgtcagactccgttttaatctaagctctcgatatatatgaacctgatcgattcggggacagtatgacattgatacta

SEQ ID NO: 246520 - DNA, 390 bp, Glycine max
  unsure (1)..(390): unsure at all n locations
ctgagagaccatacaagtttcctaacgatttctaattatgtgggccattaagtctatcatatgctgacaatagccgagaagcccatgaatctcttcgggggcggagtaagtgtctgccattgccttggccttggctaacaatcggagaagttcttgactttccgttcaaggtaagagcaaaccgatccatccacatggttcgctcttggtgtaaagagtcgatcacncttcctctagcctctttctccgcatatacttgggcatactcatccgtgaatntatgctcgtgggccgnggctagacccaactcttctcgtacttggcgtgataactgcatgttggcctcgttccataaagctagacaacttctttgacttgacaaccataact

SEQ ID NO: 246521 - DNA, 354 bp, Glycine max
  unsure (1)..(354): unsure at all n locations
actcaacttggagttcaagtgccattcgtcttttccttatttcttcttcttcnggcttcaattcatcagtgggctttccttctgtgtccagcatcttgggatgttcccagcctttgatgacagctttccacgttctgctatcgcagtgattgaggaaggccaccatccttgctttccaatattcatagtttggtccatccagaatatgtggtctgttcactgggcctccttctttctccatgttcatcagaatttatctccctagatctcactcagtgatttcgaatgttggctctgataccaattgaaattctgatactgtggacagatgtcgtacatgatgtcacgacatca

SEQ ID NO: 246522 - DNA, 411 bp, Glycine max
tatcgtacgtgtgtgagcttaccagccttctctacgctctcgtgttgcagctttgcatgcgaaactgatcttcttttccagctctataagccaaggtctgattagtttaagagtatcttattctaaattataattaaaagatcaataaggaaagaattattgaaaattcaaccaaatttctcctaaaaataagataaattttatattgaataatatgtaaaaacatatcatatatttatataaatttatatatacatatattcatgtctaacaattaaatatcaaagctacaaatcacaatatagatccttgatatattatccaaaatatcaactaatagtaaggttggttatacatattaatcattaaagtgtcgtcaaatatcattactacaccatatacatatctatg

SEQ ID NO: 246523 - DNA, 337 bp, Glycine max
ggggacaaaaccgacgcacattgtatctatatacaactgcttgctgcatgcttgaatcttgattccaggtattgcattgtcatcatcaaaaagggggagattgcaagtgcaattggctttgatgttctgatgatgatcatgatgatgtgttgcaattgacgcacaagggcttttcaagattaaaaatccagaccatacttcaagattacaagtcacaacatccagatgatcactacaatattatgaagggaatccccaattgaattagcaaaggcttggcccagtgatttaacataaaaagtgcttctcaaacgctctactctctggtaatccatca

SEQ ID NO: 246524 - DNA, 365 bp, Glycine max
gacggagaaagatctatatatagcgcttgctaagggtagagagaggaacactagagatttggatcaagtaaagtgtgttaacgatgaagaacgcaaagtcttagtgcatgaaaaagatatcaaggaaaggtggaaggcgtatttccacaacttatttaatgatggatatggatatgactctagcagtctagacacaagagaagaggaccggaactataagtactatcgtcggattcaaaaacaggaagtaaaggaagcgttgaaaagaatgagtaatggtaaggcggtggggccagacaacatacctattgaagtgtggaaaactcttggagatagaggtcttgagtggctcaccgaactcttta

SEQ ID NO: 246525 - DNA, 352 bp, Glycine max
cccgccgccaccacaatctcaagagggatacgcttataatgcagaacacgcaacaaccatcaatttaacaatgttctctaaacatgcaagacacaatcgattgcaacacactaaatacgacaagggaagagagaacgcaaacacaattttatactggctcagccacttcccgtgcctacatccagtactcaagcaccccacttgagatctccactatcttcgcaaaatcctttacaaagtctgaaccacacagggacaacccgcctcttgtgttcagacgctttacaacaagagacccaccgtctctcaaccaatctcattgaataagaagaatggaagaacaattctctct

SEQ ID NO: 246526 - DNA, 336 bp, Glycine max
caacaagaatcaagccaaggctattgtgcaagcaatcaatggggcaaaacacaccaaaagattatgatgatggatggctcaaattctcacaaagataaacttatcactttcaaattgagctttcaaaactatcatgacatgtagaggaaaaacaaggatttcaaatcacaaaatgtcaagagacttttattttcaaaacaattacccatttcttgaacatatcctataattcaaagaaaatatgcaaagttgtacatgcaaacagaattgacctaaaatattaaactacaaacccaacaaaactaaaaaatttaacacaaacaaaactaacaaaac

SEQ ID NO: 246527 - DNA, 345 bp, Glycine max
ctttagctggggaggctaagagatggttgcattcattcaagggcaacagtttaaagacctgcgatgaagttgttgagaagtttctaaaaaaatatttcccagagtctagaaaaatattttgagtgaggcattagaaagatttcgtagcttgctgtggaaaactcccactcatggtttttcagagcctatacagttggacatcttcattgatgggttacgactgcagtcaaagcaattactcgacacttctgcaggaggaaaaattaagttgaaaacacctgaagaagccatggtaaacctttacttacttgacactaagtaagttgccaactcaattgcatgcta

SEQ ID NO: 246528 - DNA, 337 bp, Glycine max
tcgcgtgtatgacactcactccacaaggtttgaagtataggagagcttcaaccctataacacaacgtggcggacaaaagtgggcagttaacttgaatgatcatcattgtcaatgcggaaggtattatgcgcttcactatccatgttcacacattattgtagcttatggttatgtgagcatgaactactaccaatatatatatgttgtttatacaaacgagcacatcttaaaagcttactccgcacaatggtggcctcttgggaatgaagcggctattcctccttttgatgacgcatggacacttatccctgacccaactacaattcgtgcgataagt

SEQ ID NO: 246529 - DNA, 276 bp, Glycine max
actggttatttcgcattggagagcgttaacggaaactgtggattctgatgatgacccgaacgctaccttggtgttataaatagcgcccgagcaatctgagtgctggaaatattgctgcctgcaattggcccacagagtggcctgaggattgcccccctggcaaagagatatctataacgcacacgtggcgtcaatttatcgcgctgtttatggaccacgattacagcggagatgtgactgtggctgtggattggaatgccaacagatctttattct

SEQ ID NO: 246530 - DNA, 355 bp, Glycine max
gtatcccaaaaggtatgtgttcggttctgtaagttaaggaggttgttcttttgaaaaattgcatttgcaggtgcaagaaagaaaaggactacctatataagcatgaagtttagccgcttcaagaagctgggacttggctttgatatgcttatgaaggatagggacacaggctagtaaactagtgtcgagcaagagtaatgttataaactattgtgcagattatcttcatgtattcattatgaatagaaagggttcaatccttagtgacaccctgatattcgaatatttgaaacgtgtaatttgctaagatgaaattcaatcgtcacgatatttcatctatgcagtagtttgttgt

SEQ ID NO: 246531 - DNA, 340 bp, Glycine max
tgattaaggaggcctataaattcaagctttgagcacatgatatagtttttgaagcgctaattgttcaaattttttctgtaaaaagcactatgcttaaattcttgtaaagtttagaaaagctctcaaaacacttttttatcttgaaagaaaaaaactaattgtagaaattggttattcatttgtaaaacaatagtgtgttagtcattgtgcaaaatcaaaccaacaaatcttctaatttgtgataggacaaagaatactagtttgaacaagcttggtgtaaagcttgagttaaggacccagaagtggcagtgacaaatacttgtaaaagttagtggaactt

SEQ ID NO: 246532 - DNA, 111 bp, Glycine max
ccaaaccgccccaggggcaacccagccccaccaggaccaaccaacaaggacaaaacacaaagaaccaaccgacgcgggggagggaacaccaaaagccccaaccacccaaac

SEQ ID NO: 246533 - DNA, 342 bp, Glycine max
aacgggtctccgaagtttgaaaagtgaacaggagaacaaggcaaactcgaagcaaactctcacctcacacaagtccataacctcaatctaaacgtgctcaaactgaatttacacctaaaattccaccgaatcaaaatccgactctgcaacacccaatcttgccctagaaatggctcttcatccactttgatcatttcgctctccctctagcgcagcccaaactttcccccaagtcctaaacgacatttcaagctaatatcaactcactgtaacctccatacaccacagaatgcagacttagccttccaaccctcaaagcctcactctttgtccactcataac

SEQ ID NO: 246534 - DNA, 342 bp, Glycine max
tctagcttgtaaaggaagttttctcaaagaagcttctcaaggaagttttctcaagaaagctacctagtctataaatagaagcatgtgtaacacttgttgtaactttgatgaatgaaagtcttatgagacacacctcaaagttccacttctctccctcttttattccttcaattttgtgctccccccttctctctttcttttcctccattaaagcatccttttcaagctttttatccaaggcacattctttgtggtgaagctccttcttccatggcttattcccttgtggatggtgcctcccctctcctcttctccttttccttccgctgcatctccatgatg

SEQ ID NO: 246535 - DNA, 342 bp, Glycine max
  unsure (1)..(342): unsure at all n locations
gatttgatttgagcaatattggatgangagaagtgtgattttccaaatctgcacttatgcagaattttgctgtcaaaataggtgcagcaggattttagcttggtgcagaaaatgcttgtgtgtggttggctgtggacagagtagtacggaatgagttctggatgtttgctagtagatcccaacggtcacaatgtaggcttatgcactatagacttccagtaaaattttggagtcgatccaacggttgacgaattggatccaaggaattgttactgtggtctttacgcgagaaaagctgtgattttggttgatgtgttgagcagagttttctacctttgctct

SEQ ID NO: 246536 - DNA, 346 bp, Glycine max
attctttcctcttatttcacaaaaatcaattgttcacaaaatgtttttgtgaggtccgtaaacctctttctgtgcaagtatactttgccaaatctaatttaatctattcatcaacagatccctgctgcgcttttattctctattgcgaacctagctacctaggagcctgattaaaattctaaggaaccattgcttttctcattgatatattattctttcattaataaattgtatactatagaatcttacctattggcggatacacacctgaaatgggaaaatgagtgaagatgggtcaatgcaatcttgtcgggcattgcagggatctcccacatcgcagcatata

SEQ ID NO: 246537 - DNA, 360 bp, Glycine max
  unsure (1)..(360): unsure at all n locations
gctaagtttccntgcgagtgatttgacccgaattgggagtgcatcggataacattttgtttgcgattgtacaggctccgctaacatgcgtgtgttgctgggttctcttcatcaaggtaacactaacttctatacttcatttgacctattttattttttctgggtagtaataagtaatgttgcatgatttttagtaaggcgttatattatatatatatcagtgatcaaaagtaccagaggtactagtacatagggatatacatcctgatatctagatactaagactaaggtattctagatattaggagaacatatcttttgttctaaatgtaacacccattacatgataaaaccctgacta

SEQ ID NO: 246538 - DNA, 329 bp, Glycine max
aatgtataaattctccccaatttattattctttttgtgtaggattgtaagtattttcttgtttagtttaaactttattcagtcgatactttctacagggaattaatgcaaatttcacttcattttctggcaaaaaggagaaaaattggaaggcgcagcagctggtgtctcgctaagcctgggacatgcgcttagcgagtatcatccgctaagctaggcatcagctcgcttagtgagtaagagaaatcttgaagggaatctgccagcatgcactcagtgcgttatcagctcgtccaacgagtcaattgtctattctggtgcttacgatgc

SEQ ID NO: 246539 - DNA, 352 bp, Glycine max
ggggagacatgtggggtgtatgtatacatgattgtgatgatgtcaaaaagaatcaaacaaggctcatttgcttcaagattaatacaagattgtttcaacaaacaaagccttgattcaagattccttcaagatcaagccttgcctcacaatgaaaagtttcaagtcatccaaggcacatgtaatcgattaccaatacatgtaatcaattaccaatggtttgaaagtgtgtaatcgattacacatcatatgtaatcgattaccagagactttgaacgttggaaattcaaattttaaatgaagagtctcaactgttcaagaaaaacaactgtgtaatcgattacattaattcagt

SEQ ID NO: 246540 - DNA, 347 bp, Glycine max
accatagagcggtatctgaagatatgtcacgggggtcaggagaccttggggacgtcaggtggggtgctattgcccaaaaccaagcttgaccaatcccgacccaacccgggcatcgattacacagtgtaaattgcatgtttccatgttctgaagctgtgtaactcgagtttggcctctggtaatcgattaccaatgttgtgtaatcgattaccagagaagaaaacccttgaggcataccttttaactacatgtagcggttatgggactcattgtgttgtacacgtagttagatttctcatgaaagagtctacccctttttctcttatttcttgtagatcgcgatggca

SEQ ID NO: 246541 - DNA, 347 bp, Glycine max
ctggtgtgtcccaatatgacttgagaaacaaaggtgatcaaatagcaagcagaaatttaaaagttactaggttgcctcctagtagcgcttctttaacgtcttgagctggacgcctaatgatttgttggtcatggacctagtactttgcttacctttggctttggacttggtcgcctatgggtcggccatgtgtcgtaggcaacactctaacctttttatggatgagctgaggtgaactctagaggtggtggcggtgtgtctattgcccgctaccggccatcccaatgctgctgtggtgtttcgccctgcgcctgcctgggggcgcagtacttcttgatgaaagctcg

SEQ ID NO: 246542 - DNA, 347 bp, Glycine max
  unsure (1)..(347): unsure at all n locations
acggcacagcaacagggggaactacaacnnataccctacatccaaaaggcagaaacgctataaaacaacaataacaagaactaggtagaaaatgtctgaagcttgttttccgacaccgtaggtaatgtcaaagacaaatacctggatcacactggtgataacagagcagggattgtagtcgtagttgtagttgcagcgttgagattgagctcctcctgcctccatctccatgtttgtgttcgtcttgttggaatggagggaaactaactatttattcgcaccccttatagctctctctctccctctgtatagggtgggaaatcctctcatatctcccaccctgggga

SEQ ID NO: 246543 - DNA, 353 bp, Glycine max
ctttatgggaatcctgagatttaacacagcaataggaaggatgaaactcaaagaaacagttattatctcgagtgaatttactaacactaagtaaatttttggtaagggagggaactagcagtaaatttttaagggagagagtagtgtttggaaaatagggggacctaaacagatttgagcctatgtaagagattcttgtacctatgccattagccattaggatatgttcatttcctgcagctgtactgctctgaaggagattatgtggatcattggttacatggtgtgaagcacttgaatctggaaaccaagcctgcgaaatgttagcagtatgtggaatttgctgttgttag

SEQ ID NO: 246544 - DNA, 360 bp, Glycine max
ctaagatggagccaaacccagtcaccctcattaagaactagctcttttcttcctctattgcctttagttgaatacacctttgtttggttctctatttggttcttaaccctctcatgcaacttctttacaaattctgacctagattccccttctttatgtataaaagaagtgtccagtgggaggggaatgaggtctaacggtgttaggggattgaacccatagacaacctcaaaaggggactgcttggtggttctatgaacccctctgttgtaggcaaattctacatgaggaagatactcatcccaagacttatggttgcctttcagaagagcccttaaaagggtggataaagacctattc

SEQ ID NO: 246545 - DNA, 314 bp, Glycine max
acacactgacaaaaacttatcttctcctttttggacaaagcatggcaggctgggggcaaataaatattcttcccatcagaccgcggatgcaactgtaatcgtatgtccatataagctagatcttgacgagtattcaagtcatccttcgtcttgccttgaatgttaaagatcgtccccatcacactgtcacaaacattcttctgcacatgcataacatcaatactatgtctaacgtcaagatcagaccagtacggaagatcaaagaaaatggacctcttcttccatacgcacactcttacttttatccttgtttt

SEQ ID NO: 246546 - DNA, 340 bp, Glycine max
tggtgacttctagcgatggtgatgcaccggaagatataggacaagaggtgagaggagacaccatccactacggaataagccatggaaggatgaacttcaccaccatgagagtccttccataaaaagcttagagaggaagcatcaatggaggaaaagaatgacagagagggggggggggcatgaaattgaaggagaaaaaagagggagagaagtcaaactttgctgtgtgtctcacaagtttcacattcatcaaagttgtgacaagtgttacatatgtttctatttatagcctacgtcactaactaaatgaaattcacaaaagttaatttcatttttattt

SEQ ID NO: 246547 - DNA, 58 bp, Glycine max
ccaccaaccacaacccccaccccaacagaaaccaaccacacaaccgccacccaccccc

SEQ ID NO: 246548 - DNA, 295 bp, Glycine max
aagcaaactctcacctcacacaaggctataacatcaatcgaaacttgcccaaactggatccacgcccaaaattacaccgaatcacaaatcgactcctcaacacccaaatttaccctagaaatggctctctgcccactccggccatttgtttctctctctagcacagcctcacccttctcataagtcctaaatggcattccaagctaggattaactcactccaacctctaaacactaccaactccagaaccggcccttcagctctcaaaagtacactccctttccactcataacac

SEQ ID NO: 246549 - DNA, 99 bp, Glycine max
  unsure (1)..(99): unsure at all n locations
aaacaacaacaacgncacacacgcacggccgaaccagcgacgcaacacacccggacgcccgaaanggaaagaagaaccccngagccaacacaaacgaca

SEQ ID NO: 246550 - DNA, 351 bp, Glycine max
tcctccagaagcaaccgccttctggaggaattttctggaaggcccaagtgggcctggttgctatttgcacccccatttttactaagtacactccctgccttttattggtgattctttttccataacgttacgaaagtttacgaatttcgtaacgatgcttattttctttcggtaatgtttcgaaaccttacggattacgtaatcatcccctttttgccttccggagtgttacggaactttacgaattacgcactaacacttccttttaattttcggcatgtcgcggaacttcacggattgtgctacaatgctttcttttgacttccggcacgtcacggaacttcacgaatt

SEQ ID NO: 246551 - DNA, 233 bp, Glycine max
cagcaccaagagtaacaaaagcaaccaaatcaatcaactgactagaaattccaagtcaacttcaagaccatctagaacaccaattaacccataagaactacctaccaaaagatacgccacaagaaacgagtggagtgctagctaacaaaacgcacctattttcaacgagaaaatgaatataatcatcaacgaaccacacaactaattaaaaacgaaaaaaactcaacaacgaa

SEQ ID NO: 246552 - DNA, 336 bp, Glycine max
gtacctggagatatgtcgcaagggtcacgagaccttggggacgtcaggtggggtgctattgcccaaaaccaagcttgaccaatcccgacccaacccgggcatagtcggtcagtgagaacctgtgatgtacctaagcaggcgagctcctggcagtcaacagataaaaggaaaacaagaccacaaagcaaggaggcttgtggtggctggccagctgtgaattttgtgtaatatgtggattgtggcctctggtaatcaattactaagggtgggtaatcgattacaaggcttaaaattgaagacaggaggctaagatggtctctggtaatcgaataccaa

SEQ ID NO: 246553 - DNA, 348 bp, Glycine max
ttttacattggggataataaaaacttttatacactgcataactattaaacttaatttttaaaatcaataatgtttatttattttaaaacaacaataaagattaaaaagaatttcatattttagaaaaatgttaatagtaaaaaatagttgttacaataagactaaaattataaatgacacaagtagtttgacacgtaggtttcttaaccaaggtctgaggttcgatttctcgcttggacatagtgtcgtaactaaaagtatcccaaatgagtcgaccttgtaagagtgaattaattaagtatcaaataagaagccttagatgtcttcctcctagtgtcctgattaggg

SEQ ID NO: 246554 - DNA, 393 bp, Glycine max
  unsure (1)..(393): unsure at all n locations
ctgcngctgctatgaactagattaatttttttggttcaaattccttgttcttgttcttgaaccatgaattgtgtttagtttacgttcctttgagttttatattgtcaatttttttggctgaaacgtaaaccataaaattcttacaaaaacattaaagtagaagaaaacctcaaaaatctagaatgacatattcacctattgtagttttgtcataaaagtcatgtctagtcatgaaacttgtcacataagattccttatgttgtgttgaattttatttttcttgtttctttgtctaactcatttgttcatgagtgtatgaaatttttttagcctataatttgatttgagtcaaatcttgcatgttaattagtccttaacatgttcatgcataat

SEQ ID NO: 246555 - DNA, 341 bp, Glycine max
aaacaccaatactcttaggcttttcacatatataaggtgagaaactgccatttcatttaatttaattggaatgattgtaataaattgtttgttcagcatttcctattgagattgtagtttctgtttctatatataatatagatcaatatcaattcatgattggtgtaattgattcccagtaatttgttttcaatcacgttatggtataggagcaactataattggcacattgaagcttactattaacttcatcttccacatgttgtgcgctagtttatatgtgtgtgaaattaatattgtttgatattatgttaattttaatatatgaattgaataaagaa

SEQ ID NO: 246556 - DNA, 51 bp, Glycine max
ccccaccccccccacccccccccgcccaccccaacacaccccccccccccc

SEQ ID NO: 246557 - DNA, 321 bp, Glycine max
agaatgagaaatcccaaagagaaaacgtccgattgattctccgctttactttactaaaaaatattgctctgatcattatattatcatcccacctcctcttcgtcaaccgcggctacaacgcgaacgatcgggtagattttgtctcaacagtgactaaacgagattacaacacaaatgatcggttgaaattcattttatcattcactagacgagaaaacggcttaaataaacggttaaagcatgttaaaaacggaagaaaagaaaattgaaagtaaacgaaattgaagggaaactacacaaaacaagaaatgaactgaaagc

SEQ ID NO: 246558 - DNA, 359 bp, Glycine max
cgaccttgacgcagcaatcttcccctgcttccatggggaagcagcgtactaacagagacacagagagagagagagtgtgtgtgtatcagagatgaattccgttgcaggagaaaggtgtgaaacagagagagtgttgttcctccgacaatgctagagagagaaagtaatataattagaagaggtgagagagagcgtgtgggaaaaaagggtagttgtggaaacgaaagggcctcataagcgacgcgcgccaggtatctgtaagaacaacaaccaccatcattttcccttcaccttcactgcattggggtcgcgtgctttcaaccttttctcacctttttccccaatttacccctcctcaa

SEQ ID NO: 246559 - DNA, 349 bp, Glycine max
gaacctaacgggttctaatgatatgggccatcaaatctatcatgtgtcgacaataatcgattagcccgtgaatctcctcaagggccgtacacacttcggccatggcttttgctttggctaatagacgcgggaggtcttgacttccattcaaggtcaaggcgaacctatccatccacatagtcgcttcttgatgcaatgcatcaatcaccctccctcttgcttctttttcggcgtacacttgtgcaaaatcatccactagcttttgttcatgggccacagactggttcaactcttccttgtattgccctatgatagctagcatgctctgctccgtggcttccaagtgttg

SEQ ID NO: 246560 - DNA, 347 bp, Glycine max
ctttaagggtggtttcctaccattgagatgcagccgaagacaaaggagaagaggtgagaggaggcgccatccactagggaataagccatggaagaaggagcttcaccaccaagatgagccttggatagaagcttggagatgacgcttcaatggagaaaaagaaagagggatagaaagagagaggggggagcacgaaattgaaggaagaaaaagggagagaagctgaactttgagttatgtctcacaagactctcattcattaaagttacaacaactgttacccatgcttctatttatagactaggtagcttccttgagaagctttcttgagaaaacttccttgagaa

SEQ ID NO: 246561 - DNA, 211 bp, Glycine max
aattccaaacaaacccacccacgcatgaacgcattacacgcctaataaccaagacaaaacgcatatcaacggccctatatccccgccattaagctaccaaaataaacaatgacatccgaacccgcaccctaacaccaaaaataggacctaccaagaaaataacgcaaaactccaaaaacataagcatgtatcattggctcgaaaatcccac

SEQ ID NO: 246562 - DNA, 288 bp, Glycine max
aacacacgccagaaaacccgcaccaaggaaaacacgcaaccgcagcccaccagcaaaaacccatacgagacaaaaaactcgaggaaacaaacccaccacacaacaccaagacacgaaaacaagcacaaaacagccaatgcaacacgcacaaggaacgccaacaacaaccacacggctcaagagttggagaatgacacccccccctacctgccgacgaaaccacgaacaccgaaggagaaagaagaaaatccacacgtgccaaaagcccccatcagaagcaaaacaaaa

SEQ ID NO: 246563 - DNA, 358 bp, Glycine max
  unsure (1)..(358): unsure at all n locations
tgcagctcaacattaactggagcgctgttantttggaccaanacactccgagtaattatatgtcgttgaatttgctcaagcttaacattcaatttcgagcgtgtgatatattacgggactcaatcgactccgataaaaagttattgtcgtttgaatttgctcaagcttcaacattcaacttcgagcgtctcgttatattataggactcaattagacatccgagtaaaaagttattgtcgttgaatttgctcagagcttcacattcaatttcgagcgtctcatatattacggactaatagactccgagtaaacgttattgttgttgaatttgctcaaagcttaaaattcactttcgagc

SEQ ID NO: 246564 - DNA, 337 bp, Glycine max
  unsure (1)..(337): unsure at all n locations
gcacaacacaccccaccaacgaagaacaacgcacgcacatacacncaccgcaccccccttacctacacgacacacacgaacatccaaggggtatcagagcaacacaacacacacgccaccgaggccgaacatacacacacacacacacaaagcatgtgggggaaccaaaaacagcacacgcgcccaccctggcacacctaacacccccacctacaccaaccgcacgatgaagcccgacaccaacacaacaaggcgccacaaaccatgcctgccactaccaaggtctcgccacccaaagccacatgaaaaaccaagcccaaccccccgaccggaccaa

SEQ ID NO: 246565 - DNA, 329 bp, Glycine max
accacatgtggaatgtaactaacgggagcatcaacttattgaatgtacagtccatgattacaagcttcataaagttgatttattgagtttgtaacatccacactcccattattattaagtggctccataggagtagaatgggagaaggaagcatttccccaagccatgttttgcatgaagttgccttcactttgatgcatgtttttcaaagtatgatcacaagccctaatcttggcatccaccagagcaatgaaagccctcaattgctcctcttccatgtttctgaaacttggattccaagttggatacttgatgttggtgatctcttt

SEQ ID NO: 246566 - DNA, 395 bp, Glycine max
  unsure (1)..(395): unsure at all n locations
gcaagcttgcaaaattctaggtggtggatatnatagtattattatacacatgataaaaggattatgctcttcctactcaagatttttcccaataacttgagaccaagtcgttgatgattatgatgaatttgttaagcatctattagtcatactcatacattttaaaagaaattatatgattcaaaatgttgatctctaacgaagattccactactactttttttattttcactttttcaacatccaactaaccaatcaaaaaactcgtcttctagatctaataacaccttgagcaaaaattgaagtagtagaataattcaaaagcttgtatgagttagtttatggtagttattatttgagggaaagacaattagatagttaagtagttataacta

SEQ ID NO: 246567 - DNA, 333 bp, Glycine max
ctcatgtttttgcactgcatgcttttgtgttgccttttcctccaacaccttcattttctacttttccagctccttatgtctatgccgtttcttctccaatttttggccaactgcaacttcaatgcttttctttaaaaacttcttcaatgtaaatggtatcttctacaatttttcttgtccaagaaaaactcaaaacaatggtgatgtggaaaggaaaaataaatccttacaagagatggctagaacactgattagtgagtatagcatacaaaactatctctgggaagaagttcgtagtatagtctgctacattctgaatagagttcttatcag

SEQ ID NO: 246568 - DNA, 350 bp, Glycine max
cctagcaagcagatacaggggagacccccacttaatactttagatgttcgcccaagatcaccaccaagatgtttccattgcagctcaatggaggacgtacgtattccataaaagtaacagatatataatatttttcattatcacttttagacttgttggggaaaaaaaagaacaattatagcacaagaagaaagatttagtaaggactgacagagtacgagacttacaccaacaaaagctgaaaatagaagttatagattacatgaaagtcaaatttcattaccctaacaattgatgattgagcaattgcgaacaaatgaacaaaacaaacaagtgaaatcaattttatc

SEQ ID NO: 246569 - DNA, 186 bp, Glycine max
aacactccacaccgacgactgactcgacgacataaacaaacgagacgctccaaatcgaacaacagaagcacccgagaaacccgaaatgccacaactcaccacacgatgccccaatcggggacacaaaacaaccagacgcccaaaactcaacaaacgaaccccccgacaaaatcgaaagcgcacaac

SEQ ID NO: 246570 - DNA, 236 bp, Glycine max
  unsure (1)..(236): unsure at all n locations
cccgccccccaccaacaacacaaacgacgccgccacacacccgggccggccgacccaaaanaccgcacaaaccgccacagccccggacgacccacgcaaaagcccccggaccaaacaccacaaaccacaaaccaagccccaccagagcacccagaaaacggacaacacacaanaaaccgagaagccgacgcaccaacacaacagggncaccgcccacagaccccaacccaaaacac

SEQ ID NO: 246571 - DNA, 342 bp, Glycine max
atgagagtctgaatgcaattcccagcttacgaacccaaacttgtagcttcaatgcaagaaaacatgcttatggctaggaatccaagaattccgctttagaattagaaaagaatgaaaatagggacttgtttgtaagaatttgggctgccccatgattggtactttgcacctaagtaatgtgggaaatgcttttcaatggtgcgtacatatgtgtgtaaatataaagggcatgaaattctttgcagagggtgaaggaatattgaagccactttctaaatgaatgtatgatagcaccagattcccttttgaatgccagtatgtgcataatgtaaatatctcgcc

SEQ ID NO: 246572 - DNA, 348 bp, Glycine max
ctcattgatatcggctatagtcgagtatgcataaatttctaattgtcataacatatgattcgtggatataatttaggcttcctttctttctttacattttaagccactagccaaacaactatcccaatgttatattattttaccatttgcaaccctttgagccaaacacttgatgttttgttggaacactaacctatgataaaagtttcttaccttaccattttaagtttctaattgatggggatttctatcatttggtggctaatatgatgtaaatactctattttttatgggtattaagcgaaaatagaaaagagaaaagaaaaacaatttctttgtggataaata

SEQ ID NO: 246573 - DNA, 325 bp, Glycine max
ccactagcggcagaagaaacccacaggcagaaactctcgtctcaagcatatttctcctccaaaattagccaaaaaacataacgactctgctgcgactaaccagacctgacagggcaacatcagaacagaaagtatccgagacccaaaactccatccctaaaccccgcccctaaacgtatccgaacactcgcaactaaacgtcatttcggccgaccacagagactcacaaagggagaccgaaagacacaaatcatcgcctctaaagcctaaagtgataactctcgccccaacagttctaacgcttaaaacaataccaccgcccccc

SEQ ID NO: 246574 - DNA, 301 bp, Glycine max
gcccacaaaccacccggactttgggaccatacacccacccttcatatatcgccatgagacagccgataagagtgattgccctcctgaaactcttgagggaaataatatctaaaattcctaatagtaccaccaacctctaatttgattcttatatctccaaggatccataattgatgacggtggaaggtacaagtgaacataaactgtatgcataccaccatatattcttttttgattgaaaggtattgctggttatggaatgataacaacatgtatattactgtaagacaaaccaatgcca

SEQ ID NO: 246575 - DNA, 335 bp, Glycine max
  unsure (1)..(335): unsure at all n locations
acganggaaaggcgggcagtttgacctgttctaatttccaaaggagacaaatttagtctcgcataatgtcctagaaatgatatggaacaaaaacaaatggaagcaattccatatgcataagttgttgttgcatctaccatggaagctaaatttggagcatgttttgaggctacaattcacgctaattggctgccgaactttatttcagagcttggaattgtcgacaatattgccacgtcgctgcaaatgtattgcgataactccaccgtagtattttttctaagaatgacaagtactctaagggtgttaagcatatggaattgaagtactttttc

SEQ ID NO: 246576 - DNA, 193 bp, Glycine max
gaacacaccaccgcgtgcgcctctatcaggctcccaaccctctcatgcaacctctaaacaaaccctaacccacagtcccctcctctacgaacaaaaaaagagcccaccgggaggggaacgacgcctaacagtgccaggggaccgaacccacatacaacctcaaaaggggaccgctcggagcgcctatgaaccc

SEQ ID NO: 246577 - DNA, 388 bp, Glycine max
  unsure (1)..(388): unsure at all n locations
ctgcagctctgctatgatgcaggcggactgnatggcgtgnggcgaccgccaacgatagcgggatagttgatacacttccatctaccatactgtcatcttattgaaagttgcattcccgacaacaaatatttccttactatcatcgatcgaggtgtgtatgtgattctcacacttatgcgcttaagtattatacgcaacggttgacatgttactattctttagtagtacattgtaattcattgagtgagccatagttccccgtttgagattgaatacaacgattaatacggacagcttggattaattattgtattcaatcttgaattgtccgctcggacagattgggaagacaaatcgtttttacttcattctgacttataagttaagt

SEQ ID NO: 246578 - DNA, 381 bp, Glycine max
  unsure (1)..(381): unsure at all n locations
tatggagagctgaatcctnatattttcttccttgaacgtacttgatgtaaatacttgtatatcaatttaatgatgttttatgtgttctctatgctattagtacgtcatttcagtgtgcttttgccttgatcacatagatgcatgcttttttaggatcattcaacagtggaaactggttggattcttagaacttgataagacggggctagtttatcgtgttatcacaagggattggggtacggtaacctagttgttgtatgtttgtcttaatgtggttctagttgagtttagtccaacaagaggaatctgaggacgatgcttgatcaggattaggctagactatcatggggaatcggggtttagcatttcaggagacaccat

SEQ ID NO: 246579 - DNA, 333 bp, Glycine max
  unsure (1)..(333): unsure at all n locations
gttgaacgaaaagccttgtcaatggccangtaaaattataaaacttcataaagcaactaaatttgttttatgatctttaagtcctggttttattgaaaatggtaaaagcatgaagtaattgtgggaaggactggcagattttttttcttcacattttactgtttgtagcctatattcatatgtaattagtcatttcatatgtgcatccatatttccagctatattaattgggatccatttatgtttcttgatttgatgctttctaccttgtcaaaatattttcttggttctacttctatttggagattttctacatttttatcctcacaaatt

SEQ ID NO: 246580 - DNA, 337 bp, Glycine max
ttattgtcgttgtgtttactttttataccccctgttgacgtgcttaagccattttacttaagtcgtttctcgcttaacttaaaaataaaataaatttccaccgaacgtttgaattgtattatccattaacttcggttaaaatcaattccgaccgttcggtcgtgccgtaaccacgttggaaatcaaaaagaggtaaaaaataatatagtaatcaaaaaaacatcttttagtaaaataaagcggaaaatcaatcggacgttttctctttgggatttctcattcttaatcgaattgattaataactaaagtgaaactaaggctaaaatcaactcgccta

SEQ ID NO: 246581 - DNA, 338 bp, Glycine max
  unsure (1)..(338): unsure at all n locations
acaaaactacgcagcatatcgcccaaaaccccatacccacaaatgnggagcttcaacggagaatgaagaacaagagaatggccacgtgagggagagagagagccgcctgaaataacgtggggctgagagaacagagagagagccgctttttgatcataaaaaggctctctcctcatttctcattattttattataaactatgccacatgtctccatttgagtggagcaaaaagggcccactttcccttttgactgtgacccatactcagccacaaaagtgaggaaaatccgaccttcgaaatgctaaaatccccgcctggccggcgtgccgtatctct

SEQ ID NO: 246582 - DNA, 258 bp, Glycine max
tttaagtttaccttatgtctatcccaccgttgggtcagtctcgttgacaacctccacacgatcaaggtatgagggctccgtggggtttagtttcttcttcactcgctacatgttgatggcagcctttttcttgccaaaactttgtattttgctgtatcatcgatgtgttatggctgcggctattttatttgttatgaaaatctgtctttttaatatgggaatgtccaatgttaaagggagatgctgcccaattcttta

SEQ ID NO: 246583 - DNA, 174 bp, Glycine max
  unsure (1)..(174): unsure at all n locations
cacccaccggcacaccggccccacaccccagcaagcaacaagaacccccggccagcacaacccaccccacagaaaaaaaaacccccgaaaaaaaaagggcacaacaaacaaccgcaaaaacgacaccaacaaacaaacaaaaaccaaacngaccaaaaaccaaaaccaacaggc

SEQ ID NO: 246584 - DNA, 247 bp, Glycine max
  unsure (1)..(247): unsure at all n locations
caaccccaacagagaaggggccaggccccaagacccccacggccaacaccccaagccccaccacgccggccgaaccgacagcacagcaggcaaagcgacaccacacgcgacaagcaggcgacaagaagccccaccgcacagcaaggacccacacagcgcccagcacagagcgcacacacccccacgaaagaacgacaccacagaaaacccgcngaacaccagaacaccccaaaacaacaagacaaac

SEQ ID NO: 246585 - DNA, 338 bp, Glycine max
cccactccgctcttaatccatttcgttatttactaacctttccttgaatatctatcacggccttaataaattccaacctaactctgcgctttttctccttccattataacaaggtgtaacaaggcgtaaaaactgaggtagaatatcacaattgacttgtgaaatacgatctttatttcttgaaatattttacactggagatgtcagatgagaatccatcataaagatttcttatattgatatctggattgtgacttttcattggtttttgaaagatacattctggcttatttgcttcattaatgaaataggaatgacatttttgtgattttgcaaat

SEQ ID NO: 246586 - DNA, 302 bp, Glycine max
gtattgactaagcaccactttttgcaagatgtattgactgaccaatcatttttcttgatatgcataccaattgtatctaacatgcatgcaatctaaatcatttatgttttttttatgccatcacaatcgttgatatggcatgggtgacgagagactactgtatcatctaatataaataatactaggggtttgatgcacctcaacactgttggatgatattcatcatattggttaaaacatgaacagtatatatgatcctttgtattgtgacggtgacatgattgcatcatctaaacgaacac

SEQ ID NO: 246587 - DNA, 319 bp, Glycine max
aaaacagagcagaggcagaaacacctgctcaacacattaaccaacatcacagctcttctcacgtaaagaccacagtaacaattccttcgatccaattcgctaaccgttggatcgactccaaaatcttactggaagtctatagtgtataagcctgcattttgaccgctgggatatactagcaaacatccagaactcattctgcactatacttttcacagccaaccacacacaagcatttttctgcacttgtgcaaaattctgctgcacaatttcacagcaaaaactctgcataagtgcagattttaaaatcaccctttct

SEQ ID NO: 246588 - DNA, 288 bp, Glycine max
ccctcacataccacaaaattcccaaaacattcgctcatgtaaccatacaccccttcactctgcgccaccatccccccataacacaaaatctcccgcagccactactgggggaggcggccgagagacatctgagcccccgcgaacttctttcaataaaatccaaacacgcgcatcgccacccacacatcgaacacaggattcttacaacaaagcttcagccatgccacacaatcacaaactgaaacaacggcccaaagaaggctaccaactccaacacatcccttcacc

SEQ ID NO: 246589 - DNA, 351 bp, Glycine max
  unsure (1)..(351): unsure at all n locations
tcaccaaaaagggggagaaggggaatgtgtgtatacatgattttgatgatgtcaaanaagaatctaaccaggctgcttcaacaaacaaagccttgtttcaagattcactaaagaccaagccttgccttaaaacaaagtgctttcgattaccacaagacagggttgagaaatagctgttgaaaaaggttttgaatttgaattttcaacatgtaatcgattaccatatgtttgtaatcgattaccagcaatggaaatttggaaatttaaattcaaaagtcataacccttcaaattataattgtgtaatcgattacacaaacattgtaatcgattaccagtagagaggattttc

SEQ ID NO: 246590 - DNA, 263 bp, Glycine max
  unsure (1)..(263): unsure at all n locations
aaaangcaaagcgaacgcgacggaacatgacgctgggaacttgactgtgaaaatttgagggatggatcttcttagtgcctcaatagattttttattttttctacacacgaggggataacgatgaaatgaaaattttattcttaacttatctttccttctctttatgaatcaatgtcatgtaacttccttttatttttattgatcggtttgggttgccattcaaaaacgtgaaattggtggcactaaacaaattattttttatc

SEQ ID NO: 246591 - DNA, 353 bp, Glycine max
  unsure (1)..(353): unsure at all n locations
tcaattncacgatttgacaacctttactgttaaaaatcttttgaatacctttaattcaatttaattatatcatgattttgatcaagttttacttaaataactattgataaataagcttagaaaattaaaacatgaatgttttaaaaaaagttttattttattatacactaaaaattgtattttttaaacttgagtgttgcttcagacgtgtgtacctcgtgagagtataaacaatttttctaaatagatttaagtaatgatgaattaaattatgcaaaatattacactactatctagttgcaatgttgcttagttaaatatagcacacctaagtggtaggagtattctttcgt

SEQ ID NO: 246592 - DNA, 270 bp, Glycine max
ccagaccactacctgcgtctcccgaccagaacgcccacacctcacacaacacactctctcaacaccagcaccctacttaacaacaacctcccgagggagcacgacacaaccctcatcctctgccaccacaaaccacttacacctcggcaacacaaccttacattcctccccacgaatcaactctcgactccccacaaaaccaatggacgacccggttgccaaccgcgcggccacatgacccacccggaccccaagggtttttaacgccca

SEQ ID NO: 246593 - DNA, 236 bp, Glycine max
aacagaaaacacgggcgaacaaccactgcaccaatccaagcgacacgaaacggcaccaccaataaacaaaaccccccaagcgttccgaagcccacgcacgaaacaaaggcaccggccacacacaaaaacgacaaacacacacacgcgacaccggcaccgccaaacagacgggcggcacgacaccagcggatcaagagggacgcgacccgcaggagaaaccaccgagaacagagcac

SEQ ID NO: 246594 - DNA, 394 bp, Glycine max
agctggtaatggagatgagtgagagtgtatttctggcaactgcttgtgggaaggacaaagctactaagtatcaagctaataagaaggggaatggtagaataccacctcaaactgatattaagaaggtgacaaagtgtttcttttgtaaaaagaagggacacatgaagaagaattgccttatatttcaaaaatgacttgaaaagaaaggtaaatcaatctcattagtatgttatgaatctaatatgacttgtgttaatattacgcatgtgtttggtccttgagctcatatctttcattttcgtctgatacaccatctacagagaaagtgaaagcttggaagaacccaaacaaaacaactctttcatgacaatgactggaggtatattttgattct

SEQ ID NO: 246595 - DNA, 383 bp, Glycine max
  unsure (1)..(383): unsure at all n locations
tcacctttcctccttttncattccactaccattgatcttcaagaagccaatgaatncattgatgaaggagatccaaagcctacaagctctacatggagctacaatacctacaagacaaaatcaattagagagaggtggtacccaatttaagttgggtctaatggggttaatcttcagagataaatcttttggaatccacatgtattttactcttagaatgtcaaactttctaacatagtaatcttaacatgtttttcctagaccaaggagatgtgtcataatgtgagtgaattttgtttgaagttctgaaatggtttccccattcttcattcgaaaatgcttcatatttaaatacgagagtgtgctttcttgctcttctcaca

SEQ ID NO: 246596 - DNA, 390 bp, Glycine max
  unsure (1)..(390): unsure at all n locations
cggtagtatattctcgaaagagctatgaacttcagctaagtgctcttcacggaggtgaaacataacatccatcttttgaatcataagagactcacacgaacttcattgatgtgcagactcttgtggagcttaagctntaacatcttccatctggtcaaagaatctagctattggctctccagccattatccattcatgatcaataaacctcattcctatcttcttgagatgccattcggtaatctcactagatgctctggtaaagttgacaatctcattacagacatcaacattgaagtagtcgatgaatcttgaggcaagcataaaataagaaaattcataatccaccagtcaatgactcttcaacataatgtcttcaatcaacagtac

SEQ ID NO: 246597 - DNA, 407 bp, Glycine max
tacctcaagatatcttggctatggctgagtcctccctttcaaataaagtaacgacttgttctacaaaatacacttacatcattattgggaattgcgatagaagctaagttgttctacaaattgggtaaaattctaccttccaatgaatgcacaaaacacatcaagtagagacgataaagtggatcgttttgccctgctttggcgtaatcttaccaaaacgtgcacaaaggtcaaatcacctacttgtgggatgtgttgaaaaatgtagctcaccccatttacggatagacaagcagattaactcaccaaaattttaaaagaaagaaagaatagaacaaaataataaaaacttaaaaatataaaattctcatatgttatcacaacttcaatgccccattaataccttt

SEQ ID NO: 246598 - DNA, 392 bp, Glycine max
  unsure (1)..(392): unsure at all n locations
attatgaaaccctaaaacatagtctgttctataaaaacttactattgtttactcataaaacctacacactcatggtaactattatccaccacaattaaagatcccnnncnnacatctgaaaacaagcatcatacacttcttaactacaatcatcaagcacaatcaaaaatacaaaaacaatcatcataacacaaacaaagacaatcaacgacaatcattaatcttcagacaacaattaacatgactatcaaaacacaatcaaagacaatcattaagccacaattaataataaccatcagacaccaactcaaatataaagaaagaatataatcaaccgacttaactatttatctaagtcattgctatctaaaagtcctaattctcttctaata

SEQ ID NO: 246599 - DNA, 444 bp, Glycine max
caccccaacaccccaggcaaagaccacttttctaactctaaccccatgtgtctctctggacctttttaaacaccaccatttttttaaaaagaaaataaaaaggattatatctaaaaataaatagagtcttagaaaaataatgaaaaatttggaaataaataaataaataagccaatacaataaatatatgttcttaaaaaatgatttatttattcatttgataagtagtaaaatagagtctattcttataaaatgataaaatcactaccacaaaaatggtcttctacgatgcatgttttattatggttgtacaaaaactgatgtcataagtaaagtggtgacatctttgtacacaactagaaattttctaagaggattttatcaaaatcttctctgaaaatgaattacgacatcggttctacaatgcgaaaatacaatgtcttt

SEQ ID NO: 246600 - DNA, 405 bp, Glycine max
aaatatggcaacagcaattgggaccacaatgtaaaggcattttgactcaccttaaccacatcatgactgtaattgtgaccgacaacgttgtaaatatcggcggtgattgtgttactgtctcgtcatgtttgttaatattgtgataaatcgcaaataaataccatcgatacagtctccaattgcgatcggattgtagtcgcaaacacaattaaaaaatcttgaagttacgacccacattacggtcatgaactcatgtttaaaaccttgacggccacatcaattacattttcccacaattgcccacagtataaatgttttcatattcattcaccgcaatggcaatttaaacatcttaattagtcatattccccgtgaagttaacaagatgcatatccgatatattaa

SEQ ID NO: 246601 - DNA, 418 bp, Glycine max
  unsure (1)..(418): unsure at all n locations
tgagacttcctacttttattctttgaccacagagnggnacctggagatatgtcgcgggggtcagaaaaccttggggacgtcaggtggggtgctattgcccaaaaccaagcttgaccaatcccgacccaacccaggcatagtcagtcagtgagaacctgtgatgtacctaaacaggcgagctcctgncagttaaccgataaaagaacaaagaccacaaagcaaggaggcttgtgtggtggctggccaactgtgaatcttgagtgatatatgggatatggcctctggtaatcgattaccaagggtaggtaatcgattacaaggcttaaaaacgagatcaggaaactaagagggcttctggtaatcgattacaaaggggcataatcgattaccacgcttagaaatgggactggaatgtgga

SEQ ID NO: 246602 - DNA, 376 bp, Glycine max
  unsure (1)..(376): unsure at all n locations
cacatgaagagagacacactcatccaacgcatatatagctcacaagggttgcacaacacaaatccccacatcaagagagagataaccctattgccaatatacacaccagaagataagggctcattaaagcattatcaatcaatattaagactacctgtgcggcgtccctaaataatgactggtttaatagtaataaatcaaatcgcagaaaccatgcgaatttttttttttgcactgctattcatttcacggtaattaaattcagaaagaaaattatcactataaagtcctgaatggctagttcacaactctattcggattcatttctttctaatcactcataacctctanactattttactatttcacaatatac

SEQ ID NO: 246603 - DNA, 393 bp, Glycine max
  unsure (1)..(393): unsure at all n locations
gagctgtactcaatatttaggatattggacctgacgaatcctacaagaaaatatggcgataagtcaagggtagataaagggaagctcattgctaagtcancatcactgcctaatctgacagaactagtagatggaggctcatcattagctcactattgtctcactgggaatgaatttctgagattatgtacaggagcaatacctgngacacgtgactacgataagcagcactgtaaagaccttcatctcttgcctccacacgtagaaaatcctatctatggctggngaatggattgactagctngaatgtttgaaggaaaactctgcacaccagattatgacaagcagtactcgaaagccatcatctaaatgcctttacgtagaaaatttatg

SEQ ID NO: 246604 - DNA, 397 bp, Glycine max
  unsure (1)..(397): unsure at all n locations
ggaacggctacgaacccggaatgggtttaaggaaacacaacggcggcatgactaacctgataaatgccaaaggaaatcgtgggaagtatggtttaagctataaacccactcaggcggatataaagagaagcatcgtgggaagaaagagcggtggtcaaagctcgcggttgaggcaagaaagtgaaagaagcccgccctgccacataagtagaagctttataagcgcgggtctgggagacgaaagtcaagtggtcgcgatatacgaagatgatgttccgagtacattggatttggtacgaccatgccctttctgatttcagctgggaaattggcgagtggaggaacgccccggcatttacgcaacgagcataatgtanacctttacgggtttaaaagc

SEQ ID NO: 246605 - DNA, 377 bp, Glycine max
tcacattgaatctttgctggacattttactgtaattgatctctttattatgttaaaataagagtgcacgcttgttttaatgtaataacgagatgttcggtttacgcaaaggttggaagttacatggaagttactaaaacttccatcaacggttggaagttacatggaagttactaaaacttccatcaaccgcaatttttaaaaataaataacttccatcaaccgccaaaaaccacctgttctttgattataaataatcatcctggttcagaaagcataacatgtgaaaaactcacaagaccaaaacaaaactcttgaattataatcttctgaatttatccgaatgacacaatttggttgaaccccgaacattgattc

SEQ ID NO: 246606 - DNA, 374 bp, Glycine max
atagcgaaatgtagtgtggaggaacccacatcaaaatcgttacagcagcatagcacgtcacacagtggctattgtagtgaatacaacagctacattctttaactcctctttgttatttccaagactttgggaggagtataggtaggtaacaaattatgcatccatctcccttattataaaaaagtagtcttgttatgttttttatagtccaaagcttagctacgtgctaattcagaggggtttatctaacataaaagctttgattagacaatatgcttcctctgttctgctctcgttctctttttctctttcacatataaaccaacaaatcaaagaataaaaaaaggaacagaattcactctactcattcaaat

SEQ ID NO: 246607 - DNA, 409 bp, Glycine max
tctaaggtgcctttcaatccaaactccattcctacaaaataattcatcaataagtggacatatcctatcagaatgatgaactaaagtgtaagactaaatattgacaaatgtataattaaaaaggcgcatataagattctaaataagagaaaaaaataagataattgcctaaatttacatccttcaactaaatattttttacaattatcatgaaggttgagcggttggaaagcatcatgaaaatagatgaaagatgtattagtcaaggggatgttaagattgagaatgaagtattgacatgtgtatgctacaaaatatataattgtttaagatcatgtggcacatttgttgacgtgaaagtgatgatgtgacattatatttataatgttacatgtgacgacatcattaca

SEQ ID NO: 246608 - DNA, 321 bp, Glycine max
gactcctctaaaggcatcccatattacttccctacatcttttgggacaaaaaactttcaattttaatttttcaccttttataaaattataaaataataaaatatgcacgcactaaactatgagtctatgactaggactgcatgataaattgtgtgaaacctacaaacggcagataatcgaagtcccacttataatctcattgtgtcaaacgtcccacaaaagtaatttgatagtaaccagcagaatacacaagcacagcagaatacacaagcattaaccagagcaagatcaaagagacaaagcattctccctgcatacttg

SEQ ID NO: 246609 - DNA, 370 bp, Glycine max
caatgactgattttttcggattctttgctttaatcgattaccagttggattaatcaattacttttctctcgtttagtcattcagaggtgaaaaataacactttaatcgattacttatgtcatctaatcaattacattgttaaagttattttcgagatgttggatgaacactctaattgattacttggataatctaatcgattactttgctaaaataatcgattaccttataaatttaatcgattacagatggttataactgtttattctataaataaccaacttgtgttcacatctacacatctagagatcattagagaatactcaatacatcttgaaattaacattttagcctcagaatgagcaagatt

SEQ ID NO: 246610 - DNA, 389 bp, Glycine max
ggcagacgcatgtatctgaacttaattacgctcagtgtctctgaaccacaccgacaatgtgatcctaaaatgaaatggccgccataaaaaagaagaaacaaaaatgagagggttagtaaagttggtcatcctcgtacagttcctacaaaaacattcgtcaattgtttctctacggcgaaaagttcagaattaagatttaggatgcaaacagaacttggacaaatatattttaattacgaggataaatatatgcattgcttatattatttggcatataagttcttccaaacttcctcagcggcttcatggtcctctagattctacttcataccgaatatatatatatatatatatattagaaatcataattaatattctgattctataat

SEQ ID NO: 246611 - DNA, 372 bp, Glycine max
gttgaggagaccttcaatcctattacacaacgtggccgacaaaagtgggcagttaacttgaatggtcattattgtcaatgcagaaggtattctgcgcttcactatccatgttcacatattattgcagcttgtggttacgtgagcctgaactactaccaatatatagatgttgtttatacaaatgagcacatcgtaaaagcttactccgcacaatggtggcctcttgggaatgaagcgactattcctccttctaatgacgcatggacacttatccctgacccaacagcaattcgtgcgaaaggtcggcctaaatcaacaaggataaggaatgagatggattgggtcgaaccctctgagcaccgacaaaaatgc

SEQ ID NO: 246612 - DNA, 387 bp, Glycine max
  unsure (1)..(387): unsure at all n locations
acaaatgctgtctcattnttgtaaatatcactaaaattacaactatgctttttaaaaatgaagtcaaagcctgatattgaagacaattctttggagaactgtaattgaaatcgctaattcaaagacgatttttgaaaatcatctttgaagttcaagtgttatggctcttatactcgtgccctttctttgcatctcacttcgtctcaatagcttgcaccctctcagagtctctttatgccctctctcactcacgtctctgtcaaaggtgcccagcactaccgttgaagcttccttctgccgaagcttgtgtgtggcctggttgtggtttgttttccctcattccccatatgaagtagtggggtggtctaaagaattgtggcttaatat

SEQ ID NO: 246613 - DNA, 415 bp, Glycine max
  unsure (1)..(415): unsure at all n locations
agannncctttctcttttgttttctgaaatctacctcattaaataaacaaagagatcttgtttcatctgttcttgcagttccaccttttctcatatcattttgcatgtttttgtttctttggtcttgtttggtatagatatgagggtcgattctttgaggatcctaacaacgagggtttgacaatcgattntgatagagatataagccaaacgataaacgaggaagaggaagaggacgtcctgtcaccagagttggagaggttggtcgctcaggaagaacgtgaaatgaagccttaccaagaagaaaccgaattggtaaacatggggaccacggaggataagatagaagtaaaggtaggaaccgatatgatcgcgcctatccgtcaaggcttgataacccttcttgaagagtatc

SEQ ID NO: 246614 - DNA, 401 bp, Glycine max
cgttaatgcaagttaagggtattatagtaattaaatcttaaacttttaaataaataaaaaattaaatgtactcatgtattactcgtttctccctcttcaataatctctcaccttgaagttagtgatctatttacaaaacctcaacattgctatgttcttctttcttctgattggtgttaacattttcatccgatgaattttgttcctaaaagagatgacataagagagagaaatgagtaataagcgagtgtatttaattctttatttatttaaaaagttaaacttttaattactataatacccttatcttgaattaatttacatgcaaagaatgaatcgactttctgtcctaaacttttggtgtagcttatatatatatatatcaacacacacacaaaaga

SEQ ID NO: 246615 - DNA, 377 bp, Glycine max
  unsure (1)..(377): unsure at all n locations
attcaacataaaactaataggtccataaaaaatgccttaaagcatcccttataatagcaaaaaagcctgtctagttggatggcttcggcatggtaggtttgattttgttcctacaacattnttaccccatcagatttacattttgcaaaataaaactaaagccaacttcatcggtacgaccacctccaattttcatcatccatatgctcaacatcatcactatgagcaccttcatattcatcanaatcctcatcatataatggatcagcatcatcttcagaaaaaccatgttctatattctcatctgatgattcactgctcgtgttgccatcctcacgttctgattcattctcagaattntcatcctcttcatcctc

SEQ ID NO: 246616 - DNA, 356 bp, Glycine max
actacaccaaatattattatcctaatcaaacgtcagtcattacatataataaaccaatcatcaatcttatcgtcactgtaacaatcaattactaatcaaattatcactactcttcctttaattattttaataagaaacatcttttccttttctaaaagctcgcacataattaagtgaaagactcaccatggaatacgttgttatctacacaaaggaactctgaaactttaattaaaaagaaaaggttacactacaccaaatattattattttaattatgtgtcacttatcaacaacaataaataaattatcgatcttatcatcaatgtaacaattagtcatcccattatcaatatt

SEQ ID NO: 246617 - DNA, 351 bp, Glycine max
tctcaatttaacattttaggcaattaaatcacaataagaaacattagcagttattctacacaatttaatacgatgtagcgtaaattataattttaaatttttctataatttaaatctgtgagttttattcttttatttataaatcaagacatttaattcttctaatatttagaataaataattttaatatttctgttagttaatcatctaaagttaaatatgaaatttggtataatatattgatgtcaatgtaacacttatgtaagaacatgaaacttatataataagaaattaaataaaataaaaaaataaaaaaaggtttaatatgatgtattaatgttgatttaatac

SEQ ID NO: 246618 - DNA, 335 bp, Glycine max
aattgcactaaccgacccttcaaatctgaaacgtccaggagtctcttaaacactgaagttggcgtaaaacaatatataccacagaaggaggaagcgaatagacacactcagagagacgaaaaacagagcacagcttccacccttaagagaggttacgctttacgagtgatcttacggttctaggggtggaagagacatcctcatccatctgtaaccttagttcttcttcaaaatctatcttttgtgttgaaagttactaacttacaatggaaggctaaacctcttgttggggatttctgttgaacatctgatgtaatattctctcactatctatt

SEQ ID NO: 246619 - DNA, 314 bp, Glycine max
acattagatctggaataagaccaacattatgtgattagcaaatggcactctatctatataaaaggggatcatactctgatttgggggcaaacaaaaaatcttcttcttccaacaaagtggtatcacaacttgagttctagagtgttgaaagaaaaatactcttgtgagttgagagatgacaacaatggcttgagtatgttttaattccctcgtcttaccaaagagaattatgataatcggtgtcatcgcatgacagccttgttaggttctcaagatgcttgagagattgtagagaaagggtatacccaacctca

SEQ ID NO: 246620 - DNA, 396 bp, Glycine max
ggagaacgcgaatgtatgtatacatgatcttgatgatgtcaaagaagaatctaacaaggctgcttcaaatgataagcatttgcttcaagaataattcaagattgcttcaacaaacaaagccttgtttcaagatcactaaagaccaagcctttccttaaaacagatggctttcaagacatgcaaggctctggtaatcgattaccaggaagtgtaatcgattaccagaagatagggttgagaaataactgttgaaaaaggttttgaatttgaattctcagcatgtaatcgattaccatatgcctgtaatcgattaccagcaacggaactttggaaattcaaattcaaaagtcataacccttcaaatatagttgtgtatcgatacacagacattgaatc

SEQ ID NO: 246621 - DNA, 388 bp, Glycine max
  unsure (1)..(388): unsure at all n locations
aaactggggcaaatgaagagggtgaggatgaagtanaagcccatgctgtgactggcattccaatacagccaagtttcccaccaacccaacaatgtcattactcagccaataacaaaccttcttcttacccactgctcagttatccacaaaagccatccctaaatcaaccacaaagtctgtctaccgcacttccaatgacaaacaccacctttagcgtaaaccaaaacaccaaccaagaaatgaattttgcagcgagaaagccttagaattcaccccaattccagtgtcctatgctgactcgctcctatatctacttgataattcaatggtagccataaccccaaccaaggttcatcaacctccatttcttcgagaatacaactcgaac

SEQ ID NO: 246622 - DNA, 405 bp, Glycine max
  unsure (1)..(405): unsure at all n locations
ccaagaagagttaggtctagccacgacccacgagcatagaatcgcggacgagtatgctcaagtatacgcggaaaaagaggctagaggaagggtgatcgactctttacaccaagaggcaaccatgtggatggatcggtttgctcttaccttgaacgggagtcaagaacttccccgcttgttagccaaggccaaggcgatggcagacacctactccgcccncgaagagattcatgggcttctcggctattgtcagcctatgatagacttaatggcccacataattagaaatcgttaggaaacttgtatggtctctcacaccttgactagatacgactttctttttgaaataaaatgagttggtcccatgtttctactccaaaaaagcttgtgcanatcactcctaca

SEQ ID NO: 246623 - DNA, 420 bp, Glycine max
tttgagagctcttgctgtgcgaagactggcagagaagtgagcttgaagaggaagccatcctaagagcatgagatgagtctatgagtgattgtgaggctctagaggtggaagagacatccccactacttgtatttcttcaatccttcatttttctcttctctttgttgtaaaggaagcttcccagatatggagagctaaatcctctattggttcttccttgtaggtacttgatgtaaatacctctttatgtatttattgatgttttgtgtgttctctgtgctatcaatacgtcattttagtatgcttttgctttgatcacgtagatgcatgctttgttaggatcatttaacaatgggaactggtctaattcttagaatttgataggacaaggctagtttatcgtattatcacgagggatcg

SEQ ID NO: 246624 - DNA, 380 bp, Glycine max
  unsure (1)..(380): unsure at all n locations
gaagcatgtgtaactcttgttgtaactttgatgaatgagagtcttgtgagacatacttcaaagttccacttctatacctctcttattccttcaatttcgcgctcncccctctctctttctctccctctttcttttcctccattgaagcatcctttcaagcttcttatccaaggcttatcttagtggtgaagcttcttcttccatggcttattccctagtggatggcgcctcctctcacctcttctnctttgtcttccgctgcatctccatggaggaaaatcaccattaaaggacctcattgaagctcanagatctagcctccatagaagccccacaagcaagctttcatcagagagggtgatggtactaaagaatgcact

SEQ ID NO: 246625 - DNA, 396 bp, Glycine max
  unsure (1)..(396): unsure at all n locations
tgccactattattgttatcagtctcctctccatcattgggggcgctgcttgagctgccaaatccctccacctttgagcgtattctttgaaagattcatgctccttcttacatatgttttgtagctgaattctacccgaagccctatcagaattgtactgatactgcctaatgaaggaaatcattagttccttccatgaatggacttgggaaggttccagattagtataccaggtgacgctgccccagtaagactttcttggaagaaatgcatncaacaattttcatttttcgagtatgcccccattttcttgttgtacatcttcaggtgattcttatggcaagtagtcccctttgtatttgtcaaagttcggcaccttgaacatgggaggaattat

SEQ ID NO: 246626 - DNA, 396 bp, Glycine max
  unsure (1)..(396): unsure at all n locations
accacccgcnaaacaagcggcctcagatatctttaagaacggggggttgaattaagatatcaaaaactattccccaattaaaattttaactctcttcttgaattaataatttacccttaatatgaattactcaaaagataattcacaataaacttctttaaaataaatgataattgacaataaataaaagaagtttaagggaagggagaattcaaactcagtttttatactggttcggccatgccatgtgcctacgttcagtccccaagcaacccgcttgagatttctactatcttgtaaaatgccttttacaaagtctaaaccacaaagggacaacccttctcttgtgttcagaattccttacaactcaagaaaccctccgtcccttaatcaatc

SEQ ID NO: 246627 - DNA, 278 bp, Glycine max
accctttatggactttctatctggttgaagtagttagcattaggccttcttcaaccttacctcaatgcattgattcataagtgtaacattccttaaagattttccatcttgtctttctacaatgagtttcaggtttgaagattttattaattataacaatataacttcaaaatagataattgtaaagtacattttcttagtgctaaatttttcaggattcacaaattctttggtgttctgatatcgctaatccattaaaatggcggatattatataca

SEQ ID NO: 246628 - DNA, 391 bp, Glycine max
  unsure (1)..(391): unsure at all n locations
atgcactcagtaagagtcgtcctctccacactccaccaaaagctgaagtttgtagtagaaggacatttggtcatagtatcaggtgaggaagatgtcctggtaagttgttctttctctatgccatatgtggaatctgcggaggagtcattggaaacgactttccaatcttttgaggtagtaagcatcgcttccgtagattccctccataggcagccccgcctgtctggtgcggcaatgatggtggcccaagtgatgttacggcatggctatgagcccataatgggtttgggcaacaataacggtggcacggccagcctagtaagtgtcagaggaaaccgcgggaagtttgggttacgctataaacctatgcaggctaacgtaaagaanaaca

SEQ ID NO: 246629 - DNA, 408 bp, Glycine max
  unsure (1)..(408): unsure at all n locations
ctttatcttccgccgcatcttcatggtggagaatcaccactgaaggacctaattgaagctcaaagatccagcctccatagaagcttctcaagcaagcttccatcactaaccctatgtcgtaaacccttaacactgacccctatatatagaagtcatattcactttcgtttaacacatccacacaacactatcttgctttattactttcttccaactttgcaaacacaaaccctctgtcacatttctttctctattatttctctattacacaacgtgtcttccttatttgtcaaatggttagtgcgcttcaatggtcatataatcaaaacaaatgaaggggataagtntcaatgcccccacccattgttctttaaaacaaagcgaggcctcccacttgaagccttaaaa

SEQ ID NO: 246630 - DNA, 415 bp, Glycine max
  unsure (1)..(415): unsure at all n locations
caagacatcctattaactaagaaaaatgcacccatatacaatcaaggtagcttcattacctagattatttacatgtacttccaaggtgtatttgttatttacatcacacacgcctccttggctaaatttacatacatgcatactcaaagcatttcggggtaccaaaaattgcacatgcgctcatcttggtatttctaatacctatacatatacaaacttcatgatgaatcttgactacctacgcaataaggtgctacattntcatgctctttttttttttttttttttgaggggaatattaaccatgtcccctctcttctcatggattagcatcttgcctaacttgaacttacttaagttagaattaggcgttgattacttattntnttactctttaaaacaaacaaaaagtaaa

SEQ ID NO: 246631 - DNA, 358 bp, Glycine max
cctggagatatgtcgcgggggtcaggagaccttggggacgtcaggtggggtgctattgcccaaaaccaagcttgaccaatcccgacccaacccgggcatagtcggtcagtgagaacatgtgacgtacctaagcaggcgagctcctggcagtcaacagataaaaggaaaacaagaccacagagcaaggaggcttgtggtggctggccagctgtgaattttgtgtaatatgtggattgtggcctctggtaatcgattaccaagggtgggtaatcgattacaaggcttaaaattgaagacagggggctaagatggtctctggtaatcgattaccaaggggtgtaatcgattaccaggcttg

SEQ ID NO: 246632 - DNA, 247 bp, Glycine max
ggtaggttcttactttttgatagagtttggggtcaccacggttgatgatcaaagaatggggcatggggtgcaccaccgtttggcaattcagggagaaaaaaatcaaggaaaggttcaaacgcggtggaattaagacgttactatacatacacatcacatcgtttaagataccagtagaaattgtaatcgtttaaaccatgtactccaagacatcgtttaaaatatgtattactctaatggttgaaac

SEQ ID NO: 246633 - DNA, 387 bp, Glycine max
  unsure (1)..(387): unsure at all n locations
gaaaatggtattaatcacaatntttctgcttcaagaactccttaacaaaatggagttgttttgagaggaaagatagatttctttaggaattaacaagaactatgctaaatgaaaaccacctacctaaatacttatgggtggatttcatttgtacaacttgttatgttctcaatacaatgattataagaccgattttgaaaatgacaccttatgaggtctacaaaggtagaagcctaaatacatcacatcaaaaagtctttgggtgtaaatgctttgtgttaaacaatggtaaataatcacttggcaagcttgatgcataagataatgaaggtctatttctaggttactcatctagcaaggcatatagggatttcaataagagttcat

SEQ ID NO: 246634 - DNA, 339 bp, Glycine max
tacagacaaccctgctggtggagcacaacctatgctacgtcagggtgtaaaacagcatggcctggggagcatgatctgctctcaacctaagagcatggctcgtgttgtgatgaacaatcacaagaattctagaaaaactgagtaattttttatccaaaaaccacctaatctaaattcattgaagattaaatgacctatactatcctagaaagtcaaaacacaaaaacaaaagctagattagaagtcaacttacttgaatcgaagaaaatgcaatgaatgagggttgagagaactgggaatgtgagggaaaagagaaacaacacatatggagtgagggga

SEQ ID NO: 246635 - DNA, 364 bp, Glycine max
cgagaggttgagtccacacggcagctagttgatgctcactatcaataaactcaatgcacactctccctttgatatatgatctctaaaaaagatggttatcttatatgttggcctatatgcatgacatgattctacataattgatgcacttgtgtgtcacatttaagggaatgtgagccaggattactccaaattcttcaagctattgttgcatccagagacttcgagcataacaacctctaactgctatatatgctgcttctacagtggatagttctacactagctggtgtcttgcaattccatgatacaagagagcttcctcagagagggatatcccatttgacttttcctatctagttgacc

SEQ ID NO: 246636 - DNA, 393 bp, Glycine max
  unsure (1)..(393): unsure at all n locations
acacaaaaatgacatgctaattcttccgatttaaaacaaactcatgcacacatttaatgtaacacatttatgaacatgcgtatgtgtaaaatatcctactatttatgtcaacatacaaggacatccaacacattctagttaccacacacatatatacatctttgaaaagaacacacattctcgtgctcaagccattgtgtcaaaatatacacgtaatcacatcctaaatattttgctatcacaaactacctacacatatttgaagtatttatcatacaaatnttgttgtttcactcacatttatttatatgcacattggaaagctaattacatcatgcacatactcgcatttgaaaaggaaattccacgccatcatatattcatttatgaagc

SEQ ID NO: 246637 - DNA, 459 bp, Glycine max
  unsure (1)..(459): unsure at all n locations
cctgcggcatgcaagcttctcaagatcactttaatggctntttattttctatggatactctcccaaagaaaagtgtgtcgtctgcatactgcaatatgctgactttgacttcatttctgcccacattgaaaccttgaaacaggtttttatccattgcttctttcaccagcgcgtttggtccttccacaagaatgttaaacaggaacggngatagagggtctccttgtcttaagcctctntggggaataaactcaggtgtaggacttccgttaaccaatatggatatggaagcagactttaggcagccttcaatccaagttacccacctgtcacaaaaacccatcctcttcaacaaatatagtacaaactcccaagatactgaatcatangcccatttataatctactctgaataccacgcatggcttgttccttatctctgcttcctgtatgacttcat

SEQ ID NO: 246638 - DNA, 291 bp, Glycine max
atgttaattattctgttttaagggaagggcttataacccaacatggtggctctaacacatgaactaaaatgtgtgtgaagttacgcttcccttcttgttttgttctgagacgaaacgcaggatgacaaacatgaaacaatggttgcatttgcaataaaagttgtgacgctatctgagatgcatgatatgcaaagtgagctgatatgatacgcaatgcagattgtcatttgatgttgaaaatcttatcatgctaataatgctttacgcacaacccgaattattttttatggc

SEQ ID NO: 246639 - DNA, 396 bp, Glycine max
  unsure (1)..(396): unsure at all n locations
ttacaatagagagagcacgagaaagaaagtgagaataacagagagaaagggccagtgcgctgcccaataagatagagagaaaaagcatgatttgaaaggtgaaaccattcaaaatcgtctttgcattgggttcaattatgatggttttnttgaataaccgcgcttaatttacaattccaagacaactgtttgaaaatcgtctcttaattaatgaacttaattacaaaattgccatgacattatcttcaaagacgatatctgtcaaccatctgtgttggtgtgttgaataaatattatttgagtagtggctagtgaaactcatgattcaagtttcatctcatccttaatttctacaataactcataggggtgacaaatgaagtcatcccacctcgac

SEQ ID NO: 246640 - DNA, 349 bp, Glycine max
  unsure (1)..(349): unsure at all n locations
ttgagccttgtggacgagattctagagggtaatttgaagaaaaagaacattgtaaacaggtgtagcatttgttgctaaagaaatgattatttggactcaccacggtcactagagcagacttggctttaactttttcagacagcttcaaattaattccatttttcattatcacattgatatgaagcacatgatcaaatctttcagtttttattatagcacagagattagtttcacatgaatggatgttctcttaatataaccaatgattttattagatatatgttcaaagnttaattacaacatcacatgtattattattaaagaactgatgcaaaattggagaactatc

SEQ ID NO: 246641 - DNA, 299 bp, Glycine max
gaactgaattaagatgtttctttgtgctggctaagcatactctatgctacatatttataagagtcctactttgatctactaaatatctcttcgagcgactatcctaaactgatgcatataacttaatgtattttactaagattaccttttaagcgccaactctaagatgatcaggagaacatatatcatttgtggatttagcctgccaccctataaggttaccttcatgcagaagatttaccttaggggtgattgaaggaaaaaggatggtgagaaaaagagaatggctattaaaagag

SEQ ID NO: 246642 - DNA, 379 bp, Glycine max
  unsure (1)..(379): unsure at all n locations
attgctaagctctcnaaagcagaaaagtactggntgacaaatctggactgggtgagcttgaagaggggcccatgacacctaatgagtcacatggttcctaaattcaaagaatctaaatcttagtgaataaaatcttcccattctataagtctcttgcttatgcccctgagactttccctggttgcatcatcattcgtatgaggcccaacatcatcaatcgtacttgtaacaatgaggattggcccaataggaataaatgtactatcatcacaataggtgtactatcatcacattagtcacaatttctcacactgtcaaagatagctacgaaatggcaaccacaaccacaatacaatccaaagccttgctttctacttct

SEQ ID NO: 246643 - DNA, 401 bp, Glycine max
attgctccaaaggtagtgtcaacatcaatatgtcctttaaaagtgtagcatgttccccttcctctaatcatgtctcaaagtgcagagccaaaatccttacgcctcaaagtaattggaacatcaatgtctgttatcccacttttcacgagctttgcagaattggcaagttctgctcctccaatgctaacattaccaacccagatctcataatcaagtgcattgaggcctaggtcaaactcattattgttgtccaacatcaaatgaagaatagcaactatctcttcacaagaaaacctctttaactgaattttcatgtggctatggctgtaaaagcatttcctaactgaattctgatgtttagtgtctctagtgtaggagaatcttcatgtcatcatcaattt

SEQ ID NO: 246644 - DNA, 446 bp, Glycine max
  unsure (1)..(446): unsure at all n locations
actaagctattggaaaatatactgcataagatctatgatgtattttactnattattgngnnagtaaagctaacaagagaataaactcaatgtagtagaaatgagaatgttgcgtcggatgaacaggcatactaaacataataaagatggtagaagctcacccaaggtggcttaggcttgattgaagaagagctgtaaaagccacactaaagagagtagatctgatggagggtaactcaaatcaccatagacaaagggaagattgagaaaaaataatatgaaaaatcgttaagagactcagttaaaatagtttgtctataaacatgatttacaatagaacatgacaccatttgtttcacggagccgacccctcatgggaaaagggcttgttattgttgcatactntgcgtcgttatgtcatatagttaaagcataactgaactatga

SEQ ID NO: 246645 - DNA, 332 bp, Glycine max
  unsure (1)..(332): unsure at all n locations
ctaacctcttttacctttctgtcattgaactcaagaccacgtctcaatgaggttatataaaattttacatgggacaatgtcatgacagtgaataagaacgaatcgcanatccattttcttattatatttaattctctaaattcatgattttttcctacttataacaccaatatcacatactctgggattcttgctcctccatgctctatggcggtatttaacataaccattctctgataatttagtatttttctgtacgactttatggcgacaataacattttttgtctcatgaatgacattggaagcaagctgcgcgatacaatcaaatct

SEQ ID NO: 246646 - DNA, 387 bp, Glycine max
tttgttgcttatagcttctgccaatggaagagcttctggagagacgtcttactgaccctcgtttaccaatgtaagatttattgcgaagaaaaacttggttgaggcaatattattgctctatatgactatatttgctttcatttatctttctttggatgttgagtttgcttttgtgggacgttcatgggatctcctctatttatcataatgtatctgtcaggactatataaaggctacacatgacactaacatatgttttttgatctattgggatctgggtcatacaacagggaaactcatatccttcccatctatccatccttgtttcaaatttgaacctgaaatctacaagttggggtgcctggtccttaatcatcgaaatgtctg

SEQ ID NO: 246647 - DNA, 345 bp, Glycine max
aatatttcttttatgcgacttatctctcaacaacaagcttccaaacccttatttaaaacataagaaaacataaaaattgattctaaaacctaaacatacttgaaggacttctaaaaaataaatttaactaaggagagaaaccagactctaattatggaacatgtaagataaatgcaattatgtgtaccacacagataagcaaataatacaattatcattgtcttcgcaaccaccgccatgattctcacatgttacattacaatgaaatgtcagattcaaacattgaaactcaaataaaactcatttaacataccattcataagattacaaataaaaataaatatc

SEQ ID NO: 246648 - DNA, 418 bp, Glycine max
ggggagagcacgaaattgaaggaataaaagagggagagaagtagaactttgaagtatgtctcacaagactctcattcatcaaagttacaacaagtgttacacatgtttctatttatagactagggagcttccttgagaagctttcttgagaaaacttccttgagaagcttctttgagaaaacttccttgagaagctaaagcttagctacacacacccctctaataactaagctcacctccttgagaagctttcttgaaaagattcctaaataagctagagcttagctacacacacctttctaatagcttagctcacctccttgagatgagaagctagaacttagatacacaccccctataatagctaagctcacccccatgaaaaaatacatgagaatacaaacaaaagtgcctacta

SEQ ID NO: 246649 - DNA, 326 bp, Glycine max
atgtgagtcagtttgtcagattgattatgaaagaatgcattgactgtatcccggtaagagtgtgatccttaaatgatctatccctgaagtactgatttttgcatgaatctctgaagtatggactgaatgcatgaaattgaggatgatgaaggccatgtttgattatgatagccacttagccaaaaaggtaaccatgtgcttgaatgatttatcccttgcaccctatttgagttgaatgaattattgattgattgaaccctgaggctatacagcgttatctcctgctaccttgtcttaagttggaagagagaatcatccacataaag

SEQ ID NO: 246650 - DNA, 398 bp, Glycine max
  unsure (1)..(398): unsure at all n locations
accctcattaagaactaacggtgttaagggattgaacccatagacanacctcaaaggggactgcttggtggttctatgaacccccctgttgtaggcaaattctacatgaggaagatactcatcccaagacttatggttgcctttcagaagagcccttataagggtggataaagacctattcactacctctgtttgcccatcagtttgtggatgacaagtggtagagaaaagaagtttagttcctaacttagcccataaggttttccagaagtggctaaggaacttatcatctctatctgacacaatggtcctaggcaaaccatggagtctcacaacttccttgaaaaagagttttgagatgtgggaagcatcatccaccttgtggcatggtataaagt

SEQ ID NO: 246651 - DNA, 360 bp, Glycine max
ctattgcgcacgcaatcaacggggcacaccacaccaaatgattatgacgatggacggctcacattctcacaaacgtaaaaccatcacttctcaaatgagctctcacaactatcatgacatgtagagaagaatcaatgaattcaagtcacaaaatgtcaagaacttttattttcaaaacaactacccatttcttgaacatatcctataattcaaagaacaacatgcaaagtcgtacgtgcacatgaaattgacccaaaatactaaactgaaaatctgacgaaactaataaccttaacaaattaacacaactaacaaattaacaaaaccaacaaaactagcacaatcaaagaacactccccc

SEQ ID NO: 246652 - DNA, 440 bp, Glycine max
tcttgcataacccttttcttgttttggatctccttcgtctcttccggattactcctataggtaaccctattaggaagtgaagctcccaaaacaagatctatttgatgctcaattcctcttaaaggaggcaagccatggggaatgtcttgtgggaagacatccttaaactcctttaagagtgtatcaaaaccttgaggcaactcaaaggcactagaagacaaacacatgtaatttggaatgagtaaatacattggttgtctagctagcattacttgttttacctccttaggtttgataaacaaactctcttttatcactaattttttttcactctttttttctctgttctttcgatctttcttggtactctgtttgccttctttttctttatagttattctctctcaaaggactattatcttctttgaatttcttttctct

SEQ ID NO: 246653 - DNA, 388 bp, Glycine max
  unsure (1)..(388): unsure at all n locations
atgggtgaacaccacgtgatgtccatcgaaatatggaaacattattttaaaacgtgattaagcatagagattactataacaagtcaaagataggatacttttctctacggaaaagaaagcataacctaggttccttccatccttgggtgttgcccagtggcttggccaccgacggagtgagtntttgctctctacaaacgctggggttccttctttgatcctagggagttttaactgcctcggtctctaaagtttttccttgcttttcccaatcgggtgccctatcactntttctcatcttgggctatgaaatagttgtcagtttgaactgctcttgatggagaagaataagggtcgtcaatcgcactcaactgcaaagcacattatg

SEQ ID NO: 246654 - DNA, 411 bp, Glycine max
atcttacctcactttccacaggcaataaacttcgaacatcatgcagctcaaaacgggaagcaaggagctgaccttcttcagctagccatggagtgaaggccattgaaattcccacgacaagaaacagtaaagaggacatttgggaagacattatgccctgcacaaatattaattatcaaatagccaaacgttagtttttataacaaataaaatgtcaatgaggaaaaaggttaaaggccccatggatgtttgggaaatgcaagaacagatgacattgcacctcaaaactcttattaagtcacaaaatgtcaaaataacagccagcgataacccaattttattaacacttgactggtgaatggttataacatattattaatccacttatcaagtcatttttccaagaaagct

SEQ ID NO: 246655 - DNA, 387 bp, Glycine max
  unsure (1)..(387): unsure at all n locations
acttcaagatcaagcatcaagaatccaatccaagattcaagattcaagagaagaaatcaagaagccacaagtcaagacttcatataggataagtattaaaagattttctcaaaaaccaaatagcacagttttgttttacaaaagaattttctcaaattttctaaagttaccaacgtgattactctctggtaatcgattaccagttagcaataatcaattaccagcgaccagattggttntcaaaatattttcaaatgatttgtaacattccaaaatgattnttaaatagtgtaatcgattacactatattagtaatcgattacaagtgaatatgaacgttgaattcaaatcccatcgtgaagagtcacaacttttcataaaaaacat

SEQ ID NO: 246656 - DNA, 401 bp, Glycine max
gatctcgggcttagtgtgcgcccctgatgaagacgccctaccagattcttctgtcgcgctaaacgtaacttcaacgcccttagcgatggatgcgcgcttagcccactgatgagctaagcttaatctgtcccttttgggactacatgacttagcctctttttcacctaaaattgcagatatttcatcattaaatccaatggatatattctagagacaactttatccataaaagataatttagtacaaaaatcactaaaaaataaccataaatcggggaactgtacaacgtttggaaaatgagttctatacaaaagttagtcgtataacgcgactaacagaggccgtgttaccgttcgaagtagaggtcccctccttatgaatattggacaatctgcgttaaa

SEQ ID NO: 246657 - DNA, 283 bp, Glycine max
cgctattaagcaaaccactgtatctttgattaaacaactgtcacacatttcttaatgtaaaattaggaacggcatatgcgtaaaaatcctactattatatacatacaggatttcaacatttattaccacacatcatattttgaaaaaacatatacctgctaagtatggtcaagtacacatgtatatctatatttgtaccataactacctacgccactgagatttataacaatcattttgtgttacaattgagaccactatgcagccacattgcttattgaaag

SEQ ID NO: 246658 - DNA, 398 bp, Glycine max
agctatctggagtattgataacgaaaaaactccacgatccaatggttttactgttgcttttttccagaactgttggggcaacaatgaattcctctttcgccacttgagtatctaaaaaggatagatctctcaagataaagaattataaacctataagcatagtctctggcttttacgagtttattcttaaggtcctttctacgaggctgagtgatgctttgtcaaatatatgtccactcacagattgcacaagtagccaagtagactttcttatcactgagtatatggcaagtactgcaaagccatgttacaggtttgaaaactgagttgaatgctattaccttgagcattgctatattgctggatataacataacacctgcagcctgaaatgaatat

SEQ ID NO: 246659 - DNA, 405 bp, Glycine max
  unsure (1)..(405): unsure at all n locations
ttttataaataaagaattagagatatttttaaatgacatatttttataaataaataattaatggaatagattattttagtttaacaaataatctcatgttgaagggttgaacatgcacgtcttaaatactcaaaagaaagatnttgttgcccatactttacttgagcatgaatatcttgtctgaaagatacatataatccataccaaaacaaaattaagaaaaattataacattggactttttaaccatctaatactnttgactctntggtcaaattttgagacatctttacaaaggtcaattntttgaaaagttatggagatcggagcataattatacttaannattcttanttcttcagaacaatgtattatgcatagaattaaattgcattcttttctacat

SEQ ID NO: 246660 - DNA, 411 bp, Glycine max
  unsure (1)..(411): unsure at all n locations
cagccaannaactataaaccaaagagtggataatcctaattaattaccaacatcacacattgagaacaaagctagcaacaaaatcatccaacagaacagctataagcctataacttgaaataataatcatgaatgatgtaacctacttcgtagaattaagcctacaagttactaaaggaaaaatgtaaatgtgaattaagtaactaagctgacatgaaatgtgaactttaatccaagttaaatgagtaaattataatacatgcagagagaaatggcatggatgaaagtagtgaggaaagatatgattagagaccagagagcatgcaagtatacaacttatcacatttaaaccagaaaataatatccttacagaagatcagggatttcagaatcaagcttccagataacaat

SEQ ID NO: 246661 - DNA, 341 bp, Glycine max
ttataattacaaaagcctgaaaacagggactcgtttgtcagaatctgggctgccccatgattggtactttgcacctaagtaacgtgggaaatgcttttcaatggtgtgtagatatgtgtgtaaatattaggggcataaaattcctcgtcaagtatgaataaattgctttcctaaatgaatgtatgatagcatggaatgctctcttgaatgcaaatgtgtgcaggatgtaattagctctccgatctgcatataaataaatatgagtgaaacaataaaaatttgtgcggtgtacttcaaatgtatgtaagtagtttgtgataacacaatgtttacgatgtaaa

SEQ ID NO: 246662 - DNA, 331 bp, Glycine max
ttgagaccattctctggtccctgtgaggtgcttgacccccatattatgcaattatgagaatccaggacatgccgaaaaaccaaaaaaagttgatgcacaatccgcaagttccctgaccatcggagataaattggaagcatgttcataattaagtgaggtccgtaacatttcgaagtccaaaaggagatgattttgaatccgcatagttccgtacaaacggaaagaaacaagttcgtacaaattctaagtttcgaactttcgaaaaagaatcacccaaaagcagaggtgggtctctataaaatggggtgcaatacaccagcccattggccct

SEQ ID NO: 246663 - DNA, 383 bp, Glycine max
  unsure (1)..(383): unsure at all n locations
gagaaagaaagacaaccttgtaagatgcctcgggctatagtgaacttcattgtgcaaagtcttggtgatttgctcattcaagaaggaatgttcctatatggggtggaagacaaagtgttgcaactgcaaactaaattgaggatgatgaggtcttacttgcaagttgcacatagaaagcaagatggtaatgaaagcctaaggaattggatttcaaaaatcggagaagctgcttatgattctgatgatgtcattgagtcatatgccctcagaggagcttcaagaagaaatttgactggtgttttgagcctcatcaaaaggtatgctntaaacatcaacaaattcatacaaacccacaaagtgggatctcatgttgataatgtcat

SEQ ID NO: 246664 - DNA, 394 bp, Glycine max
  unsure (1)..(394): unsure at all n locations
tccatacgccaactcccaatattttgctccaattgaattggcaaatggactanttgagttctcacccttggtggtggtggtgatgagcaaaagaagtctcacccatggcaacaggtttgcagataacttgcctcaatctagctgaataagtggcaaaacatggaaggtttacaaagagaacatgacaaattgaaaaatctagatagagagaacacacaaacacatgtgacaggtggtgttgtttcaaaactacgcaaaatcacagtagctagtgcatactacatatgaagagcagcatagcaacgcactccttggaatcacgacttactccaatttgattgaaaaaaagttcaaaacttgcaccattccncctaaattaagaccacttatacaa

SEQ ID NO: 246665 - DNA, 389 bp, Glycine max
tgtgaaagcctgctccaattgctatggccttctccaccacggatatgaattcttcttggtcttgcatctcatgccaaacgcagctcttgaaatgatgtcatatattgacagaagtactgcttcagtgaggctgatggaagaagaccctccatgggaatcaatcatcttgacaagattgccgagctcctcttctcttatcggctcgaatgaattgacacgtttttgagtgaaaagctccacagtgcatatttttcgtagctgtctcccataatgtccgtaaagcgccgaaataatatttgtggattcatatgataatatatctgaagcaagactatgaggcctttgcgcaaagatgacatcatgggttctcattatctccttaccatact

SEQ ID NO: 246666 - DNA, 409 bp, Glycine max
  unsure (1)..(409): unsure at all n locations
agagaggggggagcacgaaattgaaggaataaaagaggtagagaagtggaactttgaagtatgtctcacaagactctcattcatcaaagttacaacaagtgttacacatgcttctatttatagactaggtagcttccttgagaagctttcttgagaaaacttccttgagaagcnttcttaagaaggttcctaaagaagcttaagcttagctacacatacctctctaatagctaagctcacctccttaagatgagaagctagagcttagctacacacccnctataatagctaagctcacccccatgacaaanaacatgaaaataccaaaaaaaagtccttactacaaagactactcaaaatgcctcgaaatacaaggctaanaccctatactactagaatagccaaaata

SEQ ID NO: 246667 - DNA, 404 bp, Glycine max
gagtcacactgagtaatacttataactttgataacttagtgaaaatttagtggttgtaaaaaattggacataattttgaggttgagacaaactaatataaattcattgtgtgttttcttgatgtttaactaacaaatgattctgaatttgtttttagatcttatgcattattttgtttttcaaataaaattgttttttctcatcatttgatacaatctatatcaaaacctttataagtgtttatatttatattcatcggacgataaatatgttttttagtcttaagaaaaaatcttaaatttataaaaatataattcaatcccttttttgtgttatttgctcttgtaggagaaattatctcctctgtgtcacgagaaaccaccaagaattacaaagaacaatgg

SEQ ID NO: 246668 - DNA, 415 bp, Glycine max
  unsure (1)..(415): unsure at all n locations
agctcaanagatcaatcaaaagaacaacctcaagtgaatcataagatcaattcaaaataacaagctcatggtgatatcaaagaaaacaattcatagaagttcaaagaataatgaaatcaatgacagaaatctcaagaactcacagagagaagagtnnttagaaagtcaagaaatcaaagaattcaaggggttcaagaatctcaagaaatcagagatcacagattcaacgactcacagattcaatgaatcaaggagaaggcttatatcaacataagtatgaaaagatttttcaaaaactgagtagcacatggatttttcacaaaacatgtttaccaaagagtttttactctctggtaatcgattaccagattgctgtaatcgattaccagtagcacaattgttttggaaaagtttc

SEQ ID NO: 246669 - DNA, 386 bp, Glycine max
  unsure (1)..(386): unsure at all n locations
gaagaaaagggttcggccccttaggcacttctctctctctcgaaattgctgaggaaaattagttccgtgaagaaaatccaagccaatgttgcttcctccagaagcaacagccttctggaggaatcttctggagggcccaagttaccctgattgctacttgcaccctcctttttactaaatgcanccccctttttctgcacaaaacaaaatacaaaccataacaagaacaacgaacataatatacatacacacatatacacatatacacatatctggcgaagaaaccgatccgganaacaacagaataacgtgtttcccagtcaccagagacttcgcgctcgataatggaggacacatgaacagcgctaggtcataaaactcatgga

SEQ ID NO: 246670 - DNA, 420 bp, Glycine max
  unsure (1)..(420): unsure at all n locations
gcaacaaccttctggagggaatctttggagggcccaagtgggcctggttgctatttgcacccccttctatttttggtaattctttttccgtaacgttacgaaactttacaaatttcgtaacgatacttatttccctttcgcaaggctacgaatccttacggattatgtatttactctcttttagctttcgaagaagttacgaaaactcacggattgcgcaaaaatacctcttttcgacttccgcctcattacggaatttcacggatcgtgcaagcctgcttccttttgatttccgagacgtctcgggacttcatttattgtgcaaccaaggacgccaagtgtctcgaagcggcaattccaagggtgtatatcatcaaataataatccccggacgaaaatanggtatgacagatgcccctc

SEQ ID NO: 246671 - DNA, 376 bp, Glycine max
aaagtccaagccactggacatgcccaatagtaccatctccaccagaaggggatgctgtgttgaaaatggaaaagaacaataaacataaataaatatacatccatcgaaatcatgcatctaatggtggcgcaacaacttacaggtcttactacaataaatcctgagaacagattccaaattgcataaaatacagcagtcacaatggaaacaacatggtggtttggtttcactcccacagccatcatgccatagaaggtgaagtacaacaatgtgaagtacatgaaaaatagataccaaaagaatttctctacagtccagtcaaatccgggcatggcataaactattacaccatatgtcacggcttgaacaaagacat

SEQ ID NO: 246672 - DNA, 376 bp, Glycine max
cttttattttacccaccaaggacgtcgagtgcatcaggtctgagagaccatacaagtttcctaacgatttctaattatgtgggccattaagtctatcatatgctgacaatagccgagaagcccatgaatctcttcgggggtggagtaggtgtctgccatcgccttggccttggctaacaagcggggaagttcttgactcccgttaaggtaagagcaaactggtccatccacatggttgcctcttggtgtaaagagtcgatcacccttcctctagcctctttttccgcatatacttgagcatactcatccgcgattctatgctcgtgggccgtggctagacctaactcttctggtacttggcgatgatactagcatg

SEQ ID NO: 246673 - DNA, 381 bp, Glycine max
  unsure (1)..(381): unsure at all n locations
ttcttctattttcagattgggaatgcctctaacagcacctttgtcaatgattttcttcatgcctcttaagtgcagatgtccaaatctttgatgccatattctgacttcatcttctttggaggatagacatgtggaggagtaactggtttcttgaggtgtccataggtagcagttgtcctttgatctgctgcccttcattagaacttcactcttctcatttgtcaccaagcattctgactttgtgaagtttacattgaatccttcatcacacagctgactgatgctgatcaagtttgcagtcagtcccttcaccagcagtactttgtccagactaggaagtccatcatggactnagctttccattccaatgatctttccttt

SEQ ID NO: 246674 - DNA, 403 bp, Glycine max
aaatcattctcaaacactcattccatgcaaaacaatccactgcatatcattttcaatcaattcactgttcaaacacgcttttggtacaagcaaacaactcaaagtgctgaaatttaaagacttgaaacataaaaactgaaattaaaatgactgaacataaatcataaaataactgaaaataaactaaaatgttcaagatgcacaaatttaaatgtcctgctcctgtggttgctcctgtgcatgctcattaaggtccaacacctaaacagttggtgaatcttgagagatacgttgctctaactcagatgctggtgcacatggtatggcatcatcaggtatgggtgctggggatggctctgggatctggtctgtacaagttccacctcctgaccatgtgacacct

SEQ ID NO: 246675 - DNA, 398 bp, Glycine max
  unsure (1)..(398): unsure at all n locations
ttcgaaggatttactgatccttcgtttgtttttaactaatggagcaggttaaagagttccatanaagagatggttttgaggtagcaagtgctgacaagatggctaagtcatgcatggtttattgtgaaatgcatctatccctaaggaaaaaaataattacaaaagcttttaatggtagttatagtatctacaaggaaactttttgtaaccaggtctattgcctttntgtttgagtaactggacatgcacgtacaataattgttgttgaagatgacaagggacctgaaagaggaatgccgagcttcaattctgagttacccaattccaattcatggtaaatcttgtctttgcaatagttcttggattacgctctgcatatgtggaanaatcttgttcat

SEQ ID NO: 246676 - DNA, 387 bp, Glycine max
  unsure (1)..(387): unsure at all n locations
tgctaaatggcacctgtaataaaagaacatcaacatttatcctgtaaaaccataatttatagaaaataagaggatttcatacaatgttgttaagcaaaccaaagtgacaaatacgtggaagtgagcacgtagtgtaagaatcacaactttgaaattaaaaatttcaaactgctttgtgaattgatgggggtatgggtttgtgcattaaggaaaactagtaggaattatgccccggctcagaggattataagccactaaaagaagcaattttgcaatcttccaaaggtaaaactaaatttctagcacttagtacctttactacaacaaanagctcanaacttcaaaataaaaggcaaaaagtacacacaatttgttccattgtaatca

SEQ ID NO: 246677 - DNA, 397 bp, Glycine max
  unsure (1)..(397): unsure at all n locations
tgagaagtgaaaatgagaatggggtaaatttggagcaaactctcacctcacacaagtctataacattaatctaaacttgctcaaactggttttatgcctaaaattccaccgaatcaaaatttgactcctcaacacccaatattaccttagaaatggcccttgttttcactttggtcactcatattcctcatttgcacagcctaagctntctcttaagtcctaaatgacatttcaaactaggattaactcactttaacccccaattaccactgaatccagatttagccttccaactctcaaagcctcactctntttccactcataacaccacattctcactttctaaccttaggttaactctaccctttatctctaacnagtttncatcagcaatttc

SEQ ID NO: 246678 - DNA, 346 bp, Glycine max
ctcctctaatgacaataacatcatttttggcactaaattgttgggagtcggaatccatcttctcaattaaatttctggcttcagcaggggtcatgtaatatacccactccttggagcaacgtaatataaccagtcctttgccattgcctctcaagaatgaggaaaagccttcacaaatatgtgatcctcctgtacatatgggggtttcatggtggagcacacaatatggaattctttcacatgtttgtgcgagtcttcacctgcaacgccatgaaactttggaagcaaatggatcagtccagttataacaacatatgggacatcttcatcacggtattggatgcac

SEQ ID NO: 246679 - DNA, 247 bp, Glycine max
  unsure (1)..(247): unsure at all n locations
cactaactaaatcttaatcgtcttacaaaccgatatgaaatctaaccatttagtcctgtctctcgaaatgctcaaagtatctngagagcttttgaaaatatttcaaggggatttggagctttttatagaaaaaataggaatgattgtccgctcgtttatgatgagaatcatgatactgggcaaatacaggctaaaggcccaagtggagaatgacgaacgcctaagttgggaacgacaaagcccccta

SEQ ID NO: 246680 - DNA, 299 bp, Glycine max
agcccctatttgtcaggggcaacttctaccttatgaacgactatcgccgggcaacacgatggggaaggagatacccatcttggccccctgctccacctgataaatccgttcccacatgaactaccccaaccgaacatagttcgccatatcccggcctcactcacacccgtaaaagaatctgttccctttgcagaagatatgggaaacactgaggcgcttgaacagacgttaagagcagtcgacggccttggcaattaccaatcctcagatttggcggatttgtgtctactgctcaacat

SEQ ID NO: 246681 - DNA, 433 bp, Glycine max
  unsure (1)..(433): unsure at all n locations
agagaaaaggggaaccattttttgctgaatcnatcangaaagaagaactaaatcatatggttatgttccatttactctgactacttaacatataaggacaattagactaacagataagtatattggaactattagcctaaaattttctaattgtagtttgggtagaccctacgaaaaaataaatatagaaacatatctggaaattttattttcttttcctagtgtggtttggcaacttgtgatactgatggaaatgacgagtctagcaaactatctatgagattatttgcagctattatgtattactaagaaatatttatgttcttttagcgtacatgaactcatgcaggcatactcatgttgttgaatatctaaaggttccacttcacatgttcttcacaatgccatggacgtaagtcttgtntcatgacat

SEQ ID NO: 246682 - DNA, 323 bp, Glycine max
ctcctctgctgacaaccatatagacctttgcccttccatgcagcaacctggagcaattgagcagcctgaagcttatgctgcaaataattacaatagacctccttatccttagcagcaaaatcaaccacagcagagcaattatgacctctccaacaacaaatacaaccctggatggaggaatcaccctaacctcagatgtttcagcactcagcatcaactacagcagcctgctccttctttccaaaatgctgctggcccaagcagaccatacattccttcaccaatccaacaacagcaacaaccccagaaacagccaacagttg

SEQ ID NO: 246683 - DNA, 321 bp, Glycine max
tctgcctttcaaagacattttcctgatccgacgtcggatctctgaaagagcctgtctgcgcttaagcctctagtgaactttagaggaacctctaatgaagctctagagaagcctctatgaagctctataaaaactacctgaagctgctcggtaaaatgctgccacctacttaaccgtgaatcttttgaaactggtttgcccttccaagacactttcatgatctgccgcgctaaacttcgttccgaagctttctattaacacttcaccttgtttcggtacatagcaaaactatttcttttctttttttcaagcattctaagt

SEQ ID NO: 246684 - DNA, 284 bp, Glycine max
  unsure (1)..(284): unsure at all n locations
ccttttgtagaaaagcctctttacaaaccacatctcttctttcgtgcttatatagagttgaattcttgtcttccaaagtttctttcttctttgaccacgggccatgttttgaagaaaatgtgagccaaatattctaagatgactcacaattggcttccttcctgtccaaatgtccttaggaaacttctccttcaatttcttagttgggcactcgttcaacaaataggcaactattgagatagctntacccctacaatgattgtggtaaggccttctctttcaac

SEQ ID NO: 246685 - DNA, 417 bp, Glycine max
  unsure (1)..(417): unsure at all n locations
atatgcatgtgaattaggatgcatcaacaagaatcaagccaaggctattgtgcaagcaatcaatggggaaaaacacaccacatgattatgatgatggatggctcaaattctcacaaaggtaaactcatcactttcaaattgagctttcaaaactatcatgacatgtagagaagaatcaaggatttcaagtcacaaaatgtcaagaacttttattttcaaaaaaattacccatttcttgaacatatcctataattcaaagaaaaacatgcaaattcgtacgagcacacaaaattgacccaaaatattaaactaaaaatccgacgaaactaacaacattaacaaattaacacaactaacaaattaacaaaaccaacacaactagcanaatcaaagaacacttccccctctcatacttaa

SEQ ID NO: 246686 - DNA, 376 bp, Glycine max
ccacaatcctaagaaggggggttgaattaagatattccaaacttttcttctaattaaaaaatctatcttacttttacttaagatatgaattcccttaatgacaatcttcttaaatattaattcaaatgaagcaacttgaattatgaatataaagcactaataaataaaggagattaagggaagagaaaatgcaaactcagttttatactggttcggccacacccttgtgcctacgtgcagtccccaagcaacccgcttgagagttccactaacttggaaattccttttacaagttctaaacacacaaggacaacccttcctttggtttagagattctttcaacaagagactacagtctcttatcccttgagaatga

SEQ ID NO: 246687 - DNA, 378 bp, Glycine max
gagaatgtcgatccttaccctcggaagcaaaaaagaatagaagggaaatttccaatcaaaaaagaatagaaggaaaatttccaatgaaagcaaaaaaagaaaagaaggaaaattccccaatcaaagagtgggagaaagcaaaaagaaaagaaaggaaattcccaatcaaagaatgggagaaagtcaaaaaggaagaagaagaaggaaagacagctcctgatcagggatcgaaagaaaaacagaagaaatgtgcagagaggtctttagaccggacaatatctgaacaatacagaattgcaccaaatgaacaaaaagaaggaaaggaaaccacgacctaaaatggtcttctctctttgaataccaaccaaaatcccgtgc

SEQ ID NO: 246688 - DNA, 402 bp, Glycine max
  unsure (1)..(402): unsure at all n locations
ggaatgtgctcatgtatgtgggtcagttttggtttgttttcttgcttgattgggttgaattgaaggtttgtatgagatggccctaggcctataatgcattttgaagcaatggggcatgccacattgtccccgttctcttgctatttatgcctaaacgcgcgcccaccaagtgttcggtgaaatgcctcaatggcatttgcgcatgattttgtaggaaaacaacctatgggataatttggtttgtgcatgttttctatttttttgaacatgtgttcagtttcgtgagggctagaataattaccccacatataccctangcctagtaaccaaagctttgtttgatgcaagaaaacacaagagtgtgtgcatattgtgtgaagctaccctttttggtagcaatca

SEQ ID NO: 246689 - DNA, 225 bp, Glycine max
cccggccctcggggagagagatatgcgacacggccataaatcttggctggcttggaaggccgcagaatatctgactttctacgagttttttcccaacttgtatcaactgtctgagatgctcagatgtctttcctcacaaaaatatcatacacttacttacttgaaacacatgctagcctgtaggtgctgaaaagcaccaaatagcaagagcgctgaaatgaacat

SEQ ID NO: 246690 - DNA, 387 bp, Glycine max
ttatctagctccgcgtaagtattattgttgttggagtagcctatggatttcttctacgaatgattggcaaccttagtagatgtacacgttggaaaagtgagaacattatccacaggcaagtgttgctatgtgtacgttcattaatttctacttcactttgttaccttctcctacttggtttgttttatgattttggacaaacatttctagcaggattttcaacaatagagtcttataaggcaattcgtccttgtcatatggggagggttctaatcataggtattgattaatattggttgatctgctttattactttcctttgtcagagatgttgctgatatcatttgatctgtttgctattggaacaaagtgccatgtggatatctg

SEQ ID NO: 246691 - DNA, 301 bp, Glycine max
  unsure (1)..(301): unsure at all n locations
acnaaacaatccgaggaagaatctgatgaagatgaactcaccttcatttcatgaaagatttgcaaaatgtggaaaaacaaagggagatccaaatggaagaactcctcaaaaagagtactcaaggataagaaagataaatacatccttcatagtatgctatggatgcaagaaacttggacacttcaaatctgaatgcccagagttggagaagtcactatacaagaagaaaaaagaaaaaaaaaggtcttatgagcacataggaagatctagatgacactttgtctaatgaagagagtgaata

SEQ ID NO: 246692 - DNA, 438 bp, Glycine max
  unsure (1)..(438): unsure at all n locations
tgacgctctgagaccactttttggacatgtggcccaagatatcttaagaaggggggttgaattaagatattgcaaactatttccccaattaaaattctatttcaatttcaatgcaagttgcaagttcccttaaaaaaaactcttaaataatgattcanaaagaacaatctgaatataaatataaagcaataataaataaacgagtttaagggaagagaaagtgcaaacttagatttatactggttcggccacacccttgtgcctacgtccagtccccaagcaacccgcttgagagttccactatcttgtaaaatccttttacaagttctgaacacacaaggacaatccttcctttgtgttcagaattctttacaacaagagaccctcggtctcttaatcccctntgagaatttagaaagaagagaagaataaatctct

SEQ ID NO: 246693 - DNA, 405 bp, Glycine max
  unsure (1)..(405): unsure at all n locations
acaggttcaggtgcaggtgctgctactggtggaggcacttcaatttgcttgccagacctcaaggtgatgacactcacattttttgggttctgcacagtttgtgaaggcaatttgtcagaattttgggactgagccttgttcaactgagtagccatctgccccatctgatttgtccgactctgaatggaggctcttgtctcttgctgaaattggatattttggatggtcatttgcctcactaactcctctaaggaaggttgagaaggggcctcagttgcttggtgtttttgttgttgctgctgttgctgcattggaggaggaacatatggcctgctcggaccaacatcactctggaaaggagggacaggctattgctgttatggaggactngcccatgttagattt

SEQ ID NO: 246694 - DNA, 252 bp, Glycine max
tccataagcccacacggagtttaccatatatgttacactcccacagtaggttgatgagccttctacaagtttcaacttgcacgcctagtgctatacgatgtcatccataatcgcatgagtggccagactatacactatatctcatacctcatatacaatcatcaatcggtaaaaattaatgcatttgatcaacaaccaagaactgcgtcgacttatcgtgcctatgagattcgacatatcattaattgagga

SEQ ID NO: 246695 - DNA, 363 bp, Glycine max
aaacttgttgaattcctattatactcatccaaatgacaatcccgatgtggcgattgttgctcatgttctcagtggtggaaattaccactcatggtcgcgtgctatgctccttgctttgaagaacaagacaaaggtcacatctgtggatggttctttgcctcgtcctgctcttaatgatcccaattttactctatgggatcattgtaataccttggtggttcatggctttatcattctcttgatccatacatctctgcaaccatcatgtggatggagaacgcatcggatatctagaatactctcaggcgaacgtattatcaaggagatgtattctgaatcagcgacttacaagaagaaattatc

SEQ ID NO: 246696 - DNA, 392 bp, Glycine max
  unsure (1)..(392): unsure at all n locations
ttgatgcaaaaactgcttgcgacgaaattggcattgatattttcattgaaatctatgccaatgaaaaggatgcaaaaccaacagcagcagaaagaatggcgagaataaattttctcaaagagattgaggatcatgaaaataatagcaagtcaacaattgaggataattgcatagcagcaagtgatgagggtgtcatgcaaatcactactccaagaagtattggtaattgtattccttctccctctatatctgagattgatcttgacgaggatttgaaacaatccttatatgatgctganattggaataaatgccaccaaagaaagaattcttcatgaacaaaaagaaggagattcagatgatgaatcaccatctattgtctggtctcatgaa

SEQ ID NO: 246697 - DNA, 174 bp, Glycine max
gacaaatactgaggaaatagatttgccttcactgatactactgcataaatgaatatcactcatcggatttgcttttaaggtcaaactcatcatgagtagtagaaaagctgcacattgtaatagtgtgagtgctttatgtcaatttcaggggaattgtatactgaaacaaggttg

SEQ ID NO: 246698 - DNA, 377 bp, Glycine max
  unsure (1)..(377): unsure at all n locations
taggaattaaaataacttaatggctgaatgctactgaaattgtggcaaccaaaagtcacccccaacaaccatcaagccagccaccatntggtctcccaaaaggctgatgcctaggttgccaatagggcccttattaaaacttgaactaaaccaaactaaagcccttttagttgattaacccaaaccatatttttggtcagccaactttacaaggattgggccattatttagacaaactaaacactctaaaattgagacaaagtggtgccatctagtcctcctccatttgggccatgatacaactcacaaccttggacttttctccttgaaacttgngcttgtaatcaaatagtatggacatcactcgttgaagagct

SEQ ID NO: 246699 - DNA, 410 bp, Glycine max
  unsure (1)..(410): unsure at all n locations
caaaattcagtatcagatcactattagcatgcgatgtcctttgcaggccaatattcctatcaacatgttcagtttccagcatattcataaaatccctttcaggaaacagatctgataactccaggctcttctttgatacacactcatctgagaaaaactccatcatgttatgcttcatagaacccaaaagttccttgccctctataacagattgatattgttcatcaaaattttgagatctgatattttcaaaatatgagtcaacaatgtctaccaaagacaagcacgtgggagttcccaaactttcctcatccacttccaaaataagaaaattgtttttatcagagtgtggctggtgctgaacagaaatatgaccttctagagaatatgcattctcccncatcaagtac

SEQ ID NO: 246700 - DNA, 393 bp, Glycine max
  unsure (1)..(393): unsure at all n locations
gacaatttagagagtgatcccatactttccaatggatttccactgaatttattaatagacagatagagatattctaatgatgaaagtttccaaatgatcttggaaagagcaccaccaatttaagttgtttggaataaacttagcatgtcaatatctttaaaagccccaatctgatctgtcagattgcctgaaangtgtgaactctgatctgcaagtgttgcgagtccatgggatatacaaggagcaagaatttctaaaagttcattaacctgttggttgagtttgagatatgataaacctatnctccttaagttgcagagattagccaaagaagttggaatggttccttcaagtagattatatgacaaatcaagtncaacaacagaagtcaaa

SEQ ID NO: 246701 - DNA, 381 bp, Glycine max
cactggataagcgctgtgtgataatcgttccttcgcgcctaaatgatgtgaaatgcttgctgataataagtatgtgtattgggtaggtagtaaagcactttgccaatatgcatgggcgctggaaatggcatgaaaaatgtttcttaaacgggaaactattgcgagaaattactctctaaaatgtgaacaagtagtggaaaattctgcctttcccctgaatgcgtaattgcttttcatgtgaatacacatcagtacgcgggcgcaccaccaccaccacctcggtaggccgattcggctgagccactgagcatggagcggtatctacaacatttggttcgtcagcaagtctgcaaccaccgtggacaggtacagatacatgag

SEQ ID NO: 246702 - DNA, 391 bp, Glycine max
ttttcatgtgatataatccaccacttctcttatacaaagtgtttcagaagtaatcaaaaacactttaatcgattacgttgaggatctaaccgattacattgttcttgaaagttttctacgttttgggaaaaatactttaatcgattgaaatgataatataattggctactttgttgaaataattgattacattgtatatttaattgattacaggtgattataattgttttctctataaatagccaccttgtgttctcacttcatagtacaagttcatgaagtgcgaaattatgagctaaaataactgacagaagagaagaaaagtgcttacacatagtaactcacaacttctaatctttgattatgaagatcattttgtgaaaagtgagtt

SEQ ID NO: 246703 - DNA, 362 bp, Glycine max
  unsure (1)..(362): unsure at all n locations
taaacccgacccccctctctccctttctttataagcaactgtcttaacctcccaaatgtaatacgtgatggtcgaattcacttttttatcatctgtttcatcacaacacaagcctttgcagcattgtccttttcacacaaccccttgataagggcagaaaaggtgtgcatgcttggaacaaactgatttgattcatatacttccatattctcagagccatctccagttcatttttctcacagaacattttaatcatcattgtatatgtgtcagcatccggttcacacaacttgatcatccggcagaagactcgganagctctatcagtctgtccttggccaatcatactgcttataataaca

SEQ ID NO: 246704 - DNA, 406 bp, Glycine max
gtgttcgcacttccagaccattacaactgtcgcatatggatctatttggactcactagaatgcttaattttgaacgaaagaaatatggatttgtcatagttgatgactattcaagatatacattggtattcttccttgcacataaacatcagtcttccaaggtctttgaaatattctataaaagagtttaaaatgaaaaaaaaacgtttttcatttcttctattaaaagtaaccatggaattgagtttgagaatggctaatttaaatcattccacgaaaagaatggtatttctcacaacttttctttgccgagaacaccccaaccaaatgggatagttgaaaagaaacatagaactctacaagacatggctaagactatgctatgtaaaaactcacttcctaaaca

SEQ ID NO: 246705 - DNA, 391 bp, Glycine max
  unsure (1)..(391): unsure at all n locations
taaagaatgcggtcatcggagcattaaatgcatgtacttcttcattagggaaaatcactcttcttcgctggcgtgtttaacacttcaagaggaaactactttcttttgcgtcagaacaagtctatgcagcagagtgttcctttcgatggtgattgagaacattcagagtctagcttcatttattcttcataggattcgacagatcctaagagaacgtctttgtaaaaatatatcacagacacacaatattaaatgaagtatttaatattgtatcanatcataatttcatcttgctcatcgttgaagcattagacgcatactcgcaaaacatgttctgataggatataagatgcagcttttaacccttgtatttggtcacatccaatcataa

SEQ ID NO: 246706 - DNA, 337 bp, Glycine max
acgtagtagtgttaggttgagtttctgttaatacttagttctgttaggttagttgttcgttagactagaattagggttttattgtggatacaatgtacttgttttgattagggtagatagctaatagggacctaactggaggggtgagaagcccctgctttttctataaatcacgatgagcgtgctaagcgccttgctacgttaagtgagttcatcgtttctgttgaacatctgaatttccatatgaactcactaagcacagctctgtcccactaagcgcgttcatcttctctggttgaaagttcaattgcttataaactcgctaagccagtgctgt

SEQ ID NO: 246707 - DNA, 396 bp, Glycine max
  unsure (1)..(396): unsure at all n locations
aacctacacataaacattcattntctttttgtaaaaaactctctataaatgtctatataactccgcaaaataacttgattatcttaagagaaatgactaagggctaagattgtatatttgtttgtaagacaattaagagccggtcattgtgcacacaaacaacaaatgtgtttgatttatataagggctaataagattgtatattcgtgtgtaagaagattaaaagctagccattgtacaaacaaacaacaaattcatttgatttatatagagtcaacagtggctttgtaggacaaaaatatcgagttttaacaaagttggggtagagtttgtcttgtgtagtaaagtgtggtcgtgacaaaatactcataactntgaanaagttattgaaacttg

SEQ ID NO: 246708 - DNA, 324 bp, Glycine max
tgacaacaacatcaattgcctactacaaactacagacgcacgtgggtttctaggtatgttgggttctgttgattgcatccattgggaatggaaaaattgtccagttgcatggcaagggaaatatcatagaggtgatcatcggaaacccacaataatacttgaagccatcacctcacaagacttgcggatctgttgtgcatattttggagttttacgtttgaacaatgacattgatgtgttaaatcaatcttttgtgtttaatgatgttttgcaaggtccagctctcccagtgcacattacaattaatgaaatcacacacagtat

SEQ ID NO: 246709 - DNA, 397 bp, Glycine max
  unsure (1)..(397): unsure at all n locations
gattgatgaanagatggagtaaaatgaatttcaagtatattactttctattatttggattaaaaattaaagagtacgtggaatacaatattggaaaggaatgccattcgatcatcttgagtattttttttcttactgcgtaccacaatcggagtgtatccgatggaacgtgaacttttttttctttattatattgtaaatgtattatttatcccttccttcacctaaatacaacaaaaacaacaagagccaaagggagtacaggctacagagcttggttatgccttgctggttccatncgtgctgaacacagtgggtgaattttttgtgaagagagcagtaccactgtaccagtaatgcagtaacaaatctagagctcgtgtcatgcctgcatcctg

SEQ ID NO: 246710 - DNA, 393 bp, Glycine max
  unsure (1)..(393): unsure at all n locations
ccggaagctngganacttaggtggaacagcaacgcttatccgtcgtcccttgtgaggattcagggagtttataactgataaactgcacgtatgaacactacaaagttttataaagaaaaaaagataaagagagagagagagagagagaaatagcatggcgctattagtatagaagacaattgaaaattagttgacctggtgtggcatggattcggtgaacaagaaggaggggcacggaagcaagcggcagagacatcaaacgttgtcgttgctgtcattgctttcatcgtcgctgtttattgtctaattggtgttgctgagattcttacttcttagaatgatatatactacccaatgcaaacgagtggttagctttaatattgatgatcgagt

SEQ ID NO: 246711 - DNA, 299 bp, Glycine max
cctttttttagaagggtcaacatctataccattctaagaccccactcccttaacttttatcaattatgaggagccatgcgactattaatttgcctaacttccgtggagcgataaaatctgccacaggtcggtcaacccatactgtatttatatcaagctcattcgatttcataaagaagtacatgaaaatccctttgaacattattttattttcacacgaactgtgtgttctaaactaacagaagctacacaatcgaaatttatgactgtgactcccaataatatgtggatgccacatg

SEQ ID NO: 246712 - DNA, 375 bp, Glycine max
  unsure (1)..(375): unsure at all n locations
agacttagccttccaactctcacagcctcactctttttccactcataacaccacattctcactttccaaccctaggctaactctatatttcatctctaacagttttccatgggcaatttcagcatacaaacatcacaaacatcatcacaaaaccctaaaacagaatgggtatgtctaactcacccaaacatggcaatttcaacgagctttcaacaaaagtcttcacgataatcatcacacagcagaaacctagcaagactactcatcatatctctccacaccctatccccacganaatcaaaggagaaagaagtccaccccaacctggattttgaagtcccactcgtagccacgcacttcacgactccgaaaatg

SEQ ID NO: 246713 - DNA, 358 bp, Glycine max
  unsure (1)..(358): unsure at all n locations
cgccatccactatggaataagccatggaagaagagcttaccaccaagatgagccttggataagaaagcttggaacgatgcttcaatggaggaaaagatagagggagagaaagagagaggggggagcacgaaattgaatgaataaaagatggggagaagtacaactttgaagtgtgtctcataagactctcattcatcaaagntacaacaagtgttacacatgcttctatttatagactatgtagcttccttgagaagcattcttgagaacacatccttgagaagcttctttgagaaaacttccttgagatgctagagcttagctacacacactcctctcataactaagctcaccttct

SEQ ID NO: 246714 - DNA, 233 bp, Glycine max
agggctcctttcttttcttgcttcgtgattcagggaaaataccataagacccatgactaagatcacctctaaacccacagcacttataaggtgaaacatctacccatatattcttaagtattacagaatgcacttgtgatgcttaattgttatttagttccaactgtatatacttacaccccatataatttgaataccacacaagttttaatgtgtaagtcagaaactgcttt

SEQ ID NO: 246715 - DNA, 415 bp, Glycine max
  unsure (1)..(415): unsure at all n locations
actccgaaagtgaccttcaagagaatattccatggaagccttctattgtctttcatactattttttttcttagattcaaacattagttattcaaatgtaagagaggcaaatagaatatgaataaaatggtacatgagaacttcccttttttgttatacaatctttgagactggacgcaccagtttaccttatggcaacgtgttatattgntatgcacaagagtgggcactcagtgaatatagtatgttggacgttaggttaaaacaaagcaaactttccatagatgtgaagaatattcatttaacaaaataatcctgaccacttgtcaaaaaccaattaaaatatcaataatctatccttatgttatacatcaaaatctatggtggatgagacgcatggtcgtcataccaaacac

SEQ ID NO: 246716 - DNA, 359 bp, Glycine max
ctctcaaccccagataccatatgcaatgtagcaccccctggaacaatatcttcagtacgcttttctaacatctatttatgaacttagcttgcaagaatctcttaattcttgcctagtacgctcatttcaaatcaagtctgcacgaatgtgatcaagatcaaaagcttcgcaaaattcaggccagttacatagaagtccaccagatcctacaggggtgttcttcacaacaacttgggcgggagcaagaatgcctgcattctgcaaaccaactgcattgctgtcacgatcaactgtaattgaaaactcagatcctcgagcttcatttgagtttgctgataccgcaatagctgaatccacaa

SEQ ID NO: 246717 - DNA, 404 bp, Glycine max
ctgaaatgctactacagattaatgaacaagtgacgctgattctagagaagaaaatagcatctcatgataggcataagagctactttgatttaatgaggaagcccctacattctcacgaaggagaacatgtgcttttgaaggtttctcccttaaccggagtcggaagggctcttaaagctaagaagttgacacccaagtatctaggtccatatcaaattttgaagaagattgggcctgtagcttatcatatggccttacctccgagtttatcgaatatgcatcctgtagtccatgtctctcaactgagacggtacaacccatattcatcacatatacttgcattggacgaggtacatgtgaaggataacctcacctatagagcacaacctcatgaaatcactgac

SEQ ID NO: 246718 - DNA, 373 bp, Glycine max
  unsure (1)..(373): unsure at all n locations
cgcagatatcggaggaatgggggctgaattaagatatcacacacttttcctaattaaaaaattctattctgattctaacccacatcccaagattcctttcaaaatgaactcctaaataattatgcaaattaatcttactgaatagaaataataagcaataaacaataaaagagttntaagggaagagagattgcaaactcagatttatactggtttggccacacccttgtgcctatgtctagttcccaagcaacccgcttgagagtttactatcttgcaaatcacntacaagttctgaanacacaagacaacccttcctttgtgttagatttcttacaacaagagactctcggtctcttaatcccttttagaa

SEQ ID NO: 246719 - DNA, 318 bp, Glycine max
taactcgcctgtgctttttctttcatgccatatgtagcaaagtcgttgatcctgtcaagtctgatgagctacaaaatgaagccgcaattatactgagccacgtggagatgtattttcccccggctttccttgacatcaagattcacttgagtgtgcatctactcagagaaatcaaatgttgtggtcctgcttatttgcggggatgtaccggctgagcgaacatgaagatttaaaaaggttacaaaacatctgtatcatccagaagcattatattgagaggacattgcaaacaagccttgaatttgttcaaatacttga

SEQ ID NO: 246720 - DNA, 344 bp, Glycine max
gagtacgacagtcaccgctctatgagccctgtacaccagcagcgcttcgaagccatcaagggatggtcgtttctccgggagcgacgcgtccagctcacggacgacgagtatactgattttcaagaagaaataaggcgccggccatcggcaccactggttactcctatggccaagcctgatccagaaatagtccttgagttttatgccaatgcttggccaacagaggagggcgtgcgtgacatgagatcctgcgctacgggtcagtggatcccgttccatgctgacgctatcacacgtctcctgagatatccgatggagttggaagagggccaccaatgctagta

SEQ ID NO: 246721 - DNA, 404 bp, Glycine max
agatatcttaagaaggggggttgaattaagatattccaaactgtttcccctaattaaaaatctatttcactttttactcaagttatgaattcccttaatgacaatcttcttaaatattaattcaaatgaagcaacttgaatatgaatataaagcaataataaataaaggagattaagggaagagaaaatgcaaactcagttttatactggttcggccacacccttgtgcctacgtccagtccccaagcaacccgcttgagagttccactatcttgtaaatttcttttacaagttctaaacacacaaggacaatccttcctttgtgtttagagatcctttacaacaagagactcacagtctcttaatcccttagagaatgagaagaagaagaggaacaaatctct

SEQ ID NO: 246722 - DNA, 358 bp, Glycine max
  unsure (1)..(358): unsure at all n locations
tcctgagaggttacttcctcgctgacatcttctgtcttgaatggaattgccatgacaggtttattgttactgtctttgttattcggtacttgatattgcgttgcgggaggtaattccgattggattaactcaccatccttaacttgccaatttgctatgacatttgttgttggatcacctatgatgtcttgtttccaacggtaatctatatcatttctgatggcataagcatgaaaccaatcaaagaanacgacattaatcttgactctttcaacaaattcgcacaacttgtcttggatctgttttctgttcgtaccctagtaaagctggaaaaaccatcttctttgacgttcattct

SEQ ID NO: 246723 - DNA, 340 bp, Glycine max
  unsure (1)..(340): unsure at all n locations
tttacaatcctaccaaaaagaaacataaattgggaaaaatatataaatttttgaaaacttttctatacaaaagtttgtcgtaagagacgactaacaaactcccccaaatttacagttttgcttgtcctcaagcaaagaaagaacaattcacttgtcctcaagtgacaaactcacagtggttattcacaaggtatttattccaaagaattcaatcacatgacatgaatggcatacaatgtntcaatcaacagcttctcccaagacatgcaacttttcaaagaaatgaacatgattattaagcatcacagctgaaataagctagctagaatgataggtatca

SEQ ID NO: 246724 - DNA, 335 bp, Glycine max
  unsure (1)..(335): unsure at all n locations
aacaagatccggtggagattaatttatctcagcctcatttgtcacaagatagtgacatggagttgatggtaaatatttgtcacaacaaagtagttctatctcaacctaatttgttgctgcactccatttttatatattacaattattcatgtttggcatttacatgtaggtccctgcaactattgttccaccaataacaaggaataagctagccataacaagagccaaacaaaggaaggttgctgataaagatgatgcagaaaactgaagaagcatcttttgttgcattntgaaggttgctgaaggttgctgaagacccattttttgttgcgcat

SEQ ID NO: 246725 - DNA, 299 bp, Glycine max
  unsure (1)..(299): unsure at all n locations
tctagtcaaggtcttagagaccatacaagtttcctaacgatttctaattatgtgggccattaagtctatcatatgctgacaatagccgagaagcccatgaatctcttcgggggcggagtatgtgtctgccatcgccttggccttggctaacaatcggggaagttcttgactcccgttcaaggtaagagcaaaccgatccatccacatggttgcctcttggtgtaaagagtcgatcacccttcctctagcctctntttccgcgtatacttgggcatattcgtcccgcatcctatgctcgt

SEQ ID NO: 246726 - DNA, 400 bp, Glycine max
  unsure (1)..(400): unsure at all n locations
tgaaagagcacaacaagacttttgtaaattggtttaaagatacaatctttggtgaggataatgcttctgcaatgttaaggaagttaccagatgggcctaaaataaatattataacttggcaaggatacgatatcaacaagtatttattctacacgaaatcacaagacgacaagagtacgctacaaaacagtagtgtaagtctaagggttgaatctcaacactttgctattgtacataatgacaaaccccgtgtagcttccatgccttactttgggtcattgaagaaatctgggaggttaattatgtaaaattcagtgtatgtgttttcaatcgtaagtgggtcgataataatatgggtgtgcgaatcgatgatntcnngatcacacacacacacacatgc

SEQ ID NO: 246727 - DNA, 367 bp, Glycine max
  unsure (1)..(367): unsure at all n locations
ggggtgatataacacacccgtgcatgcacacatgcacgtgtatgcacacacatgcacgtgcatgcaaacacattnttatttttacataattatntaaaaggaattaattacactttcggtcttcctattattgttaaaatttgattttggtctctttactttcttgtggaaatttaacctctntactattttaattctgatattttagttcatttattaaatttttaaattgatgtttaatattgaacaaaaatgttgatgtgacactgcatgacagtctcaaattaacatttcattaaacattggatgtcaagttaacaagttgacaaaaatttcacaattaaaatagtaaaggaccaaattcatg

SEQ ID NO: 246728 - DNA, 309 bp, Glycine max
  unsure (1)..(309): unsure at all n locations
tatcgagaagcttgaaatgggatacccaaactctgaacaaaatcaaacgacaataactctntactcggatgtcttattgagtcccataatctatcggaacgctcgaaatagaataccgaagctttgagcaaattcaaacgacaataacctttttactcggaagtcggattgagtcccgtatatatccagacgctcgaaatcgaatgttgaagttctgagcaaattcaaacgacaataacctttttacttagatgtcggatagagccccgatatatattgagacgctcgaaatggaataccgaagctctg

SEQ ID NO: 246729 - DNA, 355 bp, Glycine max
aaagctatgcggtgaatttgtcaaactcggtttcaatttcagcctctcgatataatacaggacttcatgagacacccgaataaaataggtattgccgtttgaatttgcttaaagctcaacattcaatttcaagcgtccgatatattacaggactcaatcggatagcctagcaaaaagttattgtctgtttaattcgctcagagcttcagtgttcaatttcgagcgtctcgacatatttcgggactcactcagacatccaagaaaaaacgtattgttgcttgaatttgctcaaagctacggtgttcatttcgagcatctcgacttatcacgggacactattatacatccgaataac

SEQ ID NO: 246730 - DNA, 412 bp, Glycine max
gactcaatatgaaaaaaattatacacaagccacttttgtggtttctactaattttttttttcactctatacatgcattttgcattattttaggttacgttagatagtttcattttatgtttattctgaagtttgatttatattgccattcataaagaatgtatattttattttcaaaataaatcatacaaaacaattggcaccatgcaacaacaaaagttgttttcactatgtttgtggtcaacaaaaacatgttttcctaaagggtatttttgtaaaataatgtaaggataatgaccattctggttttcaaatatgacaatcgatgataatttaatcccttacatacgcaaaattatgatttcatccctaaatatgcaaaaagtatgacaactaaatcgtctcatacaact

SEQ ID NO: 246731 - DNA, 365 bp, Glycine max
gaacacttcatgataacaaagatgatgatctccagaatcaaaggatgagttcaagatgttcaagattgaatcaagaacacttcaggttcaagaggaaatttcgattcaagaatcaagaatcaagattcaagaatcaagattcaaggttcaagcttccaagaatctagatcaagattcaagatcaagattcacgattcaagatcaagattcacgaatcaagagaagaattaatcaagataagtatgaaattttttttttgaaaactgagtagcacatggatttttctcaaaacatgttcaccacagagtttttactctctgataatcgattaccagattgttgtaatcgattactactagcaaaat

SEQ ID NO: 246732 - DNA, 251 bp, Glycine max
cgcacctatcactctaatctgcttcttaaatccttgtcttattattcgttccttcgatcacattaaatcacctaatttcattgcactatacgattcagaaaatatatacctacaaggaataatcccatttttgtaaggggctctgccataaataaataaataaattacctccctgggcgactgagctcgctcggcgagcgtgtctgacttggcttaaaaaaggggtgaaacatcttcccccatttcttccc

SEQ ID NO: 246733 - DNA, 385 bp, Glycine max
actggataaaaccttcttttaaccgaacgctcttgacttgatcccatgttttactaaagtgaaataaaatctaatgcgaatcaaaactccgacatctatcatgggtggaatggatgaatgcatgacagaatgcataggacacaactgtaatttaagaatgcgggggcccaagacattgtctcctttttagacacaacgtctaggggtagcaaagtgccccaacgtatgtatttaaaacggtgacccggaccttccattgatttgtctatagaggggatcaagacagaacccctatgcgatgcatattcaataggcgcactagcatgacaatatccactgaacatagcaaaagggtatttgatttcatgcatggcactgtgaaaat

SEQ ID NO: 246734 - DNA, 294 bp, Glycine max
tgactttggtttacgagccccaggaaagtgagtaatcatgagtcattatcccaaaattttcttacttaactcaaatattcacacatcttctttcattgattacgtcaatttatgaccatagaagggaaaagagagtgaacatggtaaaagagtactccaagcagtttattgcgatacctttgcacactatacaaattagggctaggataaataatatatattttatgaacaacattttctttgtattagtttgctaaaactatattcactggaggattatcttatacacatgta

SEQ ID NO: 246735 - DNA, 302 bp, Glycine max
aatacaaaggaaactcatttacaaaaaatgcccaatcatccaactaagaccttatcttaaaagatctattctcgaaacttttaaatgagaccgtgattagcatcaagattcttctttggggttatatatttggtatttagacactctaatttatttctatataaatatttattagacaattttgtttcatgcaagacaatatttgtgaaggactttaatatatctttattcctaataaattttttaaatttttttatccttaatgaaattgtagaaatttatgctgattttttgaaaaaatt

SEQ ID NO: 246736 - DNA, 419 bp, Glycine max
atcaaaacgcatcctctagacgaggattaaaggacattcataaatgaagttgtcaacttttgctacaaggtcatgccattccgcctaaaaaacataggcacgacataccaacgactaatggactgagtcttcaaacaacagatcaaacaaaacatcgaggtatatgtggatgacatggttgtcaagtctcaaagcataccccaacatgtggcaatcctggaagaagtctttggggaactatgcaaatacgacatgcacctcaaccctgaaaaatgtattttcagggtatgcgaaggcaagttcctcagcttcatgatcacacaccaagggatcgaagtcaaccccgacaaatacactgccatactagagatgcacaacccaaccaacatacaagaaagttagaatctcaatggtaagct

SEQ ID NO: 246737 - DNA, 381 bp, Glycine max
  unsure (1)..(381): unsure at all n locations
tttggctataatattatgacatttgaataatttagtatttcttttatttgcatggtatgattgaacaatgataaattatgttatatgcctatggggttnttatatanttgatctattcatggttcttgcttcatgattggtttatattctttaatgaatgtcttgtgaatgattagtagtgtatgtatgtttttttttacttgttacacactttggctttttgttgatgccaaagggggagagaaatagggattaaatcaagaactcacataagtaattaacttaatttcaagtgaagcttaaactaaaaaaaaggggggagaatatggaaaattaagtgagtgatcaattatgaaaaaatgtgtatatgtgtntcttgat

SEQ ID NO: 246738 - DNA, 418 bp, Glycine max
tgacgatcagccgctgaagatattaaggaagaacatgaccactttacctcagacatggagtgttctttccttctctaacctgattcctacctcccacacatctgatatcacattggacagagccaagttaatttatggcatcattatgaagatggatatgaatgtggggtacctcatctcccactagatctctcttactgcacaacatgatacatctagacttggattccctgccttgatcacagctctatgcaaggccagaggagtccaatcagattctagatccttggagagcttaagccctgccattaactcggcatatattaagaagaactattggaatttagataatccaacagtggcatttagagggccaaggaatgccaagagtaagagatcagacgtcctcactacttca

SEQ ID NO: 246739 - DNA, 316 bp, Glycine max
ttttttttttacacacaatggactactctttaagaccggcttaggaaaggaaaaacaacctagctagttcttagggactaatatggaatgaggacaggttgaactcttctataggcctaatgactatccaacttgtatagagtggacacaactataagaagcctcttaaaatctatggcttactctatccaagaaggaccacccatggaatttagggttgcccttaaaactaggaaatagggaagacataaaaatcaccctaaatattccagaaagatacatattaatgctcaatgttggagagacatgctctatg

SEQ ID NO: 246740 - DNA, 353 bp, Glycine max
aactcaccttagactgcaatttccactaactccaaattttgcttttctaaccctcaaaatctcacacttttccacttacaacactaccattctcacatttaaccgtaagttaactcttcccatcatctctaccagttttctatcaacatttcaagcatacatatatcacaaagcatcattattaaaccctaaattagcatgggtagttctgctcacatcaaacatgtcaagtttagcatgatttcaacaaattccttcacaaggcaataacttagtagaactacccattatagctcccaaaaacccaatacccacaaaattcaagtgagaagaagtccacccttacctgaaat

SEQ ID NO: 246741 - DNA, 413 bp, Glycine max
  unsure (1)..(413): unsure at all n locations
cgtgtgctcgaagcttccattcccgagagcatttcttatttaagcatttcagcctttgctttcatgtagcttaggaaaaacgccatttcttcttctttctctntcaaatccatttctaacatcccaagcactttatccatcacccacagccaccattagccaccataaaccatcgttgttctccattgaaaccccacaccgagaggaacccttcaaccaaagcggaatcttccaacttagcttgcggtttcggtagagaacaaaaccctaatctgacctttcgttntctttcgaggtaaccatggttctacacttgtttctgtagaagcanagcttcaagcaaggcttcatggtgaatgtgattcanaggtggtttgatgaatacaatgatgacaaccaaagatgatgacaaa

SEQ ID NO: 246742 - DNA, 344 bp, Glycine max
  unsure (1)..(344): unsure at all n locations
gagagcaacttggancactagaggccctcgcttaagcccaagccttaattagggcttgagtgaggtaaatatgatatttgttcatgactgtacgtacatacaagcatagtagcacacacccacccacaaaacaaaccacagacgaaaagataaattgtgattccaatgagatgggtgacatcatatcaaatggttatggtaagcataccttggtgtaatgtctgcaaccctgtgaacctttagtaacaattaaaagcttgagatttgggggaaaaagtttcttaaaaactacattatctgtctatggatcaccagacaatgttcttantcttctaaaagtggaa

SEQ ID NO: 246743 - DNA, 411 bp, Glycine max
  unsure (1)..(411): unsure at all n locations
gaacgaagacttgaagcggaaggattcttatgctggtgtcattctttttctctctttctgtttagggcaattttttatcttgtcaactgcaatcatgttatacctcttggaatagacccagggattagttgctgatggcgggcattcaagttttgggaatttagggctttgaaattctctcagttttagcacaatgttcgttatgatgttgtagctaaatggtgaactgaactccccttgacattccttattgaaccttagagttatcaataatgttggctgtgaagatagaaacaggatgaggtcacatgtttagaacgaagaatgtgaaaggctaagagggagaatggtgatagggaatatgttctttatganactattgaacgatatatatctgcatgaaattgagtg

SEQ ID NO: 246744 - DNA, 351 bp, Glycine max
agtctaccacgccacgacatacaatcccgacagtatgctcaattacgggaaaaagaagctagaggaagggtgatcgactctttacaccaagaggcaaccatgtggatggatccgtttgctcttaccttgaacgggagtcaagaacttccccgcatgttagccaaagccaacgcgatggcagacacctactccgcccccgaagagattcatgggcttctcggctatcgtcagcatatgatagacttaatggcccacataattagaaatcgttaagaaacttgtatggtctctcacacctcgactagatacgactctctttttaaataaaatgagttggtccatgttctactc

SEQ ID NO: 246745 - DNA, 371 bp, Glycine max
  unsure (1)..(371): unsure at all n locations
tgagagaaagaatgggatgtagtccctgccgccatangaatgtgaacaacattactcttcattggtttggtgggccattttttttaacaatgaggtttgcaagtaggtacctcttctttggtctgacaaggtgatcgaggccgtacccgaatcatataaacatgaaaatgcagtaactaggaagtgatcctaggtcgtttcccaacgagcagtgacaagccaaatgttcataatatacttgcagtaacagtaacgatggggggggtttggttgtttggtaattaaagagcagaacaaataaaatggaatacgaaactactaatattaaaaacgggttgtttcctctgattcagaagccactctcttattct

SEQ ID NO: 246746 - DNA, 430 bp, Glycine max
  unsure (1)..(430): unsure at all n locations
agcttgcacatgagttctttagatatgatttatttactngggnttagtttaagactacatgtgcttgttaattactgtgtgcaatattgtattgtcagtgtaacagtttgttgctactcattgaattataacatcactattgtatgactatataaaatcaactgatgttttgatgcagcaagatcattcaaccacgaggtttcagctttacactgaatgcatgtatacttcatgcaatgtttatacttattgtcttaagcacgtgcggtgtaagtcaaaggtagtgtggctttgtattaaatcctttcttatagtaaactgtatagcattgtaatggtgtagggttttattcttagtcatgataatcaacttctgatgctattatctgcatggttttatcaattagcaattgtgatattttaaaaatggt

SEQ ID NO: 246747 - DNA, 436 bp, Glycine max
gctattcgattcattctatgtacccgcggtggttcacattttggttcatgtatatttattctcgcttcatttattatttatacccccttttgacgtgcttaagccattttatttaagtcatttctcgcttaacctaaaaataaaataaatttccaccgatcgtttgaattatattattcgttaactttggttgaaatgaattccgaccgatcggtcgtgccgcaaccacgttggaaaccgaaaaaagaggtaaataataatataaataaaaaaataaaatacccttcagtaaaataaagtgaagaatcaattggacgttttctctttgggatttctcattcttaatcgaattgactaataactataagtgaactaaggctaaaatcaactcgcctagttaagctcgtccacaaaaataggtgtgtgaaagttatta

SEQ ID NO: 246748 - DNA, 437 bp, Glycine max
agcttaacatcagaccacttccaggtgctggatctactccacatggatttgatggggcctatgcaggttgaaagccttggaggaaagaggtatgcctatgttgttgtggatgatttctccagatttacctgggtcaactgtatcagagagaaatcagaaacctttgaagtattcaaagagttgagtctaagacttcaaagagaaaaagactgtgtcatcaagagaatcaggagtgaccatggcagagaatttgaaaacagcaggttcactgaattctgcacatctgaaggcatcactcatgagttctctgcagccattacaccacaacagaatgggatagttgagaggaaaaacaggactttgcaagaggctgctagggtcatgcttcatgccaaagaacttccctataatctctggctgaagccatgaacacagca

SEQ ID NO: 246749 - DNA, 414 bp, Glycine max
  unsure (1)..(414): unsure at all n locations
agcttcaattgaattaatcttcactttgttcaagtgttgagacgagagttaaaattagtaggtctcctttttaattctattaatcacaaccattntcttgtagaaaaaatccatccacagaaacgaaatgaaactccaattgaatgacagattcacattgcatatccaatttcgtattaatggtgatgagagagaaagaaaatgaagatgcatccattaaattagccaagaacaaaccggtcccgaggatgagaaacaacagagcacatgacttggtgattttaatttaaatttagttatcctatttattttagtgtactaatttgatctcatgtgattacaactttattattttaggtcaccaactctttagatagacattaactattgattaattatcggcactttgtgatg

SEQ ID NO: 246750 - DNA, 448 bp, Glycine max
  unsure (1)..(448): unsure at all n locations
tcctctgagtgacctgacgcatgcaagcttcaagagatcatccncttgagaacattattggtgatatctcaaaaggggtaacaactagacattctcttaaagatttatgcaataatatggcttttgtgtctatgattgaacctaaaaattaaatgaagccataatagatgatcattggatagttgctatgcaaaaaaaactaaatcaatttgagagaaacaatgtgtgggaactagtagagaaacctgtatactaccccgttataagaacaaaatgggtatttaggaataagttagatgaacatggcatattcattaggaatattgtctgattagttgctaaagggaattttcataaagaaggaatcgattttaagaaacttatgcttagttgcgagagtaaaaatctcttaatgcgttagttaagcattctattatgttactattta

SEQ ID NO: 246751 - DNA, 432 bp, Glycine max
  unsure (1)..(432): unsure at all n locations
catgcaagcctaagaaaactgttcaccccacctgtgaatctgagcgatcacatcacatcacaatgccacacaattacacatccaactatgtcccaaattgttctgtcctgtgtgtctggtattctaggtggacaagatctttttccttaagagattctttttccttatagagatgagggtactttactcagtcagagtctatagagatgcaaccgcagaaccaagcaagagataaatttgttatccctgtaagacacttagcaaaagtgcccctctttatcatcatctattttggcctcattccttnttgttttaaggggtgagacactgacataaggacaaattttgaaatctaggaacaaaacgataatagcgagatcaatgcacaactactttgattggatactctttagcacctaagatcttttaagt

SEQ ID NO: 246752 - DNA, 374 bp, Glycine max
  unsure (1)..(374): unsure at all n locations
gcttgaatgcatttgaacctaagtgacatcttttatttaaattntaaatggtaatttttcagattgagggcccaattggtggctagaaccacggtgttgctagcagagttctatgtcatcactgacaacaccatcatcgtcacccaacgcatcatcaagaagcttccaatagaggccaacttcaggctcacaaattgcaagtccaccctcgcaaagcctccaccctacaccctcgcaaatctggttgtcgatgtagaggcatccatcggaggaagagacagtggtgcacagtgtcagggttgagccaatagaggaggtggaaggaccgacttgatgaggaggaagtcattgtcggagtcctatatttggaggga

SEQ ID NO: 246753 - DNA, 352 bp, Glycine max
agccttgtccttttttatgcttaggttgttttgaattcccttccaggttactagagaacgaaccatgttattataaaaatggaaccttgtatatttgaggttttgagttcaaaaatttgggttgctatttattcgatgaatattgattaaaagttcttatttgtgaagtgttttgatgttgtttatgcatttggaattaatgggaaagagtttgagtctgctttgggatgatttacaacccatgagagacaattctgcaaaaattgtgaaattctgcaagatacgcatctagtttcgcatccaacatccggtgaccattcttgcctctagttttgcgtctaccgtctagtga

SEQ ID NO: 246754 - DNA, 409 bp, Glycine max
agcttgtcagtgagtattggatagctgtgttatatttaaaagagataccatgtgtcgggcgaaaattcacttggatcaaaccaaatggggctgctaaaagcaaattggataaaatatttgtatttgctaattggttcactaaatggcctggaagtacacaatttatcttggatagaaacttttcggatcattgttctattctgctcagatctaaaaatgttgattgggagcccaaaccattcaggatccttgactgctggtttaaagataagtcatttgggaatataaccaaggaatgtttgacatatacacaacaaaggggttggggtggtttccagctcaaagaaagaataagcgtctttaggagatgttgaaatatggaacaggagcaattggtgacctttaagaa

SEQ ID NO: 246755 - DNA, 426 bp, Glycine max
  unsure (1)..(426): unsure at all n locations
agcttaaccaaaagtaaaagtgataattattagtgcacatcggaaaataaagagtgtagggaagaagaagacaaacacaagaattntattctggttcggcaacaacccgtgcccacatccagtccccaagcaacctgcggtccttgagatttctttttaaccttgtaaaatcctttacaagcaaagatccacaagggatgtaccctcccttgttctctttgaacaaccaagtggatgtaccctccacttgaactgatccacaagagatgtaccctctctggttctcagttacaacaacccaagtagatgtaccctctacttgtaccacaaaggatgtaccctccaatgtgttaagacaaagttctcaggcgggtagtcctttgaaactttgtgaaggggaaacaaaagatatctcaggtagttaat

SEQ ID NO: 246756 - DNA, 432 bp, Glycine max
  unsure (1)..(432): unsure at all n locations
agctntattcaagacaaagcttttatgatattcaagatggatgatcaagacagtctatagagtcttagaaagggtatattaaataggaagggaattccaattgaagtagcaaaaggtttggccaacaaaattaagttaaaaagtcttttacaagaaatttactctctggtaatcgattaccagaggatgtaatcgattaccagtggccaaaactaatttacaacatctattaaaatttgaattcaaaattttccatgtgttatcgattacacatatatggtaatcgattactagcagtttctgaacgttttaattcaaattctaaagcttgtaatcgattacacatatactgtaattgattaccagagcagattntcagaggatattctccacagtcacatctttntatgtggttcttgaatggctatcata

SEQ ID NO: 246757 - DNA, 428 bp, Glycine max
agcttgcctcatagaggtccatgaaggacaaggcggccgaaggaactatttccactccggagtacgacagtcaccgctttaggagtgctgtacaccagcagcgcttcgaggccatcaagggatggtcgtttctccaggagcgacgcgtccagctcagggacgacgagtatactgatttccaggaggaaatagggcgccggcggtggacatcactggttactcccatggccaagttcgatccagaaatagtccttgagttttatgccaatgcttggccaacagaggagggcgtgcgtgacatgagatcctgggtaaggggtcagtggatcccatttgatgccgacgctatcggccagctcctgggatatccgttggtggttgaagagggccaggaatgtgagtatggccagaggaggaaccggtctgat

SEQ ID NO: 246758 - DNA, 417 bp, Glycine max
gctttgatggtgtcgagaagaaatcactttttttgtcatcttcaaaaagggggagaatgtgaatgtatgtatacatgattctgatgatgtcaaagaagaatctaacaaggctgcttcaaatgataagcatttgcttcaagaataattcaagattgcttcaacaaacaaagccttgtttcaagattcactaaagaccaagccttgccttaaaacaatgtgctttcaagacatgcaaggctctggtaatcgattaccaggaagtgtaatcgattaccagaagacagggttgagaaatagctgttgaaaaaggttttgaatttgaattttcacatataatcgattaccatatgtctgtgatcgattaccagcaacgaaactttggaaattcaaattcaaaagtcataacccttcaaatta

SEQ ID NO: 246759 - DNA, 392 bp, Glycine max
  unsure (1)..(392): unsure at all n locations
tagctgtngtagctcattcatgagtggagatatttattgaaacagcataatcaaagatgcgcctgaggtgaggcaccataatggatcactaactcattaagttgctaactgtgatgctaaaacagggtcaaatagaatgaatggtaaaaaaacgctccctcggttttgatataataatggtcagtcactttagaagtgtggtttgttttgaattatttctcactttagaagattagtttgttttgaattatttgtgactttataaaatcaagaaagtgtttttttatgttacccgcaattatatcctgtctctttgtatctccaataagtggaacgagagactgttatcaaagtaaaaggttaatttagtcaaatgtcggtatattccctaa

SEQ ID NO: 246760 - DNA, 399 bp, Glycine max
  unsure (1)..(399): unsure at all n locations
gcaagcgnggggcgcacctttcactgcgaaatctgtttatattgctgccggaagccgatacgctcaaaggctctggatgaaacaacacacctgaagactttggagtaaacctcgaacacatccctctaaaatgtgacaacacaagtgggatcaatcgaactaaaaaacccatcatgcattctaggactaaagacggaaataatacatcattttctaagaggacatgtcttaaaaagtgaaagcggcatagaatacataaatagagtgggaaacttagcagatatatccactaaaccacctgctagaaataggaagtgcgtcataaaaaatgaactaggcatcttatatcgatctcacatagaacggacactcgtgtaatgcacattatggggttcatat

SEQ ID NO: 246761 - DNA, 288 bp, Glycine max
aagcctgaagcatccataattacataactaacctggatggacgcaatactgcctaatactaccaacaagaaaacgcagtgaacgaaaaccacctttctcaagagaaataacaagcgttggagactaaactatatataaaaacattatttcattgaacaaaacatacctctctaggcctttcggctaagatcaagtgtaagatctgttctaatcagttgaatatatgatatgtggaccactggtccacacaacataaacataaatcttcgagggggagggaccattata

SEQ ID NO: 246762 - DNA, 433 bp, Glycine max
agctagcttgaggagctacaatggatgctgtatctttgagcatcaacgaggtccttcaatggtgattatccaccatggagatgcaccggaaggcataggataagtggagaggggaggcaccatccactagggaataagccatggaaaaaggagcttcaccaccaagaatataccttggataagaagcttaaagaggaggctttaatggaggaaaagaaagagagaaggggggagcacaaaattgaaggaataaaatagggagagaagtggaactttgaaatgtgtctcataagacttttattcatcaaagttacaacaagtgtaacacatgcttctatttatagactaggtagcttccttgagaagctttcttgacgaaacttccttgagaagcttctttgaaaaaactctcttgagatgctagagcttatct

SEQ ID NO: 246763 - DNA, 428 bp, Glycine max
agcttgtagactaacttggccctatctttatttatatcagaagtatgggatgtcggggccaagttataataagatataacactccaggtttgggccagagtggtaagatctttcctcatgagcttccacggtagaccctcattattaagtacaaatcccctcccaaggatacacagccgggctgcaagctcttgaggatcaggcctcagtctagcaaacctggagtaagagggcaagctctccccttgctccacgaccgctgggtctccaaaaaggtgttgagggaatcaacatcaaattttatcaggtgccctctaaccctaacttgctttggttctttgtcctcagggacatataggtttgcatagaattctgtgacaattgccacatcaatgcttccctcaatcaagttggtcaactgttttgcc

SEQ ID NO: 246764 - DNA, 400 bp, Glycine max
  unsure (1)..(400): unsure at all n locations
gtttgttgcaatnagaaagtggtgaaatcattggtaacagtgacccacaagacatccttgaaagttcccattcttttaatctcattcttgatatgagttgccatgaatgtttttccaactccccccattccatctatgccaataatgaagacttcctcatcctccacaagatcccacatctttttcacatttttatctcgcaacccccaaggcttctgtatcaataatacatcaaactcaatatccaattcagaaggctcatccaattcattagtctacccagactgatgcagtgagtttttcacatcaatagctctttttttaaggtcctttaggttatccaaccaatcgtcatcttgtctcttgcgcttattgccctggaactcccgccaatgtaacc

SEQ ID NO: 246765 - DNA, 383 bp, Glycine max
  unsure (1)..(383): unsure at all n locations
agctnggggatgaacatgattgttattgttctctaacatcatcatcatagacacttattggaagagagtatctggggggaggatcatgtatctcatccgttcttgtctgtggaataagctgggatagggtacttttacactgctaaacactaaagttatgtaatatataaataaacaatgatcccaaaatagatggaccacaaaatgctctaagagaatattaactccttgaaggagaaagatgaataagaatatctctaactggtcgcttttagtcttttcatttctaacagtgatgtgggttatattagtccatgacaaaaaaacatatttttggtaatgtagaactaaaacattaaattttatatactaaactaagtgtt

SEQ ID NO: 246766 - DNA, 390 bp, Glycine max
tgatcatcactgatgttgctttgaattggatttccaagcagattcagggcctgaagtgagttgtagttagccaccagctggcctaatgcttttgttgttgcgatcttgttaaagctcaggtccagaactgttagcttcaataacctatgtagcccctcaacatcacttatcttgtgtccagcaagatatagctctttgactagggtacaatttgataatcctgataaaacacgacagataattgtatttagaaaatactgcacaagtctatgaaattcaagaagtgaaaacctttattgagcatcactgcatcaaccaatgtagaaactgaccttgtccaattcttgagatgcgagtataacttaagtcaagtacccgcagccgtgttaa

SEQ ID NO: 246767 - DNA, 440 bp, Glycine max
gcttctcaaggaagttttctcaagaaagcttcttatggaagctacctagtctataaatagaagcatgtgtaacacttgttataactttgatgaatgaaagtcttgtgagacatacttcaaagttccgcttctctccctcttttattccttcaatttcgtgctccccccctctctctttctctccctctttctcttcctccattgaagcatccttccaagcttcttatccaaggctcatcttggtggtgaagctccttcttccatggcttattccctagtggatggcacctcctctcacctcttctcctttgtcttccgttgcatctccatggtggaaaatcaccattaaaggacctcattgaagctcaaagatccagccttcatagaagccccacaagcaagcttccatcaagtggtaatcagagcacaagagcttcaag

SEQ ID NO: 246768 - DNA, 445 bp, Glycine max
  unsure (1)..(445): unsure at all n locations
agcttctatggaggttggatctttgagcttttttatgtccttcaacggngattttctaccatggagatgcagcggacgataaaggagaagaggtgagaggaggcaccacccactatggaataagccatggaagaaagagcttcaccaccaaaagagtgtcttggataagaagcttagagaggaagcttcaattgagaaaaagagagagagagagggggaggggagcacgcaattgaaggaggaaaagagggagagaatttgaactttgaagtgtgtctcataagactctcattcatcanagttacaacaagtgttacacatgcttctatttatagcctaggtagctttcttgagaaacttccttgagaagtttccttgagaagcttccttgagaagtttccttgagaagctagagcttagctacacacatcccttttataactaa

SEQ ID NO: 246769 - DNA, 421 bp, Glycine max
  unsure (1)..(421): unsure at all n locations
ccgctgcagctatgatataatggtcggtgtattgttataaatataactataaactggaggtgtcaaatatcaatgccaaataacttcataaagaagtttccacgatgagcgattctaattaattttntaagtccgaaccggacggaaattaataatagatgtaagtaagaaattggatatgcaattaattgattattggtattgatattcataattttactactttcaaagatgtctccaaagatttgtctttatgctggatttttctttataaatacaaataagaacttgctacatattttgattggatttataagtaaaacatgttgatttttttttgttgaaagaacttgttggaagtctttgtgtacaatattgtcttggggcctgtaattcacccaaagttagttttattaacaca

SEQ ID NO: 246770 - DNA, 329 bp, Glycine max
  unsure (1)..(329): unsure at all n locations
caagcgncanccatcagaggcaacaaggaaattgtttactttgtggataggatatggngcaaggtgcacccattgttcttttatccactacctcctcactaattctttgaataacttcttatagagaagtaagggaaaatgattgtttgatcaaaaaggtgcatttctctttggggcgggtgcattctaagacctattgccttacaacctttgctttttggggaggagccattttctgaccagtggtcttattgtgtgccaccttgaatattataagaaaacaacatttgggaacatactagttataatccaaaaaaaggaatatggaa

SEQ ID NO: 246771 - DNA, 341 bp, Glycine max
aaatgataggttggaacagcctacaatcataacatggatgattcatccttacccacatggcttaggactacacacgtataaaacattaatgaactaaggagctattcttaagtgaacaagacctactatataggagcacactggatatgagctcttagactgcaactcctataagtggatggccaatcacaagtggaaacgataatattaaagaataatatccaacggccactatgatgtcggagaactagcatgcactctttgagaaaccagggttcagacaaagtatcagtgttatcgtggccaatagacacagtcacatacacaatcctatttatatc

SEQ ID NO: 246772 - DNA, 389 bp, Glycine max
  unsure (1)..(389): unsure at all n locations
agcttgtangaactatagtaacaatatttgttattgttcttggctgatagacaaggacttagattttaatcatgggttaaggagtcgtacaactgatgaagatatattacacttagtgagggatgcttttgaaaatgagaatgagataaatgtttattttcatcatgaagtagatccaattttattagaagtcccacagatgttgtacttggaatgtgatccaattccaaaagctgttgagagagaggatgatttatatgatgtacctgttactggccatgaggagggcaagttttaattcatctgtacttgtgccaacatggttaccataattagataatatgattaattattacttgatcaccattgatgcaaatgttggtggggga

SEQ ID NO: 246773 - DNA, 368 bp, Glycine max
tatttcaccttacaaaaacaaaggatcatttacttgctatgtaaataattaataggcgtcctttacttctatcgtgtctttatagctagttcaacccactcacccaccccattatatatgaattattttcttgcctatagacacacatgacctcaaatcttccagagtaaatcttctaattcggaaaaatatatgaaaaagaataaattgaaaatgaacacgggtactgcgaagttggtacataacttttgtcattcgcttttatctcgggctatcctttcatgattagaggtgcgtaaaaaggtaagacaatgaccctgcctttgctgccctggtttctccatggcccgagaggccctcgacgcccc

SEQ ID NO: 246774 - DNA, 423 bp, Glycine max
  unsure (1)..(423): unsure at all n locations
gcggctgccactggacaggatgctttggctcattttttangacaaaagcggcggagccctataaaactctgactgcataatatagattacttgtgcactatcatacaactggatgacctcattgttgtcgcaaacaacatgctcagtcctcactcctagagataatactcgatataagaaacatcaatatgcgggcacattacaaccagatgcatagaatgacaacatacataactgtaaacaactgagaagtatcgaaattaattatattggatacactaaatggaaccatgtgtaattgggaattgccagtttcttgtacgagattttcgcacgacattacacaaatacatagactcaagtttttcgagaaataagttcatcatagacccacataagagaatcccttcacatcaataaagt

SEQ ID NO: 246775 - DNA, 331 bp, Glycine max
acccggaccttaagtcacctgcggctgcaagcttagtggaggaagagattgttatatattgagagagagagaaagaggaggggggcgtgggatctgatagagaatatggagagaagttgaacttttcccattcatcaaagttatgacaagtgttacacatgtttttatttatagcctaggacactagcacatgggaagcttccttgagaagcaaggaaggtagcttccttgggaagctaggaagaaagcttccttataaagctagagggtatcttccttgggaagcaaggaagtatgcttccttgataagctagaaagagggggggggggg

SEQ ID NO: 246776 - DNA, 399 bp, Glycine max
gctttgaatgcactattcaatggagttgacaataacatcttcagactgatcaacacttgcacagtggccaaagatgcatgggagatcctgaaaatcactcatgaaggaacctccaaagtgaagatgtccagattgcaactcttggctacaaaattcgaaaatctgaagatgaaggaggaagagtgtattcatgacttccacatgaacattcttgaaattgccaatgcttgcactgccttgggagagaggataacagatgaaaagctggtgagaaagatcatcagatccttgcctaagagatttgacatgaaagtcactgcaatagaggaggcccaagacatttgcaacatgagagtagatgaactcattggttctcttcaaacctttgagctaggactc

SEQ ID NO: 246777 - DNA, 431 bp, Glycine max
  unsure (1)..(431): unsure at all n locations
agctacaagtcttcattgtataattagactctgtttgcctttatntgttcactggaaactgttaattagtcactggatttgcctgcttttgattcctgtttattttctactgccagcggttttggtttcagatctggaatgtaactgttagtgtctggggtgcaatatgtttgatcctccttacaatcactttaagatgtactttttatttttgatattttgactatattctttctgatgcgtcccattttagcttcttcttattctggattgcatttttgacattttaaatgaactgagtgtgtctgtctacaatgccaatgatgttgtcagctgttctatgagtagatctcaattgcttagagctctcgtgtatttttcgcctctcacgattattattcttgcgtgtgtgtactttgctgccctggaaa

SEQ ID NO: 246778 - DNA, 446 bp, Glycine max
  unsure (1)..(446): unsure at all n locations
agctntgagccaaaatcctgactcaccatataccttgacccagggtgagaatgccaatccttaccctcggaagcaaaaaaaaaggagaagagaaggaaaatttccaatcaaaggaaaaaggagaaggaaaatttccaatcaaagaggaagcataaaaaggagagaaggaaaatttccaatcaaagagaaagaaaagaagaggaaaggaaattcccaatcaaagagtgggagaaagaaaaaagaaaagaaagaaaactcccaatcaaagaatgggagaaagaaaaaaagaagaaagctcctggtcaaagaaaccagaagaaatgtgccgagaggtccttggaccagacgatatctgaacaatacagaattgtcaccaaatgaacaaaaaaaagaaaaggaaaccatgacctaaaagtggtcttctccctttgattagcaaccaaaat

SEQ ID NO: 246779 - DNA, 454 bp, Glycine max
  unsure (1)..(454): unsure at all n locations
tccttaagtcacctgcggcatgcaagcttttaatttcaatacaagaaagcatgacttattcctangaatctaagttttggttgtgaatgaaaaaaggcatgaatattatgacatgnttgagaggttgttattaaaatttaaatttggctgccccatgaggaataccttgcacctaggtagcatggaaaatacctttcaacggtatgtatatatgtaaatatatatagcatggaaatgccttgcaaaatgttgaataaaatgccttgcagaaagttgaataaaatgccttgcaaaatatgaatatatatagcatgaaaatgccttgcataatatgaatatatatagcatgaagtgccttacaaagtgttggatgggtagcgtaaaagtgtttttcaaaataggtgtatctgtgagtaggtaacaaaagaagccttccaacaaatgtgtgtatata

SEQ ID NO: 246780 - DNA, 267 bp, Glycine max
atttgagggacttatgggcactatgaatgacaaaatccttgggagtaaggagtgctgccatgttttcaaagccctttctgagaatacaacttcttattataagttgaataagtaaagggtggaccacttaaattttcacttaaaaaaaccattggatgacctttttggaaaacacaggccccatcccaacatttgaagcattacactcaatttcaaaagaatttttaaaatttggccattcaaattttggggcattaattatctttt

SEQ ID NO: 246781 - DNA, 439 bp, Glycine max
agcttatatgtgcaacaagactagtaaaggttagtttggtaggtgaagtctctaagggaaaataaagaggggaaattgttagactgagttttttcttatgacttaattaacataacatgtaaggttaatcgttctgggtttacaaaaactgtctgtttcattgactccatacttgaagagatttcaaagtacagttttagattcaaaatgttatgccggctacactttttttttaatagaatagtttatactagtctctttcaatgcaacaaaggacggggaagaaacaacctccatggcgggtgttttctttgaaggaattacactccgctacaaataatttcaactatgataacaagctcagcgaatggggatttggcagtgtgtactggttcacaagtagtactatactttgataacaagctctgggatggatcac

SEQ ID NO: 246782 - DNA, 464 bp, Glycine max
gatcttaagtcacctgcggcatgcaagcttctttgggaccttgaacaagcatcttactcctctttcaaaaccatgctatgtgctcgcgactggtccctctcttcccttcgcagcttgagttcactattgctaccccatagagctccgcgaaatttattccggccatactcttccttgcgagccctcttggtctcttgttcaagggctcttgcggtaattgcattctcttcccgtaacccggcacactccttccgaatgtgtgttgcggccaacttgaacttctccttggcaattttcgcctttcctaactcgcttttgagagcttggacttcttcgtcctcttccggtgcttcaaaactctcttcgctgacgacttttaacttggcgagccaatctaaacctcgtacatgaactttcagccattcatggtagccaccaatgatgccattacgaatgcctctaag

SEQ ID NO: 246783 - DNA, 445 bp, Glycine max
  unsure (1)..(445): unsure at all n locations
agcttcctcggggccatttcctgcgaaggctctctatttggaaagntagttttaccaagaaattctactcttataacaaaaatggcatacaacctcctccaataaacacaaacatcaatgtaaatttagagcaaactcatgcacatacttccttacgaacattcactcgcacaagatattcttctaactaagaaaaatgcacccatgcacaatcaaggcaccttcgttacctagattatttatatgtacttccaaggtgtatttgttacctacatcacatgcacttccttggataaatttacatacatgcatactcaaagcattttggctaccaaaaattgcgcacgtgcacattctggtatttctaatacctatgcatatacaaacgcttgtgatgaatcttggctatctacacaataaggtgctacattccatgctttattca

SEQ ID NO: 246784 - DNA, 442 bp, Glycine max
  unsure (1)..(442): unsure at all n locations
agctggtgtttcatcatttacctgtggtgtggtattgtatctaatggaatctgtaggaaggatggtgtgacagcagaggaacgttggaagacgttaagacaaagatacaaatgaggcaagaaggagctttcaaaagagaaagagccatggcttactctcttgctcacaaggtaacttgtctgcttgcctgtgttgtcattgggtgaccatttctgctgaacttaaaaaattaattttgaagttagatgaactttaactccacattaatttaaaattaaattaaatatgtagacattgacttaaaatcatgtcagttgacattttaatgtgattctaaatcatatataatttgatttcaaacaagccacaacaaagtccaataaactatgccacttntttttctactttagaaagatgtttaacattctcatttatatgtata

SEQ ID NO: 246785 - DNA, 417 bp, Glycine max
  unsure (1)..(417): unsure at all n locations
agctttagttntatcatttttaattaaatttattaacataaacaaactaattatatttagtaaaatagttaaattaaaaattgtaaaattcagattattatacaaaataaatatttaataaaataaatatgttattatacaaaagttaaattttaaaacatatattcaccaaaaaaatatcttaaataatttaaataatataacagaaacacttaaatttaataatatcattttcttaataacaaaattaaattataaaataatattacataaattaatttaataaataactaattttcaaattatttaaaaataattttatataatataatatttaattgtaataatataaaaacttttttataaaaaaaaaaatagaagaacggaagtcggggtgtgagaacccgacttccctga

SEQ ID NO: 246786 - DNA, 400 bp, Glycine max
ataattataataattgctatcaatcgttattaaaagagctattatattccatacaaatatactctataataagatataaaaaaacattaatgtaattctaaatatatttactttattttctaataaaacaatttcaggtatccatccatatatacacgaatatcacaatctttaataatgttaaagtggccaatccaatcgaattgcactctgaccccatgacatgaccctgagttaatgcggcagataaaatttgaatggttggtaggatcaattaactgcccattttattttagtagttgctctcaccctttaatgtgattaatgccatttacctattcaaaaggtccttatatatctatcgtcaatacgcaataatgtagctagtagctactagtac

SEQ ID NO: 246787 - DNA, 409 bp, Glycine max
  unsure (1)..(409): unsure at all n locations
ggaaaacattatatatcgttctntgtntaaacttaaaataaatgcatcacaaaagcatcaaatttataacaaaattaattttaatattgatatttctgaagaaaaaaaatattaaatgcttatgcgttttatgtcatgcatgctttcttttttttacttaaataattataaaaactattaaactcattgattgaaagatctagcatttctatttcaacttttttgcgtagtgatgtggaccttcgggtggccaataagagtcaggaaaagtgacatctgtcttttagactcgaaagtatccaaagctcttgtttcctactaaaaaggtaaaataaaataaaaatatttttagttttcataatttttgtaaactttaaaatcaagagaaaaaatagattctaattaattc

SEQ ID NO: 246788 - DNA, 336 bp, Glycine max
  unsure (1)..(336): unsure at all n locations
ggactanttctgctcctgagtatgacagtcaccgctttaggagcgctgtacaccagcagcgcttctaggccatcaagggatggtcgtttctccgggaacgacttgtccagctcagagacgatgagtatactcgatttcaagaggagatagggcgccggcggtggacatcactggttactcccatggccaagttccatccagaaatagtccttgagttttatgccaatgcttggccaacagaggagggcgtgcgcgacatgaggtcctgggtaaggggtcattggatcccgttcgatgcagatgctatcggccagctcctgggatatccgttcttgc

SEQ ID NO: 246789 - DNA, 441 bp, Glycine max
ttaagtcacctgccgcatgcaagcttgtgcatcccataccctgatgaggatgtcccatatattcttaaaactggactgatccatttgcttccaaagtttcatggccttgtaggtgaagacccacacaagcatatgaaagaattccatattgtctgttccaccatgaaaccaccagatgtacaggatgatcacatatttctaaaggcctttcctcattctttaaagggagtggcaaaggactggctatattaccttgctccaaggtccatcacgagctgggatgacctcaagagagtattcttagaaaaaaatttccctgcttctaggaccacgaccatcagaaaggatatttcaggtattagacaacttagtggagagaacctatatgaatactgggagagattaaaaaattatgtgccagttgccttcaccaccagattt

SEQ ID NO: 246790 - DNA, 433 bp, Glycine max
cggcaccagagtcaaacaatactgttattcttatctcagatctggcgcttcctccatcgctgccgggcaaatctgtattcccaaatgttattgctgccaacagcactggcgaaggtggcaccgaggaacgaatctggaatggaggaggattactgagtatgcggcggggaaaaggttgtggcgagagaaacgaacatccttaacccaaatttttcatgctgttgggaggagcaaatttgggttaaacttaacggaaccataacaccgtttggaccaaggggttaaaagaaatgttctaaaagtgagaaatattacatgtaataaggattaatcttagtgctcaatataattaaactcataaaacaacaacaaattatataattaaatataatacatatatctacaagagtcttcctccttcaatggttgcatg

SEQ ID NO: 246791 - DNA, 431 bp, Glycine max
  unsure (1)..(431): unsure at all n locations
agctaacataatggcgcatagcgatcttttatatttcgaaaattcactcagagtgggggcgaagcaaaacagccccgcttagccacacgtatctcaacaggaggatgagtgttcatccttacaaaaggaactcgcttagcgcggtaggcgcgcttaacgagatccgttaaaaacacatatattcaatgaattatgatagaactcgcttagcgcagcatgcacgcttagcgaatacattgtgatttccagaaaaaacgcagaaaacacacttcgtnttagtaccatttctaagcctgtaaaaggcatatcaaacatgcgaaccagtctaaactatctacacaacacaatcattccaaaatcccaaccttccctaaataaacattcaaccctacaatcaaaacaaaactatggtttcaacctaaggcaacaac

SEQ ID NO: 246792 - DNA, 442 bp, Glycine max
agcttgatgttctaagtcttccaactcccttaattttgcaactccacaacatcccttatatcactatgtatcccatgtaggaaatgagccatagtatcctctcgatccttcataacattagctctaatcatggaaacctccatctccttgtaatactcatcaacacttctactaccttgtgtgagtctttgtagcttgttatgaaggtctctttgataatgagaaggaacaaatcttcttctcatcaacctcttcatttcttcccaactatccaccaatagttcttcatatcttgccctctccctttgtaattggttccaccagatgagagcctagttagtgaattccatggctgccaccttcatatttttatcctcagtgtaattgtggcatgaaaatagttgcttaattttcatttcccactccaaatatgcttctagat

SEQ ID NO: 246793 - DNA, 439 bp, Glycine max
cctgcggcatgcaagcttatccttatggtttgactcctgtcttcatcccccgtgccacccgggatgatttaatccatgcccctactttctaggggcaactcccaccttatgaagactattccgggcaagacgatggggaaggagatacccatcttggccccctgctccacctcaaagatccgatcccacatgaactaccccaaccgaacatagggcgccatatcccggcctctctcacacccgtgaaagaatgtgtttcctttgcggaagatatgggaaagattgaggcgcttgaagagaggttaatagctgtcgacggccttggctattaccaattctcggattttgcggatatgtgtctggagcccaacatcgtcattcctgccaagtataaagtaccaaactttgatatagtccaaagggacgacatgtccaaaat

SEQ ID NO: 246794 - DNA, 358 bp, Glycine max
gttctcaagactggactaatacatttgctgcccataattgatggtcttgcaggcaaagatcctcataagcatcttaaggagttccatattgtttgtaccatcttgaagccccttgatgcccaagaagatcatgtctttctaaaggcttttccttattctctagagggagtggcaaaagattgtctatactaccttgctcccacgtccattttcagctgggatgaccttaagagggtgttcttggagaaattcttccctgcatgtaggaccactaccatcagaaatgacattttaggcatcaggcaacttagtggagagagcatgcatgagtactgggaattattcatgatattgtatg

SEQ ID NO: 246795 - DNA, 411 bp, Glycine max
agcttatgcatgtacacgatgataaaatttctctttctgaatgaataaaatgcagagaaccattgaagtacagactcgttttcaggaggggccttgaccttgaaacatggagagtctctttcctctctctctttacatcacaacactggtccgacctgcctcgtccatggcagagcatggaactcgtcgaaccaccacagaccatctcgaggaagccatagccgccctcaccgaacattccgatttggctaataagttcgaagccatctgtgaacgcctctcccacatgacctcttctgctccgccacccccttccgcgccgtgaccaccggttaaacttgatgtcccgcggttcgacggccatgatccacttggctggatcttcaaaatctcacaagttttttattacta

SEQ ID NO: 246796 - DNA, 434 bp, Glycine max
  unsure (1)..(434): unsure at all n locations
agcttatcctaaatgacactccttgtacctctatattcctaactcgatcacttttaaagtcttgatgaatgatacaaagtgacttacaacagtttggtgagtaattcaacacggtatataattaatacaaaagcacccatgtctgtcaaattttaaatcatatacatatctaagatgaacttaatgttaatttcaagatgtgtcgagtaccatgtactcatttatgaaaggtgcatgattcaccatctgaatttggaagtgattaaagaatgcaaggttgttgatattcattaaaggaacttaaatntagaagctatggatggaagactatatttgacaaaattggctatggatggaagacttttgcacaatcacaaaatttagaagctggaacttaaattatgtgagttcctagatgcaacatctaattttat

SEQ ID NO: 246797 - DNA, 351 bp, Glycine max
gcattctcggagcttctctttgtgatagccgaattagccctccacaacgcctgtatccaaggcttgccaagttattgtggttatgtgaattagcctcctctcatcatctctcttgtgttgtttaaaagtgcgtttgtttcactgaataaccattcattggtttatttgtagtcatctttttactataaagaaactgactctttttatgtgtgtgtgtgtgggcgcgcgttatattttggccataacattatctacaactccccctcaggccgaagacctgatactaatagcgtgaatgttgcaagactggacattaataataatcactatgacagactctgacaccatttt

SEQ ID NO: 246798 - DNA, 439 bp, Glycine max
  unsure (1)..(439): unsure at all n locations
agcttagtggtggctggctaagtggcaactgttgtcgctttagaagcacgtgagagcaatntgcaactcgttagtttattgcattttgttgcgtttctcgccgcttcaactatgcttttattaaagagaaaaaaagattatatccttattattgatggtgtaaattatgaatggataattgtgtataattattttatatttttagtaaatggataataattttttttaattttagtttttttttatttttcaaaatatataattttggtggaatttttaatttatattttaggctttattattatattttaattaattaaataatttcttgataatattttaaataaatatatttggtctaaaattcaattggaccgaaataaaagaaataaaataaaactaaaatttttaatttgatcaaaattatgaattctttaaa

SEQ ID NO: 246799 - DNA, 438 bp, Glycine max
  unsure (1)..(438): unsure at all n locations
agctttanacataaatatatgagaatttattattctctaaataaatgtaattaaacaatctttaaggatataagtttatatgttataaaattatttagatttcttaaataattaaaaataatgtaattccacaaattctcaggttattaaattatttatattagcttatcaccaacacgggtgtttgctttcacatcaatgagttatcaaacagacttaatccctaaacccatccatacatttatttgcacacttctatgatattctatcaccgactgattgtatctttcatattctgtcacgcgttctcacatagtctctatttttatcttgctaccactccgtgcaactcaagtttatatatatcattattcaatcttacaccatatatgcacccttcaatctcatcatatatgaagtctttaattatggcgaact

SEQ ID NO: 246800 - DNA, 333 bp, Glycine max
tgcccaccaatattagatgagacgaacagaaccactcataagcacaatccaagtggtcctacatgttcgttgcacaatgatggggggaacaaccaaggaggaagtggcttacctcactttcatgaaggcccttgcaccattaagtggggcatcaactctaccataggaaagtggcgacttattcttccagcagctgtcacctaacctgataatagcaacagaacacaaacaatctaccatacaagattgtgtgcaatgtcatcaacgaaaggtttgtgcagtacatgatctgaactaggccaatgagcatcgatcaacacctcaaaatcgtat

SEQ ID NO: 246801 - DNA, 444 bp, Glycine max
  unsure (1)..(444): unsure at all n locations
agcctaaggctgctcaatagctccaggtngctgtattgaagggcaaaggtctgtatggtggtcagcagaggagcacaaaccacaaacccttgcgacaggtacagatttctgattcaaggccatctgggttaccaagttaaccaatgcatccagtttgccttcaagcttcttagtttcaaatgatgcagatgggtttgtaactacctcatgcactcttctaatgactatggcatcatttctggcgctaaactgctgagagttggaagccatcttctcaattaaatatctggcttcagcaggagtcatgtctccaagggctccaccactggcagcatctatcatacttctctccatattactgagtccttcataaaaatattggagaagaagttgttttgaaatctgatggtgggggcaactggcacatagtttcttaaatctctc

SEQ ID NO: 246802 - DNA, 406 bp, Glycine max
agcttagtctctgacgggaccccttctttatgttctctttttggcaggaattattcaaggtcaatggaacaaagctctgtatgagtttggtgtaccattctcagaccgacgggcagacagaggtcatgaactatgttatagaacaatacctcagagcctttgttcatcagtgaccatcaacgtggggatgattcttgatatggacagaatggtcgtataatacctcgatgcactctgcaactggaatgtctccatatgagataacttttggcaagaaacctccaagtctaattcagtatttggagggaacttctaatgtggaagccgtggatgagcgtgttaagcaaagggaccaaatgcttgctggcctatcaaaaaagctaaccaaagctcaacaacggatgaa

SEQ ID NO: 246803 - DNA, 351 bp, Glycine max
  unsure (1)..(351): unsure at all n locations
agcatgcaacnctagagaaactacgngaatcttctttctgtaaaatgctatgcagccattgggaaccgctggagcttcacgaaatctggtctagcaatatccaaaagacaatatatccaagatccgaccgtgcggatcattgagaaaatgtctgtagtgtgctagaagcctcttaatgaagcttctaaaggaagcctcttaatgaagcttctagaggaagcctcttaatgaagctcctagagaaaactacatgaagctgcctcgggaaaaatgctgcccagcctacagtaaccggggaatctatttgaaatttggaaggcaacttccaagacactcttacatgatctgacc

SEQ ID NO: 246804 - DNA, 387 bp, Glycine max
  unsure (1)..(387): unsure at all n locations
ggatccttnagtcacctgcggcatgcaagcttccaagagtngaagaggcgattgacttcatctccaatgttgatnttgcccgaccctaagagaccatttgaagtgtattgcgatgcaagcgggcaaggcttaaggtgcgtattgatgtatgagggaagggtagtggcttatgcttcacgccaattgcgtcctcatgaagttaactatccgacccatgacttggaactagcagcttggtctttgccttaaagatttggaggcactatttatatggaactcgttttgaagtttttagcgatcacaaaagcctcaaatacttgttcaatcaaaaggaactcaatatgaggcaacgaagatggatggagttcctcaaagaatatgactttg

SEQ ID NO: 246805 - DNA, 408 bp, Glycine max
agcttgccacccagctcgcttattcgatctttgttgcttcctccaaaagcaacagacttctggaggaatattctggagggcccaagtgggcctggttgctatttgcacccccattattactaaatacacccccttgccctttttttggtgattcttttttcgtaaagttacggaaacttacggatttcgcaacaatacttgttttctttccgtaatgttacggaacctagcggattacataatcatccccttttgtgacttacggaatgttacggaacctcactaattgtgcaaacgatgcttccttttgatttccggtgtgtcacggaaccttacaaattgcctaatgatgggtgccaagcaccttacaaatgaccaaatacaagttacatgcattcaaactcaggg

SEQ ID NO: 246806 - DNA, 432 bp, Glycine max
  unsure (1)..(432): unsure at all n locations
agcttagagggagtcgataatgacagatattatatgactgtattaactaatggtcctctactagttccttttgtgtcaaacatattggctcgattggatatttaagaaattgtcaccttagggacaatcaacaatgacagagctgaaagatctaaagattttgtttgaaatattggaaatactgaaatagtgaataggaaaatgagttgtatgtatgtttatggtaattagggtaatagtttatattgatgactctaattataggctagagcctctgctgtgtaattgagacacgtatttcacattttcaccacatgtaatctagagcctaaatggtaggtatccctaatctgtgaataatcaaaatcaatcccccacatggcattagttatgttataatatataccttacatngtgatttncatggtatga

SEQ ID NO: 246807 - DNA, 438 bp, Glycine max
  unsure (1)..(438): unsure at all n locations
gcaagcttcaacctagaggagacggaccattctattttntgagaagatcaacgacaatgcctacaagattgacttgcctaatgagtataatgtaagtgccactttcaatgtgtctgatctatctctttttgatgcagatggaggagccttggatttgaggacaaatccttttcaaaaaggagggagtgatgaggacataaccaagggcaaggaccatgaagcacttgaaggtcccatgaccagaggcagacttaaacaagcccaacacgtcatagagacaaggctggtcatttgtatagctgccattgatgatgattgaaggcccaagtggagaaagatgaaggcccagaggcagaggcactaccaagactactaattgttgttgaggcccaaactaacttgaaggcccaagttaaataagtttttagttataattta

SEQ ID NO: 246808 - DNA, 424 bp, Glycine max
  unsure (1)..(424): unsure at all n locations
atgaattgatttagccttattttcactttggttattagtcaattcgattaagaaataaaatcccaaagaaaaaacgtctgattgatatttnttattattttatttaaagatatttttttattattatattattattttgcctctttttggttttaaacgtggttacggcatgaaagatcggtcgaattttattctaacagaaattaaaagaggttacaactcaaatgatcgatggaaatttattttatttttgattaggcgagaaaatgacttaaataaatgactaaagcacgtcaaaagggggtacggaaagtaaatgaaataaaaataaaagcatgcgaaacaagtggggaccactaagggcacatagaatgaattgaaaggttcgatttcgggaacttaccggttaagaccaaagaacgac

SEQ ID NO: 246809 - DNA, 444 bp, Glycine max
tgcaagcttcatgatgaatcaagagtgattcaaataagttttgatgataacaaaggtgatgaccaagggctcatagatcaagaacaattcatgataacaaagatgatgatctcaagaatcaaagaatgagttcaagatgttcaagattgaatcaagaacacttcaaggttcaagaggaaatttgatttctagaatcaagaatcaaggttcaaggttcaagcttccaagaatcaagatcaagattcaagactctagagaagaattaatcaagataagtatgaaaaagttttttcaaaaactgagtagcacatggatttttctcaaaacttgtttaccaaagagtttttactctctggtaatcgattaccagattgtggtaatcgattaccagtagcaaaatgttgttgaaaaagcttgtaattgaatttacaatggtgcaattga

SEQ ID NO: 246810 - DNA, 425 bp, Glycine max
  unsure (1)..(425): unsure at all n locations
gcaagctncttaagtacaacaataattatgttttcttctcagatcacgaggggatccatcagaatggattaaattaattgtcatgaatttaattgttaaaataaaaaaaagcaatatttattgtattttattctatacttgtatatttcacaagttctcaaatattttaacataacatacatacataattattattcgtttcttatacataatttttatttatttattttctaacatatgtcatcttttgtggaaccaaaggggtgaatattgtttaatagatcaacttaccaccaaactattttgattaattattatatttatgacacaatttacatatttcatttgatgttacttacatcaattcgtgcaattcaattactgatttacttgtttgatgattaatgatccatcaatccaatatc

SEQ ID NO: 246811 - DNA, 440 bp, Glycine max
  unsure (1)..(440): unsure at all n locations
agcttttggtcaagtggcttgtatattctttatttatggccttcatcatatccacatttatgcatttcattctaaaattcagagattgatacaaaaatcatagctctatgctagtcgttctctcaacaattaagatctcagtctcaccgggttatggttcaagattatctttctcaatcaatttgtccattgactaacatctctaattgtgatcctactttcttgttctttctcatctaacatacatgctcattcaaactcatgatttcaacacatgtttcaccctttcatgcaatcaattcacaacaccaatttcacaacaaaaantaattatgttgtactgcatactaagataatcaagtcaaactattcagtatgcttcaagacatgcatactactattcacaatcaaaagtatgtaatcataaatataaacccata

SEQ ID NO: 246812 - DNA, 422 bp, Glycine max
agctttctgccaagtggcactcacaaaattatttgtgttggtccatgcagctactgaagaagatccaaattgataataacatgctattgctatgttctacaaaaatttccgcctctctagctttctgtctctttcgaaatctagcttttatttattagcatcgtgcaaataattagtacgattgtattctttaaaaatatacaagttcaatcttgtgaacatatatcattggttgacaaaagatgaaaaaagtattcaggagtcttacaaataattaattttcaccaaaaaatctgactaatcatttttagtgaaatatttttttttaatcatatttttttcacataaaagaattaaaccaaaaattttacttaaaagaatcaaattcaatattacttataccaacgatttattttagaaaa

SEQ ID NO: 246813 - DNA, 426 bp, Glycine max
agcttattattatagggtttttttttacttatttttgttgacttaacaactattgagccataactgaattggactaacaaattcaaatttaatttgaactaaaaaatttaagctcaagtcttatatttgtatatgatactccctttctttcgtatctttatattaactccttatttaaatcgttatacattatattaatatatttaattgtctgttatcatactatattaaaaaaactaaagaaatagtctttaatttcaaaaaacttcaaggagtgtaggagtgtaagtataagtatgataatacgatgcagtagaaagaaaaaaaaattataataggtattgttgaagtatttatatcactactcaagcctcttatgattaacatttattttatgtagtataatagctcctacgtcttatctct

SEQ ID NO: 246814 - DNA, 414 bp, Glycine max
  unsure (1)..(414): unsure at all n locations
agcttgagatgaggaagtgttgtatggtttatcttcctgcttntatcggtgaccacagagtggtatctggagatatgtcgcgggggtcatgagacctatgggacgtcaggtggggtgctattgcccaaaaccaagcttgaccaatcccgacccaacccgggcatagtcggtcagtgagaacctgtgatgtacctaaacaggcgagctcctggcagtcaactaataaatggaacaaagaccacaaatcaaggaggcttgtggtggctggccagctgtgaactttgattgatatgtgggttatggcctctggtaattgattaccaagggtaggtaatcgatacaaggcttaatattgaagacatgaggctaagatggtctctggtaatcgattaccacggggtgtaattgattacc

SEQ ID NO: 246815 - DNA, 409 bp, Glycine max
agcttaaatgagcacttttagatcagacttttttgttcctctcttcctcttgcactggcgcacaatgagatataggctcataagtggacaactttttcttgtgagtattatagctcactttgaactaccaaaagtgtgctgaaagtgagatcaaaactaaatggacgagcatatgttcaccaaactctaactgaagtgcgttcaattatgatgtcaagttagacattgtcattatgtactccctcgaagagaagtcgttcataaatccaaataacgatgcaaagaataaaaacaaaatacaccctaatttaaaccaaatacccaatttaccaacaatttatatgtgttgtcccaaaaaaagaatgggctcaaataaccaaagcattccatgtataattaggggatcctt

SEQ ID NO: 246816 - DNA, 441 bp, Glycine max
  unsure (1)..(441): unsure at all n locations
gcttgtgtgaagagatagacagaaaaagatctttaatttntgttttacaattgtctatccgctaaacgttgaccttgcgctaagggctcagtcttcacgcgctaagccgagcttgcttgcgctaagcgcataaacccctgattggttggctgaaaagttcagctaagcgcatatcactgcgttaagccccacatcgttgcggtaattgaactttaaccagtgggcttagcgtggatgatgcgctaagtgccacttcatctcgggaaaaattttattgtaacagcgctaagcgcgctatcctacgctaagccccatatccattctataacttgagtttttaagatgggcttagcaggccaggaagcactaaacgccaatctcttacgggttttgaaatnttgcaagtgcacttatcgcgcctgttgcgctaagcctgaacta

SEQ ID NO: 246817 - DNA, 448 bp, Glycine max
  unsure (1)..(448): unsure at all n locations
gctcatgatgatgaatcaagctgattctatatgantttgatgataacnaaatatgatgacaaaaagctcaagagaatgatttcaagattgagtcaaccaattcaagaatcaagagaagtttgattttcagattccggagaagatgaatccaaaattcaagagaagaaaccaagaagacttcacaagggaagtattgaaaagatttttcaaaaaacaaacatagcacaattttgtttttcaaaagagtttttttttttcaaattttctaagttaccagagtttttactctctggtaattgattaccagtttcctgtaatcgattactagtgacaaagtttgatttcaaaagcttttaactgaatatgcaacgttccaattgatttcaaaatggtgtaatcgattacaagattttgataatcgattaccagtgcatctgaacgttggaat

SEQ ID NO: 246818 - DNA, 459 bp, Glycine max
ttaagtcacctgcggcgtgcaagcttgttcaatggtaatagaggcaatcttatatgtttacatgcatgtgtactttgtgagaagttaaccaactaattcatttgctgtgactttgttaaaaaaaataaaaattgtgaaaaacagcttctctgccaattaaggtgtgttgtttggagaaaaagaggataaaagaaagtagaaatcaacaaagtgagattcacattcttacactttagttttaaatttttatctcactttaattttttttttcatttctttccactaacagacccttaaaaaattgaaaaaataatgtggacaatttagtcaactcactaacactattataagcaagtgggttttaaattttgaaaagcattacgcaataaaaaaaattaaatgttaaactgcaaatcatgaacaaaatcatatatgggagttactagatgagaaaataca

SEQ ID NO: 246819 - DNA, 369 bp, Glycine max
tttagatatggcaatgaatgattctatagtccaccacgataaaagaaaatcccatctcatattcataatacgaacatgaagactatctcttattaagaatattattaggcagaataattaaacactattttacaaaatgcaagaaaatcgctatcttttgagataggacagataataaaacccattaatatacgttaatatgtgaacagagataaaatttataattgaataatctcttgagaaaacatttcacgatttataatataattaggacatgatgagttactaatcatctttgatgaaagaggtcatgttgaccaaaactactcacatttattaaaagacattgcgatagaacttaaatggccc

SEQ ID NO: 246820 - DNA, 436 bp, Glycine max
  unsure (1)..(436): unsure at all n locations
agctntacagcagattatagtaatgtactttttacctagaattaaaataacttaatgccattaacctagggaattaaaaaaaacttaatggctgagtgtaactgaaattgtggcaaccaaaagtcacccccaacagccaacaagtcagccaccatttggtctcccaaaaggctgatgcctaggttgccaattgggcccttattacaacttgaactaaacctaactaaagcccttttaattgattaacccaaaacatatttttggtcaaccaactttacaaggattgggccattatttacacaaactaaacactctaaaaattgagaacaaaggggtgtcatttagtccctctccatttgggccctgatacaactcacaaccttggactgttctccttgaaacttgggcttgtattcaaatagtatggacagcactt

SEQ ID NO: 246821 - DNA, 306 bp, Glycine max
ttttaagcaagccctccacgaccgaggagataatctgcgtgtattcatgtgccaaccatccgcgcagagtccaccatgacaaaaaataacaaacactacttccagcgaagggggtggagatataataaactgacgaaggagaggtggtacctattaatgtctaacgccacgctcggccgcgagaaaaaaaataaaataggggaaaatttaataggaaggagaaaaacggaatgttggaacgctcggtttgagagaaaaaaggagaaaaagaaataatactgattcttaaaatctgaggaagcagta

SEQ ID NO: 246822 - DNA, 437 bp, Glycine max
agctggcctaattaacctgagattgagagaaaatgattattaaacacacaaaatgaaagtactaagtatttattgactatacataacagaaaattcttataacactacaaaataaccataagttgggagagttagatacaatttatacaagttttatacacaaaagttagtcgttttcaccgactaacaataggctgaactcagtggacaagcaagtcagaaagattcattctaacaaaaagttgttgttctccaatgttaatcaacttcagaagactcttaatgacttctttgagagattcctccactttgaggaatgggtttatgacaagaccataccttccttgattcctgaagtttctcctatatagcatgagccttcatcatcaccaagagaaccaactacacattcatcttcctcatgctcagaaaattca

SEQ ID NO: 246823 - DNA, 197 bp, Glycine max
  unsure (1)..(197): unsure at all n locations
agcttatctgatcagcagcatctctcttatattatctgtactgagaaagattttaaataagacatgtgaactcttactctcatggaagcttaaaatttcagcttcagggcttgtgaagtttgaagccaaaaactctctggacataactctgnaatgagttctgtggctttaattgcacataacccttcaaaaacaga

SEQ ID NO: 246824 - DNA, 424 bp, Glycine max
agcttgaagaatttttatttatattatatatttggggctgaagtataaaataaagagtggatgaagagccttaattgttatttaatagaaaagaatgtaatgattgaccagtaatctaaaagtaataatagattacgtgtaaaatgcgtcggaaactcaataaagcagataagttttttagttctccaataaagcagattttgtcatgaagctatttagtaagatttacccaacaagagcaaaaagttaggacatactttgaataaaggacaaaagttgcatgtattttcataagcaaaatcggtcttgttctctagtaataattgaagttttacttcaataatttgtataataaaagataacattaattagaaatatagagcttcaatataaaagagaaagaaagaatcatgctaatgaccgg

SEQ ID NO: 246825 - DNA, 438 bp, Glycine max
agcttcacctgcaactgcaatccgctttattacctaacaacaggtgatctttatgttgaactttaatgtttgtccgacccataaaatatgaatgatgtacaacaaaaatgttaagaatcttttatagtgttcaccattgaaaatgctcttaaaagtgaacatatttagcatatataattatgttaccaaaatataaattttttacaaattaaagggttactcataattctttaagacaattgtgggaagggttttgtcatgcttttctcccttgcaaatccaatacatataagatctctttcgatataaagtagaagtgtgtttgagagtttttttaataaaataatttatatttataatagagaaacttccataagcatgtatgaattgtatccaaacacattcctaatgggttctagagtgcacaatgtttgaatg

SEQ ID NO: 246826 - DNA, 466 bp, Glycine max
  unsure (1)..(466): unsure at all n locations
agcttagtgggttatttccaactatattggtttgttgagaatttntttctcctccacatcgcacattgggagtaacatccaaaaggtgctacaagtagaaaaacaatttgtatttttctctaaattttttctcttccttttcttataaattatttttttagagcaagaacattggtatttaaaaggttgaaggatcctcttgctacacacgatcaaaaccaacgattgtcgtatcttgagagaagagagcaattagattttcttgtcagtgcaattaggacgttttccctcattgcactcaagatagtgtttgcgtgcttcaacctaggctatttaaaatttctcccttaaaattggtttcctttgggtttattggatggtatattacattggtaatctatgttctgtcatattctaaagctactttgctactattggttntattatttaattgaaggctttacat

SEQ ID NO: 246827 - DNA, 464 bp, Glycine max
  unsure (1)..(464): unsure at all n locations
tatatattcatacttgcttttaaaccagaacatagcaaaataacaattttcaattcttgtgtttccttggtattgactctcgagattgcagatgcactctaacatgcaattatgcctttttttttttgttctatctcagctgcacatatagttctgcacttcccattgtcattgcattttgtgttgtntcccaatggtcactctattattttaaatcaaatcgaattccaattaatgataatttgggaagaaaatttattttctaagaataataaaattaaataatgttaactattctttttaatgaatatgaaattagttntttttattataatcgaatagaatagtatcttttgtaatttcaaagaataaaataacagtttccaatgatgattgatttattatgtatggattgacatgcatactaaattagtgtttntntttttttttatgtagacaacatg

SEQ ID NO: 246828 - DNA, 422 bp, Glycine max
  unsure (1)..(422): unsure at all n locations
agctntataatgaactatctttgcattgctactattcataataatagtaacaaatttctcttccaacatatcaagatcatgatccacaacactgaggtgaaattggacttgctcattttagtcagagaagttaagcccattaaaattggcacaaatgatacataagaatccaatgaattcaaaacatgtattacataataaaattcacataagtgttttgagacataaaatacatgtcatacatatgattcattcagataacggtcaatgtatattgatgttctcctttgggtgatacaccaacacacaacatacaaacataatgatgctaataaaattttaacattatttgacaattaaatatgcaccaattagtagtatctatttcctttgggcatataaataaaactaatgatacacac

SEQ ID NO: 246829 - DNA, 476 bp, Glycine max
  unsure (1)..(476): unsure at all n locations
gcagcttganggaaacccgctgagttctttgttatctccgaaactctatgaggaggccaagaaactactgtgtaagattttctttctttccttgttagtgttcttgatttgtgaatctcacttaaattttgagcttaatatgtggcatgcattgtgaatcacatttttaatctttatcagctaagttgagttgtttatgtatgttgtagggcctttcaaggagaaacgaagcaatgagcttaaattctaatagctcanaatcacatataattttcacatttgtcattgagtctttgtgtaagggactgtcaaattttgtaattctacctaacattaccagcagttgtgtatggaaattgttgttttcctaagattcaagccaggtttatattttctctgttagttctattgctaaacatgatttttttaaactgatgttgcaaggaaccacaaagggtttcaatatctcaaaaact

SEQ ID NO: 246830 - DNA, 424 bp, Glycine max
  unsure (1)..(424): unsure at all n locations
agctngcagcaacattggtttacttgggttcataaacacgaaacatgttcacgcgtctgtattgttttttaaaacatagtgaaacaatctgtcagtgaaaatcatctatatatatgagacacgacaactcgctaacagaatcacaaatctacctgctttcacattttctccctattgttacaacaaagtatgacattcttaggagaaacaagcagtcagacgattgtgaactcaaggttgggtttcacttttccaaatggatcaattatttacagtgatagtgggatttacttccaaagttccactccagtgcccattcgagtaccaaatagttgtgaccttgcaacgctgaaaaccagaatacacatcaccctaaatctaacccacgaacaatttttgaaagaaattcactaccggaagctag

SEQ ID NO: 246831 - DNA, 400 bp, Glycine max
  unsure (1)..(400): unsure at all n locations
gagttnntttggagaggagaataatttgagggttttgcaattccaattnttattacggttcatgcgcactattcacataaaataaaattcattttctgcaattttatttatgcttcaatctacaatttcgttttctactaattaatggaaggctaagtctccaacgttgttttctcttgaggatcaagcacaactctctttgaggttttgttattactattgaattctgatcagttnttcctcttctccaattactctgtatttgttgctattaatccatgcatgcttagtgcttgattaattgtctctgcgcttaatttacgttcatgcttaatgatcagtttccgtcatgattaattggtgtatgtgttgcttagtcacataatgaccacacttatgt

SEQ ID NO: 246832 - DNA, 409 bp, Glycine max
  unsure (1)..(409): unsure at all n locations
ctcttaatgtctntagaggttacttcctcgttgacatcttctgtcttgaatggaattgccatgacaagtttattgttactgtctttgatatttggtagttgatattgtgttgcgggaggtaattctgattggattaactcaccatctcttacttgccgatttgttatgacatttgttgttggatcacctatgatgtcttgtttccaagggtaatctatatcctttttgatggcatatgcatgaaaccaatcaaagaaaaggacattgattttgactctgtcgacatattccgagaattagtcttggatatttttactagttgcacccttgtaatgttgagaaaaccttttctttgaggttcattctctggagaatataatactttctataggttgcttatcaatgctaa

SEQ ID NO: 246833 - DNA, 381 bp, Glycine max
agcttcaacattcaatttcgagcgtcttttatatttctggactcaaacagacatccgagtaaaaagttattgtcgtttgaattggctcataggttcaacattcaatttcgagcgtcccgatatattacgtcactgaatcggacatccgagtaaaaagttattgtcgtttgaattggctgagagcttaaacattcaatttcgagcgtctccatatattacgggactcaatcagacatccgagtaaaaagttattgtcgtttgaattggctcataggttcaacattcaatcttgagcgtctcgatatattacgggactcaatcagacatccgagtaaaaagttattgtcgtttgaataggctaaagctttacattaatttcga

SEQ ID NO: 246834 - DNA, 361 bp, Glycine max
agcttgcctcaaagagatctagtgttgattaagcggctgaaggacccagttctgctcccgaatatgacagccaccgttttaggagcgctgagcacatcaagggatggtcatttctctgggagcgacgcgtccagctcagggatgacgagtataccaacttccaggaagagatagttcgccggcgttgggcatcactggttacccccatggctcaagttgacccagacatagtcctcgaattttatgctaatgcttggcctacagaggaaggcgtgcgagatatgcgatcctgggtgaggggtcagtggatcccgttagatgcggatgctcttatccagtttctgagataccctttagtgct

SEQ ID NO: 246835 - DNA, 458 bp, Glycine max
  unsure (1)..(458): unsure at all n locations
agcttgagtctgaccttgtgtgtaanagttattgaccattgaatctctcgagagcttccgattttcaatatcaaacatctcgatatattatgcgcccgaatcagacatccgtgtgaaaaattatgaccaatagaatttctcgagagctctcgttgttcattttcaagagcctctatattggatgcgcctgaatcggacatctgagttaaaagttatgactattttaatttttcaagagcttccgttgcccaattttgagcgtctagatatgtgattcgcatgaatcggacatccgtgtgaaaaggtatgactatttgaatttctcaagaccttccgttgttcaattatgatcgtctcgatatgtgattcgcgcgaatcgaacattcgtgtgaaaagttatgaccatatgaatttctcgagagcttgcgatgtctaatttcgagcgatcagtatattat

SEQ ID NO: 246836 - DNA, 452 bp, Glycine max
  unsure (1)..(452): unsure at all n locations
cagcaacttgccttctgtaacactggctttttttttcttantttcttccaagcggacggtgtcaaaaatggctcccagccatctaccattaccatccaaggtgccacaaatggctgcacgatgatcacaccagctttctggganatactctactggtctttctggaggatcaagcggctttacaatgggaagtgcaccacctacatgagaaggaatgtanctaagccactttaaaatagaagaaataccttcaagatcatcggaaactgtaagatgaacgactccgctagttgccatgattctaggtccaccaagttgcatgtgagagctcgttacctcccgaccaagatgtttcgttaatgctgaaacaccactaagaattatgggctgatcaagcctttgtttgcctctcatcccaacgctaacaagataagcaccaatctcacagttct

SEQ ID NO: 246837 - DNA, 459 bp, Glycine max
ctatcacgcttaagcacttttcttttgcgcttaagcgagataggggagttagctattataagtcggcgcttaagtgccaccagggtgtgttcaagcgagacaagagtttgctattgtaagtttgtgcttaagtgccacacagggtgagcttaagcgagataataaagatcacgcttaagcctaggataagtcacgcttaaaggagattgtctgtcaagttttctttccacatatcatttgaatttcaatcttaaatgcttcttgaagtgcatgtcaaccttaaatgggatgaatgaagttgacatatcttgttattctcatgtaattcatattcatatgatcggtgtttgattatggaaacttgcagtgtgaaaagtctcatgatgtttagatgaactatgttagaatgatatgaatgatgaatcgacgatgaattggacaatatgtgaataatgaatc

SEQ ID NO: 246838 - DNA, 317 bp, Glycine max
taccatgctacattcactaaaccccattatgttactatggacagatggaaaagaggactcgaatttcaaatcgggaacaacatgaagccggttatggctcctcaatgtgtaagcagaccatattttccccttttatatgtgaactctatggcgaacctttacttgttggatacattctttcggaagaaaaccttggattaaatcacaaaccaaaattggcaacatttataatgcgactctgtcctctttgacatgttcttgaatcctccatcgcttcgtatagaaaaaaaagcgaaatgaatccttggattcatctt

SEQ ID NO: 246839 - DNA, 299 bp, Glycine max
  unsure (1)..(299): unsure at all n locations
ccacattatttccatgacacaaatgcaaaaatgatgatttggaaattntatgcaaaactggtcatgcctgcacctatgcggacactcaagtgttaaatttatatggtcatgtgatgctaggggtcaagattcatttcctctattttagtcaacccaatgtttccaaaatatggtcttttatcaatttgtgcattcctccgagtccatttcgggcgtccggaggaaattcacagcattcacccttcaggtgtagacacgtttgtctcttcaaaaatcggttatgatcaatgaattgaatt

SEQ ID NO: 246840 - DNA, 355 bp, Glycine max
atatcccagaaatttgggaagccactgttgctgctcacgagtttgccatcgttgctctaacaattctttcaaactcttctgatatagtcgaataatgaacttatggctcaataaataatgcctgaatttgccaaggcttcagtgattgcatgatattccctaatataagccgactgtttttgcatcctatatgacagtttttttgagaaataagctataggatgttcatcttggctgataactacaccaatctcaggcgccgaggcgatagtgtacaatacaaatgggcttttaggattgggaatagctaaaactagaaccgaagtcatcacttcttcaccttataaatgcggga

SEQ ID NO: 246841 - DNA, 377 bp, Glycine max
  unsure (1)..(377): unsure at all n locations
gaaataaatttcaattcgaaggctatatatgagttggtacttgattggaattcaacagatggtttgagacagagatctttactaattttttccttttgtttgacttatcagccctttgtggaaagcttgtccagctgtcccaaacatggtgtacacaatccttttaaggcaccagagaggtatgaccagattatcctttgtatctattcattntctttatagaaatagaagcatataataatcttttttctttgtgggattaatgtttgtcataaacgtcaaagaacgaaaaaaaaaatgataggaacctcatcctcaacataaacatttatgccttatgttgtccattataggagacttgtngcccaatgggattt

SEQ ID NO: 246842 - DNA, 474 bp, Glycine max
  unsure (1)..(474): unsure at all n locations
tctaagtcacctgcggcatgcaagctactctnttatggcatgatgtttanttaggttttctcaacactctntatggtggtgtggaccaagttatcatcactcttgcaagagaaatccaagaagcccaatgcattggtttgaggaaatatgaaacaaaatatcagaaatattaaggatgcaacaagaataaatccaagggatttcttcagttgcatccaatatatggatctcttacaattcacacacacatgaaaattgtggcaccaaatggtttgttttgactttgtgtgtgttccttttcttgttttgcatgttgaaagtgtgaccttgttgttgttggtggaggtgtgaatgaaagactntcttctgggctgtttctttctcacctcaagagtgccaaggatcagatctccaaaggtggctattccatcactctgcgtccacctggggacatcctcactgattcaccaaagc

SEQ ID NO: 246843 - DNA, 438 bp, Glycine max
  unsure (1)..(438): unsure at all n locations
agcttggctctggccatcaaatctcatcttattcttaagttcctcaacctttaaacagacatttcggtcaagtaagtgtttttctgaatcaaacagatcanacttgatcttctgatcatctatgcccgtttccagtttaccctttctcatatccaccacacaatcggcggttaacatgaagggatggcccanaatcaaggggaatttagcgtcctcttcaatatccattacaacaaaatctacagggaaagtaaaatgttgcaccttaaccagaacatcttcaattatgccataaggccttgtaatagaccgatctacaagttgtagtgtcattctagttggcataatctccaactctccaattctcctgcacatggagagaagcatcatatttatattgggccccacatcaatgagagctttaccaactgacaccgg

SEQ ID NO: 246844 - DNA, 429 bp, Glycine max
  unsure (1)..(429): unsure at all n locations
gaaaactattgntatagctgaactctatcaacaacagaaaacactccaaactcccattttgttctaatacacatgctcctaaaaggtcctccancgcctgaatggtctgttcagtttggtcatcagtctgaggatggtaggctgaacttatcctaagcttggttcccaacgctttgttcaaactctcccaaaacctagaggtgaatctaggatctctatcagacactatgctagatgacacaccatgtaatctaacaatctcactaatgtatagggaggccaacttctctaaggaaaacctaatattgatggggataaagtgtgcagaattggtcaatttgtcaacaataacccaaatagaatcaaaacctttgggggtcataggtagtcctaaatcgaaatccatggagataccgtcccacttccact

SEQ ID NO: 246845 - DNA, 400 bp, Glycine max
  unsure (1)..(400): unsure at all n locations
agcnncnctntcttcctcgtnttttttttttttaaancagcaaatacggatactatattaaaaaaagggcacaatgggtaccccaacccatatacaaatcagggaaaaaaaaagaaagaatagcagaccaaggttacaacatattaaaatgcaagcacatcaatataaaataaccaaggctaaagctgaaacaaaattaaaatatgcatttatacattaactctgctattggccaaaaattatctttcatcacactcaaatcactcttattttgtattttttatttatattagattttcttaattttctgtctagctcttttgcagaaaataacaatttaattcattagctctagtgatcacagttaattaactctgatatgctgacaccggttagggtc

SEQ ID NO: 246846 - DNA, 440 bp, Glycine max
cgcggctgcaagctgttgaatagtgactggggaattgattttctctgattgtttgatgaaaagagtgtctgtgaatgatatgaatgacaaactgtatgaattgagtggattagaatgattagataattgttttgatcaagcttgcaaccattataagaaaataagcatgtgattggaattatgactgaaaatgttagttagtttgtcagattgattgtgaaggaatgcattgaccgtatcccgatgagagtgtgatccttaaatcttgagagaaatgactatcatttagtactgatttctgcatgaatctctgaagtatggattgaatgcatgaaattgaagatgatgaacgccatgtttgattgtgatgccactttaccaaaacgctgaccacgtgcttaatgattatcctttgacccagttgagctgatgaattatga

SEQ ID NO: 246847 - DNA, 386 bp, Glycine max
  unsure (1)..(386): unsure at all n locations
gcttctttttagacatcgatcggtcatctttttcttttcgacgccgactggcatttttgcgatcactatcggtgaataatatttttttgccgaggtgggataatgttttcctggccgaataaatgggaacatgccattttcggccgaaacgaaacattggttcggctcgcacgataaaacctagccgacctacattgttagtttttgatgcaactccgaaacaagaaaanctcccctgccgtaagaaaaaacattataggccagcaagcgttcttttttataaaaaaattgcgcaatgtcggctgaagaatattagtcatggccatttcacgaccgatgtcggctattgagttttctattcaatccctgaatgaaatttgaaagat

SEQ ID NO: 246848 - DNA, 474 bp, Glycine max
gcttcatgatgatgaatcaagttgattctttatttttgatgatttctaaagatgatgacaaaaatcccaagagaatgatttcaagattgagtcaagaacaattcaagaatcaagagaagttgtatttcaagattcaagaaaagatgaattcaagtttcaagagaagaaatcaagaagacttcgcaagggaaatattgaaaagatttttcataaaacaaacatagcacagttttggttttcaaaagagttttcacaaaattttctaagttaccagagtgtttactctcataatcgattactagtggcaaagtttgttttcaaaagctttaaattgaatttacaaccttccaattaatttcaaaattgtgtaatcaattacaagatattggtaatcgactaccagtgtgtttgaacgttgaaattcaaattcatttgtgaagagtcacatctttcatataagccttgtgtatcgat

SEQ ID NO: 246849 - DNA, 446 bp, Glycine max
ttaagtcacctgaggctgcagcttgaagaagtgtaggtcaatttcttgtgttagcttgaaagagcctgggtagtcgaagagaagttcaagtccatagtcatcaaagtctgaaaagagtatgatgaactaagggatgtcaatatggccaccgatgaagccttggaatgagaaaccaagaaggcccgaaaggaagaacacgaccaaagcaaagttttgaggggctttatagggcagcaatagtgagctcaagctccgaagaggtgaaaggaatcatcacgggtcaaaggcatgatcttgaaggacgagctataggtttgccttatgtcgaaaagaaatttgtcccaacagttaagcgagactgaagggaatatgtgggccatcatcgataagtgcaaagagaagctaaatctagcggcgactcacgagcaaaggctagaggatgagta

SEQ ID NO: 246850 - DNA, 271 bp, Glycine max
caccctcattacaaactagctcttgttttcctctattgcctctagtataatacaccgtggtttggctctctattaggatcttaaccctctgatgcaacttctttacaaattctgacctagatatcccttctttatgtataaaagaagtgtccaacgggaggggaatgatgtctaacagtgttaggggattgaacccatacacaacctctataggggactgcgtggtggtcctatgaaccccactgtagtaggcaaattctacacgaggaag

SEQ ID NO: 246851 - DNA, 494 bp, Glycine max
  unsure (1)..(494): unsure at all n locations
gatcttaagtcacctgcggctgcaactttgcctgaacactacttcattttattgcagagaataactcaagtggttgagacttgtcattgcatgtataccgtacaaaacctgaatccaaattntccttcccaggtagcaactgctgagtatcacacacataggaactgctgccatgagacttttatctggatcctttttctttatctgtgtttcctgatgagcttaaaagtatctatctaaccaagaaccattgaaataataaacaatgggcaggtaaattaataaattaggatccaatatgaacagcagttaacggatgggatgatattgggctgatattctctttgggggcaatttgcgcaggatgtagaggactaaagctgaaagtatgacctcaaccagctgtattttgaaaagccgaaagtaaattccaaatgctaagaatgtgacacgtcataaaacaaaaaggaatacttaagcgtcataccatgaaa

SEQ ID NO: 246852 - DNA, 393 bp, Glycine max
  unsure (1)..(393): unsure at all n locations
agctngaaaaagtataganctacacatgttatgtgtatntaatccaannatgatttcttgtcaagtttttttgtaatattggttagggttaccaaggggttatgagtgatagggtttgaaatcttggtttatctcttgtatggttcaagggaaaagtatatttagggaattacatgtgcatagtggtggtacttggttctctaatagtggagtgttatatgggatcttanaataattagatgtaggtcctcttgaggactaaaatagtataaattcctatcttaattctctctctaaacttttgttntgtgcatttatcttgatattagaattgatatgtgtgggtcataaaactctgtttgctaagattttgaatatattggtttatgtgta

SEQ ID NO: 246853 - DNA, 306 bp, Glycine max
  unsure (1)..(306): unsure at all n locations
agcttgcttgagaagcttctatggaggcctcnatcttnnanannnnaaaagggggctccagatagtgattttcagctcatcgattttacacgatagattaaggataagaggtgaaaggaggcgccatccactagagaataagccatggaaggaaaagcttcaccaccaagagagtgccttatataagaagctgagagaggatacttactggatgaagagaatgacacagagagatatagggggcgtgtgaattgaatgagattatggatataagttgaacttgaagtgtgtctcacaagtttctca

SEQ ID NO: 246854 - DNA, 332 bp, Glycine max
gctctaattccttcacttaagcccctccacctaccatattttgagtccagcaccctatcccacaactctcccgtcgctgaaataggttccaattccacttacccagtaaagattagttaaaggaattaatgtctttgacttccacatgatatatctgatgtaactcaattcaatgtttgctggcatgccccgcaaatgataatttctttaaataaacaaagaatatttctttatggagggagagataccaatacaagaggataaggaatccacaagaactaaatggtaaaagaaattaaaaagtagataactaagcctgaaacatgcaacac

SEQ ID NO: 246855 - DNA, 77 bp, Glycine max
  unsure (1)..(77): unsure at all n locations
aagggaaaagatgtgagaggaaaaaaaaaagggtgatggtggatgaaaaaanggagagaggggaaaagagggggggg

SEQ ID NO: 246856 - DNA, 67 bp, Glycine max
tagagtaaaacttaggtcttaaatgcttcggaaaaaagacccttactagtaccctaacgactggtta

SEQ ID NO: 246857 - DNA, 477 bp, Glycine max
  unsure (1)..(477): unsure at all n locations
agcttgagtctttgattctnaaganaacttctcgtaataaagccaatttagttcgacaattggtgaagttggagtataaggatggtcatagtatgattgagcacttgaataattntaaagggctcgtaaatcaattaaccaaaattgagatgaagattgatgatgagttgcaagcccttctactccttagttccttgctggaaagttgggacacactcgtggttacacttagtaactcagctccagaaggaaagctcaccatggatacagtcagtgacagccctctcggtgaagaagcaagaagaatggaacgaggtgagtctatccatcccgaggctaatgttattgagaatcggggtaggaatgagactcgtggatgtaataagagccgagatcntgagtttcccaacactattcaacactatggatgtaatggtattgagactcgttcacgaagcaagaaagttcgagttttct

SEQ ID NO: 246858 - DNA, 463 bp, Glycine max
  unsure (1)..(463): unsure at all n locations
tgttgtactatgaccactttatatttatatccaagtctgtttagcatccaatctcagttgaagttggtttaaacttcatatngtcaacttgtaacaattttgtattttatatatatagttntgatacttaaatttgtgtttggaaattctgtttctcttatctctttggttcagaatgtctcaaattggtaatggtatttgtttaccaagtgctaatttttggtatgtgactcctcttcaaaatactaaaatttaattcatgactgggaaacgtaggttgtctacatcagaaaatatgcttgtttcaattcaagagaagataaaatgggctgatgcaatgagtgaaattgacaagaaacacaggaaggatgtggaagagaaggtagaagaagtaaagaagtccatttcaaggtgggttggtttattttatnacctttcttttcacaacatttttttctaaata

SEQ ID NO: 246859 - DNA, 482 bp, Glycine max
  unsure (1)..(482): unsure at all n locations
gcttggaaatgatntctatacaaaagttattcttattaagcgactaacaacttcccttacctaacacgccaaagacatgtccatcccataaaacttgatagaagcagcccagacaatacttgtccaggcttgggggcttgacaagccgcatcgacctacaattctctcacctatcgagcttaccacacttgacattagaaaaacactcatccacacctgtgggctcgacaaccctctacttatcaagattacaaccccgaacattagaaactctccttcgacactagacaatctttttcgccgacaagccggctcgaagcttggggggattatgtattgcctagggtctataaaatacacgtggcaccctacatggtactctgagacatgtgtcaacccttcacatcaatcctgcaataggagtgcggacactctgcccttaatagtcgggctccctaattgacaggttatctctaacctat

SEQ ID NO: 246860 - DNA, 496 bp, Glycine max
accttgagcaccgcagctgcagctgtagatatggggacccgcatttgtggtttaggtggttatcgggaaatggtgcaaatcaactctcccacatccacaaatcacacacgaacccaccatccccagttgcccaccttcaactgagctcacgtactcccacgtagcccttatcctcgtccctctcagcaccgggtccccatcaacccctccaagcttcctcaatatccaagcaattcaatatcaaaacatcatgaactaccctaaaccaaaccattcaaacacaatgttagatgttaaaagttattttcatcttggttggttgctatagccaagaggactcgtcaaaatttattagagaatatattgctaaacaatttcttaacacctatgcactcttgcgtgatccctctatagtcattttttgaatcataccgaaaagaatgaaagatgtctcatgaaagagtgtctcttccacatgtcactaaatccctagcaa

SEQ ID NO: 246861 - DNA, 404 bp, Glycine max
  unsure (1)..(404): unsure at all n locations
gcaagcttaacagtcaaagaaaggtgctgatgtatgctttcttgtgaggctnctatggaggctggatcattgaacttcaatgaggtccttcaatggtgattttccaccatggagatgcagcggaagacaaaggagaataggtgagaggaggctccatccactagggaataagccatggaagaaggagctccaccaccatgatgagccttggataagaagcttggagaggatgcttcaatggaggaaaagaaagaggaagagaaagagagagtggggagcacgaaattgaaggaagaaaaatggagagaagttgtactttgagttgtgtctcacaagactctcattcatcatagttacaacaagtgttacacatgcttctatttatagactaagtagcttccttg

SEQ ID NO: 246862 - DNA, 306 bp, Glycine max
  unsure (1)..(306): unsure at all n locations
aagagaaagattggagaagagaggtctctagtaatgcgataagaagtgaccaagttgacgggcgtcgggttcatcaaagaaattgactactcacttggctttccaacgtgatcatggtcaagaagccaaatgggaagtggagaatgtgcacagattacacaaatntgaatcgagtgtgccccaaggatacttacccactctcgatacataatcgcttaggcaatagggtggccgaacacatgatgttgagntttctggatgcgtattccgattacaatcaaattaggatagaccccaaggatgagg

SEQ ID NO: 246863 - DNA, 440 bp, Glycine max
  unsure (1)..(440): unsure at all n locations
tctttcgganaagactttcaagaagtttttgaagatttctcttgatgaanactataacctgcatccttttgagttcaaccattcccacttctgcaccatggggtttgttacctggtgggagaaatattattcgacccgttcagttggagacactactatcatgatctccagacttgagagtggttttacacaaccaacggtcgagaatatccgctcaaaccttcaagctcgaggtattaaattacttttgtctttctaaattgatatgtacttttgccttttctaatattcttactttcaggcaaaacaatcatgacgaagaatagtgctgaaacgtctcgagctgatgtgagacccaagaaacccactgtggtgaagatccaagaacggaaacaagaagacaaggtaactcttctgaacttatcttttactcttaacgt

SEQ ID NO: 246864 - DNA, 469 bp, Glycine max
  unsure (1)..(469): unsure at all n locations
agcttcnttgagaaaacttccttgagaatcttttntgagaaaacttccttgagaagcgagagcttagctacacacagccctctcataactaagctcacctccttgagaagcttccttaagaagattcctcaagaagctagagcttagagacacatacctctctaatcgctaagctcacctccaccccctataataactaagctcacccccatgacaaaatacatgaaaataaaaaaaatccctactacaaagactactcaaaatgcctcgaaatacaaggctaanaccctatactactagaatggccaaaatacaaggcccaaacgaaggataaacctattctaatatttacaaagataagcgggctcatacttagcccatgggctcaaaatctaccttaaggctcatgagaaccctagggccttcccttggatctctagcccaatctacttggattcttttatccaat

SEQ ID NO: 246865 - DNA, 428 bp, Glycine max
  unsure (1)..(428): unsure at all n locations
gcttctccgaaggcatggttatttcctttttcctganaatatctaaaaatctcaccaaatagtggtccttctccttcttggaaggtaccacaacatatggtacttccgcactttcattcacagctatatgtcttttcttttctctagcttgttcacttctactcctctcttcattcttatattttcatctttttcattgttttcatattctttttctttgtctacttctttttctttttcttggtcatttaatttctttttcttgaccattatttngtgttctttatcctgatttctttcacctctcacatcatctttcttttcatcattacctttcttttcagcagctttcttcttggatacaacactattctcatcctgcaccttcacaaacctcttactcattttcatcacagctttacattcct

SEQ ID NO: 246866 - DNA, 438 bp, Glycine max
  unsure (1)..(438): unsure at all n locations
agctctggtgagacatcttgactagctttctcatctgacattcaccacagattctgccttcttctattttcagattgaggatgcctctaacagcacctttgtcaatgattntcttcatgcctcttaagtgcagatgtccaaatctttgatgccatattctgacttcatcttctttggaggatagacatgtggaggagtagctggtttcttgaggtgtccataggtagcagctgtcctttgatctgctgcccttcattaaaacttcactcttctcatttgtcaccaagcattctgactttgtgaagtttacattgaatccttcatcacacagctgactgatgctgatcaagtttgcagtcagtcccttcaccagcagtactttgttcagactatgaaagccattatgaactagctttcccatccaatgatctttccttt

SEQ ID NO: 246867 - DNA, 392 bp, Glycine max
  unsure (1)..(392): unsure at all n locations
agcttgagatgaggaagagnttaatggtgtatacttcctgtctntatagaagaccacagagtggtacctggagatatgtcgcaagggtcacgaaaccttggggacgtcatgtggggtgctattgcccaaaaccaagcttgaccaatcccgacccaacccgggcatagtcggtcagtgagaacctgggatgtacctaagcaggcgagctcctggcagtcaacagataataggaaaacaagaccacaaagcatggaggcttgtggtggctggccagctgtgaatattggtaatatgtggattgtggcctctggtaatcaattactaagggtggggaatcgattacaggcttaaaattgaaacaggaggctaagatggtctctggtaatctatac

SEQ ID NO: 246868 - DNA, 463 bp, Glycine max
  unsure (1)..(463): unsure at all n locations
agctttcatcactcacatatggaactcatctggctcttcatcaaagtgggcgcttctaggactccacgcgtcctcacacatccccatcatcgacatcatcgtacccccattattatggctctcgtcgaaaacggtgttgtcctctgtgcaaaggaggctagaagcaaagtcaaaactgggtgccattgcaagacctcgaattgaaactcaactaccctcttcctccaaattcttcacgctaaaaaaaaaataacgaaactttattttcagattattgatagggtctgtgtgacagtgtgtgtaggcgagtggagtttcttttatgaacttgttaaaaggaagagatgacaatctgtggaaataagaataataaaaccgcttcgggaaaatgcctttacttcattnttgaatgctttntaaacttaatttttttttaattntntaattcagtccttatcacatg

SEQ ID NO: 246869 - DNA, 346 bp, Glycine max
  unsure (1)..(346): unsure at all n locations
cacttgctcaccatctgctctaacttgtattatctacacggcttctctttatacatcatatcgcgaccctctatataaatatagcataacatcactcaattgaaagtgactaccagcataagaaacgaggtgataagattacctntgtgtccttacgaattgaggattaatgtggaaacaaacaacataagatacagaatgtatatacctctatgcacatatacattgatggaataacgaccagattctacttgacagtgacattgacatgtctagataagactgaaaatagttaactatgcctatgttactgcacaatattaagaataggaatagaagattaact

SEQ ID NO: 246870 - DNA, 463 bp, Glycine max
  unsure (1)..(463): unsure at all n locations
agctttcaatgttcttatgcaaaagctatctttgtttcatacttgcgttgccaaactttcaaaaatcttttgaaatngagtgtgatgcttcaaatgttgggattggggctgttttgatgcaagaaggtcatccaattgcttattttagtgaaaagttaagtggtcctacccttaactattaaacttatgataaggagttgtatgccttattacgggctttggaaacatggcaacactacctttatcccaaggaatatgtcattcatagtgagcatgagtccctcaaatatatcaaggggcaaggcaagcttaacaaaaggcatgcgaagtgggtggaattcctagagcaactcccttatgttatcaaacataaaaaaagaaaaggtaatattgtagctgacgctctatctcggcgtgatgcattactttctatgctagaaacgaaattgataggtcttgaatg

SEQ ID NO: 246871 - DNA, 495 bp, Glycine max
  unsure (1)..(495): unsure at all n locations
taagtgaccgccgcatcaagctngatttaaaatgtttaaaaatatctttatttatatatttgaattttattcctttattaatatatatgtgaggggtagagggtgtcacatttatggcttgtacttgtaccatatgccattctcggttttcttcttagaatcgcaaatttattttccttttggtcttgtttctatttagttatatatggctcaagttgaagtccaatttgcaattgagaatagactttcatttttgttctgatctcaaaatctgcatgcattgttaggatcccttgtattttattatccgcttaagtgtttagagtgaatcatcataattttatcttatttgtaagaaatgttttagttgattaagatcagaggatgtatcctcgacccattgctcaaccaaatagaataaatccatcgctaagtagagtgataaatagtatactactggtggaagagttaaataattaaaatactaaaatgttt

SEQ ID NO: 246872 - DNA, 430 bp, Glycine max
  unsure (1)..(430): unsure at all n locations
tgcaagcttnccattatcttcaaccacatcatttctattttaactagattggtgaagatgagttctctgcgcgtatcatccatantctttgaagaactaaagactgaaagggctcaatgggataagtatatcatggctaacatcgctgcacactaggctggataagaagcaagtaaagacaccaacatcatccaacaggtcattcatgataaagaaaggagattnttaggtctggctgacccatccctaccttggattttgatgattacaaaggtataaattgttgataactaatgagttttngttaaagtaaaacaaacctactacatatcaagcgtttagtccacacctcatatctttcaagctcttataagtaagcatccactcataagtgcaaattgagcaaactatttttgttaactatagtata

SEQ ID NO: 246873 - DNA, 431 bp, Glycine max
aacccagctggccagcatacagacctttgcccttccatgcagcaacctatagtaatggagcagcctgaagcttatgctgcaaatatttacaatagacctcctcaacctcagcagcaaaatctaccacagcagaacaatgatgacctctccagcaacagatacaaccctggatggaggaatcaccctaatctcagatggtccagccctcagcaacaacaacagtagcctactccttccttccaaaatgctgttggcccaagcagaccatacatttctccaccaatccaacaacagcgacaaccccagatacagccaacagttgaggcccctccacaaccttccctcgagaacttgtgagacaaatgacttgcaaacatgcagttaacaagagactgcggatgcgtgttcacgaaagaataccacggagtccc

SEQ ID NO: 246874 - DNA, 338 bp, Glycine max
  unsure (1)..(338): unsure at all n locations
tatgaccttcagtcttgcctttcatttccggaacctatatttttcacaggtcagaattagatgcaatatttcgcacgtgatactcttgagtgcataatatttcccgcaaacactgtatggatgtcattcagagccattatccaaacacagtctccatacgtaaacatgaaatccataaaatacctcanattacttaatgaatcaggggatagctgacaaagaaatgatgcaatgacattactagcctaattctgctttgaaaaaaatccaactagttcaagctaagtgcacaacccctccctgtgaacaattgcagccaatgcaacaacaattttgtg

SEQ ID NO: 246875 - DNA, 419 bp, Glycine max
  unsure (1)..(419): unsure at all n locations
accccggaaggacacccacatttcttatttccagtgtctctncagaaaaagcgcttggctacacttatactcgccactcctttcacaaccaattaactgaaacgtacgccgtcctctactacctgtgtggtaggccgaccctaaaatcaccgccacaaatccgttgtcatgagccacggatcgagcccaccgcaaaacatcctctcggcactcaaacacctacaaaatgcacataatggaagtgttctaccagtattcattttattaaagatgtgacaagcatgaacattataacctgagaagccttgaacgctcccgaacaatcaacatgtggggcattcgcaccacatgattgtgcattatcataatccagatccgctcgtacagacattatctcatacatccactcatcgtcatcc

SEQ ID NO: 246876 - DNA, 69 bp, Glycine max
caggttgatactacccctcttataatatctccacttggccaatgcagcattgattttccctcttcactt

SEQ ID NO: 246877 - DNA, 398 bp, Glycine max
  unsure (1)..(398): unsure at all n locations
agtcacctgcggcntgcagctttctcttccataacatttgtgttacaagtgctcccaaaaagagtccacattgtcttgcaaggcacttacgattatggaaatcccataaccaaacggaacattgcatctgcaataggattttcaacggccaaacataacaattcaataatcattttcacataataagggagaggggggtaacagtctgactacgaggatgggtaataagttatttatttaggcttgctcaagataccaaaccacacacgcaagcacatgtaagagcttgtgtcctgattttttctaanaaaaaaaagtgcattaagaataagaattaggtcattagaactctcactatataaaagaacttttaaccctagagcggttgtacacaacat

SEQ ID NO: 246878 - DNA, 416 bp, Glycine max
  unsure (1)..(416): unsure at all n locations
atcatacaattgctcattcaaatcattctcaaacactcatttcatacataacaatccactgcatatcattttcaatcaattcactgttcaaacacccgttttttagaagcaaacaactcaaagtgctaaaatttaaataactgaaacataaaaaccaaaattaaaatgactgaacataaatcataaaataactgaaaataaactaaaatgttcaaaatgcacaaatttaaatgtcctactcctgtggttgctccagtgcatgctcattaagatccaacacctgagcagttggtcaatcctgagagataggctgctctaactcagatgctggtgcagatatcangtatgggtgttggggatggctctaagatctggtctatggaagtctcctcctcctgagccatgtgtacacctgc

SEQ ID NO: 246879 - DNA, 442 bp, Glycine max
  unsure (1)..(442): unsure at all n locations
agcttcttatccaaggcactctcttggttgtgaagctcctccttccatggcttattccttagtggatggcgcctcctctcacctcttctcctttaccttacactgcatatccatggttgaaagtcaccattgaaggacctcattgaagctcaaagatccaacattcatagaagcttctcaagcaagcttccatcaagtggtaatcagagcacaagaacttcaagtaggtgctccttaaacctccattaattttcagctttaccttctcctccattgttgtttcttcatttntctccatgtatctcctcacatgtcttgtgccaaatgttgttaacatgattntttagaatttccaccgattaaacttgctatagaagttagaattgattntctatggttcttatttcttggtcttggtcttgaaccatgaattgtattgagt

SEQ ID NO: 246880 - DNA, 446 bp, Glycine max
  unsure (1)..(446): unsure at all n locations
gcttagagcacatcacatcactaagccctctcttcttgaggctatgcctatntnnccgaagcttatcgtgctacctcacactaagccaaattccctatttgcctcataattaggcttagcgtgcacctcacgctcagcccaaaaccctctttgtcttgcattgggcttagcacgcctttcgtgctatgccccagcctttatcttatgcttctaattgttatgggcttagcaagcactctcgcactaagcccaattctttctctgcctgacttatcattataattgggcttagcacgccacctcgtcctaagcctccaacctaatattttgcattggcactaaacgcccacatggaggcttagcgcccaacctcatttctgattttcttctgctgtatctaattttacttttattaattgttttcctctttgtattattggtcctat

SEQ ID NO: 246881 - DNA, 457 bp, Glycine max
catctaatcatttattctactcaattcttacatttgatcattcaagtcattcacaaacactcattcataataaatcacaccactgaatatcataatcaatcagttcactgttcaaacatgcttttgtataagcaatcaacacttaaacaacagaaatttaaaagactgaaattaaagactaacaaagcaaaaactaaataattgacaagaactaaataactgataaaataaattgttcatgatttgcaaaattttaaaaactatgcagaatttaaaactcctgatcatcctgctgctgatcttctgcatgctcgttcagatctagcactgaagaagctggtggatcctgtgaactagactactcttactccaatgctggtgcatatggcaaggtatcctcagaaataggtgcaggaagctcctgagctactgcttcctcctgagcaattgggtcagt

SEQ ID NO: 246882 - DNA, 63 bp, Glycine max
gaaatataaaaaagggaatgatctctcctcaaacaaaataaagagaggagagagggaggggag

SEQ ID NO: 246883 - DNA, 469 bp, Glycine max
  unsure (1)..(469): unsure at all n locations
cagcttgtgcagatgaaaggaactttctctctgaactggtnagagttntctatacctgtgctcacagcgatatggaagggtaatttttttctactgttaatggtgtagaaatggttattggtgctaaagtttgaagaatctactgatgattataacaagatccagacttatagaggtatgctccttgaatctgaggaatcacctangtgtaggtggtttaactgctgaaaacagaatgttcgtgtaccacataacctatattctcaaccaaggtccaacgaccacacacaggtgactgattgtcatttacagatcgtgtatggtctaaaattaggtattcaaatgaattgggtactcttgatcgaagacatcatgtngaagagccatcggttagtggactatgagttttngtatgttatgttagcctctagattcattgattatttaatatcaatgtntctaatgagat

SEQ ID NO: 246884 - DNA, 469 bp, Glycine max
  unsure (1)..(469): unsure at all n locations
tgagctgcagcttgaagcggcatttattgatgttgtcaatttgtgttaacttgtataaatctaatttggtctttctgtgaaacaagacctgctattaaaattcgacttcctttgaggaagcatagagaacctgatgaaacgaaatccaaatctaaattacaattggggtcttcttctggaagtgtgggggcaatatgcagattccttcactaaaactacccttgcaagtgatcctcattcacaatgtctcaggattacagagccaaaacgggttcttggaaactctgattctagacatggcanagctatgctgaattcagttcatggagatgctgtggtcactaagaataattctggaagtgatcgccagccacaacaacgtctgatgattacagaacccacacgggttattggaaactctgattctagacatgtacaagcgatgctgaattcagttcatggagatgct

SEQ ID NO: 246885 - DNA, 238 bp, Glycine max
tgtgcttactcggcatttaactcgcctctgggcatgtacaccacactcaacaaattactttctacacctacgtgtacgttaatttcaccaatgctgccatgacaatgttccgacaatcctttaaaaccttattgaacattatgagaggctcgttgacatgaggcaatataacgttcttttatttcgtaagccactcttcacttttcctgtgacaagcgaaccatcactgttgcttatg

SEQ ID NO: 246886 - DNA, 433 bp, Glycine max
  unsure (1)..(433): unsure at all n locations
ggatcttaagtcacctgcggcatgcagcttgaagattatggggtacccatcatatgtggtactaagtggcggncgggcgatggtgcacaacaaagtttccacatccacaaatcacgcataaagccaccatcccctgttgcccaccttcaactgagctcacgtactcccacgtagccaatatcctcgtttctctcaacaccgggtccccatcaatcctcccaagcttcctaacatccaagtaattcaacattcaaacaacacaaactatcacaacaaataaaacagggcaaaggcagaaaactctgcccaaaacaccaaccaaaatcacagcttttctcacttaaagaccccagtaacaattccttccttccaaattgtaaccgttggatcgactcgaaaatttactagaagtctctagtacctaagcctacat

SEQ ID NO: 246887 - DNA, 318 bp, Glycine max
  unsure (1)..(318): unsure at all n locations
gcaagcttctancacaatggacttagcctgtattatttctttgatangccctttgagccttgtttccctttccttgatgtgaagctcactacaacgccttaagtgaaaaaaccatgatattaccatatccttaaggaattttggagctctggaattgttttgggaataagtgtggggggttnttgttcattggacaacttgtttgttggctatgcttcatgatgatatttgggccatacttgatgtacattgtgtattggttaaatgttggacatgctgaatgaaatgttgtttctcacaggcttaagagtaaaaaaa

SEQ ID NO: 246888 - DNA, 159 bp, Glycine max
cagaaacaacaaccttctggaggaatcatctggagggcccaagtgggcctgagtgctatttgcacccccttgttactaaatgcacccccctctttatttttatggaaatctttttcccggacattacgaaacatatcgaaatttataacgatacttatt

SEQ ID NO: 246889 - DNA, 388 bp, Glycine max
  unsure (1)..(388): unsure at all n locations
tctattgcatatgtacaaccaactgaacgatgcctctatcagcagcagtcgacagcttggcggttacatcacactgctgcaggaaacaaacatanttttctttcgttgaggttcaacaatgttcaactttaaattttattagactttcattattaatgtctatcattttgatgttacctctgcagtgctggatttacgagcactttccctcagtcacggagtccacttctgatcaggactacaatgaggatccctcgcgtgtatgtaggcggattgcgacgaataatactgtgaagagcatacgtacagtggcgtacaaggagcgcctggaccgactctggattccggatgtctgttggatcccgtatggggagcaccgaccggtccg

SEQ ID NO: 246890 - DNA, 470 bp, Glycine max
  unsure (1)..(470): unsure at all n locations
agctngactatcaactatgtgtgcggttttttaactatttgagccggatatcttggagatcctgcgatcatttaaatcgcgtcgctctttttggaagaaagcccaggatatctttgccaatgatatccaaagcttgtttgatgcaaccatgaaggttatagccctcaagcaaacaagtcatgacatgattgctcatgtgggtaaagctcgggctgccgtggaagaactgagaaagttccttgtagctgattcattggaagaagtgaataggaagcttgacaagttctacatggttcttattttgaggagcttacattcagactttgatcatgtgcatgatcaagtacttgctggggaccagattccatcaatggattccctcatcactagacttctccgcgtgcctcatttattgaggatgagaatcctactgatggagtggagacgtcagccatggttgcgtctcgagg

SEQ ID NO: 246891 - DNA, 327 bp, Glycine max
cgattacacagggcagaatttgaattcaaattttaatagctgtttgtaaatcagttttggccactggtaatcgattacatcctctggtaatcgattaccagagagtaaatttcttgaaaaagaatttttaacttaaaattcttggccaaaccttttgctacttcaactggaattcccttcctatgtaatataccctttctaagactctatagacagtcttgatcatccatcttgaatatctttaattgccttgtcttgaataaagctttgagacacatgtgatcttttggcatcatcaaaacatcggcttgatcctttgtctacatg

SEQ ID NO: 246892 - DNA, 421 bp, Glycine max
  unsure (1)..(421): unsure at all n locations
ctagnnnagctctctgtggtttgactctctctcttttgcgcgccttacctctttttcgttttggagaataattctagttttcttcgttttctactacaattgtgttttctattaattaatggaaggctaagtctccagcgttgttttctcctgaggatcaagcacaactctctttgaggttttattattactattgaattctgatcagtttttcttcttcaccaattactctgtagttgttgctattaatccatgcatgcttaatgcttgattaattgtctttgtgcctaatttacgttcatgcttaatgatcagcttcattcatgattaattggtgtatgtgttgcttaatcacataatgaacgccttatgttaatttcccttataatttatctacaatggattatgtggttgactgata

SEQ ID NO: 246893 - DNA, 351 bp, Glycine max
  unsure (1)..(351): unsure at all n locations
agagggaagtactagatnntgtagagcgtccctttcctgcgagggaagggaatgtcatattctgaaaattttctcatcattccaccatatgggttccaaatcatcaagggactatcttcttcgagcaatgtttgccacaaccccttaagtctagtttatggtattgcatctttcacaaaatctgacttggctttgaattatttcttgaaagttgattttccttgaagcaaaacttcagggggggtgtcatttggatagctagcaatatatagcacacatttgatcctatacaagtttgaagacaatcttttttaatcaaacccaattcaggaaagctatctttcatcactt

SEQ ID NO: 246894 - DNA, 422 bp, Glycine max
  unsure (1)..(422): unsure at all n locations
caacgcgagctgtgaccactgtgcttccttcctgcggagcttattttcatgtccgcttgagtgggcttatagcctaaaccatatttcccacgatntccttgggtgtttatcacgctagttatgccgccattgtctttgcctaaacccatcccgggttcataaccgttccccaacataactcgggccatcattaccgccgcatcggacagacaaggttgcccaaagagggagtccacggaggaaatgctgaccacctcataagactggaaagcggtttctaacgattcttctgcggcttccacataaggcatggaggatgggcagcttaccaagatatctttctcgcctgatacgatgaccaagtgcccctccactacgaacttgagctattggtggagtgatgagtgccaactcccactgag

SEQ ID NO: 246895 - DNA, 354 bp, Glycine max
  unsure (1)..(354): unsure at all n locations
aacatttcctctagtgccatcttctttttcaaacctggtactagaagatgattccaaatctcttgtttccacatgagcagtaaagccttgtggatctaaattctcacaaatggttccttgtgaacaaatctgatcacctgatatctcaagttcgtcacttaccctgttattaggttcaaattgttgagaatgtacagtgggattgcttgtcagctgctacctccagtttcttcaatagtattaacatcaatatcatcctcggatgaggtattagatgtgttactggttgcttgactgcaaccaaaattggcctttgtnaaaatgagaccttccttgttcagaagttaacatcat

SEQ ID NO: 246896 - DNA, 488 bp, Glycine max
  unsure (1)..(488): unsure at all n locations
acctgcggcatgcaagcttagcaagctccgatatctgcaatcctttgtttcaaaaactcatccaacaatatgtgactagacttaacatctctatgaatgacgggcctctcacacccatgatgcaaatactccaaccctttcgctgccccaacagcgatttcatacctggtttcccaatcaagctccatcttcctactcgtgtgaagccggtcccacaagctcccattgggcaaatactcgtacaccaacaagcttgaatcctcgctggttatgctgcaataaagcttcacgacatttacgtgccttatggagctcaaggcctgaacctccgcgtcaaactcctttgacttcccagcagcgaacttattcccaagcatgggagtgctgctccacgacgactttctcctggcggngacatcggtgttccaaatatgcttcaccgcgagttctttcccgttggaaagcgtgaccctgtacacgttcccgga

SEQ ID NO: 246897 - DNA, 95 bp, Glycine max
gggggaggtatgaaatgaaaaaaaagagagatgatggactggaacaaagaaagagaggagggaagagagggaggggagtttttttattttgaaaa

SEQ ID NO: 246898 - DNA, 440 bp, Glycine max
  unsure (1)..(440): unsure at all n locations
agcttgacatttccttctttcttgggagttactcccatcttttaaaatacaaggccaagcttgtcatctcattgggagtntattgcctatgcctagtcaatctcgcaaatttgctcagctctaaatttatgacactgaaaataaaatccaaaatagacttggaggctggaggttagtaaagaatttcttttctataacaattcatatatctgaaaaatattaatgtgatcttaacatctaacattccatatcactaacaattccacttggttatgctttgcagccatagatgccatattgatgaacaaattatgatcaagtgaaaaaaccatgcttcatcagcataatgtctttgctcagtcatttagaatggacaatgagaggtttgttaccacttatacaaatgatctttatattaatatgatttcaatagagacact

SEQ ID NO: 246899 - DNA, 394 bp, Glycine max
  unsure (1)..(394): unsure at all n locations
gcaancttgaaaatgatgctataactacatctttcttattctcaangcttgtatgaaaaagagaggaagtgaggaattgttntctgggacaagaagctaatacataattaaaatgtgcatgtctcgcctaatagcaaaatgcaatccaataacaagcctgtgggcagtagaatcaatgcatatttaattcctatacatgttgaataatttggaaaaactctgagcacattatctttcgaccatgatcatcaaatattttctctaatgtaatatcttgtaaagcatctaaggtagtctctcacatatcaagccctgcctgggtggcaaaaatgaacacctacaatgcctgcaacaaccatatttcattaatgttcattcaaactaatgaattgac

SEQ ID NO: 246900 - DNA, 458 bp, Glycine max
agcttacaagatctaccttaactagtttgtgctctttccaggctaggctacaaacaggttaaaagataacttcaaatgcaaattttaatgtccctaccctttctttcctactttaacttcattcttagtacatggggttaatgattatctcttgctattaacaaattaactttatttattaaattagcaaatctactttgatggatggttaatgagaagagtaaacgtaaactataagaacatgaatatgatagtcaaacacccttaataagaaacaaaataataaataattatatatatataattattaatttcacactaattaaaaaagctagttgacattatttaattttattaatcttaaataaaaaaattaagttattggtaaaatatctttcattagaacttgatattatggataaaaaattattgaaaataaaagctaaactaaatgagaa

SEQ ID NO: 246901 - DNA, 440 bp, Glycine max
  unsure (1)..(440): unsure at all n locations
agctntgcgaanagcttgttgctggagctgtctcattaacttccctatctcttttagactagagatccctgtgctcttgaccttgacttgatagaacctctttttgagcgaaggcatttgacttgatcccatgttntactaaagtgaacaaaaccgatgcgaatcaaaactccgacatctatcatgggtggaatggatgaacgcatgaagaaatgcatatgacacagatgcaatttatgaatacgggagcccgagaaattgtctctttcttagatacaacgtcttggggtagcacagtgcctgacatatatatttaaaaaggtgacacggaccctccattgtgttgcaaagagaggggatcaagacagaactcgtgatgatgcatatgcgaaaggacaacatgggatgtactattcgacaatattacaacaatataacaa

SEQ ID NO: 246902 - DNA, 451 bp, Glycine max
  unsure (1)..(451): unsure at all n locations
agcttaagtntaacgatcaaaatagacatatattctatacatgtaacatatttaaatgttataactgtntttgctgattaaaatggtagaatcgaaaggcaatcccaatattattggccaggcaggatgccaatggcatgttggggatgtcagtaaaggtctacctagaggattactagcgtgaaccgcaaatagtttcactcaatttgtagttactcaattaattcctaaatgtcaaaggatttctttaaaagtgtatttggatgaggaaatttaaaattctgagaaattctaaattctaaaaattttaaatacttcaattaaaattcttttattttcaaaattttgtgtttggataaaaaaaaattaaaattctgagggtgaaagacaaatgaatgcacagagaagagaagatatggttgatgtgcttccaaagagaagaatattgatg

SEQ ID NO: 246903 - DNA, 362 bp, Glycine max
  unsure (1)..(362): unsure at all n locations
aaattccggagtatatcgagacgctcgaaattcaaaatatacctctcagcaaaatgaaacgacaataactntttactcgaatgtccgaatgaatcccgtaatatatcgagacgctcgtaactgaaaacagaagctctgagcaaattcaaaagataataacnttttactcgtacgtccgattgtttcctgtagtatatcgagaccctcgtaattgaaaccagaagcccgtagcaaactcaaacggcaatatattnttactcggatgcccgaatgaatcccataatatatcgaggcgatcgtaattgaaacagaagcttgagccattcaacgacataactgttactggatgataccgtatatat

SEQ ID NO: 246904 - DNA, 438 bp, Glycine max
  unsure (1)..(438): unsure at all n locations
tcaaaattggtaagaacatttcagaaactactttggccatatttaagaaaattgttaatcaattaccagagagtaaataccatgtttttgaaattttaaaaaaaactttttggaaaatgtcctttggccaaaccttttgcatcatcaagtaaagaatgttgtctaagactntaaggactatcatcatttatcttgaatttctaagttcttgacttggattaaacttgaaaagtgcttatcttgtggcatcatcaaaacttcatattaagtatgcttctacacagactacctgcgtcaccgacaggccattttgaattctctgacctcgcacccaaacttcacggcttctcacaatttgatcttgaagaaggacgcatttggcttcatgaagacttcaatgattccaccttgctactgagtatactctacacctacagt

SEQ ID NO: 246905 - DNA, 408 bp, Glycine max
  unsure (1)..(408): unsure at all n locations
agctntttggagtagaaacatgggaccatctcattntatttcaaaaaggaagtcatatctagtcaaggtctgagagaccatacaagtttcctaacgatntctaattatgtgggccattaagtctatcatatgctgacaatagccgagaagcccatgaatctcttcgggggcggagtaggtgtctgccatcgccttggccttggctaacaatcggggaagttcttgactcccgttcaaggtaagagcaaaccgatccatccacatggttgcctcttggtgtaaagagtcgatcacccttcctctagcctctttttccgcgtatacttgggcatactcatccgcaattctatgctcgtgggcgcgggctagacctaactcttcttggtacttggcgatgatagctaacat

SEQ ID NO: 246906 - DNA, 59 bp, Glycine max
  unsure (1)..(59): unsure at all n locations
agaaaaaaaagagagaaaanagaggagagagaagtttttttttttaatatgaaaaaaaa

SEQ ID NO: 246907 - DNA, 294 bp, Glycine max
  unsure (1)..(294): unsure at all n locations
acctgctgcatgctagctagcttatntcgcccatgtatttgttctttcatgcattattttctttcttagtagatcttgtatttcacatcttattattaattgatatataaaggtacatgaacaattcagaatgttcttttaacatgtctaaattgttcatgtacctttatgtgatgaataatgaactattgagcattaatttcattaattttgattatttcttccatgttgtctggactgcaggactatctaaggttagagaacctaattatatgggcacatcatttgttcatg

SEQ ID NO: 246908 - DNA, 458 bp, Glycine max
  unsure (1)..(458): unsure at all n locations
agcttatgcaccttattatgtataaatactaactgattctaagaagccattgtatntgggatgcacaaccttcacacggttaccggcggtgttaggtttggtgaacttgaaggcaagatttgggtggagtgacaaaagcttcactgaattgcttgtgctattgaagaatatgcttcttgaagataacacattacccaagaatcattacgaggcgaanaaaattttatgttctctagggatggaataccaaaaaatacatgcatgccctaatggttgtattctgtataggaatcagtttaccaaaatgtgcaagtgcccaacatgtgggtatcacgctatatagtgaagtatgatgaatacagtggtgatgcatccataaaatacgatcatccagcacaggtgtgttggtatcttccaataataccaaaggttaagcgattgttgctaatgatatgatg

SEQ ID NO: 246909 - DNA, 445 bp, Glycine max
  unsure (1)..(445): unsure at all n locations
ttctagttcccttttggttgggactttctgaaaaaaagaaccattggcgggttctataattgatatagagataaactcacttttatttcaaatgttatggttcattntatttggagggaagcaaatcttatcgttcattctcaagattgtattgtaagtttgtaactaccattggtttgattttacttttccatgtatcgaaactttgattatcaatgatatgatataattcttggttaaataaaataaggaaattgactgtagatgataggttgctgctgaattatctaaagaaagacctttccttcaatacaaaaatacgttcatgagttgtagagtgttgtgagttgtgagtctatgaactttcatggctactttaataacgtgttcggaccgaagaaaataaatgtggatacttttcaataaggtgaatcttgtttcagta

SEQ ID NO: 246910 - DNA, 359 bp, Glycine max
  unsure (1)..(359): unsure at all n locations
gtcacctgcagcatgcagcttgaatgttttagttgttaaaggtgagacttcctgcttttattcgttgaccacagagtggtacctggagatatgtcgcgggggtcaagagaccttgnggacgtcaggtggggtgctattgcccaaaaccaagcttgaccaatcccgacccaacctgggcatagtcagtcagtgagaacctgtgatgtacctaagcaggcgagctcctggctgtcaacagataaaaggaacaaagaccacaaagcacggaggcttgtgtggtggctggccaactgtgaaacttgattgatatatgggatgtggcctctggtaatcgattaccatgggtgggtaatcgatta

SEQ ID NO: 246911 - DNA, 391 bp, Glycine max
  unsure (1)..(391): unsure at all n locations
gggcgacgcgcttgtgttactttanttccctacacattctccctaaatggcactccatcgggtattttaaaagcccaaagagggttgaggcaaggagatccaatctcccctcttctctttgtttttgctatggaataccttcatagggtgcttcatggtcttggatcaaactataacttcaattaccaccccaagtgtgagaagctcgaaaacattcatttgtgctctgcggatgatattcttatatctttaagaagagatcttggatcaatgaatctactgatgaacaaatgaacgagttttttgtgctcatgcctcaaatactcatttaagataagtctctttggaggtggagcagacatacaaacaatgcacaagatctggttcgtgt

SEQ ID NO: 246912 - DNA, 284 bp, Glycine max
ttaagaaacaagagcgcccctccagatttgagttgtctctggccaaagtgatattggctcgaacagttgagtccaaagagctctctgctttcttcaattgaaccgagaactggccagtatttgaggacccttgaagggcttgagctatggttgtcgccttggattgaaaagcccaaaaaactggccaattggctacatcgtcattcttgttcagcatgtgctagccatggtctacaatgaggcttacattaacaagcgacttagagcaaactccttgacaaaaa

SEQ ID NO: 246913 - DNA, 53 bp, Glycine max
gcgggcccgacgacccgggcacggtccacccgcacaccaggggagaggcgcag

SEQ ID NO: 246914 - DNA, 304 bp, Glycine max
tatgagtcataatctctgcatcaatctctgaattttagaatgatatgtgtaaataaggacattatgaaggccatgattatgcatacccaagccttttgaacaaaaagcttactttgaatgataactgtaccctttgcaccctttgtgagttgaatgaatttgtcaataattgaaccctaaacctgaatgattatctccagataccttgtttagactctgagagagcatatgattcaaggcaaattcaccccacatttgggggagtggaactgaatgggatgtaaagaaaaaacagagataaaac

SEQ ID NO: 246915 - DNA, 359 bp, Glycine max
agaccttggggatgtcaggtggggtgctattgcccaaaaccaagattggccaatcccgacccaacctgtgcatattcagtcagtgagaacctgtgacgtacctaaaaaggcgagctcctggcagtcaaccgataaaagaacaaagaccacaaagcaaggaggcttgtgtggtggctggccacctatggatcttgagtgatatttggaatatggcctctggtaatcgattaccaagggtgtgtaatggaaatgggatatcgaggtggcctctggtaatcgattaccagtgttgtgtaatcgattacagagagtaacaggccactggtaatcgattaccagtcatgtgtaatcgattacac

SEQ ID NO: 246916 - DNA, 246 bp, Glycine max
  unsure (1)..(246): unsure at all n locations
aagaagcttctaaggaagttttcttaaggaagcttctcaggaagctaccttgtttataaatagaagcatgtgtaaccacttgctgtaactctgatgaatgaaagtcttatgagacacaactcanagttcaacttctctacctttttcttccttcaatattgtgctccccnctctctctttctctccctctttcttttcctccattgaagcatcgtctccaagcttcttatccaaacgctcatcttg

SEQ ID NO: 246917 - DNA, 337 bp, Glycine max
tcaaccccccacgcagctctctctctctcgaatatgcttggaaaaaatgcttccgtgacgaaaatccaagctgaggggctctcgaaacgtatccgtaacgcttccgcgaggaatttctcacaggtctcgaccgatcttcgacattcttcattctgtcttcatcgttcttcgatctataacgggtaagtacctcgaaccaagcttttcgatacattctatgtacccgcggtggtccacattgtgtttcgagtatttttattctcgtttcatgtacttcttaataccgcctctttgacgctcttaagccattttatctaagtcatttctcgcttaacct

SEQ ID NO: 246918 - DNA, 324 bp, Glycine max
  unsure (1)..(324): unsure at all n locations
ccaccgaaaaatagctcagacaatctaggcccgctgcctctgaacctcctatttacccgtgaagcagcggaacgctctcttactcgcgaccaactagcgaagagcgaagaccgaagttgccctatcacgactcggggattttgctttcattgngacggacgcccaagcacgacactgccactgaatcgccagcacgaagaattggtcatgaaacacacacacacacacgaaccctaatgacacacacacccacacacgtatgatagaaacacacagacacacactgatgacacacacacacacacacacacacactcatcatac

SEQ ID NO: 246919 - DNA, 338 bp, Glycine max
  unsure (1)..(338): unsure at all n locations
atctcagcctcattcgtcacaagatagtgacatggagttgatggtaaatatttgtcacaacaaagtagttttatttcaacctaatttgttgcagcactccatttttatatattacaattattcatgtttggcatttgcatgtaggtccctgcaacaattgttccaccaatagcaaggaataagctaaccataacaagagccaaacaaaggaaggttatgatgcagtataaagaaaactgaagacccattctttgttgcattntgaagggtgctgagtttgaagggtgctgatgaagaaaactgaagaagcatattttggtgcattntgatattacgat

SEQ ID NO: 246920 - DNA, 367 bp, Glycine max
  unsure (1)..(367): unsure at all n locations
gcaaggaagccctcccaagcatagagaaattaaaggaacatagctccctccctattacatgacacactagcagcaaataaccaaagtttgatgtgacaaaatgagaaactgataagaaatatactccctgtatgttctataccacccagcaataagtgacacaagttccccttaattacaaggcgccatactcnctgtatggtctatacaaaacgagaaataagcgacataacgcccccttaattataacgtgccataaaccaagaccaagatcttatattaattagctaatataactattctctattttctgcgatccggctattggcagctggatgttggtaagctagtcactgactttaaatac

SEQ ID NO: 246921 - DNA, 376 bp, Glycine max
  unsure (1)..(376): unsure at all n locations
atgctgcttctaaaacatttccaatggatttaatgatgaaatctgcgcatcctacgtgaaacagacgctaagtttgaaatgcanaaagtagctgatgggctatactcagaaattgggcctatgcgcataatcaccactaagcgcagctctaacgcgcttatcgcacaagagaatctggtatagcatcagtatcatagctgtgcgctaaacgcgccatacgaatttcagtttttaaaaagtagaggcaaagacacttgggttgctaccttggcacccatacctccgcactctctcatacctgagcatttattgttctattggatgctgatcttacctctgcataccttgcatccttcacattctacattacacaatc

SEQ ID NO: 246922 - DNA, 362 bp, Glycine max
  unsure (1)..(362): unsure at all n locations
gaggggctgaggggaacacgttcaacatccttagtaagcatatttcactcatattagtgagaaaaaggagaaaaaaaaagaaaaatcaaggccgaagtgctttcgtaacattttcgttatcaatttcgtggacgttcatcggtctttgactggttagtnttcgattttgaagctttgaattcattctatgtaccctcaggggtccattcttgctctgtatgtcttcagctatattcttctaccgtcggtgttctttttctctgttttaagtgagttctgacccatcggttaagccgtaatctcacttaatcaatgttataataaaattcaaccgatcgtttgtgttgtaatctcgtctaatc

SEQ ID NO: 246923 - DNA, 374 bp, Glycine max
  unsure (1)..(374): unsure at all n locations
gccatatgacaacaatangacccttgtttctctgcctcccacttccaacattataataatctttggtgcattcccttttcattacgaaaaagaaaatgaattgcaccatcgttcaattaaaacaaaattcatggtccattattaaacgtcgcctattacgagccggacaaataacgtaacactttttcattaataccataggtgcaaatggcttcctaaattctgcatacgttgtcataatgcataaaccaacttgatgttcttgttatacactccacatatccaattggaacatacatcaaacctaaaaatcaatctaattccatgtactagaagcacaagagtgcatcgaccaatatangaccctctctcgt

SEQ ID NO: 246924 - DNA, 349 bp, Glycine max
cctataataaggataaatcattggagcggaggtgttcttcttaattcgacacaaaaatattttatccctaatgtgaaagtggacaaacttcactttactcaccatttcatcggaactttgataaagtctaaaaaattcatgttgcgctagtaagactaattgaacaagagtatggctcgtgacagataaataatgacaaaattgtcgagaagcccatcactaaattaatgcttaaatttaagtcatgttcttgcaaatcttactttgccactatatgtcttacaacatggagtggttttttttccaaacactccacatccatgctctttaccaaacagttatactcagg

SEQ ID NO: 246925 - DNA, 376 bp, Glycine max
caatggcgagaataaacactcgatattttgttctacaatgttaaagaaaaagtgttgactacatgaataagatcaaaaaatctttcttgaacatgcccatctttatccataaatctcaacactattgcaatttgttctctttttattcatctctagcttcatcaatggtgagacaaaaattaaaaataccaatctcttcacgtattgcaacacgtacccttctagcaaaaatatacaatatctctctttgatacttggcgagataattgagcatattctgtagccttttcatgacaacattagcaccctagaactatagacgccctaagtttactagctcaataaaatctctctattagtgaccgaagactttata

SEQ ID NO: 246926 - DNA, 349 bp, Glycine max
aatccactctctgagtgttgtaaagaatcttttattctatatcgaacttttgtttatgaaagctatgagtagtggcttagtgaaaaaactatactttggtgttcctagattcaggagcagtctaaagattctgccatgagtggccttaagaatacttgtatgccaaaagtggcaggtgttagacataaggggagcaacatgaaaacttatccttgaagcttgaagtaaaagtctgaataagctttgtcttttacatgcccaactctcttgactaacatttgcattaattgttgtattgtgtgttgcatcatagtttctatcatttcatatgtgcatcatgcatcatcat

SEQ ID NO: 246927 - DNA, 407 bp, Glycine max
  unsure (1)..(407): unsure at all n locations
acacttgccacatgtcctcttttaagtggagcaaaagggtccacctttttcccttgatgtgacttcatactcagccacaaggaggaaaaattgaacctttttggatgctaaaatcctgcctcggtttgcatgccgcctctctggttccagttcctcgcgtttctctacacccattggggcccattttcgaaagtaggcaatatatatatcaaaatgctcagaatgagaccctgagcgtggttcagagggttgatttgttaaattttaagttgcacgcaaaacgataatttntagactaattaattgtgaattactctataatcgctcgcgtacgggttactcttagttaattaatctaacccgcgtatctntccccaatgtacatacttctaccaagaatatatata

SEQ ID NO: 246928 - DNA, 383 bp, Glycine max
  unsure (1)..(383): unsure at all n locations
atgcgagaaaatatagagttaatagactaaaaccatgttacacagcggattcttgtttatatagacaagtagtattgattacacataattagaagatattcaatttctctatatcagatatcaaatcctatcacatcattatacattaaattcctgattctcaacactcccctcaatctaaagctttgttacaagaaaatttattcccaactaataaataaaaacataaaattgagttccaccaaaaaacaatgtttgaaagacaactcatggatgttggcgaagttggagaatattgctagaaagataacattgcccaagagctggaataaccatcagcctaagaaattatggcaagcangtccagcctacttaagaacaca

SEQ ID NO: 246929 - DNA, 218 bp, Glycine max
atacaattataggcaactaactgctgaatccggatatactgtgccttctgactcgccgtaacgacctgaatgaggggtataggccgtgtctacctgtttaacgtcaactctagtggactctacgacttatttctttttcgagccaaatgtgatgcgacatgatatggagatggacttgaaggagcaaactactcttcatgccctatctggaatggaaa

SEQ ID NO: 246930 - DNA, 293 bp, Glycine max
caacaccggggaccccactcgcctaatctccaccagcgccgcaatatcaagccaccgagcattcccatcagcaccaagttttgcataagcatccccgcgagactcaacacctcaagccttatgcttctcgaaaagaacctgagacaaaaccaacggcactgccaaaacagctactctctcaccaagaactgcagcggtttcagctgcaaagccagcgacactctccacaaaacccgtcacatcaaagaccccaccaccagggaggctcagaggttgcgccacggcctcaccga

SEQ ID NO: 246931 - DNA, 393 bp, Glycine max
cggatcttctcgaaatttggtctgcagctcgacaagacacttggcctcgatctgaccgttgggatctttgagaatatgtccggagtgtgctcacagcttccgttcccgagagcatttcttatttaagcactttcacctttgcttcgggtagcttcgaaaaacgtcatttcttcttctctctttcttccaaagccatttataatgttccaagcactttcttcatcacccacaaccaccattagccacctaaaaccatcgttgttctccattgaaaccccacaccgagaggaatactccaaccgaagcggaatctttcaactcggcttgcgggtttgcgagagaaagacactctaatcttacctctcattctctttccatgtaaccatggttcta

SEQ ID NO: 246932 - DNA, 329 bp, Glycine max
tgtctctctcttgtgcgggaaacaacaatgtcttttggtgtttcttcttattttctttgtgaaagtggtgttgtagatgcatatatgaagggggattgtgaaccgcaatggacaaaagagtttcaagtccacgtgcttttggttcttcctacgtgtaatcccattcgaccagtgagtacacgccgggacctccgacaatgtgtttggttaatggccatgtaagccaatcaaagatcccgactaatggtagggatcttagacaacacttttcaaatattatggactccactcaaagaagtattatcaggaccccatgtcaaaaccagttt

SEQ ID NO: 246933 - DNA, 476 bp, Glycine max
  unsure (1)..(476): unsure at all n locations
cagctgcccccatttcctataaaaggttgattgngaattatttaaggcncaaccctcctggtatgtgagattcacttaaaattagtgagaaaaattgtttccatgaagaaaatccacgccgaggcgcttccgtaacgtttctgtaacgttttcgtgggtgatttcgcgaagattttcaaccattcttcgacgttcttcttttgttcttcgtcgttcttcggtcttcaaccggtaagttcccgaaatcgaactttntaattcattctatgtacccttggtggtccccatttgtttcgcgtacttttattttcgtttcatttactttccgtaactccttttgacgtgctttagtcatttactcgcctaatcaaaaataaaataaatttccaccgatcatttgaatcgtaacatcctttaatntcagctaaatgaaatctgaccgtctggtcatgccataaccatgttggaaaccaaaa

SEQ ID NO: 246934 - DNA, 362 bp, Glycine max
  unsure (1)..(362): unsure at all n locations
tagtgaataggtctttatccacccttttaagggctcttctgaaaggcaaccataagtcttgggatgagtatcttcctcatgtagaatctgcctacaacagggggggttcattgaaccaccaagcagtccccttttgaggttgtctatgggttcaatcccctaacatcgttagacctcattcccctcccactggacacttcttttatacataaagaaggggaatcttggtgagagtttgtaaagaagttgcatgagagggttaagaaccaaatagagaaccaaacaaaggtgtattcaactaaaggcaacagaggaagaaaanactagttcttaatgagggtgactgggtttggctccatctt

SEQ ID NO: 246935 - DNA, 395 bp, Glycine max
  unsure (1)..(395): unsure at all n locations
tctccattctgctgccattcatcttccaagaagcaaaggaatccattgatgaagaagatcctagtcctacaagctccaatggagcttacgtcaaaaaattatcttctcctttttggacaaagtatggcaagctgggggcaagtaaattttcttcccatcagaccttggatgcaactattatcgtatcctcatatcagctagatcttgacgggtattcaagccatccttcgtctccccttgaatgttaaggagcgtcccaatcacactgtcacaaacattnttctccacatgcataacatcaatacaatgtctaactcctagagcagaccagtacggaagatcaaagaaaatggacatcttcttccatatgtaactcttactttcatccttctttt

SEQ ID NO: 246936 - DNA, 415 bp, Glycine max
  unsure (1)..(415): unsure at all n locations
gtcgagccncatccagagaagtagagtctatctctcttatctcagcgagagtgaccctcctaaattcttgagcgatacaagaacaccctggctgatcaaaggactctcacaacctttgtgtgctcgcctcgctggaaagagcgattctttccttcctctcatcttcacccttggctctcaaaccacaatctccagaaattcacctctgcccagaattatctcgtggccataactcccatcctacgctctcaaattaattgactcctgagcctacattgaatttcacaacgagacctttcacctncgttntggaatcacctcatgtggagccctgcagcttcacgtattgccatntctatattcctgtccagacaccacttaacctacgtgtcaccatcttattcatccactttat

SEQ ID NO: 246937 - DNA, 387 bp, Glycine max
tgaacaacagaagctctcgagaaactcaacaggttttaatcttttactctgagggccgattgacgcacataatatatcgagacgctcgaatttgtacaacgaatactctcaagaaattcacatggtcataacttttcgaacggaagttcgattcacgcgcatattttatcgagaagcttgaaattgaacaaccggagctctccggaaattcaaatggtcatgaccttatacactgaggtccagattacgcgcttaatatatcgagacgctcgaaattgtaccacgaaagctcctgagaaattcaaatggtcataagttatcaaacgagggtgcaattcacgggcgtaatatatcgagaagcttgaaattgaataaccgaagctctcc

SEQ ID NO: 246938 - DNA, 247 bp, Glycine max
acaactgcgatatattcaacacacgggatcaaacaacatgattgggcacaaaaaccttaaattcagggatttatctttcctatgggtgctgggtgcccacatagctggtgccctacacctttaatgtataccacgtgcttacttacactaatttacctaaaaaatatctgcatttaaatactcactataattattaattaattttttatacactctccctgtcatgatatgttattaaccttattaa

SEQ ID NO: 246939 - DNA, 221 bp, Glycine max
  unsure (1)..(221): unsure at all n locations
gaataatagttaagaccgggcagatgtctgttttctaagtatcaagnggattgagatcataaacaagtccctatgcatctctctcccaagtataaccaatcaacttcaccaaattggggtaacctctcaatgttggattagtccaaaattttaccttcctcctgcaaaacagaatcattgaccctcccaaatccccgacagataacgataaatctcgaaaa

SEQ ID NO: 246940 - DNA, 220 bp, Glycine max
atctttcttaggcaattcataagcggcagctatattcgggagattagtaataaggtgaggtaaaataagtatgcaacaaggggggtgtattccaacacaaagtgcatctcctttgatgtggattataggttatgaaaatgaacgatagacaactcatatgctatctaactgtgtacagagattaataaaaaaaattgtgaatgctgttgacagaatacaa

SEQ ID NO: 246941 - DNA, 232 bp, Glycine max
ctctagtgataaaaataaaccacctacatgacgagtcactgctatgctctgaaaatagctcaactgtcccaagtcctttatagcaaattctgagctatgaaaggatatgatagatctccggagctcattcgacgaagccaactaaatgaaatcatccacatactataatatcgaagccatagagacaccttgatgataaatgaatagagaatgatccgaagtactgtgaaag

SEQ ID NO: 246942 - DNA, 299 bp, Glycine max
accccaaaattaaaccgattatctgtaattgagccaatagcattttcactaaaattggtctacggaatggtgtaagtgacaatacatatattggtgtgctgcttgtaaatgatcaagcaacccaaggagatgagacaactgtagaagactctcacccatgccacaagaatctgctctccagcagatatagaattgtcaatagcctgccttccggtaatattaccagaagaaaactccaaagctataaacatctgatctcagagccagttgaccagacattgcgtacactggagcacaat

SEQ ID NO: 246943 - DNA, 219 bp, Glycine max
  unsure (1)..(219): unsure at all n locations
cccccaanncnccnccgcccgccaaggaattttgcgccgaaccgccgaacaagaccgtagaccgaacacacctcaacaacgaggcttccgcacacctcaccagacacaaacgattagagaaagggcgcggacacggacccaggcatgacaaaagccgacatcacgtgccaaaaggggcgaagaacggcaggacgaccgcagcaccaaccgtccgaacca

SEQ ID NO: 246944 - DNA, 392 bp, Glycine max
cgcttaaacttgcaccaggagtgagcggtattttattcgtcttcaaactcttagaggtgactctgagcgtttgtttatggaggagtccgagtcaatttctgattatttttctcgagtattggccgtagtcaatcaacttaaaagaaatggtgaagatgatgatgaggtgaaggtcatggaaaaaatacttcgaactttaaatccaagttttgacttcattgttaccaacattgaagaaaacaaggatttaaagaccatgactattgagcaactcatgggttccttacaagcatacgaagaaaaacaaaagagaaaaattaaacaaaaggaggctacggagcaactactacaactcaacgtgaaggaagcaaactatgctaattacaagagcc

SEQ ID NO: 246945 - DNA, 345 bp, Glycine max
  unsure (1)..(345): unsure at all n locations
aagctgtggcaatgttattgcatatcctcgctcacaacctaaagtatatagtngtgcactttagttattgtagatccatggaaacaattagtaggcaattcaagaatgttctgtgagctataatgaaagtcagcaaagaatatttgaagttccatgagtataatctatagggctcggtggaaaacaaattgagatggtttaaggtaagtttgtcatttgtagtaattataggtactctacgtgactgtgacttattttctatttggaatggttttagaattcgattggagcactcgatgggatacatattccagtaacagtttctgcagaagatagacctacata

SEQ ID NO: 246946 - DNA, 258 bp, Glycine max
tttagaaaggggactgggcctaacataaggcatcatccagcgcatctttcatgggtcacgggtcaagattatattccttgtgtgccaggtaacgaagtttttaaacaaaacaagggactgatgtagctcttaagagcttgtagccctgatcttctcataacggagactatgcctcttgagattatatagcgaatgggaatggaaagaaattggaaagctcttcagggaaagatagtcagaaaacctcccccctatgaa

SEQ ID NO: 246947 - DNA, 389 bp, Glycine max
ggagggggggcaccacattgaacgagaacaaaagagagacacactgaacgccgaagtgcgcaccacaagtatcacactcatgaaagtttcgacaagagctacacatgcttacatccatagcccacgacactacaaaaacgaaagcccccgtgagaactaatagctcagctacacacactcctctcacagataacctgactctcttaactaaagaagctagagctcaccaacacacacgcctctaatagccaagctcacccccatgccaaaacacatgagaatacaacacaggccacactaccaagaccactcacaacgccccacaagaagaaaaacccatcctaatatttacaaagacaagcggacccaaccctggcccacgggcccaa

SEQ ID NO: 246948 - DNA, 325 bp, Glycine max
aacggtgagaatgaaggagaaacccatgctgcgaactgccggtcctacatggaaactcccccgcctgctcaacaacatcattactcagccaatatcagcccttctcattacccaccacccagtcatccatataggccatcccttaatcaaccacatagcctgtctaccacacttgctaagacgaacaccacctctagcacaaacccaaagcaccaaccacgaaatgaatgttgcagcgaagaaacctcgagaattcactccgattccggtgtcttatgatgacttgctcccatatccactcgatatacaatgatagtcatgaccc

SEQ ID NO: 246949 - DNA, 328 bp, Glycine max
  unsure (1)..(328): unsure at all n locations
ccatgtcctgttgcccaccttcaactgagctcacgcactcccacctagcccatatcctcgtttctctcaacaccgggtctccatcaatcctctcaagcttccccaacatgcaagtaattcaacatccaaatcatcacaaactaacaaaccaagcaaaacagggcaaaggcagaaaactctgcccaaaacacaactcaaaatcacagctnttcacatacaaataccccagtaacatttccttcgttccaattcgttaaccgttggatcgactctaaaattgtactggaagtctctagcacatacgtctacattctgaccgttgggatct

SEQ ID NO: 246950 - DNA, 383 bp, Glycine max
  unsure (1)..(383): unsure at all n locations
tcctnancnaccgacacccctctattaactaaatgaacctccctgaaaataattacggataaaaataacgcaacaaatataatcaaacatcaaacataattactaataatatatagatatatatcaaggttttacaggaagcatcatcctccttgcggcagggtataaagtgtgtcatcttgctaaacctatcaaccaccacaaagatagagtcacacacctcttgggttctaggaagcccaaagacaaagtccatactaatgtctacccaaggtgcatatgggatggataacggtgtgatagcctatgaggcatcaccgtagactagggcttgtaacaagccacacacctagtgcaatgcctatggacatctntcttcatat

SEQ ID NO: 246951 - DNA, 262 bp, Glycine max
gcgcaagaccgttgagaagcaccttaggggcctaaacccacccaatacaaatcactaagagaacaagaagctcgcggctaataagagaggcagaaaactgaggagacaaaccttgcatgtcccctaatgcatttcgaatcaggcgccaacgatcatgtcaacattatataatatgtactttgccaaaatgtgatccatggagacctagctctcatacatctaaagagagaaaagtggagggaggttccatatatcatgactt

SEQ ID NO: 246952 - DNA, 364 bp, Glycine max
  unsure (1)..(364): unsure at all n locations
attatgaataacaagatgaggtggaaagtgcttacagagttcacttgcatgtgaaaaattttcaaaaagaaaaagattcaagttagaaggataatgcaaccaagctaatacttaccaagaaaagaatgttttgtaaaaacatcttcagacaatttaaatatttttatttggttatattagtataaatcatctctaatccatatattttttaatattatgcgttttttttttcattntcttttgatatactctatgcttaaataactcgaatctaatataattttcgttatcaattatttctagatttgtatattatttatacaaaagtttataagtttctttctttagttaatattctactaag

SEQ ID NO: 246953 - DNA, 283 bp, Glycine max
  unsure (1)..(283): unsure at all n locations
ccctaacttttaagtagattttaggtttaggagtgattnctatgttcctagaggtggagaagacactcccactgctttcgaatctggtattttctctaaaacccttttctatttgtgaaaggtactcccttgtcatggagggatacaatcctttgttgggaaattcccgtgagtgcttgatgtaaatattattactatctatctgaagctattcttatgtgttcaatggttttatctgcgcttatgttatgcatgcttgcggcttgatcacccatctgtgtgt

SEQ ID NO: 246954 - DNA, 357 bp, Glycine max
  unsure (1)..(357): unsure at all n locations
atctatcttgggcctttttcctacnactctaaaaaatagaagagaaatgttcatctaaagcatacatgtccctaatgttatcaaatcctaaaatttgagctcctagggagaaaaacaatgtgtgtctcctagagagggcatcaactaccacatttttttccctttttgtatttgataacatatgtaaatttctctaggtactctacccattttgcatgccttttgtttaacttgctttgccctctaatgtacttaagtgattcatgatcactatgaatgacaaattccttggaaacaaggtaatgttcccaagtttggagggctcttattaaggcatacagctctctatcctatgtg

SEQ ID NO: 246955 - DNA, 264 bp, Glycine max
caggagacatcctcaccacttgtatttttccaatctttcatcctggacttctatctgttgcaaagaaggctccctagttatcgaaagctaaatcctctgttggatcacccctataagtacctgatgtaaatatatttctatatattcaatgatggtttgagtgacctctgagccatctgcttttcactacagcatgcctttaccttgatcacgcagatgcatgctttgttagggtcattcaaccatggaaaccgggctgattct

SEQ ID NO: 246956 - DNA, 341 bp, Glycine max
taggaactcttggacccaaaaacaaaaaattgggtgaggttgggaagcaaaattaactttcttcatgcccaaattgttggaaagaaaacaataaaattcaacctatctttacaattattctagaagtgtagggatgatgttggtcttggaaaatgccttgaaggcaccttgaccttagtgatgaacttattggctattaaaagggacccctaattatatataagacttaacctaattggtatgacaactgatttaatgctgtatagtgaactttctgaacttggtaccctttgacactttctagaaactaggaaatgtattatgagaggaaatatgctatt

SEQ ID NO: 246957 - DNA, 373 bp, Glycine max
  unsure (1)..(373): unsure at all n locations
tttttttggctnatnccctagaggatggcgcctcctctcacctcttctcctttgtctttcactgcatctccatggtggaaaatcaccattaaaggacctcattgaagctcanagatccagcctccatagaagccccacaagaaagcttccattaagtggtatccgagcacaagagcttcaagtaggtgctccttaaacctccattgattntcagttttaccttctcctccattggtggttcttcatttttctccatgtatctcctcacatgtcttgtgctaaatgttgttaaaatgattttttataatntccaccgattaaactagctatagaagctagatttgatttatatggtcaaaattcttgtcttgac

SEQ ID NO: 246958 - DNA, 330 bp, Glycine max
ttattgcatagccttgatatagacttcatccctcaaagcttcatctatcatctttggttccatttatgaatgcaaagcaatgtgagcttgttttttgaatgttgatatgattctaactttatcacaaggacttcgtataatttggtaatatagataatagctttcaattgccaattacttttggtatctaacttccatatcatattgtaagtgaagaggtcatgatacatgtaaaattatataccacttataaatagattaaattacatggattcctccctaagatctattcttattacactttctcaggaggtcaactcaacttactca

SEQ ID NO: 246959 - DNA, 388 bp, Glycine max
cctgtttcttctaaaatatcaagagcatacttcctctgagaaatcacaataccatctcctgattgagccacttcaataccaaggaaatacttcacagatcccaaatctttggtctggaaatgactgaataagtgctctttcagctggacaatcttagtagtatcattccttgtaatcactatatcatcaacatagaccattagatagacacattttccaggagatgtatgatagtaaaatacagagtgatcagcttcacttcgttttattccaaacatttgaacaacatgactataattaccaaaccatgctcgaggagattgtgtctacccatatagagatcgacgaagcttacacacaaggtcatactcctcctgagcacaaaccc

SEQ ID NO: 246960 - DNA, 371 bp, Glycine max
aaaccctgtgataaaggagcaaattgatccacatcgggatgatccttgttggtttcagaggttcataagatgatgcactacgtttcactaaagtgttgctgctttgaacaaaaggaaatgcatcaacgtactcccaataagatggatcacgctctgtggatctttcgcttcttttcatcggcttcttcggtgcacctttagtcttgaccttggacggaggaggaaacatagaagttttctcagggtatgtaatttctcaaagttactctttagaagaacttttccaccaacatcaacgtccttaaatccctgacgtatggtctctatctcatcgtcgatgcttgactttgcctcacataacccttcatcat

SEQ ID NO: 246961 - DNA, 375 bp, Glycine max
gttattgtgctagcaatcaatggggcaaaacacaccaaaagattatgatgatggatggctcaaattctcacaaaggtaaacttatcactttcaaattgagctttcaaaactatcatgacatgtacaggaaaaacaaggatttcaaatcacaaaatgtcaagagacttttattttcaaaacaattacccatttcttgaacatatcctataattcaaagaaaaatatgcaaatttgtacatgcaaacagaattgacctataatattaaactagaaacccaacaaaactaacaaaactaacaaatttaacacacacaaaactaacataactagcagaaccataaccaaagaacactccccccatacttacacaacaca

SEQ ID NO: 246962 - DNA, 303 bp, Glycine max
ttactcgccttttacatttaaggcactcagcttcaaataacaacccacataacctttattcttgaacttcattctcttttcctttttctttattttagcagcttttattagctgcttccttacaatattctatgtggctgctatctgtcttaccactcttattgtcacccaataatcccccccaaacttgggacaaatctgctctgaaccacaatgctctcttacaacctaagacaaggtagatggagatatgactttaccagctcagggttcagttcaatcaatcaaaaacaagctcaacat

SEQ ID NO: 246963 - DNA, 241 bp, Glycine max
caatcacctttccttcttttccattccgtcggcatcgaacttcaagaagcacagggctctattgatgaagaagatccaatgctcacaagctctatatggagctacatcagtctatgaaatataggtggaagtcgtgcataatattcgatcgatatcatcttttgggggagcaaggatatcatgcatatgttacaatttagatgcaaacaatatttgcatagactaaccacccaatctgggt

SEQ ID NO: 246964 - DNA, 143 bp, Glycine max
ccacccaaacacgccaaaaaagccgaaccgcccgcgggcaaacaaaacgggaccataaacacaaacggaaactccaaatgccaggcctcgacaccacgcaaacagccacaacaccgcccaaaaagcgtgcagccacaaagccc

SEQ ID NO: 246965 - DNA, 325 bp, Glycine max
  unsure (1)..(325): unsure at all n locations
cctacctgggccaacnaagtatctaggacaactcttcctttaagatttaatatacctatcaactttatgagccttcagtctcttatatttctagttatgaatttttagtttgtcccttgtcttgcctagatatttaataagacttgttggatcatatgcggaaaaacatgggacnttatggccactgagctggatgcaagaggtaactagacaatttaaactataactatggtgagaatgctatgaataggctcttactgacatttcttgggttaggagtgatatgttaaacctgatgatcacctataaattgatgtgacacctg

SEQ ID NO: 246966 - DNA, 385 bp, Glycine max
  unsure (1)..(385): unsure at all n locations
ccggccncgaaccagaaatctgtacctgtcgcacgggctcgtggctcgcgctcctctgctgaccaccacacagacctttgcccttccacgcaccaacccggggcaatcgagcagcncgaagctcatgctgcaaatatttacaatagacctcctcaacctccagcagcaaatcaaccacagcagaacaattatgacctttccagcaacagatacaaccctggatggaggaatcaccctaacctcagatgggccagccctcaacaacaacagcagcctgctccttccatccataacgctgctgcgccaagcagaacatacattccctcaccaatccaacaacagcaacaacctcagaaacagccaacaggtgatggccctccacaac

SEQ ID NO: 246967 - DNA, 156 bp, Glycine max
tgctgaaccacggtaaaactttgtgaccactctctctcctctccctattcaaatctcttcttcttattgctctatactaacaaaacccgggataggatgggttcacccacgagggcgagttgcgcataaaatattttgggcatgtcactatataaa

SEQ ID NO: 246968 - DNA, 364 bp, Glycine max
  unsure (1)..(364): unsure at all n locations
tagtatcccactagtaaaactaactttccaaatgtttgccttcgcaggaaatggccccgaggaagcttgcctcaaagaggtccaggaaggacaaggcagcagaaggaactagttccgctccggagtatgatagtcaccgctttaggagcgcggtacaccagcagcgcttcgaagccatcaaggggtggtcgtttctccgggagcgacgcgtccagctcagggacgaggagtatactgatttccaggaggaaatagggcgccggcggtgggcaccactggttactctcatggncaagcttgatccagaaatagtccttgatgtttatgccaatgcttggccaacagaagagggngtgcgtgacat

SEQ ID NO: 246969 - DNA, 334 bp, Glycine max
  unsure (1)..(334): unsure at all n locations
ccacaactctcgtaaatgggagagaaatattcatctaaagcatacaagtccctaatattatcaaatcttaaaatttgagctcctaaggagaaaaacaatgtgtgtctcctagagaaggcatcagctaccacatttgtttttccctttttgtatttgataacatatggaaattgctctatgtactctacccattttgcatgcctcttgtttaacttgctttgccctctaatgtacttaagtgatngatgatcactatgaatgacaaattccttggaaacaaggtaatgttcccatgtttggagggctcttattaaggcatanaagtctttatcat

SEQ ID NO: 246970 - DNA, 189 bp, Glycine max
attactcttactttctcagcctttttcgattacccatttggttatttcgccctaatggctcttgctccatccaaaagttccaccttttctggtttttcttccaaacccagtgttgggggtgctcagaaaaacccaacttgctctgtttctcttgagcttttgaatgagaaacttggaagcagaaacctt

SEQ ID NO: 246971 - DNA, 380 bp, Glycine max
tatgagacaaaacgaacaagtgttgtaacactgtcagtctactggatgaaggaaacttaagcatattgagtgaatcttagctctgctaagttaatgagtttcattgtattcgagcttactgtgtaaacactcattgagtgattagaataaatttcctattaagtgtagtgctaggagtggcctacagagttcttgtagccaaaagtggcatagagaatacttggttataattaaagatatgataagtggaacacttcaaggtttgaagaagaactggacgtagctcaagagctgaagtgaaccagtataaaacctttgtattttctttactgcttctatataactagttcttttctattaatcacttctatgctactata

SEQ ID NO: 246972 - DNA, 254 bp, Glycine max
  unsure (1)..(254): unsure at all n locations
aattatttaaattattacaacctaactaaaaaatgtcgttataagagtacaattgtagtgattttaaataattgaatgacgtgataaaaactacttaataattgagatacccaattgagattgtattntaccagaatggtttactttataaaactaattgctaaagtgagcatcttacaaaactatttacctaccatggtaattnttgtacatatatatgatgcacaaggcgttactttgagtaacaccttatg

SEQ ID NO: 246973 - DNA, 464 bp, Glycine max
  unsure (1)..(464): unsure at all n locations
aggatgctctggtggagganaataaatatagaggggggagcacgaaattgaaggaataaaagagggagagaagtggaactctgaagtgtatctcataagactttcattcatcaaagttacaactagtgttacacatacttctatttatagactacgttgagaagctntcttgagaaaacttccttgagaagcttctttgagaaaactctcttaagatgctagagcttagctacacacatccctctaataactaagcttacctccttgagaagattccaaaagaagctagagcttagctacacacacctctctaatagctaagctcacctccttgagatgagaagctagagcttagctacacccnncacccccctataatagctaagctcaccccaatttcaacaatacatgagaatacaaaaaacagtccctactacaaagactactcacaattcctgaaatac

SEQ ID NO: 246974 - DNA, 311 bp, Glycine max
  unsure (1)..(311): unsure at all n locations
atattattttttttacactaggcatcaattaaaaatcaacttaggtatgattattaaattaattattacaaaattcaataatattatcatacatatataacaatgtataatatgataattatatataaaatatttatattatcaataaactctaattaaatttgaaactaatacagaaattgaaaaagctaaagacatattttacttaaaagttattgtaataactgccgaagttatttatcaagttccaatcataagggaataatntntgatgtgtaatcataaggagtgtatttcttaatatagtttca

SEQ ID NO: 246975 - DNA, 298 bp, Glycine max
  unsure (1)..(298): unsure at all n locations
gagagaagcggaactctgtcacatgcctcacaagactttcatcaaagatacgacaagtgtgcacaagctcttatttatagactagggagcttccctgagaagctctcttaagaaaactcccttgagaagcttctttgagagaactcccctgagaagctagagctcagctacacacacccatctaaaaactaagctcacctcctcgagaagcntccctgagaagctagagcctagctacacacacccatctaaaaactaagcccacctctctgacagaaacatgaaataccaaaaaaag

SEQ ID NO: 246976 - DNA, 374 bp, Glycine max
  unsure (1)..(374): unsure at all n locations
agcaagagaagttaagttcatagccatctaagtctgaaaagagtatgatgaactaagtgacgtctatatttccnaccgttgatccttgtaacgagaaaccaataaggcccaaaaggaataacacgtgccagcaaagttttgaggggctttatagggcagcaatagtaagctcaagctccgaagaggtgaaaggaatcatcacgggtcaaaggcatgatcttgaaggacgagctaaaggcttaccttaagtcgaaaagaaatttgtcccaacagttaagcgagactgaagggaatatgtgggccgtcatcgatgagtgcaaagagaagctaaatctagcggcgactcacgagcaaaggctagaggatgagtacgc

SEQ ID NO: 246977 - DNA, 352 bp, Glycine max
ctgagcttcatggagttgagtcacatgagctatcatttgttcttcaatcattttcttcatattataagtcctctcatattgaatggtaggaagttggagtatgcattgaatgaacgagccgttgtcggcgtcctttataaagaagatgcaagcatcatcgaagtaatacttcctaactggtcgtaacacttgaaggacgtcatggtgcttagcattgtcatttccatcataaccaaaagtgaaggctttatgagtgtccatccacatgacctggttctagaagatcttaacatcatatgcgttaggagcacgaacaagcccttttccccctaacacggaaactctaatctga

SEQ ID NO: 246978 - DNA, 380 bp, Glycine max
tgtttttacttggttcttgaatggccataaaggcttattatatgtgacttgagacacgaatttaaaaagagattttcagaacaaaaaggtcttatcctcttaaaaagcaaaatcgttgtatcctcttacaaattccttggctaaaacacttgtgattcaataaggaattatttgagtgctcaaattgttcaatctatctctttcaagagagatttcttcttttcttcctcttcattctgaaaagggattaagagaccgagggtctcttgttgtgaaagaatctaaacacaaaggaagggttgtccttgtgtgtttagaacttgtaaaaggaatttacaagatagtggaactctcaagcggattgcttggtgactggactt

SEQ ID NO: 246979 - DNA, 388 bp, Glycine max
ccaggccacccacgccgagctatgctacgccaccacccaaactttcctttcgtccgaatatcacccggggagatagccatcaaccgagactagggtctctattattattgtgacgacaagtggttaacagggcatctgtgccaccccccgattcaccttctcttagaaacgaagatgtggatttgtcctatcaccatgcccacgcgaatcccaattccatcaaggggttcttttccaccagtgccttccgacgactcttcgccttatataaccttgaacgcgatgccaggaatgctagcttctgaaacctctcgtgcgtatggcaccggtcaacatcacaagctcaccatactcgccgatggtggaggacacacaaatctgtgaattg

SEQ ID NO: 246980 - DNA, 320 bp, Glycine max
  unsure (1)..(320): unsure at all n locations
ctgcataggattggcactgcaaactgggtacccaccaatcatacttccactgttgccacaggtttgggtaaatttctgtatgctgttggaaccaagtccaaatttaattctggaaactatatttttgatcaaactgttaagcattcaaaatctcttgctgtcaaattacccattgccttcccaactgtattgtgtggcattatgttgagtcaacatcccaatattttaaacaacactgactctgtgaagaaagagaatctgctctgtccctgattacaaactggttgaggggacacatgntccagacattgtctcgacat

SEQ ID NO: 246981 - DNA, 378 bp, Glycine max
  unsure (1)..(378): unsure at all n locations
ggccacctgctctctcttgtggcctcggagcttaaatcttctttctgctgcgcacttccttgagaaagcttcatctgaatcaaatccaacagagaagggctcttcctgaggcgcaaacccaaggggctcggctcatcgagtatgttcagatgggaaggagaactgacagaaccatcatccgaagcattccattgctaaaatgatggccagcacgcacgcaagcacaggaaggagaagaataacacgttaaaaaaaacaaacaagccacaagatttcaacatctctcgtgaacaaacaaagcgcttcttccatgattncgaanagtaagagctacgcaatgatgcagatgacatgttaatgaatgcgagacaagaacat

SEQ ID NO: 246982 - DNA, 241 bp, Glycine max
acatacacttcttcatttatgaatccattcagaaaggaactattgacatccatctaatagagcttgatgtctttatgtgttgcataggctaaaagtattatgatggcttcaagtcttgctattggtgcaaaggtttctttatagtcaattccttcctgttgactatacccttgagtaactagtctagccctgttttttactacttctccttcttcattaaacttgtttggaacacccattt

SEQ ID NO: 246983 - DNA, 390 bp, Glycine max
  unsure (1)..(390): unsure at all n locations
cacattaattggaagcctagaacattaaataatgatagcaatactccaaagcaggcccaaaacaacaacagtacatgtaaatgcaaaagaaagcagtgtttgactgtttatatatactatcaaaacttggatttaattcatgggtccaactatttgacaccctcctttattttcttcataccacttgtattttttaaactcctatactacccatgtccctttgtacctgcaatcccttctatttctctcctaccctctagtctctcccaaattcacacccctaaaccttttgatgctcttcttcttcttcatnccgtgcattaagggtttatcttatctctcttctctctaagagagctcctgaacttcaacccttgtcttctcttcata

SEQ ID NO: 246984 - DNA, 321 bp, Glycine max
gcaggaagaatccgaagaagatgagctgtaagttcgctaagcgcaccactccaggtcataagcacaccgcttcactatccgctaagcgaaacaagtgcgctaagccaaaatcacttatgcgcgctaacgaccggatctggctagccacgacatgacaaggcacctatttaagcttgaaatatatttcaagggagttggacttttttgaaagcttgctatgagggtttagagagagaaagccagtttaagagttgaagattgcttgtgagtctgcaaaccagtcaagggactgttgaagtgaagagtggaggtggaacctaa

SEQ ID NO: 246985 - DNA, 391 bp, Glycine max
  unsure (1)..(391): unsure at all n locations
gatgattgtgtttctattttcaccaaaactgtttttattcgtttgatgacactgtcaataacttggtttttgcatatatgcttgtgaaaaaatctactagtgaaaaagatttcattnttatctaacatgctattcaaccccacctttctagcgcgatatgtgttattttacttaatgaattgttgctcctctcaactacaccattctattaaggtgttcttagagttgaacagttgtgaagtatatcattttgctcctagaacaattgaaaattctcattctcaaattctcctccatggttacttctgattgaagtatgcatactcatttcccaatttgaacacttttacaaaatttaaagaagacacctatagactcattcttgtgggat

SEQ ID NO: 246986 - DNA, 354 bp, Glycine max
  unsure (1)..(354): unsure at all n locations
ttattaaaccagctaatacaaacattcaattatttttctcattccatgtagagtcacgttgaaagaggaggctatgagtgtgggtattatgtgatgcattggatgtggaacataatcggcgcagagttgaagactgattggagtctggtaaattcattgacagcaaatgctcatattntatttctttttaactggaaatgataaattatttgttcgtcacaatgtgtagtggttcggcgatgccacaccactagagacgaagatgatgacgacattaccgtcaaaatgggcagaatattgttttaaacttagaaactcccactgtacaaagcagtaattagatgagatgaggac

SEQ ID NO: 246987 - DNA, 333 bp, Glycine max
  unsure (1)..(333): unsure at all n locations
gaacccgcgatgcacctaagcacgcgagctcctggcacnccacacataaaacaaacaaaaccacaaagcaaggaggcttgtgtggtggctggccaactgtgaactctgtttgatatgtgggttatggcctctggtaatcgattaccaagagtgggtaatcgattacaacgcttataaatgaagacaggaggctaagctggtctctggtaatcgattaccaacgggtgtcatcgattaccacgcttgataaccaggtcacgaagctacgagagcttctggtaatccactaccaacgggtgtaatccactaccacgcttcaaacacggaactggg

SEQ ID NO: 246988 - DNA, 253 bp, Glycine max
cccaccgccaacacgtcgagctccatctggcgtgccctccctctcccttatccatcttatccccgcgacaagccgcataggggcgcctctgcgctctcctagctatggtgagctccctaaagaaacaaacagcggcgagcctgccaccaaaacacgaatatgctaacgaatgagcagagcactcagatccacctcaacgcctctcctagataacatgatgagcttcagaacttctcttcttataaaaaggaac

SEQ ID NO: 246989 - DNA, 272 bp, Glycine max
accacatagaacacaaaagcatgatttattagagaaatatccctatatacatcagcttgtttgttagaaagacccaacgtctttacctactgttgttaattttagttatttgcatttattgttttcagcatagaattagtttacttttacctttaataatcaattatcaatgtttgttctgtcaatgcctcaattctgaataaaattctgtctaagactagttccttgagttcgatactccgattcatccattttaattttaaatacttgac

SEQ ID NO: 246990 - DNA, 418 bp, Glycine max
  unsure (1)..(418): unsure at all n locations
accaccagatttctgagcaactccttcttcagtatttctatgagagacttagcaacatggagaggagtatgattgatgctgacagtggtggagctcttggtgatatgacccttgcagaggctaggaatttgattgagaagatggcttccaactcccaacaatttagtgcaagaaatgatgctattgttcttagaggattccatgaggcagccacggattgatcatcatctattgaaaataaaaagcttgaaggaaaacttgatgccttggtcaacttggtaactcaactcgccatgaatcagaaatctacacctgtcgcaagagtctatggtctatgttcttctgccaatcaccatacagaatctttgctcttctttgcagcantctggagtcaatgagcaacctgaaacttatgatg

SEQ ID NO: 246991 - DNA, 402 bp, Glycine max
taaccacttgtcgattttgtttcattagaatcaaaaatccaatttttattagttttaagagaactcacttcatcattaacaacttctttccaaaaaggtgcatcaatagacctcatggcctcaccataagttttaggatcatctttaagtagaaaagagcaaaattcataatcaaaatccttaacttttttagatcttttactcatcctaggttcaaaaacaaagtccttattagcattactacaagatgataaattagaacaagaagtatcaaaaacagatttagacaatttatctttcaaagagaacatattttcaaagaaagtgacatctctagattccataatagtaccactagagatttcggacacttcttgaattaacaaaccaagaatctataag

SEQ ID NO: 246992 - DNA, 304 bp, Glycine max
tttgcaagggactctgtcatatacaatgactctagtttcaaccacattgaggctggtgtcttttctcttgcaacttctcttaaagctttatctccaatgcatagaatgattacacttctatcttagcaaacatctctgaattctcctttgagcttaaagattcaaacatcctttcttctcctttaagagcttctgcacagccatgttgaatcaagattgcttccatcttgattctccatatcccgaagtcattttgctctgaaacctctcaatatcgtactttattgttcccatcttcttgatc

SEQ ID NO: 246993 - DNA, 377 bp, Glycine max
  unsure (1)..(377): unsure at all n locations
tacctgacatctcacacaaacaaatcaaacgtaacaagacaattatagttgttgtttgaatacctcacccactcaagtttatcacacaatgatggcttttctctaatgaaacactcttgccttttaccactctaattccccttgagttcttacgcaattcaagagattatggccacaacaaagaacaattcaccaatatgtgtaaggtaaggctagagagacaaggaanaggttaacaacgaaaaaggctaacaatgtttttaggcacacatgaaggaaataaaattcagaatttacgaattcacgtaacattccttcatgcaaccaatatattaccttaaagagaattttnnttaaaagttcttcaagcatgaacc

SEQ ID NO: 246994 - DNA, 351 bp, Glycine max
  unsure (1)..(351): unsure at all n locations
atggttgatacatggacgaagatgaaaaagatcatgaggaagtggtatgtgccggctagttactcaagggacttgaaattcaagctccaaaaactaacccaaggcaacaagggggttgaggagtatttcaaggaaatggatgtgctcatgattcaagcaaagattgatgaagatgtggaggtaactatggctcgatttcttaatggtttgactaatgatatccgtgatattgttgagctgtacgagtntgttgaaatggatgaattgcttcacaaagcaatccaagtagagcaacaattataaagggagtggctaataggagatttaccaactttggttcttcttattgga

SEQ ID NO: 246995 - DNA, 234 bp, Glycine max
ccgggggaagccgacccccccgcggagccacaaaaaaaaaaaacaagcaccagaccaagaaaaccgggaagaggccaccggcacagaagggaaacagcgacagcgcggagcaaaaaaaagaagaaagcggaaacaagcaaaaaaacccggaagggaaaaggcgggaaaaaacgcgaaaaaacaacagggcgaaaaaaaaaaaaggagcccaacacgccaggaaagccaaaagcc

SEQ ID NO: 246996 - DNA, 390 bp, Glycine max
  unsure (1)..(390): unsure at all n locations
agtttaactcttttatcttagtgagagagattctcctatattcttgagtgattcaagaacaccctgtctgtatcaaaggactttcacaacctttgtgtgttgccctcgctggaaagagtgattctttccttcctttcatcttcacccttgttctttcaaaccacaattccagaaaattcacctctgcccaggattatctcgtggccataactcccattttacgcactccaattaagtgattcttgagcctaaattgactttcaaaacgagacctttcacctcgttgtgcaatcacctcatttggagccatgtagcttcagttattgccatttctatatntctgtccagccaccacttaacctaacatttaccatcccattcatccatttg

SEQ ID NO: 246997 - DNA, 303 bp, Glycine max
ttttttttcaagacgccaaaaggcatttattttgtagcggacctaacaatctggagaaaaatacctgaattgcattatagttacatgcacattagctgagtcagtccccactttatgcggtgctcacacttttgctacaaaaaaaccctttgtatttaaaaaaaaaaatggcccatgctttctaattgcattatctcttctctctccggattccccgacttgtctcttttcggagcatcccggtattccggcctcttgctatcgaggtgtgtctttttgcaatgctcttgcctgggatgttta

SEQ ID NO: 246998 - DNA, 366 bp, Glycine max
aagcagaaaggggttcaggcccttaggcacgtttctctttctcgaaataactgaggaaaattagttccgtgaagaaaatccaagccgaggcgcttccgtaacgcttccgtgagtgatttcgcgaaggttctcgacccttccttgacgttcttcattcgttcttcatcattcttcagccttcaacgggtaagtacctcaaaccaagctttctaattcattctatgtaccccgggtggtccacatttgcgttcatgtatttctattctcgtcttcatttactctttataccaccttttgacgcgctttctaccgttatttaacgcgctctctcacctaatagatgactaaatgaatttcaactgatca

SEQ ID NO: 246999 - DNA, 397 bp, Glycine max
  unsure (1)..(397): unsure at all n locations
tagacttatcccaatggtcttatgtcatacaagtagctatctaactatcttttcctcttgatttgcttttgaccttattgtaacagcacaacgctttttcttttctcttctctttcttttaacatacaacttatttgttatgtgtgttgacgctttacctttttctttgcattctaactgactttactctcccaaatatggggtaaattttgccttgaaccatatgctctcctagaatctaagcaaggtatcaagagataattnattaagttcagggttcaatttatgacaaaatcattcagcttataaaagaagcaaaggatacagntatctcgcaaggtaagttgtttggtcaaaaggcttgtgtatgtacaaaccgtggcttcatcatgtcctc

SEQ ID NO: 247000 - DNA, 415 bp, Glycine max
  unsure (1)..(415): unsure at all n locations
cataacgcgatccctgacattttctttgactccatacttcatggaaattaagttatgaagaagagtacttatttccgccttatcgctttttgcaaagtgcttttcaatttcagcaaggaattctttggcactagttatataatttgaaatagtgcccctaaagacctcatgaatgccatgcttaatgatcataagactcatgcaatttgagtgatcccactntttataaagtttcctctgttcagaggtacttgaatccttaggagaagggggtttctcaatccttaatgcaaggtctagaatcatgcagcccagacaatttgcatgttctctctcagtacttaaaattgaccataagaatcggaacgaattagatatgaagcacacttgaagatacaacaataatctcacgtac

SEQ ID NO: 247001 - DNA, 143 bp, Glycine max
atgggtgagttatataaaagttcatgaatagctcttaacagacatgggggcatcaaaatttacccggtcgccctaatctgaattggatccctcagaaactaagtctgccatatgcatatgtctcctctttatcatcttcatca

SEQ ID NO: 247002 - DNA, 269 bp, Glycine max
agcaaatcacaaccacataacactggggcacaacaccgagcacacggcgagcgcatgatgggacacaacatagcaagagaatgggagcaatgtggcacgccccacaagcgcagaatacaacccaagcctaaggccctatcattcaaatcaccaattcaagaaaacaagcaccaaagcaaaccaaaaccgcctcacaaatataagcatgttctccaaactaaggcaccaaacgacgaagaaaacacatcaatggcgagcaaacacatcaa

SEQ ID NO: 247003 - DNA, 80 bp, Glycine max
caacaaaagccacccgccgccgaggggcagccaccagaacgacaccacaccgcaccgaacaaaaaccagcacaaaacaaa

SEQ ID NO: 247004 - DNA, 209 bp, Glycine max
  unsure (1)..(209): unsure at all n locations
gtgcaagcttataaccatgtcccaagagatgcattgtgttttattttggagaaaaaaggcgtggcactatntttttttttgctcagccaaaatataatatatatatatatatatatagactagtaccagtggtactgaaattacatacgaatagaagtgaattcagcttttccaaaaaaatgagaaagagctggagaccaaaaatgtgt

SEQ ID NO: 247005 - DNA, 422 bp, Glycine max
atgcaagcttattggtcaagaaaccctgaaccctattttgtttaatactccataaaactcaatcagtcaagtaatcctaaacccttatctttgaaatacccctaaaccataactagcaaagtaaccctaaagtctaatttgtcaaataatcataaaccctaattagttaagtaacacaaaaccctaattagtcaagtacacataaatctaaaatagtcaaacacacataaaccccaatttctcaagtaaccctaaacatctaatttttcaaatacccctaaatcctacttagtcaagtaaccctaattagtcaagtacccctaaacctttattagtcaaatatccctatttcctactttgtcaaatacccctaaaccttaactactcaagtacccataaaccgtaattagtcaaatatcgct

SEQ ID NO: 247006 - DNA, 415 bp, Glycine max
ctgcagctatagaacaaatgccttatatttcttttatgcatgtgaattaggaagcatcaacaagaatcaagccaaggctattgtgcaagcaatcaatggggcaaaacacaccaaatgattatgatgatggctcaaattctcacaaaggtaaacttatcacttccaaattgagctttcaaaattaccatgacatgtagaagaaaaacaaggacttcaaatcacaaaatgtcaagagacttttattttcaaaacaattacccatttcttgaacatatcctataattcaaagaaaaacatgcaaagttgtacatgcaaacaaaattgacctaaaatattaaactaggaacccaacaaaattaacaaattaacacaactaacaaaattaacaaaaccaacaaaactagcaaaaccaaag

SEQ ID NO: 247007 - DNA, 384 bp, Glycine max
  unsure (1)..(384): unsure at all n locations
agcttcagctgcttcctcctccccagccttctttcgtccaaggctcctcatcccctcacctcactcaccttcgcactttccgacctgtctgtaacctcttctctctctctctctctctctctctctctctctccttattatatcctctcttttatcttccagatttcacatccatggacacgtgccctcgttcgggcatcctgactgggctaggactcacgaaccctcttcttccactgctcccgctgtttccgctctcgtcgagggcggtgcaacctgcgttgcaactactgttctccacgacttagctctagggttcggtctttttcttctcaatctccatactgnacaactcttcctcttcttgctatttcatcatgtctc

SEQ ID NO: 247008 - DNA, 384 bp, Glycine max
  unsure (1)..(384): unsure at all n locations
acactttttggggtgggtcattcttggatggccttgattttctcaagttccacttggaacccatttctaccaactacaaaacctaaaaaaactatattatctacacaaaaggtacacttctctatatttgcatagagggtgtttttcctaaggattgaaaaaacttgcctgagatgtcctaagtgatcatctangctcctactgtacactaaaatatcatcaaaataaacaactacaaatctacctatgaaatcccttaagacataatgcataagcctcataaaggtgcttggtgcattagtgagcccaaaaggcatcactagccattcatacaaaccaaacttggtcttgaaagcgttnttccactcatcacnncttttcatc

SEQ ID NO: 247009 - DNA, 376 bp, Glycine max
gcaagctgaagatcacaagagagggattgttattaccttcaaccctttcatgtggatgaagaatggaattgaaatcaccaatgataggctatgacttatcaatctcacaagctaactctctcaacacatcccacataccctgcctgcactagtaatgagaactattataaaccaccattaataaccaatcattagaactcttccaactaaccttcagatgcacatggtatctagaatttcccagcatctgaaccttccataagcttgaatcccacaagcagcaaataccactagagtggcccacaacttcttccacaacccaatccttggataattttcgtggcccttgcaccactagagtgggtcttcataaaaa

SEQ ID NO: 247010 - DNA, 275 bp, Glycine max
agcaaatatctcagccgaaaataaactgctcacccacaaccagagcaacccacaccagcccaccccgtaaccgataaacatccacccaacaaagcccacaaaaatttacaaacaaccaccaccacccggacaacactctaccctaccccgtcattccacaataaatcgtaaaaggacacaccaaacaaggccccaaaaaggagacgaccgagcaaaaaaaacaaggcccacaaactatcctcacccaactcgtaggccccacacaccaaccagga

SEQ ID NO: 247011 - DNA, 411 bp, Glycine max
agcttgcccagagaatgagtcccggttgattgcttaccacctcaaaagactggaaagcggtttctaatgactcctttgcggcttccacataaggcatagaggacgggcagctcaccaagatgtcttcctcgcctgacacgatgaccaaatgcccctccattacgaatttcaacttttggtggagtgtagagggaacaactcccactgagtggatccacgggcgccccaacagacagctgtaggggggttaatatccattatttggaaggtgacttgacaggtgtgagggcctatttgtactaggagatcgatctctcccctaacctctcggcgggtaccgtcgaaggcacgaaccaccattgaactcggctttaagtgggaagcattgaatggtaatttctccacagtgct

SEQ ID NO: 247012 - DNA, 406 bp, Glycine max
agcttactccgcacaatggtggcctatttttttgaagcggctattcctccttctgatgatgcatggacacttatccctgacccaactacaattcgtgcgaaaggttggccaaaatcaacaaggataagaaatgagatggattgggtcgaaccatctgagcaccgaacaaaatgcagtagatgtggagccgaagggcataacaggcgtcgctgtccaatgcaatttgagcgtgggagtttttcaaatcgttgatttatgtatgttactcgagtgatttgtatttgtttacgttctgttcaatgtattgaatttctggggttcaatgaattcggtagtttaaaacattttgccttttgtacattacttatttgtgggcttcaatgaattcgctaaaccataaccacca

SEQ ID NO: 247013 - DNA, 409 bp, Glycine max
  unsure (1)..(409): unsure at all n locations
ctgcagcttggctttctcattttatatatgattaaacnttatgcgagttaatgtagctttagtattgttcttcctgatgcaattcattttctcagagaatacttcaaggcaatacctttgtaaattaattaatggtttaaacatgtttctggtctttgcaatattttatggtttttacttttagtctctataatttttttaagatttttgtttttgcaaaattttattttaggcttaaatatgttttaatctctaataaatactcgatttttatgttttctccttaataaatttttgttttcattgagttcctaataaaacaactctgtatttgatatttgatattttgttctagttcttaataaattagtaaatgttgtgtttgttttttgataaattaataaatttt

SEQ ID NO: 247014 - DNA, 404 bp, Glycine max
agcttgaagcacacttgaaagttttaattgtttggctatttctccttcaatcctcatttgacaaaatgaactcaaagcctcttgaaacctcgaattatgagcaaacccagtaataatggatgtccaagaaaccatgtttctctgtgacattttgtcaaacagtttgatggtgtaatcaagctctccacatttggaatacaaattgaagaagtgattgctcagaaaggtgtttggcaaacaccctcctcgaatcagcatagcatgcaactgctttcctttgtttaactctttggttcgtgcataggtttggataaggtgagccactgttttggtgtcacttagtttgtggccagatccaaaaagattctgaaagttaaaatgccaaatcagagaataattatgtg

SEQ ID NO: 247015 - DNA, 385 bp, Glycine max
gatctaatgcaattctaattcctaccaaacttatcatataaaataatattatatagttcaaattttaaattaactactttaattaaactttcatgataattaatttccaatctcaattgtatttttgcagatcacacaacatataaatttctataatatgacttgtactttttaggatgttacaacagaaattgatatggagtcatagtgaggacaatcaaaaattatgagtgtaaaatgcgaaaaaggggaataaaggaaaaaagaaaaaagatgaataaacttgacaatcaattccaaaagagagaaatctaacggtttaaaagttctcattcaccatgcaagacctatctcacttttgcatgctagaatctgtcataggctc

SEQ ID NO: 247016 - DNA, 414 bp, Glycine max
gcttgcctaattaacctaaaagtgagagattatgtattttatttatatacttaacagaaaatacttataacattacaagataactataaattgggagagtttgatacaatttatacaagttttatacacaaaagttagttgttttcaccgactaacaacacgcttaggctatttccttggggatggtaccacatttcatttgagagttgaggtcaggtgcatgcatcatatcgagcatgattgattggaactatggatggatgatgactatttgttgagtgtgtgttggactaatgaatgtttgtgtacgcttatgatatttgttaatgttttcttactaattatggctatttgatttttttgtattaatttcttttataataaactcaccccttgcaattttgtactgtgtgg

SEQ ID NO: 247017 - DNA, 356 bp, Glycine max
tgccaaccacctaagccccgtaactacaagaagcaccaatgatctaatgccaattcctataattaggatgtctaaggaactaggttacccttttacttggaaaaatcattactagcagtttactttcttaatctctggctaatgctacctttgtgttacattcaatctaaattccacagacataaaaaaccacatttgatttttacgatctatctctattattaattaacatgtataacgattgtttttttgggcttaatgtacacgtacagctttaacagcttacttggacaacgattcaagttacataaaactactcgtttactgaacaactaaccagtttttttagttaataa

SEQ ID NO: 247018 - DNA, 360 bp, Glycine max
aaagcgctggcatgcattagttgatctaatagtagttgtgtctgggcgcccaaaacgactttttaaggagtgtgccaaacgcctacagtctgggatgaatataattcaaaggttgtcaccaactttttttgtgaggttgtaattttttcttcttttgggtttgatcccagttttttgcttggcatataaagcaaaactcacttgacagcaccacttattttaagtacagaataataattacttattatggtatgtgaaatcagtttgtatgaattggctgtccaaatagccctgtgatattttttatgttgtctgaattatacctttaacctgcactttgactgttatcagtcatcacta

SEQ ID NO: 247019 - DNA, 344 bp, Glycine max
  unsure (1)..(344): unsure at all n locations
cttttagcactntcacaaatactgggccaaggttcccttttgaaatctataagccctcgaagaatggcctgtgcaactccttgctcggattctgcatagaatcaacatcgaggtaagaaaataaaaagacttcctatgagctgatgaaataataacaagacccaagctcaaaagcacaaagctcatgatatacctgaacataaagaaaagaaaaattggcagattaaaaccttgccagaaagcattaataagaatataatgatttatgaatgccattaccagcccacaatgggggaacttcacacaataagatgtagagaattactcctgcactcatatatcta

SEQ ID NO: 247020 - DNA, 426 bp, Glycine max
  unsure (1)..(426): unsure at all n locations
cacctgcngcatgcaagctggaggggtcttaagaaaccactttttttgtcttatcactatcaaactacacacgtgagcctgcttagaggcaagggatgagtttatcgcaattggggttagaatgaacatgtgtagggatccttagaggatcaaattgtggtttattttgaaatgtttattgtattataattcttcctttatgattataattacaatatcattgtatttgatggaccaatcaattcgttgatgtgaattggttgataaaattgagtgctcttggtgtttttgtgtttttgacctatgattttgattcctttgattctgatatgattatgcaaaattgtttaaggggttttactctccatgttgtgagaaacatttttgtataatttgtttgtgttttggacaagatttactatatta

SEQ ID NO: 247021 - DNA, 414 bp, Glycine max
agcttaccatgatgaaattgtcagcatgagttatatcatagagttgattatacttcttgtaaagaaacctcttgttagtaatgtgtagaagcattacagactcccttataagccagagaatcagtattccaggtactaatgcaatcacaaccttcatgaaataatggatctgtcgcttctgaaggagatctacttcaactccggaacttgtaataatctcaaacatatacggatcaagagggatatcaacctaccaaataagagctatgttaatcaaacagatgtccatgaagggacaccatccggagaaccttggcgagatatttgagatttctgatcagcaataacaattacgaggtaacttacaacaaattccaatggaaaaccttctttcatcgtcacatacaatctttt

SEQ ID NO: 247022 - DNA, 377 bp, Glycine max
  unsure (1)..(377): unsure at all n locations
catgcaagctctattatgccctctgccctcggttgttatttcttcttcggcgaaggcgaaatagttgttggcagtgatattattgaccagccctccgaaaccttctaccgagatatcatgggccacgtgggcctcgttcagaacttttactagcagagcccgatgaggctcggagctcatgagtaactccaacagcgagaccctggccggggttttgttgagctgctcgataaccttgaattcgctctgctgaattatacggaggaactcactggcttcctctagtgacacctcctttttaccatcctttctctccggaagaccttttgccggaatatctttattcgaagcgaggggtatnttatcatcttgttcct

SEQ ID NO: 247023 - DNA, 401 bp, Glycine max
  unsure (1)..(401): unsure at all n locations
agcttggaggcgactctatgttttgtatttattttaacanccgccggcgaggtctttttgttgacctttttgaatgagtttgtgtttttaattgtttaaaaaaatgatttattgcaggaaaaatgctacgatgttttgctggaaaatgctctggaagcatcatattcatagtcaggcaccctgagcgacctgtaatagcttcttatggtgagtgctactctgattccccttcatttgttgcatattctttgaatataaggaaggttctctgatgcagttttttatccctaaaatttatttagttgtttctaattattttggttttgcggaacaaatttatatcttctgtttcgctatctacctttttcatgattgctcctgaagcttatccaaaatgtaca

SEQ ID NO: 247024 - DNA, 408 bp, Glycine max
  unsure (1)..(408): unsure at all n locations
agcttcatgatgaatcaactatgtttcaatggtgttnngacgataacaatgatgacaacaaaagatgatgacaaaggtgatgaacaaaaagctcaaaagatcaaagaacaactcaagtgaatcaagaacaagtcaagagttcaagaatcaagaagaattcaagactcaagaagaaagtctacaatcaagaatcaagatctcaagaatcaagatcaagattcaagactcaagattcaagaatgaagaaaagactcaatcaagataagtattaaaaagttttttcaaaactttgaatagcacatgagtttttgacaaaacttttaccaaagagtttttactctctggtaatcgattaccatattgttgtaatcgattaccagtagcaaaatgagtttgaaaaagttttca

SEQ ID NO: 247025 - DNA, 368 bp, Glycine max
  unsure (1)..(368): unsure at all n locations
tatgcggcggncggcagaggagcataaaccacagagtctagcgacaggtgtatatttttattcatggccaattgggttaccaagttcaccaaggcatctagtttaccttcaagcttcttagtcttagctgatgaagatgaattcgtggctacttcatgcattcctctaatgacaatagcatcatttctggcactaaattgcttggagtttgaagccatcttctcaattaaatttctggcttcagcaggggtcatgtctccaagggctccaccactagcagcatctatcatacttctcttcatgttactaagtccttcattaaaatattggagaagaagctgctcaaaaatctggtggtgaaggcaact

SEQ ID NO: 247026 - DNA, 201 bp, Glycine max
aaagcacacaccgcaaagaccagctcaaagcacgtcagacgagacaccaacaataggaacccacataacccaccgcacacacaaaaaacaacacgaacaccaaccccaagccgacacgcggaaaaaaaccaaaggaaacgacgaaaaaaccacggaaacaccaagaagggccaaaagacaagaccgaaaaaaaggcaaaag

SEQ ID NO: 247027 - DNA, 417 bp, Glycine max
ctgcaagcttgaactgaaacttagagtccaacaacttctattcgagttggataattatttggcactaggttttggaaaagtctaaaagaaatgctcttgggtcatggctggaatagaactttgagaaagaaatatgtctgagcttagtcctaacaaattagagtcattaattgtagttattattcaattgataccattgttaggaacaacatagtgttaggaacaacatagtgttaggatgcagagatggcaatgctggtggttggctctaacttggtccacttggaagcttaagaacaacatagtgttctctaatgcaacctttaatgctaacaaactgtttgaagatgcaatattcactctatggacgtggctcaggcactttgagaaagattttactatccattttaatcaatg

SEQ ID NO: 247028 - DNA, 415 bp, Glycine max
  unsure (1)..(415): unsure at all n locations
agcttaactcttcatgttgctcatgttgctatctatatctctaacaatctccccctttttggctttgatgatgctaaactcgaatatgtcattgagtacatttggagggtctgagtgttgagagtagagacttgcttttcttagtcaatcctgaaaattcttaacacttacgaaaagatcaattcaaatcatcatcatcatcatcatcatatatcatactatataagtttactgatgctaatgcaaacattaatgcaatatgctagttcttcccaaatgcttatgcaatgcaagaaatatgctagttcatctcccccttttggcattaacaaggccaaaaattttgaactatacacaaaatcagaacacacaattnttttgaaaggaaattgttagtcagttaatacgactaact

SEQ ID NO: 247029 - DNA, 419 bp, Glycine max
  unsure (1)..(419): unsure at all n locations
ctgcagctgaagaaacagatgcccttanattctggtaacccaaccggccatgaatcaaaaatatgcacctgtcgccaaactctatggtttatgctcctctaccgaccaccacacagacctttgcccttctatgcaacaatctaaagcaattgaacagcctgaagcttatgctgcaaacatctacaacagacctcctcaacctcagcagcaaaatcagccacaacagaataactatgacctctccagcaacaggtacaatcccagatggaggaatcatcccaacctaagatggtcgaatccttcacaacagcagcagcaacaacaacagacttatttgcaaaatgctgctggcccaagcagaccatacgttccttcaccaatccagcagcaacaacagcaacagccccagatacaacaaa

SEQ ID NO: 247030 - DNA, 416 bp, Glycine max
  unsure (1)..(416): unsure at all n locations
gcttctccctattttgctaaaattgtgtattaantttataanaaaagggttcagccccttaggcacttctctctctctcgaaattgctgaggaaaattagttccgtgaagaaaatccaagccgaggcgcttccgtaacgtttccgtgagaaattacccgaagattctcgaccgttcttcaagattcatcattcgttcttcgttttcttcaatcttcaacgggtaagtacctcaaaccaagcttttcaattcattctatgtacccgtggtggtccacattctgtttcatgtatttttattctcgttttcatttactttntatacccncttttgacgtgcttaagccatttatttaagtcatttctcgcttaatctaaaaataaaataaatttccaccgatcgtttgaattgtaccat

SEQ ID NO: 247031 - DNA, 398 bp, Glycine max
ctgcagcttgaaatcaaacatatctattgtgataatttatcagcacagccaaattcctagtgaagcacccacaattattgaagattctcgccctccattctcatggccagaaaatgggacaattgaaataattgatttgaaggtactaaccttaggttcacatttatgctttttgttttcttgtgttttaaagccatatatcgattgtttttttcttggtgtacaagatttagtatcgaatcctagctgttagccatgttacattattaaatatctttattatgatttttgtactgcaactggctttttcccatgatcttcttaccccctactctgtcactcttgaaggtccgttacaaggagaatcttcctatggtgcttcatggagtaacatgcac

SEQ ID NO: 247032 - DNA, 413 bp, Glycine max
agctttattcaagacaaagaaagtaattattttcttgatggatgaacaagatagtctctagagtcttaggaagggtatattaaataggaagggaattcctaattgaagtagcaaaaggtttggccaagaaatttaaattaaaaagtctttttcaagagatttattctctggtaatcgattaccagaggatgtaatcgattaccagtggccaaaaattatttacaacagctattaaaatttgaattcaaaatttgcactgtgtaatcgattacacatatatggtaatcgattaccagcagttattgaacattttaattcaaattttaaagcttgtaattgattacacagatactgtaatcgattaccagaggagattttcagaacatattctcaacagtcacatcttttcattt

SEQ ID NO: 247033 - DNA, 355 bp, Glycine max
aatgggtgggattttcatcaccgtttgggttcgccggagcttgcgtaaacaaattcaaaatttaaaggtttcaactgctggagttggtgttatgggctatattggtaacaacgtcttttacctttcttcatattatttttatccactgcttaaaattatattttttttgtcattatgttgtactattattgcgataattcatctttactttcccttttattggcatactatttgctgcattatcctaatgatattacgttcttatatattgcttgctatctatcaaggactcaaatactctagatctgcatcacagttctacataagctcacgctttttgcatgttattttgcct

SEQ ID NO: 247034 - DNA, 407 bp, Glycine max
  unsure (1)..(407): unsure at all n locations
agcttgacacaatgcttaacctactatggattttataactnacaatagaaaaataccaataaaccacaatatcctaaatttgtcttcaaggagaaataatctgaaacatattgtgaacaaaaacaatagaacaccaaacaaaacaacttcaagaatactaatatcttctaccaatcattttcttcaactaaaacattccaaaccttcataattgatgatgaatgttcatacatcaacaagggataatgtacaagaatatactaaataaggaagaaagcaaccatttccatagccaacacatgaaatttacatacaccatggacaacaaaaccaaaacaactacaagtaaatcttctaaacaagatgaaaagactaatttttaatcaatgcaagctgatgacaaacta

SEQ ID NO: 247035 - DNA, 370 bp, Glycine max
taatgaacaactttcttaactatttgtccttcagattttactgtttcattttgctaatatgtaaatataaatggtataagggtatcgcgtaaaaacatggtctatatttacttctaagattgttaggggtaaaaatgaccatgtccataagccatagccttatattatttatatttacaatgaacaacgaattgtccataagcttccaattaacgattcccccaattcaattcaaacaaattgcaattaaaaataaaaaggttatagagagaggaagcgaacaacgaacctcgacttcgagcttagcgatgtaagcaataagcgcagccttatctctgtgcttaatcgattcctcataaaaaaaataaaa

SEQ ID NO: 247036 - DNA, 381 bp, Glycine max
tgagttctgagaagaccaccacaccccccaagcttatccaaccctctaactaaaccatcagtgttcaacatgagacaacttttatccgaaggaatacaacgaataagcacttcatttttccttctaatatagcaatcggaacatgaccttcatgagattagtattccttgatgtcattacaaatataatcccatggtttcaaaggtttcaaattctagctaatccacatgagtgttcctccacaaccaaatggagtgacaagcagcccacaatgttgtccaattgtattgattggaaaagcccatcgatttgactaaggttaagatgaatccaatattgaagggaggtaattaagaaagaccccctgaactttgaatcaac

SEQ ID NO: 247037 - DNA, 421 bp, Glycine max
  unsure (1)..(421): unsure at all n locations
agcttgagataatgaaaggagtaaaaactatttttccaacaattccttgaagaaggactttattggtctcctgagatttcacaagacacaagtgaggatgaaattcaaagaaaacagagttatctttagaaaattgactcacacttaacaaatttttcaaaattgaaggaacatgtaatagcttatgaagtttaaatgtaatgtgagaatcattgggggacacaaaagaaaaggaaccatcaccagagatactcaaaccttcaccattgcctatgaaaatttgatcaagtcgatcaaagtgagtgaactgcttgatattttgtgattcactagccacatgaaagttggctccagagtttggaatctaggtggagctagtaggaccattcccatgagaggaggaatntgtgatcagagcact

SEQ ID NO: 247038 - DNA, 368 bp, Glycine max
ccagctagacgcacccgccgcggaacagaaatttattgatctctataaaaccatcgactatcgcaccgtttgataatatgccatgcacatccactcctacattcactcctacccccaacttgtcaagttcaaccacggccacatccgattcatggagaacctctgacatataaaggataatgattgcacaccgcaacccactcatcattcatcaacggcggctagggttataacactatcaggagaagttgaaggcaacgttcccggtatcacaaccgactcatcagcatctacgtacggactctcacacggcggagggacccaatgggggtcgcgaactctccagcttgcaattagtcgcttgagca

SEQ ID NO: 247039 - DNA, 410 bp, Glycine max
tgcaagcttgaatgaccatcgtataagccatagtttttttcaccagctcgtcatacatggatggttgtattcttgaatctttaacatgaaatgactaatgtatatatagccaaaaatggtaaaaattattttctgcccaaagtggtgaatcttatcttacacgtctatattatatgtgttaactttctagattattgtactaatcttcctagggatatgtgtactcaaagtaaacctcatacaaattctactcacaaacagataaattacattgtgactcaatgcgcagtgtaattcttggatagatggaaatctagttcagacaattcttttttgtcaagcttcactaaactattcacgtacctatataagacagaataaatctcaataatttatttatcctaactctt

SEQ ID NO: 247040 - DNA, 412 bp, Glycine max
agcttggaagattccgcttcggttgaagggttcttctcggtgtggggtttcaacggagaacaatggtggtttatggtggctactggtggctgtgggtgatggagaaagagcttgggaagttggaaatggttttggaagaaagaaggagaaggaaatgacttttttccaaggctacacgaaaagcaaaggctgaaacactcaagtgtttctgctctcggagaaggaagcgtttctcacaagccagacgttgaatcaaagatcgcaatggtccgatcatggacatctagcatatgaacctccataccaaattttgagaagatctaaccgttaacgaaggcaggagggcgattttaccaagacagctcagtcagctctcttgagaagctttctcgtgaggcttccttgagaagct

SEQ ID NO: 247041 - DNA, 422 bp, Glycine max
atgcaagcttccacagaaacacaaaactcccatttctggatcctcccttatttcctccatcagaaacttgtaagcagtgttggtcgaataaataccactcgaatgttgcttccaaatccaagaatctgctccatgttgttgaattgatatcagtcctatttcctataggaattctgcagccattgaagcttcactatcgaataggtttctcctccaattgaaattccattcccacccttcctccttgtggcttcccatgagtctgatagtttgttgttgttggttagaaacttgatacagcgtaggaaatttgtccattaaagttctgtccccccctaaccatttgtcatcccaaaatctggtcatgtctccacaatgcaccttccactctatttgatcctttatttttattcactcctcta

SEQ ID NO: 247042 - DNA, 409 bp, Glycine max
agcttttgagctctatatgtggaactgcttaggaataacttcacagtcgcacatataaattaggtggattctgaacttgtaatagagtttttatcattttgaacctgctctaaatctgaccttgcacaaaaatacaacacaaagattagtagccaaagtgatttcccatcacaaagagagaccaatatgcatactcatacttgtattccattttccctattgtacggtcctaggtcaatatcgcttgttccattttctcacctgttaactcaagagatttttacatgagctagctaacattcagagaggaaacaacatagcattttttttataaaaaaaaacatcaatcaaggcactcacatgatcaaataatttgattattcaaaggattacaaagcctagaataaaa

SEQ ID NO: 247043 - DNA, 416 bp, Glycine max
gccgcatgcaagcttatggggaaggacactagccttatctgttatggatataagaaaaccattgttgctaatgatgaatggtgggaagccaaaattcaagtgtgtattatttaactaaaagagtttctgtgcaagccagtcttttgttctttatttgtgattttgtttttatttctttttcttttttcttgcaatcttatgctagcttctctagactttgcttttaatcatagtatctcattattgattttctttttcgctgatgataattgcgagtggctatcaatcattttactaaattcttgctcagctgatgcagttctgttctatctcattatgtcccttcttgtccttcatttttcgcacgattataatttataaattaattgcaccattgacccactagaacaacctat

SEQ ID NO: 247044 - DNA, 409 bp, Glycine max
agcttgaattgtgatgttatctctctttttcttattctattcagggtcttttggaatgattttcttccttggagggtcttccttctccacacttgggtgaggcttagccacagtagttttcatcttgttggtggcttgcacaaaattacatgtagaggaagaggaggaattaattgttagaccaaaatctttaaacacttcctcctcatcacccaacctctaaattattttcccttgtcgaagatcaatcaaaacatttcttgtgcagaggaagggttgttcaaaaataatttggatttcttcatcctcctccatgtccaaaatcatgaaatcagctagaaaaataaattctccaactttaaccaacaaattttccactattcctcaagataattaagagtcatgtatg

SEQ ID NO: 247045 - DNA, 412 bp, Glycine max
  unsure (1)..(412): unsure at all n locations
catgcaagcttggtggtactatagctgttctaaatttttgttgnggnaatcaaatgcagatgcaatgcagtagaagggggtaaagacaatatattactacaattatatgaaattgagttggtaatactaagaacagaaaaccattgcacgcaatcaccattataggaattgtgattcattatgaatcacagtagcatgaccgaaaataaaatagtcgctgtgtaaaataacataacaattgtctcaaatataggaaaaaaaaatactcctacgccatcattagccgtttttacttattgctgtctttaaaaaaaatgttgcccatttctttcgaattgtggtgatgatgtcgatgtccaacggtgtgtcattagcaaaccactgcaagtattcataattgtaagttagtact

SEQ ID NO: 247046 - DNA, 397 bp, Glycine max
  unsure (1)..(397): unsure at all n locations
agctcttatctataaacttaatattgatgttttgtttnggnctcgggntcaagtactcaacttaatgttgatgagatgaattactctcgagttcaagtactctccattaaaaaaaaaaacgtgtaattagaaggagagagttcactaagagttaccaattagacttttcaatatatattaattattaattaataaaaaatttaaatactttgtattaatgttatggtgacaaaaagcttttaacttttgattccttaagcattactctaagacttagcaaaattcatatttaaaaaagacttaaatatattgttggtccctgataaatacttgttttttacatttggcctctcataagcttttccttggatcacgcccttaatattcgaaaaatctt

SEQ ID NO: 247047 - DNA, 414 bp, Glycine max
  unsure (1)..(414): unsure at all n locations
cccgngctgcagctgcacgagaattatgggaaggttgtttttggttttttcctganattacgacctttaatatgcgtgctctggccttctcaaggatggctctgttctgggacctccaccttagcattgaacatatggaacatacgaagatcattcctgatctagtgacttttgggtgtgtagctgatgcatacttggatagaaggcttggaagaaacctggactttgctctaaacaaaatgaatttggatgattctccgcgattattaacagatccttttgtgtatgaggccttangtaaagggggctatcaaatgagttccgaagcattttttgagtacaagacgcanaggaaatggacttaccgttctttgatacaaaagtatctcaagaaacattatcgaaagaaccaga

SEQ ID NO: 247048 - DNA, 414 bp, Glycine max
  unsure (1)..(414): unsure at all n locations
tgcaagctttagcaactctttcttgttgccagttttttcntttaatgctcttaatctctcctcatctaaatcaaccaactcatccgacatcattttccaataatggtcgattggaatgtccatttgtttttgtaccctggctgattgcaaatgtatttcgaccggaagtacagcatcatgcccataagtcagtcgaaatggggtagtattagttgattccttaggagaatttctacatgcccatagaacttgatctaacgttttattccaatttcttggcttttgggcaatgtgttttttaatcaagttaattacaatcttattggctgcttcgacctgaccatttgcttgcgcgtaatatggtgttgaggttactgcttcctgatcaacatttggcaaagggactgcttctat

SEQ ID NO: 247049 - DNA, 422 bp, Glycine max
aggcatgcaagcttgaatctgaagctgaacacaggcagttgtttttccaagaaaatatgaaaaggaagaagctgcagcaagatcttcggtcagcagcccaagctcacgagtgtttaatgagacagaaggcgagatcgcgttggattaaggagggggtcagatatctcgatattttcacctggtgattaactcccatcgaagtttgtagctttttccagcagagatttcaagaaactatgagcagcagaccagttttggatggcacctcttttcaagaaactatgttctttggggaagttactatgaaaaatgtcaagactatcaaattaattttgagggcttttgaattgtcatcacgacttaaaataaattatgggaagagcagctttggggtgttgggccaatctgaataatggaaattg

SEQ ID NO: 247050 - DNA, 417 bp, Glycine max
catgcaagcttcattctacacgtgagagaaaagatgttattttgcacaaaagagacagcttcgtaacaaaaattttcatgcaagcggaccttcttctagtaattatgacttaccgtacccttatatccctcttttattcccacccagagcattccaaacaaaaagatggaagaagcagaaaaggagatcttggagaccttcagaaaagtcgaggtgaacatacctctgctagatgctatcaagcagattccaagatatgccaagtttctaaaggagtagtgcacccacaaaaggaagctaaaaggaaatgaaaggattagcatgggcagtaatgtgttagcattgataggtaaatttgttcctcacattcctgagaaatgtaaggacccaggtactttctgtataccttgcattatt

SEQ ID NO: 247051 - DNA, 421 bp, Glycine max
gcaagctttgaagatatggtcttcaccgacgaatggatcaatgtgggtctaaaaagaggcaaatctgatcatcatgctttgataaatgccaaaaaaaaaactagggcaaatgaagagggtgagaatgagggagaagcccatgctgtgacttccattcctatatatccaagtttcccaccaacccaacaatgtcattactcagccaataacaaaccttctccttacccaccgcccagttatccacaaaggcaatccctaaatcaaccacaaagtttgtctaccgcacttccaatgacgaacaccacctttagcacaaaccaaaaacaccaaccaagaaatgaattttgcaacgagaaaaccttagaattcaccccaattccagtgtcctatgctgacttgctcccatatctacttgataatt

SEQ ID NO: 247052 - DNA, 418 bp, Glycine max
  unsure (1)..(418): unsure at all n locations
catgcaagcttgtaggattatggggcacccattcatgngtttctatgcggcggncgggcgatggtgcacaacaagtttttcacatccacaaagcgcgcataaacccaccatcccctgttgcccacctccaactgagctcacgtactcccacgtagcccatatcctcgtttctctcaacaccgggtccccatcaatcctcccaagctttcccaacatcaaagcaaaacaacattcaaacagcacaagctatcacagccaagcaaaatagagcagaagcagaaaactctgccaaaacaccaaccaaatcacagcttttctcacttaaagaccccagtaacaattncttcgttccggttcattaaccgttggatcgactcgacaaatttactggacgtctttagtacataagcttacattt

SEQ ID NO: 247053 - DNA, 399 bp, Glycine max
  unsure (1)..(399): unsure at all n locations
agctntgataaagagaaaaagaagattcttttatgtttgattgtgagcaagcaaatggttgggattttcatcaccgtttgggttcgtcggagcttgcgtaaacaaattcagaatttaaaggtttcaactgttggagttggtgttatgggctatattggtaacaaggtcttttacctttcttcatattatttttatccactgcttaaaattatattttttttgtcattatgttgtactattattgtgataattcatctttactttcccttttattgccatactatttgctgcattatcctaatgatattaggttcttatatattgtttgctatctatcaaggactcaaatactctagatctgtttcacagttctacataagctcacgcttttgcatgtta

SEQ ID NO: 247054 - DNA, 398 bp, Glycine max
agcttgcactttctttaaccatctacctcttttggaccataagaataagtctcaaacaggtgtacttaattaacatagccgtttgattgtacagattgcatgagttattgtaattttcttaatacctgtcttcgattcctacagataaaacaaaaaaaacatcactactagctatcttatcttaacctcatcaattatatgttgtcaattgtcgtgtattcttgtattaataattggtttgtgtgattcagcagagcaagagaaccggattatggatctgcacggtgaagtcatggcatgtggctatgaagatgttcaagttatgtggtcaatccttgataagtcaaaatccacagcctgcaatataacttcttcatgacacgagtgctttttttccc

SEQ ID NO: 247055 - DNA, 378 bp, Glycine max
  unsure (1)..(378): unsure at all n locations
gcaagcttcctttacacaaattttttaaattgatggattgaagaaatacaagtagtggggatgtctcctccacctctacaacctcacaatcattcacagactcatctcatgctctcaggatggcttcctcttctcgcttagttctctgccagtcttctcacagtaaaagctctcaaaactctctagaacatggacctttctctctctagaaatctataaacatgcaaaagcttcgataattgcccaaactccctctccatttttgatttcacgcttaaataggtggccttgttggtgcttgcgcgcttagcgcaacttggctcgcttagcgcgcattagtaaattntggcttaccgcgcatcttttcgcttcacaaac

SEQ ID NO: 247056 - DNA, 360 bp, Glycine max
ctccctaattcaaaggatttaaactatattgttcatttttgtggtgatgctactaatagatatacttcaagatgttttgacctttgctgttgaatctttaatatgttactctgatactgattttaattttattttttcaagcctgatatgttgcaaacagatgatgaaggaatatcagaggatattactaggttggaggagctttacctgcgacaggtactgattgatgctgtagctagttatactttattagttgtcaaaatcttctttcccataactattatttgtcatgtgatatttcacatattagattctatataagttctccaatatataaatatatagaccagtcatagagat

SEQ ID NO: 247057 - DNA, 342 bp, Glycine max
ccctacaccaagaaaacaaggcagaggcagaaaactctgcccaaaacacattcacatattacatctttccttactccaataccccagtaacattctcttcgttccgattcgttaaccattggatcaacttgaaaattttactggaggctcctagcacataaatctacattttgaccgttgggatctgctaggaaatgtctagaacccaatatgtactacctttcccataaccagcaatgcacaaacattttctgcacatgaacaaaaattctgttgcacaattcaacaacaattctctgcataatagggaagatttcgaaatccatcttggccacatccaat

SEQ ID NO: 247058 - DNA, 372 bp, Glycine max
  unsure (1)..(372): unsure at all n locations
cagcttggagaccttttcacgcgaacangatggatgctgttttcctaatgctaccattttcatcttgattgagttcgtacccgaatcaaataaacattaaaaatgcagtatctaggaagtgatcctaggtcgtctcccaacgagcaatggtcaaccaaatgttcataacagatagaaataaaacagtaacgaattgggggggggggttgttcgtttttgtaaattaacacagcgagcaactttctaattagaatgccctgcctccatggaaactatatcacaattaactcgattctcatatgtcccaacggaaacaggcccctctacttgtatggtaactatcatgatttcttcgccatcgagccactgaag

SEQ ID NO: 247059 - DNA, 361 bp, Glycine max
acaaggaagcataaatatattcatcacgaaaacatcatagtggaaggaaattgcaatgctgtgatccagaagatccttccacccaagcataaagatcctgggagagtaactattccttgttcaattggagaagtcaatgtgggaaaagctcttattgacctgcgagccagtatcaatttgatgccactctccatgtgtagaagattgggagagttggaaataatgcccactcgaatgactttacaattagttgatcgctccattaccaggccatatggagtaattgaagatgtgttggtcagagtaaaacattttatcttcccggcagactttgtggtaatggatatctctgaagatactg

SEQ ID NO: 247060 - DNA, 343 bp, Glycine max
  unsure (1)..(343): unsure at all n locations
cgaggccgcccgaacgagcagtanatangtttcttaacagccccctacagctcagtcacgagttaaataaagcttgcaatctgcggcgacttctgaaatttaaagaggcagctgtgaaagttccccttgatgaactcgaacctgctactgacatcgtcaaacggctttgcactggtgccatgagtnacgggtccatatcattggaagcacacacagcattggccactgctatgaataacattggacggaaactgaacacccgtttgttttacaagaaaatatgacccggcttctgttattggaaaaaatgtcccgtctcgttccacgcgtgtgcgtactcgct

SEQ ID NO: 247061 - DNA, 269 bp, Glycine max
aacagcccactccgcgcctccacacgacccttcaaccaaatagaggcgaacgcacatgatccggcccggcaatccgacaccccacacacccacaatcccaactgcgcaccacacggaccaacccaaaacgcgcggacgaactacacgcacaggctcagagaaaggcaacggatcctcccaatggcaacggacaccaccaaacaacaacaaagcaacctccttcgccgcccccccagcgcttatccaaacaaacccacgcgaagcaacgc

SEQ ID NO: 247062 - DNA, 283 bp, Glycine max
  unsure (1)..(283): unsure at all n locations
gcccccaacaagggcaaaagcaagcggaaaaccgctcctaccaccaccttgcncgatggcagcccacaaagtaccacggcactcgcccacaaaaaaagtctcatccacccgcacaagcggcacgcaatacccgaagcccacaaggcatggaacaaacgcccaaaatacacggacaacaaacaccctacgagggctatcgccacccccccccaaagaagaagaagccttgcacaccactatggcacccggaacaaagcgacgagcagccgcgaaccatacacgc

SEQ ID NO: 247063 - DNA, 418 bp, Glycine max
  unsure (1)..(418): unsure at all n locations
gcaggcatgcaagctttcaggaaagagaggtggggcatctttttacattttaanaccaaatttttccttagtcagaactttcccagacatgcactttcatactacctcactatatatgcaggaacaacaataattcttttttgatgtgaaagatcaaactaattgcaaccattgagcatattaaaaattttctccggcactagatcagcatgcccacgtttattgcagtaaaacaatatcaaaacctattggctctaatactactattgaataccaaagtaacaaaataatatctcgtagctaaaataagagatgagaaaaataggaatggacgcacaatattttaacatagaaaaccctcaatggataacggacaaagcacgaacaaaactagagaaatattttcacttaatggaag

SEQ ID NO: 247064 - DNA, 407 bp, Glycine max
agcttctccttcttttccctataaatatgtttataggaggttaagaacaaaaaggttcaaccctcctggtatcagagaatcacttaaaattagtgagaaaaattgtttccgtgaagaaaatccaagccgaggcgcttccataacgcttccgagacattttcgggggtgatttcgcgaggattttccgccgttcttcatcgttcttcgttcgttcttcgacgttcttctgtcttcaaccggtaagttcccgaaatcgaacttttcaattcattctatgtacccttagtagtcctcatttgtttcacgtgtttatatttttatatcatttactctgcgtaccccctcttgacgtgctttaatcatttattcaagtcattctctcgcctaatcaaaaataaaataaattt

SEQ ID NO: 247065 - DNA, 417 bp, Glycine max
  unsure (1)..(417): unsure at all n locations
gcggcatgcaagcttgtacaggaaataattattatttcgtttttatgnaagcatgggtgtccgtttgtcttattttattagaattaatatacaaattttgttattaacctcatctattattttattagaattttctttttttgtattattttattagaatttttaatttttttaaaaaaacaaagacattctaagatggttctttgaaaaaccatcttagaaagtatacattctaaaataatttttgaaaaaattatcttagaattcttaatatttttaatttaaaaaaaaacgttctagccatcttaaaaaatataccttttaagaaggttctttgaaaaattgtcttagaatccttaaatttttttgtttttttaaaaaaagaacaatgattctaagacagttttgcagagaact

SEQ ID NO: 247066 - DNA, 401 bp, Glycine max
  unsure (1)..(401): unsure at all n locations
agcttctagataacaatactgtttgatagtatcctcatccactattactttagcaatcatcttggctttccaagcaacaaccaaacttatactaataccatacttgaacctcacaacattcattatttgtgtcaattttacatcattgctggactttaacttctctgcagcaattttcgatggtcattttgagttagcattcttgttgctaaaaacccttccacaatgatgttttggtctgcaagtcttaatcatatatgtggaattcctcccaaccttgttgtaaaaaatctcatacccacatttttctttgcacttggccctagccttgactntgtcatttggttgaaacacaacctttctcccattcattataaaatgatcaacaattgcttctttga

SEQ ID NO: 247067 - DNA, 411 bp, Glycine max
  unsure (1)..(411): unsure at all n locations
gtgtaatcgattacactaagnnggttatctattaccagtggctgggtctgaataaaacaaaagatgtaactcttcaaaaaggtttttgactttttcaaattggttttaagtttttctaaaagttataactcttctaaatggttgtcttgaccagacatgaagagtctataaaagcaaggctttgttttgcatttcaagcatcttgaatacttttccaatcatttgattacaatcctttgcaagccttgaatctctttgaacttcttcttcttctttgtaccaaaagctttctgaagttttttggttttccaaaccttgaaaacttgtgctattcatcttttcattctcttctccttttgccaaaaagaattcgccaaggactaaccgcctgaattccttttgtgtctctct

SEQ ID NO: 247068 - DNA, 415 bp, Glycine max
  unsure (1)..(415): unsure at all n locations
ctggccacctagctcgcccaggcgagcnctgntatgttgcttcctctagaaggcaccgccttctagaggaacttcctggaaggcccaagtgggcctggttgctatttgcacccccttgtttactaaatacacccccatgccttttttttgctgattctttttccgtgacgttacggattttacgaatttcgcaacgatactcgttttctttccgtaatgttacagaaccttacggattatgtaatcatcccatttttggcttccggaatgttatggaacttcaagaattgtgcattaatacttccttttgacttccggcatgtcacggaactttacggattgtgcaacaatgctttcttttgtcttccagcatgtcacagaacttcacagattgcctaatgatgggtgccagata

SEQ ID NO: 247069 - DNA, 416 bp, Glycine max
  unsure (1)..(416): unsure at all n locations
gagcatgcaagctaggagcggcgttgaatgcaccaattgttttagattttctcaacaaataggtgcatatagagctacatatgtcttgaaattgatacatacagacatttgtgggccatttcatacaccttcatggaatggtcaacaatattttatatcattcatagacgataactccagatatgcatacttgtttcttatacatcaaaagtcacaatctctggatgtagccaaaacatttaaagttgaagttgaaaatcaacttaacaaaagaataaagtgtgtcagatctgaccgtggtggtgaatactatgacagatatgacagttcaggtgaacaacgtcccacagtacaccatgccggngtcacctagcatgaatggtgtggctgaaagatgaaacacaactcttaatgat

SEQ ID NO: 247070 - DNA, 413 bp, Glycine max
  unsure (1)..(413): unsure at all n locations
catgcaagctggctcctgtntggaagctaacaataggctggcttcccggttgccaaaatacagaagatgtacaagtaatcacgttagaaaaaccggtgtagttgccatccagctttgaaaagcatatttttctaataaggtcaaagagctcattttcttgcacaaaaaaagagccttattagaatgtaccgaacaatataccaactgttagtttgtgatggaatttcgtgattttaattctgttgcggtgttgttcgaaattgaatgaatggaaattgttctctattcaactatcacattccgctgctgagcttgagccttcggtgatgttaattaaaattagctttaattgggtatatgctatgaattattacaaatcgaacgagggatatggtgagcgtaatctgcattgg

SEQ ID NO: 247071 - DNA, 413 bp, Glycine max
  unsure (1)..(413): unsure at all n locations
agcttcttatgaaatcttcatatgaggtgttctttttacctaattntagctccagctgccataaacataagggttcaatatttgagatgaatatagattattatcttgatctaccaatatacagttttttcacccgtatccacaatgctagaaagctaaaggcaatataaatactaccaaagtgactaaaactctaaaagcacttttatcataccactaaatagtaaatgtgtgaatcaggtggttagatgtttcttatgcctccacccttaagagtgctcctttcatggattatttaatgaaaagttacaatttcaaaaatctaagtcttatgctacatgaatagattcaccttcccatctaatgaagatcctatactttatatacaaactatagcataatgggaagctgac

SEQ ID NO: 247072 - DNA, 367 bp, Glycine max
aagagttcagccccttaggcacttctctctctttccaattcgctgaggaaaattatttccgtgaagaaaatccaagccgaggcgcttccgtaacgtttccgtaacgtttccgtgagtaattacgcgaagattctcgaccgttcttcaagatccatcgctcgttcttcgttttcttcagtcttcaacgggtaagtacctcaaaccaagcttttcaattcattatatgtacccgtggtggtccacattgtgtttcatgtattttcattctcgttttcatttactttttatacccccttttgacgtgcttaagccatttatttaagtcatttctcacctaatctaaaaataaaataaatttgcaccgatc

SEQ ID NO: 247073 - DNA, 347 bp, Glycine max
aaatggaagggtgtaaaacaaaaaacccgtgcagttaatctaaagaaaactacacaggggcaaaatcgtcattacatatgcattaaatattattttatttttagttattattatataatgaaatttatttttacttaacgttgttataaaaatataattatttttttattatatattaagttttgtaatacaaattaaatgttatcataataaatattttatatttttttatcaaatatacgaattaattaattcttatgatttaaattatactaaattgtcacacaaattattatttaccattacctgcgcgtaaaaaataaattacaaatattaatcataattat

SEQ ID NO: 247074 - DNA, 353 bp, Glycine max
ggaacccaaaatttggttttagaagtggaaaagcatgaaaatagggacttgcttgtaagaatttgggctgccccatgattggtactttgcacctaagtaacgtgggaaatgcttttcaatggtgtgtacatatatgtgtaaatataaggggcataaaattcctcgccaagtatgaataattgttttcctaaatgaatgtatgataacgtggaatgcccttttgaatgcaaatatgtgcaggatgtgattagctttccaatatgcatataaataaatatgagtgaaacaataaaaatttgtatggtgtactctaaatgtatgtaggtagtttgtgataacaaatgtttaagata

SEQ ID NO: 247075 - DNA, 402 bp, Glycine max
agcttgtaagaactacattaactaacaatttattgtgcttgaacttggcctttgtatctaagtaagtaactccacgaccaataattggggaagtggaggtggaggttgagcatcctttgctgttgaggaacaattggggaagtggaggtggaggtggagctaatagactaagagctaacaataatgtaattggtgctaagttcattctactttgagtaagagactaagagctaacaactgtgcttcaaattggttttgcttattctatgcaattattgtttggcactaataaatcgtttatttacttttcttaaaatatgttgggtttgaggcctcactttgtggccatgaacttaaagcgggtatgggtttcgttgctgctgccgaggtttttgaagcaca

SEQ ID NO: 247076 - DNA, 410 bp, Glycine max
  unsure (1)..(410): unsure at all n locations
atgcaagctttggaggtgtgcagtttatctttnttatagnagaacactggtaatgtgtctactatcattgtcatcgttttttcgtcattgaggtgccactttgagctgccaggttctccacctttgggtgtattctttgaaagatttgtgcccccccttttgcacttgttctgtagttgcatcctatccgaagacattatactgacactgcctaacgaaggccaccactaggtccttccaagaatggactcgggaaggttccaagttagtgtaccaggtaacagctacccagtaagactttcttggaatgaatgtatcagtaattccttatcttttgcgcatgcccccatcttccgataatacatctttagatggttcttggggcaagtagtccccttgtacttgtcaaa

SEQ ID NO: 247077 - DNA, 327 bp, Glycine max
cgaaaggcttggattctaagagagcacaaatcccaaacttatccaagtagtcttttcaatacaattagcttattcactagcctttcattttaacttgtatttgaccttattacaacaacacacactttctttgattgctttttttttttcctcttcttttttattttctttatttttttttaacacaacttatttgttgtgtgtgctgatgtgctttgccttccactttacatcgcggttaactcccccaaatttagggaaaatttccttgaaccatcttgatgcaatcctaccctcaaggacattggatagaagactccaagaaga

SEQ ID NO: 247078 - DNA, 421 bp, Glycine max
  unsure (1)..(421): unsure at all n locations
tgcaagcttcagaccaaagcaactcagaatctatgtatcttaaacccctcaatnnaatggattttcaaggtttgagaagtgaaaatgagaatggggtaattttggagcaaactctcatctcaaacaaaactatgacattaatctaaactcgctcaaactggttttacgacgaaaactctaccgaatcaaaatttgactcctcaacacccaatttaccctagaaatggctcttgccttcactttggtcactcattttcctcctttgcacagcccaagctttcccacaatcctaaatgacatttcaaactaggattaactcactttaacctcctgtcgcaacgtgcccttcgcgggcgagcgagggcgaagctcacaggtgcgctttccaaaggaggaaagatgcgtggagtcgccaccaacg

SEQ ID NO: 247079 - DNA, 374 bp, Glycine max
atataaatagtataaatagcagcatacttttggaggctccaataattgtgtcctcagttttgctattttttccttgagctgcctgagatgatactctgcaagtacccatattcaaattcaaatgcattaaattgtaaatacatagaagataaaccccaaaccaaaattagaccataaggcaaagtgagaaaaaacaaacatgcaacaaaaagaatcactttttaaaagcagagaaatcacattttgaaaaaattagtaataataacaataaaattaaatagaatcctaattcggctttctgcaacaacaataaaatttatgatttaaaatgcaagatagcagtatgatataaacagtataaatgacaggataat

SEQ ID NO: 247080 - DNA, 418 bp, Glycine max
  unsure (1)..(418): unsure at all n locations
gcatgcaagcttattaaaattcatataactgatggtcttgtttttctcgctgntggtgaatctataaaattaagagcttttcatgcagggatttcccatatgtctaatgcatgatatatgattttaagtgacaatattgttgttgctctaagttccaagtagaataggagccttgcaagattgaccagccaagtattgagaagccttgcaagcctttaggaggatgcattaaagtggtataagtcaacatcgaaattgtagttgatagtgattgttagcaatatgctcgaaacccatacaagcaggcccaagaggaatacggcgtgaaaacaaatcatatattaggcatgaaaatataaaaagcagtctccttttgctcgactatatatgtgtgtgtgatgaaaacttaaataatttc

SEQ ID NO: 247081 - DNA, 368 bp, Glycine max
  unsure (1)..(368): unsure at all n locations
gcatgcaagctttgggcaatcttctttatacaangtttttttgaggttaaacttaggccctaaaattctaatatgtgcataccctacttttaacacaagatacagagaaataaatacgagtaaatcaccaatttcatcttcaaactattactctctctcctaaataattcctaagggaataaaactattcaagttatcccctacaatattgaatattcatcaatttagtccctaaggtaatgtatctttttaatgcttaaagaataatttgaagggtacttatatattaaagggactactttgtttgatttctaatacttctaggactactcaagtagtttgtttactttaggatcactaggagagag

SEQ ID NO: 247082 - DNA, 400 bp, Glycine max
agcttctgtaacaagacaaagaatgtgtattcatgttatctacaatcacttgttacgttgattcttacaacaatgggttttcgtttaactggcatcaaaaaggcatcaaaagcggcggacgcaccaaaaggctatcttgcagtctatgtcggagagaaattgaagccgtttgtgattcccgtatcatacttgaaccaaccttcattccaggacttgttgagtcaagctgaggaagagtttggatatgatcatcccatgggtggcctcacaattccttgcagtgaagatgtcttccaacgtataacttcttgcttgaattgagcagaaatctcacagtataggagactgacatagattagaggagacattttgtataataggcgtcttctctaagtgtaca

SEQ ID NO: 247083 - DNA, 366 bp, Glycine max
agtggcctcagatatcttaagaagggggggttgaattaagatattccaaactgtttcccctaattaaaaatctatttcactttttactcaagttatgaattcccttaatgacaatcttcttaaatattaattcaaatgaagccacttgaatatgaatataaagcaataataaataaaggagattaagggaagagaaaatgcaaactcagttttatactggttcggccacacccttgtgcctacgtccagtccccaagcaacccgcttgagagttccactatcttgtaaatttcttttacaagttctaaacacacaaggacaatccttcctttgtgtttagagatcctttacaacaagagactcacc

SEQ ID NO: 247084 - DNA, 401 bp, Glycine max
  unsure (1)..(401): unsure at all n locations
ccgcatgcaagcttagagcatttgacttatatgctttattttgaggaggagtgcngaaactacacacattgtatggggagttgttccacacattgtatgggtagttgttccaacaaagaatatgtacctagattgtcacatattcatgtatctaggaattcacatgcatgtacataggtactagaacttcattaatattcttgtaaatttcacattgtacttactcccttagtctatataaatatagatcagctgagtgagttaagcactcaagcatttcacaacctcttgtctcttcaataaagcactacgatttattttctttttatgctggaagagaagtgtcatcacttttgtatactatcctactattntcttattgtatctcagagctaattaat

SEQ ID NO: 247085 - DNA, 401 bp, Glycine max
agcttaaggctagagttaaacaagagctctttttggccaatatggaactccttcctaagaatcttagagtcacaaaacctcttcattttctccttatagatcttggagttctcataggcttctaagcgaatctccttaagttcttgcaattaaagcttcctttccatacccgcctcataaaaaaccaccctatacggagacatccttaaaggtgttcggtaagcagccatgtgtggttggaaataaatttaattgaattggtagaagcccaatccaattaaattttagagggggaggtgaacatttgcttactacaccccattgccacatcatatagtcacactttgtgcatgtccttcatgcttttcatgcctcatgacacctaagcacacttagtggag

SEQ ID NO: 247086 - DNA, 397 bp, Glycine max
cttcaacacagaaatcttgtttatcttcttggctgccgcattaaaggacaagaagaattactagtatatgaatacgtggttaatggcagccttaactccttcatatttggtatgcaataaatgaagaatgcttaaattaggttcacttgtgttctttcttttctttgagttatacttagcagcttattaatcttgaatatctaatattgaacaatactttttaactccttcagatcaaataaaaagtaaattattggattggccacgacgcttcaacataatacttggaattgcaaggggactattgtatcttcatcaagattctcgattaaggattattcatagagatctcaaagcaagtaatgttctactagatgaaaagttaaatccaaaaata

SEQ ID NO: 247087 - DNA, 417 bp, Glycine max
  unsure (1)..(417): unsure at all n locations
acctgnncgcatgcaagcttcatagttagacgcatgtttgcttgtttatcaangaaagagaacataaaagtcaatcattttgtgtcttggtaaatgtatttgtggcaacagctttggttaaattttggaagcaagttttgtagaacctgaaaaatatggtaaaataaatgtagttattccatacctataaatatggaaacaaataaatgtagtcccctcccccctctttagtttaattgctttcttatctctgcaaccaattcttcctattttggcaggtggagaaagtcagtcatgttgtggaagggttatatcggttaaatggggtgattatacaaggcgaataggtattgatggcaccccagaagccattaaagaagcaattacggctgcttttaggttgagaactaaacgtac

SEQ ID NO: 247088 - DNA, 397 bp, Glycine max
tgcaagcttaataaatctatatatggtttgaaactttccttcagatagtggtaccctaagtttcatgggataatctcttcatttggttttgaccaaaaccccatggatcaatgcatataccacaaggtcaatgagaataaaatatgtttttttgttttatatgtagatgatattttacttgcagccaatgatcagggtttgctacatgaggtgaaacaacttatctctaagaattttgacatgaaggatatgggtgatccatcttatgtcatcggcattaagattcatagagatagagttcaaggtattttacgtctatcacaggaaacctatattaacaaaattttatagagatttcagataaaagatcgttcatcaagtgttgcttccattatga

SEQ ID NO: 247089 - DNA, 385 bp, Glycine max
cgcgctcacttaaatttcaccacactttattttatatttggatgtagcttcatataaatgagaggggcctacaataaaaatcacaactgtattgatcaaaaagtactgatatctttgtcatgaactagattattgctgacatatatttaaggtgcaatgttgctgggcttgaaccaacaggatattatgaagcagaaaaagatcctaaatggagggatgctatgcggaaagagcttgctatgataaaaattatcagacctgagaattagttgaaagacctcaacatcagaagatgattgggagtaagtgggtgtccttagtaagtctactttatatgtcaaaggtgacaatgataattctttttgtggtctccctatatatggat

SEQ ID NO: 247090 - DNA, 417 bp, Glycine max
atccatatgacatagaacaaataaaacaagatttaaaattgaaattggagaatgcaagattgacaatgggaatgagaatgtgaaaattatgtgcaaattgcttcctatgtgaccaatttataggacccaattttaaaaaagtttaatgtaaaaaaaatattaaaaattaaaacataacatgcatccaaaattcacagagcaattgtcaattgtatgcaacgttctaaaattcatagagtaacggtcaattgtggcaaattgtctttcttttctgcattctttctcttttttctttctttctttctcttcttcccccttccaaaacccacctcctatgcccctattttctcttctctaatttctttctttctttctcttcttcccccttccacgaaaccaccttctttgtacccgacc

SEQ ID NO: 247091 - DNA, 410 bp, Glycine max
gcaagcttggaccttcccaacctacactagccttactattatatgaggtggaaatcttagaaacaccaacctatgtaccttctgtaatgccctgaaatttttctaattataaatctatgtttaaatgtatttatcatgttatttgattatatgattggcttgaatgagttgaggaatggtgtgaataggtcatgtgtgatttgcttgatatggatgttgacttgtgcggagttttattgacctaagttgaaattagaagatttcaaactttacctaaacctattccagtaaaattgcgatcctggattcgttaaccattgcatcatcttcaaattttgattgtaggttgctaacacatttcctcatggtttgacagttgggatttttaaaataataactattgacctctt

SEQ ID NO: 247092 - DNA, 109 bp, Glycine max
agcttgtgccacctacatagcataggtttttcatggttgatcaacctaggctggggttgcaaatttgagaatctctcccatacccaaatataaaccaagtagtaaaagg

SEQ ID NO: 247093 - DNA, 224 bp, Glycine max
aaggggaagcccccgacaccgacgaaaccagaaaaaggccaaggggcccatcccacggacacccgcccaaaagaccctctccccgaaaaacctgaacaaacccgggacgcggcccacgggcgaaaacaaagggacaaaccaaaggggggccccaccgcagcgaaaaaggaaaaaatccactccgtgaggccccaaacccttctcaagaccccaggcacccaccc

SEQ ID NO: 247094 - DNA, 435 bp, Glycine max
agcttataagaacaaaattgcctcaatcatatccaaatatgcatgtgaattaggaagcatcaacaagaatcaagccaaggctattgtgcaagcaatcaatggggcaaaacacaccaaatgattatgatgatggatgactcaaattctcacaaaggtaaactcatcactttcaaattgagcttccaaaactatcatgacatgtagaggagaatcaaagatttcaagtcacaaaatgtcaaaaacttttattttcaaaacaattacccatttcttgaacatatcctatgattcaaagaaaattgtgcaaagtcgtacatgcgcacaaaattgacccaaaatattaaactaaaaatccgacgactaacaacattaacaaattaacacaactaacaaattaacaaaaccaacaaaactaacaaaaaccaaagaacactt

SEQ ID NO: 247095 - DNA, 207 bp, Glycine max
ctgatgggcaaacagaggtagtgaataggtctttctccacttttttaagggctcttctaaaaggcaaccattagtcttgagatgagtatcttccttatgtagaatttgcctacaacagggggggggggggctataacctcaccatgaatcacctcttgagttggatatcgttccaatccctccccccttatacctcatcccctccac

SEQ ID NO: 247096 - DNA, 416 bp, Glycine max
  unsure (1)..(416): unsure at all n locations
agctngaggtctggaagctgagctctttctcttcctagatgccatctataatgagaagaacataaatttattagactagagtttattaaaatttgaaaacagaaaataaaactaaaattgacagtaggcgcttagcgagatgcaactcgcttagtgcgccttcaaaaaaataactcactagcttagcgcaacaagggcgtgcttagtgagttatgacagaaaatttttgttctgcataatcggcttagcgagatagacactcgcttagcccagagcagattttcttcacacatgtgcttagcaagcacgtctcacttagccttattcaaaccgcattgaatagcacttagcccaacatggcagcgcttagcgcgagcaaaatttcagaattntaactaagttatgtgggcttagcg

SEQ ID NO: 247097 - DNA, 426 bp, Glycine max
agcttgaacaacttaaaatcgatgatgctttagtgattggtttggttaaaaggtggagacctgagtcacacacgtttcatcttcttgttggtgaatgcacaatcaccttgggagatgtttctctacaactaggtttacacgttgatgatagactagttattagcccaacatattatgattgggaagaaatgtgcgtagaataaataggtgttgttcccccacagaatgcactggtgggatcaatagttaaactaaagtggttaaaagaacacatgttgactcttctagcagaaccaacaccacaacaactagtaggccattgtaaggcatacattttagggctaattggtggggtgttgatgccagagaagttagggaacacagctcacttgattccgctcttacacattctacaaatagggaaaa

SEQ ID NO: 247098 - DNA, 327 bp, Glycine max
atacgacacctacatatgtaaatattcgatgccacttattttctttagactcctatgtgaatcaaacgcccttatttttgactgctcacaacagttaacttaaattatttttaaaatacttttgcatactccccccaattacaactcactaaaacatcttttcaaaataatattaatcacatttatttatatttgagtttaacatgtaaaatatccttttttgcttatatataaatttaaaatgaacatccttgaacgatgtacgtgttgatggaatagatatacatggagcaaacggattcctgctggatcagtttctaaaggaca

SEQ ID NO: 247099 - DNA, 411 bp, Glycine max
  unsure (1)..(411): unsure at all n locations
acctgaggcatgcaagcttctcgatatattatgcgcctgaatcggactttcttgtgataagttatgaccattggaatntcgcgagagcttccgatgtgcaatttcgagcgtctcgatatattatgcgcctgaatcggacttccgcatgacaagttatgaccattttagtttttcctgagcttccattgttcattttccagcttctcgatatattatgcggctgaatcggacatgcgtgtgataagttatgatcatcttattttcctcgagagcttccgttgttcaatttccagattctcgatatattatgcgcctgaatcggactttcggttgtaaaggtatgaccatttgaatctttcgagagctttggctgttcaaattcgagctctttgtattattatgcgcctgaat

SEQ ID NO: 247100 - DNA, 435 bp, Glycine max
  unsure (1)..(435): unsure at all n locations
agcttacataggcaagtgttttcgtcttaattccaaatcatagatatgtcataaattgattntgtaggtaatttcccatcaaatcaaggataatacgcataatcatcatggatcaataggactttttaaggtcggactttgcaggaaattggttttggttgctctggcctttccccttcttttcccttttgttttgtgcggaataggagagtaggcccaaaaattaagttagtaacttgaacgggcgatcacttcctatgtctgaaccaagctactactgctcccttcctttttactccttttgacaactctgtacatggttcagacattgtttggtccaaagaacttgtttttccgtttctattttcctttacttttttctatctttgattgaacaattttttttctttttcttttcttctttatttttctttg

SEQ ID NO: 247101 - DNA, 398 bp, Glycine max
ctttccttcttcctaatgtgtccttatggcacttcttattctgattagtatcctactagttaattaacctgttgcaacatgttaggagtcatttcagctgttcttggttataccattcaaattcttttctgtattcagtgctatgaatctgtaaattctgttatatggtactcttttggtgctgtttaataacttatgtatacactgcacgaaggtgatgtaattgcttatccattgattgagttaacagcatcttggactccggaactttcctcctttagggtgcatatcaactatccagtctgcttttggattacattattaaaaaaaaatgcatcgacagtcaatacgaattacatctatgtccttgcagggtggaaaatatctcggtatgatgc

SEQ ID NO: 247102 - DNA, 293 bp, Glycine max
aaaaggacaacccaacaaccaccgtctggaaccacgtcattagaggctatgccccgcgccactcaccttggaaagccccggaatggtacactcacatggtgtcttctaaggctgagcctgatgggtatacgccactggtctctgatgagtgcgtgtgcgcgaggtgggttggtaaaagaatgggaacaggagcatgccacggttttggtaagacggtattgctccaatgattatgaggacacgagttcgatcactttctattctgggcgcggtgacaattaacgggcgcccca

SEQ ID NO: 247103 - DNA, 320 bp, Glycine max
  unsure (1)..(320): unsure at all n locations
ctcggtgagagtgtgaacctcattattgagagaacgactagcatagagcaatgacttttgtttaatctctgaattttacaatgaaatgcataactatggatatgatgaaggccattattgttttgaaagccacttgaccaaaaagctcacctgtttataaatgataatatcatttgcacccttctgtgaattgaattgtaatggtcaaattgaaccttaagctctgaaattgttatctctatttaccttgcttaggttttaattggtttaagacaactntgcnccaaatttgggggagtttgtttgatggataatttaaa

SEQ ID NO: 247104 - DNA, 323 bp, Glycine max
attaccagagcagattttctgaaaatattctcaacaggcacatctttttatttggttcttgaatggctatcaaaagcgcctatatatgtgacttgagacaccaatttgctaaaagattttcataacaaaaagggcttatcctcttaaaaagcaaaaagcgtttatcctcttacaaattccttggccaaaacacttgtgattcaataaggaattatttgagggctcaaattgttcaatctatctctttcaagaaagagtacttcttctcttcttctgtattctgaaaagggattaagagactgagggtctcttgttgtgaaaga

SEQ ID NO: 247105 - DNA, 424 bp, Glycine max
agcttgctgaaatcattgaaagattggtatgtatttgatttctgttgatacaattttagttgttcgtttgatttgtttcttttgttctggatgtctggtattctagatcacatcttcccgcccttcattcttgcacaggagcaaggtgatttaaagctccgagtacgaactttggaatctgagagggcattccagcgtattgccactgtccagcggacaataggaaatgtgagtgaatctggcgtctaacttagtgaaattataagtttagttgtttcttggtatttggtttgagagatcgagcccatttaatagcctgttatcatttttagtagctatgcatgcccttcttttttattatctagtatctattataagtaactgctggctgttgtgtgaacatgattgcaatagcaacaactca

SEQ ID NO: 247106 - DNA, 417 bp, Glycine max
tacatgttagtcgatgaatacgactaacttttgtgtataaaacctatgtaaattgtatcaaactcctccaatttatggttattttgtagtgttgtaattactttttgttaaagataggaaataaatacttagtactcccattttgtgtgtttaataaccatttcctctcaattctaagttaattaagcaagtttgtgaagtgctgattttcatccgctcgctaagccaatcttctggcttagcgagccatccactgagcacaatactcctcgactgagcgcgaggaagaatctggaaaaaggatgagttgtgcatttgcgctgagcgaagggtcatcccactaagcacatcgcttcagtccatccgctgagtgagaaaagcacacactaagctgaaatccactaatgcgtgttgagc

SEQ ID NO: 247107 - DNA, 442 bp, Glycine max
agcttcaagaattatggcctcatcaaactacttgtttctcgagggaaattctataaatagacctcccatctttaatggagtgggttaccactactggaaaacccgcatgcaaatctttatagaggcaatagatttaaatatttgggaagccatagaacaaggaccttatgttccctctataatggccggaagtgcaacaatagaaaaaccttgagcagattggactgaggaagaaagaagattagtacaatataatttaaaggccaaaaatattattacatctgccctaggaatagatgaatactttagggtttcaaattgtaaaagtgctaaggatatgtgggatacactacaagtaacacatgatggcacaacagatgttaaaagatctaggataaacactttaactcgtgaatatgaattgtttacgatgaatgtaaat

SEQ ID NO: 247108 - DNA, 359 bp, Glycine max
attttcttagagactaaacatgtgtacttagtatgaatacgtagctaattagaaatttatatgaaatataaatggaaggagtgtgcctaccataatgcgttacatatgtacatatttgtttggtctaccttgtttaggattttaattattgcacaaaatctcatattaattggtaaaattgaattgttctgatgcaataatctttccgtttgagttttgttagaaatcatatttttaaatcttgaattgtgcattgcgcaaatatgttaaaatcaatcgttattctctgtatgtttccttaaatattaaactaccataatcccagtatggtggcgtattcgagtcatcagaatagtatt

SEQ ID NO: 247109 - DNA, 444 bp, Glycine max
  unsure (1)..(444): unsure at all n locations
catgcaagcttntaagtgacacgtactggtttttacttcccatatctccatatcaatcgctggcagtacatacaggcatcacaacctgctcaatggtattcgcagcatcatcagaggtacctaaacactaccactattacattggcaggtacttgtttcacctctctacaccaccatcctatgtatgctacagttggcgttccattttgtttcccttgcaattaacctaaagaaaagagattaattataagggtttcaaattgaactttgattaataaataatttaatcgttttttgtttatttcatcttttccccaaccttagaagatcataaagcatcaacatttacaacctcattataaatttgatttctgatacaatgaaagaacagaattccctcatactgccattgcctaaatcttagtgggctaataaacaacacaa

SEQ ID NO: 247110 - DNA, 438 bp, Glycine max
gattgccaatactttgacaacatatcatagatatggatgattaggacatacttatgctatgcatggcaaatgtaattatgagatcgacatgagatgctcgaagaatcatcatttcctaattaaccatgcattaagtaccatgttcacatgattttcaaacatttttttagagaaaagagtgtataatcccaacatggttggtttctagccatcatcatggtacccaacacatgtaactaagaatgtggtgtaaacttccatgcttcattgtgactttcttttgttcttttttttttggtttgccgaggaaaatgcaaggatcatgcatgagtgaacataacatgtgaatgatgaaaatagaatgtatgcagttggcagaacaaaagcatgctaaatgaagatgcatgaaaatgcaatgacttatgcaaatgcaatgca

SEQ ID NO: 247111 - DNA, 371 bp, Glycine max
tatgaatgcatggaatgagatggagtgccaaaaaattaggaattgattggtagttggttagatgaattgacacttgcctgaaacacttgtgtgcttgagaaaaacactggcttgtgaggaaaggagcttaatcaatcattcttgatgctggtcatgcttgctaactgatttcgtcttttttgcttaattgcacatgcttgtagaagcaaagcttcatggtgaatcaaaggtgattcaaaggtgttttgatgataacaatgatgataacaaaagatgatgacgaaggtgatgacaaaaagcttaaagatcaatcacagaacaactcaagtgaataaagaacaattcaagagttcaagataagactcaaggag

SEQ ID NO: 247112 - DNA, 430 bp, Glycine max
  unsure (1)..(430): unsure at all n locations
gcttagttcgaggtacttacccattgaatattgattatcgatgaagaacgaatgaagaacgtcgaagaacggtcgaaacctttgcgaaattccttacggaaacgtttcggaagcgcctcggcttagattttcttcacggaaacaatttttccaagcaaattcgaaagagagagaagtgcctaaggggctgaaccctttttcacttcacttctccccctatttatagaaaattgggggagaagcttgccacccagctcgcccaggcgagcatggttgcttcctccagaagcaacagccttctggaggaatcttctggagggcccaagtgggcctggtttctatttgcacccccatttttactaagtacacccccctgcccttttttggtgattcttttttcgtnaagttacggacacttacgaatttcgta

SEQ ID NO: 247113 - DNA, 353 bp, Glycine max
  unsure (1)..(353): unsure at all n locations
aaagtgttagaaggaagcttgataattttcatatatccaattngaattacaattgctttatttataatagttcctggctaacagaatttatcattttgtgccaagggatatttaggaaataatgggcctagcgattacggttgtgatgctgcccccccggcccaagaccgaccagccacgcttagcaattccagagcaaattccaggtcagcttccttcattgaaaccttcttcatacgtagtcactaaagtaagagggccttgtgatgaccctctttgcctttcttgctatctgaacccctctgttctgtgcctgcacctctgtttgctgttctgatgatcctcttttcgta

SEQ ID NO: 247114 - DNA, 431 bp, Glycine max
  unsure (1)..(431): unsure at all n locations
gcaagcttagtaacaaagaagattatcttcatttaataattttctcttaaagggaaccaaaataaaataaaactagttcagtcacgacctcttaattgcagaataacatcaaggcataacaaagccattcactcccgaaagatggttatggtaattgctatcatcattggcaggtggctatactgtgattcgtacagacaaatgaaaaaagttggaagcacactagcaatcaagaaagttagcttcgaacattcaattttagagaaggcaaataaaaacattattgtgtctgtaggcactcagaatcaagaaagtgacccttttgagtgttcaatggaagagaagggtctctgaaaacagagaaatcataggcttattttcctcttctcccttttcagacanaacctaaaggggtaaaccaaaaaagaaat

SEQ ID NO: 247115 - DNA, 303 bp, Glycine max
ggagaaatgcccgggggtcaagaaaccctggggacgccagggggggtgccaatgcccaaaaccaagcttgaccaatcctgacccaacccgggcataatcagttagtgagaacctgtgacggacctaaacaggcgagctcctggcagtccacccgataaagaacaaagaccacaaagcaagttggcttgtgtgggggctggccagctatggaacctgagcgattatggcctctggtaaacgattaccaagggtgtgtaatcgattacaggcttaaaaatgaagacaagaagtaaaatgggctct

SEQ ID NO: 247116 - DNA, 428 bp, Glycine max
agcttcagcaacttaattaccacatatgttctcttggatgaacagataaagtggacacaggaaactgataagggaaacttgaaatccaatttctgtaacaacaaaacacaaatgttagtgtttgctatataatccatacaagtttttaatatgatgaattgatgattgagcagcaaaggtgagtaagaatgaatcctaaatacacagatatggattgtggaataattctaaagattgataaatcttttcttcattatagatggaacacaaacatagaagatctaaacaatctggagatcacaatcatttagctcaacataaaaaataaaaatctacacatcaatgtcatcatgaaacaaatatttaaaaataattcccttccaaatggattaatggagttctgagaaccacggattaaacctaagaaa

SEQ ID NO: 247117 - DNA, 414 bp, Glycine max
atggtcgagtctgatagatcagacaacatcttatagattccactgatgatgaagtgactcttatgcctagaaatttcaaacagatgttgaacaagaaaagaaaactccagcactcctccaaaagaaaatctgaaacttcttccattacttcatcaaacgatgaagaagagatgtcttatgatgttcttcttcagaactctcaaatgatttctcttctgtgcaaaaagtataaagaaaaggtcaaagcatttatttgtgaaaatattgagctaaagaaatcaaatgaagttctgaaaaagaaaatccaaactctggaagagaatctgagctaagctagtaaggcaaaaaatcctccatagttgaaaaactaagagaggaggtagcctatcttacaaaagactttgggaagttcat

SEQ ID NO: 247118 - DNA, 437 bp, Glycine max
  unsure (1)..(437): unsure at all n locations
agcgttagaangaggaggacttatgaacttttctggtttatngccatcacgaacgaatggactctgatatcatgtggaaagggcgacaacggtgaacacacccgagatgaattatcaaaataatgagatatttctaaatataagaacaacaaaaatgactagagggtgttcttacccgatagagtcctcgaatgaaaaataacatggaagactaacccaaacttaatttaactcgcgaagatttttacggagatattgatatgaaagaaaatgtcaaataagtggaggaataacactttggtccttatatgtaacaacaaaagagatattcagagttatgttgatcacccagatattaaagtgatgagcgctatcctttctttagagaaaataacaaaacttatttatcaaagtgtgatatgatgataaataaattg

SEQ ID NO: 247119 - DNA, 437 bp, Glycine max
agcttggggaaaagctttgaaaaggtttgtcttttacatgtcttatttctttgagtgacatttgtattggttgttatcttgtgtgtggcatcttagtacatatcatatgtgttatgcatccttcatcatcatagtaagggtgaagaaaagtttctaagttagaaagatttcttcaagaggcaaaactttttgttttaatcgattatagggttgtcataatcgattgcaacaagtagtttgaagcttggagagttgagtttcatatcggtttaattgattacagtagtctcataatcaattgccctattgtttgagacaatgaatgatctatttaggagtatctgctttaattgattaccaagtggtttaatcgatttagtttcttttgtttagtagttcataagtgaacaagaacactttaatcgattactttgagt

SEQ ID NO: 247120 - DNA, 422 bp, Glycine max
atgcagcttataggtaaacctggcaggtctggcttctatcgttaagaagcgaacatgttctacttgaacaaacccaccaatcgggataacaaatactaccggggatggataaaaagggttcatttgggactttgtgtgccttgaataatactacaatggacttattttttatgctttttacctctggggttgcgtgctgtaaagcatggagtaataatacaaacatgttttgattcacttttgatgggttttttttttttttttgcatgaagtatttacagttcctaactgaaggggatttggtgaccatggtgggtctttctgtgatgaaggctctctctaactactttatcttgctgttaggttgtgtattctttttgtttaagtcatagctaatcttgagtgaaattatcttgttaagt

SEQ ID NO: 247121 - DNA, 436 bp, Glycine max
cctcaactccactagtaattaatattataaatgccttatccatacccaaaaccaatccatagtcaaattcaaatccaaaaactaagcctctttccatggaacccctatgggtgcccaagggaaaacacaaatggaatataaaagagggagggaaggtgcttaccacatcaagggacaaccaatgaatagagaggagaaaaatacatcctttcagcaaaacaaccaagttctcaaatcctcaaaaaatgggtcttcttgaacaagggggtagaaagaaaacttttgtgttgtgttcacattctctagagtttaagaagggcttatgactctaggaaattctcccattcaaacctaagccttaccatacacatccacctttgcaacgtaaactaaagatcattctttcaagcccaaatcactaaaactcattgaccac

SEQ ID NO: 247122 - DNA, 241 bp, Glycine max
gaccggcatacggtgtgtagcttacccggagttgaaagtctgctttgactgcaccctagagggcttgttcaataaaggttgacatgtatgagtggcattatcgtgtcatgactgtaaaacatatttgcttcatgatttacttattttctctacattcttcggctaaattacatctcctaatggctatatgacattcgtcctttttttcaatatgtaagccacgcttctttaataagcctag

SEQ ID NO: 247123 - DNA, 430 bp, Glycine max
agcttctaaactttatacaagaatgaagctctgatctctttgctagacaagtggcctcagatatcttaagaagggggggttgaattaagatattccaaactatttcccctaattaaaaatctatttcactttttaaccaagttatgaattcccttaatgacaatcttcttaaatattaattcaaatgaaacaatttgaatatgaatataaagcgataataaataaaggagattaagggaagagaaaatgcaaactcggttttatactggttcggccacacccttgtgcctacgtccagtccccaagcaacccgcttgagagttccactatcttgtaaattctttttacaagttctaaacacacaaggacaatccttcctttgtgtttagaattcctttacaacaagagactcacagtctcttaatccctt

SEQ ID NO: 247124 - DNA, 334 bp, Glycine max
acctatctttatgccatgattaaaaaaataaagggaaaaggagtgggttgccttctaataagcgcctctttaatgtcactaacttgacacatttaccttcaaggtcttgtaattgcataatgatggtcaacctttcaatgtcccaccatggtaccactttaacctcttaccatatactatccatgttctgtccgactttctgattgagggcaaataattccattggtccataggttcgcttctttatgggaaaggtccaaacctttatacttatctggctggaataacttcatcttaattgaaaagaacacttgtggctggcctaagtcttttg

SEQ ID NO: 247125 - DNA, 416 bp, Glycine max
agcttatcaaaccaaagcaacttctatctataacaacttgaagagctatattagaagaaatttcaattggtgaaatgtataataagtcggtcatctagtgacagcataacaaagtcacaaatactagtactaagttgaagaacatattgcagtatcgagtgtttgctggttacatattttcaggttatatacctggaggagttccacaacacatattgcggtcatcaatatgctcaacttcaagaccaatgaaccatgcaccaagtgagacatcttcattagcatatttatgcaaaatcggcctgcaatcataattagactccacatgaaatttctatatgtaagagaatattctatgagaaacatggactgatccccgaactgagatttcctattaggagaaatttaagttatga

SEQ ID NO: 247126 - DNA, 321 bp, Glycine max
gaggcccttcaatttgctcgccccaccctaaggcgatggcacctacttttttgattttcgcaccctgcgaaggcaatttgtcttaattttggaacagagcctggtttaactgagtagccatttgctccatctaatttgtcccactctgaatggaggctcttgtctcttattgaaattgcccattttggatggttatttgcctcactaacctcttctaaagaaggttgaggaggagcctcacttgctcgttgtctttgttgagacttctgctactgtgattgcattggacgaggaacatatggtttgcttgcaccaccacat

SEQ ID NO: 247127 - DNA, 396 bp, Glycine max
  unsure (1)..(396): unsure at all n locations
gacatttataaaagcataaatagcagtggtgaataactgtttaatcagaaccacttcactattgaatcgtgcatgtcaaagatctagtaagtcaccttttcaattcattctggtggtcatcaaaaaatataagaacccgattaaagtccgaaatcctgtgtttcttcataacattgggccagtcaatgctcccaaaatccacaaagtccttcccacctaatacctgcagttaccatcaacatangcaggtccctttttcaagtacttttccggatgcctaggtgaaaaacaaattattggtgtgtctggcatacgctcgcccaaaacccaagttgaatgttctttgaaagcaccactcttcatcatcatattctgcttgatccatcaagcaataaa

SEQ ID NO: 247128 - DNA, 434 bp, Glycine max
  unsure (1)..(434): unsure at all n locations
taaaccacgcagctgcagcttgaagggcgtagccaccacctttcatagttaatactantcaggngncgacgatcattaacattgtttcttcgtcattgaggtgccacttgagctgccaggttcttcacctttgggcgtattctatgaaagatccgtgccctctcttttgcacattattttgtagttgcatcctatcccaagccattataccgacactgcctaacaaaagccaccattatgtcctcccaagaatggactctggaaggttccaagttagtgttccatgttacaactaccccagtaagaactttttgaaaggaatgtatcaacaattactcatcttttgcgtatgcccccatcttccgacaatcatttttagatgggtcttggggaaagtaatctccttgtacttgcaaagttcagcaccttgaact

SEQ ID NO: 247129 - DNA, 417 bp, Glycine max
aatgaactcttaagtgactatataaccttttttctagggaatgcttcatgtaatcggtttgatataaaaaaaagaagtcaatattgtgttcatttctatgtgttggctggtacctctgttgttacttttggtgccttctagcatatcaatattcggtactgcattgtgtttcatttataaaatttatatctatattatacacaatttaatcattcataaacaaaatagttagctgagcttattattctttctttatgatattaaccttgagagaaccatactgcactagctagccattgtagttggagagttcaagagttataaatcctacacttccaatgtgagatttaagttaagtcccataccttacaattggatcttaacattatacaatgctttgcacccccagtgactgcg

SEQ ID NO: 247130 - DNA, 146 bp, Glycine max
ttataataaaatatgcgatttatttaacgaatattaacaaagttaacgccccaatactccatacgcagcgtttttgccctggagtttaccatccccagaactagccctttaaatacagagttattataatcatgttctatgttata

SEQ ID NO: 247131 - DNA, 377 bp, Glycine max
tatcaaggcaaatttgttccagaggtggggcagacattgggtaagaattgaaatggtcaaagtaaatggaatacccacactaattctgtatatatgcataatgtttctatttattgtgtcaaaaaaaactgtaagtacaaatgaaattaataagtgtgtatgttgtaattccatgaatgaaagctgagtgcctaaataaaaggcaagtatggggtgggaatgaatgaaaaagtgaaggtttatctatggatgaatgctctcctaaaacctaagcttttgaatcctagaaaaaccatgatttgttggcagcctaaccccattacaagcctagaaagtccttcggattcattttgtgtgttcattggtgtatgatatga

SEQ ID NO: 247132 - DNA, 275 bp, Glycine max
gccactactaactaactaaaatgattaagcactcgccccgcaaacaaaaaaatgggggccaacaaaacaactacgcgtgtagcacacaccatgggcataatggacaacacataacgacatgcacgcgtattaaagtttgagcgcgacaacacaatgactgagccgactacacattctgaaggaaacataaacaccaaacatggccacgcgcgtctattcttctgtaaacaaaatgaaccaaccgctcgggcacaaccatctatatatatagcaga

SEQ ID NO: 247133 - DNA, 328 bp, Glycine max
ccctcatcaactaggaaacctcttcaacctgcagcaccttaatcttggatacaattatgctcttcagataaataaccttaattggatatcaaggctatattccttacaagacccttgattgagtggttcagaccttcataaacaagggaactggcttcaagaactgaatgcacttccatctcttttagaactacacttggagagctgtcaaattgataacttaggaccaccaaaaggaaaaaccaacttcacacatctccaagtccttgatctttcaattaacaatctcaatcaccaaatccccttctggctttttaatctcagcaca

SEQ ID NO: 247134 - DNA, 383 bp, Glycine max
accaactaactaacttggcctaatatattgagtgactatgcacaacgaagggatgagcctgaattaagcccatctaatatacttaattaaactaattacacaaaacaaaacttaaactcacagttcaattattcaagtgcagaggttatgacttccaaacccaatttgaccctcgaaaataacataattgatctaagcttgtttgtgacaaaattaaagatcttttaaggactactcatacactccactccatttggagctctgtagtgtcctaaaggccttgcacaagatagataggtcgagtaaacacaaaaatccgaaaatagccacaatattaattaagcttaataatctgcctaagatcaacactaagttagagtgag

SEQ ID NO: 247135 - DNA, 420 bp, Glycine max
agcttctttgagaaaactttcttgagatgtttgagcttagctacacacacccctctaataactaagctcacctccttgagaagctttcttgagacacttccttgagaagcttccttgagacacttccttgagaagcttccttgagaagattcctagagaagctagagcttagctacacacacctctctaatagctaagtgcagctccttaagatgagaagctagagcttagctacaccccccctataatagctaagctcaccccatgacaaaatacatgaaaatacaaaaaaaagtccctactacaaggactactcaaaatgccctgaaatacaaggctaaaaccctatactactagaatggccaaaatacaaggcccaaaagaaggaaaaacctattcaaatatttacaaagaagagtg

SEQ ID NO: 247136 - DNA, 276 bp, Glycine max
  unsure (1)..(276): unsure at all n locations
attaagatgaatgactcgggcatacttatgctatgcatggcaaatgtaattattagattgagatgcccgagaaaacatcatttcctagttaaccatgccttacgtaccatgttcaatcatttcttttaagaaaaacatgtgtatgatcccaacatggttggctcatggtacctaacacatcgcacttaaaatgcaaggtgaattntcacgctttctccttttttgtttttttttttgccgaggaaaatgcacggattatgcgtgagaaaacatgaa

SEQ ID NO: 247137 - DNA, 394 bp, Glycine max
tttttcttagaagactaacattggtatttaagaataccttacttttacaaagaaagaagaaataatactttttaaacctcataaagtagcccctacacatgacattatatttttcatgaacccaccgcaacaaatgagttccactcgcctaggagattgaaaatcacattatgaggacagaatcaacattatgcctaagtcattttgaggaataaaggttattttactcgcagataacaggacctcgtaattgaccccggtgaacgagcaaaattcctactagcacatgaattcacgattgactaaccctcattaatcaactaatttaattgatggatatatatacatatatatatatatgtatgtacatagccccatacatatatatatatat

SEQ ID NO: 247138 - DNA, 354 bp, Glycine max
ggttccatggctagactgacaaagcttctccaagttgcagaggcggaaaatttaaaaaatgtatctattgctgacttaataaggtatgcaggtaccattcatggaccatgtaataaaattcattgcctgcatatttatgtttagactctgcctttagggcagatactatactcttttatggttaagtagtgttaaatatattaaatgagtttgatataggtgtaatttataagcctgaatcctgaatacataatcaaactaacttggattctgtggtgctttttgtccgttgaatccaccacacataatgacgggtttattaaatattcttctgtgaaccctttacctgttata

SEQ ID NO: 247139 - DNA, 299 bp, Glycine max
  unsure (1)..(299): unsure at all n locations
tatggggataatagctaacatcgatttcttctgtccaatgaatacgaatttctatgtacctgcgaccgatttcggtattacaaagaggtggctctgagctnttgttagtgacatatcacttttactaagtgatgaagttcatttattgaatgatccacgtggagctggcttggaagccattgttagcagaatcaaaatcgtttctggcatacggaaaatgaaatcaaatcctctagctcaggcccgtttccttgctgtgtctgctcaatccaaatattgaggatctacgtacttttatg

SEQ ID NO: 247140 - DNA, 422 bp, Glycine max
  unsure (1)..(422): unsure at all n locations
tgcaagcttgaaactatcaagaaataaaccgttttttattatacctcctgntgatgagtctctatcaactccaattgcctctccaaatttgactgtgtctcaactactttcgccacttcaatctaaatttataacagtataaataagctatagagcaaggattgccaaaattttaagtcatttgcatgtggaaaataatttaaaatgtttatcagtagatgtagagaaacctcaagtctcaataaaacatcacgattgttcaaaatcctgcgatcccattcagctattgcatttgcttgttttctaaattttccagttcgctcttgcaactcagcattccactccttgataatctacagaagattatatgattaggaacaggatagagagaaatagaggaatgtccaattccaacacccaat

SEQ ID NO: 247141 - DNA, 434 bp, Glycine max
  unsure (1)..(434): unsure at all n locations
agctntatgaaccctatcactcaacaattttattaattacgagaagatgctcacaaacacgcaattaactaataattagagatcaattccaatataaaattaaaagcgatagaaatatacaattaacttaataagattgaaaaactttattaaaaagaggaacgagagtccatgggtaccactacatcacaatcctaattctaaggggtttaagcaaccatggttatagaataactaaacaacatacaatattgcaatagaaataaaagagatcgaaaacccttacagattcgaaccctaattattcccggtgcgattcttctttcaaaagattttgttgttcgtaaaatgtataatgaatttcgaatcccgagagtacaaactccaactatttatagacttctaaatggcattattntaattaggcacactat

SEQ ID NO: 247142 - DNA, 340 bp, Glycine max
agaaagtgtatttacacctcacatataatgcacattaaaattaaaacatacttattttctttcacctaccaacaaagtttcttagaatttaaattcacccacagtaaggtttcacgtaaatgcttataacttaaatcagacaatctcctaaagttaaactgccacacccttctttcttaccttagaaagaaaatcttcatttcaacaaattttcttttcattgccaacaatcgtacaagagggagtctaacttgttcccttgaagaatgccttggtagacactctacattctatttaaaatctgaatcaaaacacaatgtaaatttgaataagggtcata

SEQ ID NO: 247143 - DNA, 414 bp, Glycine max
  unsure (1)..(414): unsure at all n locations
aagcaccgcagcctcagcttgtatcgatacacacatacgtgcaatcgantattattttaagnnntncagaacatattctcgacagtcacatctttttacttgattcttgaatggctgtcaaaggcctatatatgtgtgacttgggacacaaatttgctaagagattttcagaacaaaaaggtcttatcctcttaaaaagcaaaatcgttttatcctcttacaaattccttggctaaaacacttgtgattcaataaggaattatttgagtgctcaaattgttcaatctatctctttcaagagagacttcttcttttcttcttcttcattctgaaaagggattaagagaccgagggtctcttgttgtgaaagaattctaaacacaaaggaagggttgtccttgtgtgtttagaact

SEQ ID NO: 247144 - DNA, 346 bp, Glycine max
ttccctacaaaagtggttttttaaaaaccaaagcctaggtcaattctcccattttccagacgcttttgaagaaagaggagaccatatttttcttctttttccaagttttaccaagagtttcttgagcccttcctccattgagcttaggtaagtgacctccatttcaactctaaacatgattttcacttcattttgttgctctattctcacttgcagtttcaaaaccttatttttcactcttgaaggttggaaacttgaatctaaactccttcattattccttctaaatattgtgcaactcttgaaccatgttcttgttgttgaacttccttgaacatgttgctttg

SEQ ID NO: 247145 - DNA, 457 bp, Glycine max
  unsure (1)..(457): unsure at all n locations
atctctaagtcacctgaggcatgcaagctngctaacatctacattaataatatgaagcttaatgtgaacctcccgaggttcaataggaagaacagacaagggccttcagatcaagaggaaggaaaatcccaagagagaggatgatgcaatcctaccccgcaagggcattgaatagaagactccaagtagattggaccaaagatgtaaaaaaaagccctaggattctcatgagccttagggtagattttgggcccatgggctaagtataagcccacttatctttgtacatattaaattaaggtttcattattttggaccttttatttagggttccataatgtaggtagagtaccctaaaaatgtaggatttttcagcccttgtattttacggtacctagactaattntngtattaggggtagtcttataatttcacatgcattaagcgaatatttgat

SEQ ID NO: 247146 - DNA, 393 bp, Glycine max
  unsure (1)..(393): unsure at all n locations
ctgggccgcgaaatgtttcatatccttttgcgccctgacaagcttacgctggagaattgcgtgggtttcttcgcgtgtacgcagcatggtattgactgggtcgttgcgggataacccttgaaaatacattggaggaaaaggaggaggtttgccataaacgacttcgtatggagtcagaccggtgctagtgtgatgcgaggtattattggaccattccatgagcgtgagaaagttgtaccacgtagctggttggtgatgtacaaaggagcacaagtattgttcgagcgtccggttcatcacctccgtctgaccatctcgttgtgggtggtaggcggngctcatgcgtaaggttgtacccntcatcttgaagagttcgcgccacaatgaactgat

SEQ ID NO: 247147 - DNA, 431 bp, Glycine max
  unsure (1)..(431): unsure at all n locations
gcttccctttctttggccaatgctggatttttttgtgagngatttccttggcaatttgatgctcagtaacagcaatatccaccactccttcagttggtctgcccaggtatttgttgattacagcaggggagaatctaacacattttcctctgacaaacactttctgataatcatcactctttctgtttgttatgttagagggaatgttgacaatgaattccctgactagactttcatagcaatctcccaacttggtgacagttttcagcagtccagcagccttgatgaggtccatgatctccttgcaatccaaggcatctcttcccagttctctttcaacagcaagtctgcgttgatatacaaatttccacctttcaacattgccaatggagtggaatgaaatgttgtccaatggagcatcagggacattt

SEQ ID NO: 247148 - DNA, 439 bp, Glycine max
acctgcggcatgcaagcttccttaagaagagtgcttaagaatctttagcttagctacacatacctctctaatagctaagctcacctccttgagatgagaagctaaagcttacctacacaccccctataatagccaagctcacccccatgacaaaaaacatgaaaatacaaaaaaaaaagtcattactacaaagactactcaaaatgccccgaaatacaaggctaaaaccctatactactagaatggccaaaatacaaggcccaaaacaaaggagaaacctattctaatatttacaaagataagcgggctcatacttagcccatgggctcgaaatctaccctaaggctcatgagaaccctagggccttcccttggatctctagcccaatctacttggagtcttttacccaatgcctttgccggaaggaatgatcaacatc

SEQ ID NO: 247149 - DNA, 420 bp, Glycine max
agcttattccatgtttgcccatatctaataagctttaggatatctacattatattttaggatacctaagctatgtggttgtttctccctattattgccttaataccatgcttctgcattatctcatattttttttttgttgcttcattctggatcagatatgacagtgactggaaaaagatcgaagcatttgttgtatcaaagacacgcattcaggtaatttcaaatgcaagttgtgactggatatttacattagctgctgtttctgggttgttatccataaatgttgtggattgaattaggcatgttatagttcttgaagtgtgttcgattatgttacattaagaaatttggcactttccaaaataaagaaatggttattggacatgaaatgccgaataaaagaagatctcacgacatg

SEQ ID NO: 247150 - DNA, 378 bp, Glycine max
agagtcttctatcattcaaacaatcaaaagcaaatcgcgtatagctttcatacacccatttcagtaaggcaaataaaagtccagccttttcttattgtgattctaaaaatgcaaactatagcaagaaccttactgaaaaactttcacaagaaaaacagcagcacgtgagaaggaacaaatcacgagaatgaaaatgaaagagtagaggagggttgaatggcatgaccatgatgatgatgggttgaaccaaaggctgaatctgaatcaaagagagtatctgtgaagtgaatggctggcttattgtgaatgtgaatattatgaatatctgctccacaaagctttattgagaatcttgaactgggacatgccttaactgga

SEQ ID NO: 247151 - DNA, 191 bp, Glycine max
caatggaaaataatgatattcattctttgccaaaaccagatgaattaccgtctctaaagaacaaaaatgccaatggcaccctttctactatggcttgtgttgactccatttctaatctaaatttctaatcttcacaatggcctttattgcccacaattggtattccatcagtaaattgacacatgacctaa

SEQ ID NO: 247152 - DNA, 440 bp, Glycine max
  unsure (1)..(440): unsure at all n locations
cccggaccttnagcaccgcggctgcagctcaaaaagttatgcttttccttaccccncaaaaacaanggctaatcagcaggcccatacccaataataaggaaaagttgcaactccgaatgaaacattaaaatctatgtgaatcacaatgcagaaagaaaataaagttgtctgattaccctcttgaaaagcctcgatggttgactgcaaatcatggcggtctttgtctaggctagacatcttttttctgcaatatttattatgaaaagttattttgatataccccacaataaaatatattaaaattcccgagaaccatcaaagaagggagatgaagagctgacagaagatcaaattccgtcagaattgaggcaaaattttatctaaattaaaaaaatgcagttgttttaacccgattgttagaatatcaatctcaaagtaat

SEQ ID NO: 247153 - DNA, 455 bp, Glycine max
  unsure (1)..(455): unsure at all n locations
cccggatccttnagtcacctgcggcatcaagcttgaaaatacaaacggatccatgcatgaccaaatgggtggcgagctgaagtatgaggcaaaggtggatgatatgaagcgtctaagtaaagctatggtcggcgttgtgatacatccgggccaatcttatcttatacaagaacattttgctatgcaaggggtgtctacaattttagttactcccttaggagctaacatggttctcttagaaggtagtgtagatgacgaggacttccaaggctacatagaggaagcgaaagggtggctacaacaatggttcaaagaaatcaagccgtggaatgcgtcgatcgtagacgaggagagattggtttgggtgagatgttacggggttccaagccacgtatgggactccgatttcttctcttttttaacgaaggatattggcgttcttgtacattctgatg

SEQ ID NO: 247154 - DNA, 443 bp, Glycine max
  unsure (1)..(443): unsure at all n locations
ctgcagcttagggggagtgctcgtctcgaaaattggattttattctgtacatgcttncagataattgtcatcatcaaaagagggagaatgtgaatgaatatgtatgaagattttgatgatgcccaagacagaagcaatacaagtttacttcaagtcccaatcaagatcattgtaacaaaatatcaagagaaaaaacccgccttagtctatttttgttaaaagaatctcttaatgattgaaaaggtttggcctcaaaacataatttttaaattaattataaaaagttttaaaatattttaacatttctgaaaaaaggaatttttcctctggtaatcgattactagaagttgtaatcgattaccagaagcaaaatagtgttaaaagctcttcacgaagttgagatatgaatttcgaaacctgtagtcgaatatcattcgtatgta

SEQ ID NO: 247155 - DNA, 435 bp, Glycine max
  unsure (1)..(435): unsure at all n locations
gcttctcgggtataactacatgatccaatatanagctatgtctcaacaatgtggtggctgacatgttttcacgcctgactgagacggaatagccggcagcaantttttcgatcctttctatgcctcatcctaagttcttggagggcctgaaaagggagttcgttgagtcagatgaattcaagtcccttattgcttgcgctcgtgacgacccctgacaatgctctgagttcaccctccaggataacctcctattatataagggacgcatatggatcaatcgcgacaatacatttattcctcttctcttggaggaatttcataaatcaccattagaaggccacatggggttggctaaaactctcagtcgcctgaaacagagcttctattgtgagggaatgtgctgcgacacgcaacaattcattcgtcaatgcattg

SEQ ID NO: 247156 - DNA, 440 bp, Glycine max
  unsure (1)..(440): unsure at all n locations
agcttcctcggggccattcctgtgaaggcaaacatttggaaagttagttnttaccaagaaatgccacccttaaaacaaaaatggcatacaaccccctccaataaatacagacatcaatgtaaatttagagcaagcttatgcgcatacttcttcacgaacgttcacttgcacaagacattcttataactaagaaaaatgcacccatatacaatcaaggcaccttcgttacctagattatttacatgtacttccaaggtgtatttgttacctacatcacacacatttcctttgctaaattcacatacatgcatactctaagcactttggctatcaaaaattgcatacgtgcacatcttggtatttctaatacctatacatacacaaacttcatgatgaatcttgactatctacacaataaggtgctacatttcatgcttttt

SEQ ID NO: 247157 - DNA, 439 bp, Glycine max
agcttcaacatcagaccacttccagggtgctggaacttcttcacatggacttgatggggcctatgcaagttgaaagccttggaggaaagaggtatgcctatgttgttgtggatgatttctccagatttacctgggtcaactttatcagagagaaatcacacacctttgaagtattcaaagagttgagtctaagacttcaaagagaaaaagactgtgttatcaagagaattaggagtgaccatggaagagagtttgaaaacagcaagtttactgaattctgcacatctgaaggcatcactcatgagttctctgcagccattacaccacaacaaaatggcatatttgaaaggaaaaacaggactttgcaagaaactgctagggtcatgcttcatgccaaagagctctcctataatctctgggctgaagccatgaacacagc

SEQ ID NO: 247158 - DNA, 415 bp, Glycine max
  unsure (1)..(415): unsure at all n locations
gtggtatcatagcacattatcttcaagtaggtgctccttaaacctccgttaattttttttctttaccttctctttcattgntgtttcttcatttttctccatgtatctcctcacatgtcttgttctaaatgttgttaacatgattctttagaagtttccaccgattaaacttgctatagaaactagatttgattttctatggttcaaatttcttgttcttgttcttgaaccatgaattgtgttgagtttaggttcctttgagttttgtcttgttattttttgtggctgaaacctaaaccataaaattcttacaaaaatattaaagtagaagaaaacctcaaaaatctagagtgacttgttcacctattgtagttntgtcatagaagccatgtctagtcatgaaacttgtcacata

SEQ ID NO: 247159 - DNA, 428 bp, Glycine max
ggatcttgagcaccgcggctcagctgatagtctcattatggtattttggataatcgcgaaataaatcttgttttatggctaatgctatctctagaacatttccattagatttaatgatgaaatctttgcattttcaggtggaaaaaaaggctatgttttgaattacaaaaagtagcagttgggctaagctcaatagttgggctaagcacatatccatcgctaagcacagcttcagtgcgcttagcacaaaggagaatctagtatagcatcagcatgaaagtcgtgcgctaagcgcagtaggtaccttcagtcaggctaagctcgagactggcgctaagcccgaatccacttactcgcgctaagcgcaacgtcacgaattcagagcctatttaaagcttggtttgtgcataattagggtaagcagatga

SEQ ID NO: 247160 - DNA, 405 bp, Glycine max
ctggatctttgagcttcaactaagtcctttaattgtgattttcagccatggagttgcaccggacgataaaggagaaatggtgagaggaggttccatctattatggaataagccatggaaggaggagcttcaccaccaagagagtgtcttggataagaagcttacagaggaagcttcaatggaggaagagaatgacagagagaaagtggcatggaaaattaaaggaagaaaatgagagaagttgaactttgaagtgtgtctcacaagactctcattcatcaaagttatgacaagtgttacacatgtgtctattcactctttgaatttcatcttcatttcatgtgaatctaagaagaatattcaagaatatgccacaggcatcttaacatattccctttagatgcca

SEQ ID NO: 247161 - DNA, 441 bp, Glycine max
  unsure (1)..(441): unsure at all n locations
cgaccgcggctgcagcttaaggcagaatagcttttcttgtattttcttcacgctgngcttagtatcataagttccatcttttgtttctgaagcttcccaaaaagagtcgcaagagacatgttggggagatctcttaattctgtaattgcagttacttttggttgtcattgcttgcttaaacatttccacactttgttaatgagatcttcattaggaaatattcctcctaatgatgcaagatgattaactatatgtgtaaatcctcttttgtatatcttgtatgggctcatattgattcattataaacagctcatattcatgtgtgagagtgtttattctagatctcttaacatcagttgtaccttcatgtgtaactagtaatgtatcccacattcctattgcattcttacaatttgaaactctgaaatactcatccatgtc

SEQ ID NO: 247162 - DNA, 449 bp, Glycine max
  unsure (1)..(449): unsure at all n locations
ctcgacccgcgaccttaagtcacctgcggcatgcaagcttcttaaggaagtttctattgaagcttctcaaggaagtttctcaaggaagctacctaggctacaaatagaaacatgtgtaacacttgttgtaactttgatgaatgagaaacttgtgagaaacacttcaaagttcaacttctctccctctttttctccttcaatttcatgctccccccttctctctctctctcattcttttccttcgttgaagcttcctctctaagcttcttatccaaggcactctcttggtggtgaagcttctccttccatggcttattccctaatggatggcacctcctctaacctcttctcctttatcgtctgctacatctccatagtggaaaatcaccattgaaggacatcattgaagctcaaagatccagccttcatagaagctnttcaagcaagct

SEQ ID NO: 247163 - DNA, 66 bp, Glycine max
  unsure (1)..(66): unsure at all n locations
agctngcggntggtacccttccttangctagttcaatccttgcattcaaataagggaatggtctca

SEQ ID NO: 247164 - DNA, 359 bp, Glycine max
ctactttccatggtgcttgtggagggaaccaaaacattttattactatgatgatgattattttgtgacatggtagaagagtggtggtggtggacactttgatgaaatgagaaatttggtggctctggctctaggacaatcccagtgaggagcttatcctgatcaagtgagttaatgtgagattgaccattggaattgtcgtcacccatttcctataacaacacaacgggaaaacaccaaatagaagggttaaagaaaaaaaaaagattatctatgtattgtagagaaatcaatgatcatcacattcatacaataaaatataaaatagaaattattatttttaattagtgtctcattacc

SEQ ID NO: 247165 - DNA, 420 bp, Glycine max
agctttgtaatcctaatatgaggaagacaatcataagtagagatgtcattttcaacagagaatgagaatgggattgtggaccacacgatggaaactaaaccttctttgcgtgttccaaagaagatggcatagagcaatcaaggataaaccaagcaagataggagcctactaccctaccaatctcaccaatttcaaattctcaagaagaaaaaagctcaagtgaaagagttccacacttcaagagcttacaagaaatttataaggtaactgaaaatcaaaataatcttattttcttttgtctatttggtgattgagagcctatgagcttccatcaagccattgagaacaagaaatgaaaaaatgctaaggatgaagaaattaagtcaatcaagaagaatgacacgttggagctagattcac

SEQ ID NO: 247166 - DNA, 453 bp, Glycine max
cagcttactgaagctaataagctgccatccttattattgaataacctctcatccaattcactctgatttcgaatcatgtaaccatagtccttttctagcatatttaaactacaaggctaagaagattcttccatccagtctttaaaataaggcaaccatctaaaacaacgggataataaacatcagctacagagatcaagtattgctgatgcgtaaataaaaataacagaaggaaaatgaacccttatcgatattctctaagttttcggtttcgcattcagatgccaagcaaggctggtgcttcaatatatctgctattacactataggctttctccatggctttcctcaactcatcttcagaattgtcgtatatgtcgcaaaatgacgcaaggaagtccacacctttcgttcttttcttacctgaagaaaatttgaaatattagtgctacgt

SEQ ID NO: 247167 - DNA, 337 bp, Glycine max
  unsure (1)..(337): unsure at all n locations
accanatgactatgatgatggatggctcaaactctcacaaaggtaaacttatcacttccaaattgagctgtcaaaactatcttgacatgtagaggaaaaacaaggacttcaaatcacaaaatgtcaagagacttttattttcaaaacaattacccatttcttgaacatatcctataattcaaagaacaacatgcaaagttgtacatgcaaacaaaattgacctaaaatattaaactaggaacccaacaaaactaacaaaattaacaaatccaacaaaacttgcgaaacgaaaaccaaagaacactctcgcccatactaacacaacacattgtactca

SEQ ID NO: 247168 - DNA, 457 bp, Glycine max
  unsure (1)..(457): unsure at all n locations
tcaagctccacatcaagcaagtgcatctcatttctcttatgcaaacaatagaatgcaaaagttggagaatttgcttggaaaccttgtagttgtgcttaaagtacgatttgcagaaagtccacaaattaatcaagtcttagaagctatagatcaagaggtatgaatntataattctacttattcaacgatttaactatgatatgatactttacatagaaaaaacattcttttaagttaggtacctacaaatggttctaccagtaaagatcatcaaactacaaacaatcttaactagaggtgagttgaaatttacatggttatgaagatgtgagccggtgaaaaaatgttatttcacgaacatgatttagatggttatgaagatgtgagccagcgaccatatgttcaacacgttggtttttactttagctatttggtcagaaactcgaataactctttt

SEQ ID NO: 247169 - DNA, 472 bp, Glycine max
  unsure (1)..(472): unsure at all n locations
agctntatctatgaatttaacaatttgagggggggaaactgcttattacaagattcaagaatgatgtttcttcaccagctcaaaaaaaacaagaataaaaaagaatggtgtttctttcctaaaaaaagaacaaaaattaaatagaataatgtttattagtctttaaaaaaaaactatggttcttgtatatgatcgagtgagatatcattttgtggagtctttactgaggacacgcgtttcaaaataattttgttagccaagtttttttatattcccctaactgaaaatttggtgataaacaaacataataaacggaaaaaatagcaaaatgataaaaattctatttatttattagtaaagtaaagtactaaggtgcataaataatgtagctaacttttattccatttaagaatcttcatatcaagttgtctttggagaggaaaaaatcaccataaacctatcattattatat

SEQ ID NO: 247170 - DNA, 405 bp, Glycine max
agcttgcaagaaccccgaccatgacgtgattaaaccattacgaaacatccactgataccagctcaaggcggcgccgtcgaggtataaggaggcgacggttatacgctcttcttccggtgtgttttgatactcgaacagctgagatatcttgaatatccagcctagcaggtcacggccgtcaaatcttgggatatcgagcttgacggggttgcgctgggtgaactgcgagttggacgacggtgggttttgagtggtctccttcagacgaaggtggtcaagaattgaatccactttatcggaaagctctgcgtatttgtccgtgagcgtggattggcaagtggataagcgtgtgatagcttcttctaatctgtcggtagtggttctgcgggtggtatgatccgccat

SEQ ID NO: 247171 - DNA, 458 bp, Glycine max
  unsure (1)..(458): unsure at all n locations
aagcttcaatatataaaccttatctcttgtatttgttctctcataatggttggattctccactctgatcttcttctaaaatcttgagttcgttggagcgtttattgttgcacacctcttcttcatacaaagatcatgctgatggattagtatgtcttgtactttagtatggaagtcactcatttatatttatttgcattcaatcaaaataatctagagtcttgattcatttttaagaaataaacatcttatgacttaacaatatttaatggaattttttttgttatgtttaaaaacaccaaagttacatgacatgtattacacataatttagtttaatataatccaataaatttctggaaaattntatggataaaattaaagtaattaatctcattattattattattatcattattattattactattattattattattattattattattggtgg

SEQ ID NO: 247172 - DNA, 313 bp, Glycine max
  unsure (1)..(313): unsure at all n locations
agctagnacacatgctaaggtttctccttatcttcaaatccaagaggctacttcacataaacctcttcatttatgaatccattcagaaatgcactcttgacatccatctgatacaatttgatgtctttgtgtgctccataggctatgagtattctaatagcttcaagtcttgctactggtgccacgatttcctcatagtcaatctcttccctttgattgtaccctagagagaccattatagccttggttctgaccacttctgcttcttcattgatcttgtttttgaacatccacttggttccaatcactgact

SEQ ID NO: 247173 - DNA, 464 bp, Glycine max
  unsure (1)..(464): unsure at all n locations
agcttctcaggaggtgagcttatttatgataggggtgtgtgtagctaagctctatcttctcaaggaagttttctcacagaagcttctcaaggaagttttctcaagaaagcttctcaaggaagctacctagtctataaatagaagcatgtgtaacacttgttgtaactttgatgaatgagagtcttgtgagacattcttcanagttccacttctctccctcttttattccttcaatttcgagctcccccctctctctttctctccctctttcttttcctccattgaagcatccttccaagcttcttatccaaggctcatcttggaggcgaagctccttcttccatggcttattccctagtggatggcgcctcctctcacctcttctcctttgtcttccgctgcatctccatggtggaaaatcaccattaaaggacctcattgaagctcaaagatccatcctccat

SEQ ID NO: 247174 - DNA, 434 bp, Glycine max
  unsure (1)..(434): unsure at all n locations
agcgacctgaggcatggcaagcttactatgcagagaagatccaagatatataccttcattttacttagcatcaagagttcctaagttatcttttccattattcaatacaaaacatttacaaccaaagatatgaagatgtgagatgtttggtgttctgccattgaacaattcatatggagttttctttaaaatgggtcttagtaaagccctatttaaaatgtagcatgcagtgttaacggcttcagccgaaaagtattatggaagaggagtatcatttaataaagtgctagcaatctcttccaaagatctatgtgtcctttcaacaacaccattttgtcgagggggtcttagggtcgaaaagatatgctcaattccatgcttatcacanaagacatacagattctttattttgaaactcacccccatgatcactc

SEQ ID NO: 247175 - DNA, 486 bp, Glycine max
acctgcaagcatgcaagcttgctcgcgctaatcacaaagacccttgattggtttgttgaatagttcagctaggcgcacatgactacgctaagtcccacatcttcatggtaatggaactttaaccagcgggcttagcatggatgatgcgctaagcaccacttcttctctggaaaatttttactgtagcagcgctaagtgcgctatcctgtgctaagccccagatcctttctataactttagtttttaagctgggcttagcggggcaagaagcgctaagcgccgatctcttacaggttttgaattcttggaagtgcgcttaacacgcctgttgcgctaagcctgaactactctctgtaagatgaaacttgatggtacgctaaacctcacatctcatgctaagcgcatattatataaaattttcgtgttgcaaaagcaactaatgcatgctgctgcgctaacgcccacatgctcacaggactttataac

SEQ ID NO: 247176 - DNA, 399 bp, Glycine max
  unsure (1)..(399): unsure at all n locations
tcctatcaagaatgctatagtaaatgtgcttatatcatgattttggctgctacatcaaggtgtttagaccgattgcgaccacaatcggtagcagttgtcagtgatttaccgcaatgtcaagaatcatgacgaaaccgtgtgagtgagaccactagtaaaaaccttggactatatatataacactagaaatatcaagttcaccacagatatttcttaacaatgagaatttgatccataaacacagaatagaaaaagaaagggaaactataaataaatgaataaatgagggtcactaatcacttataggtgtcacaaaccgcgtccacaagctngtgtgatcaattgaatgttcacacatggtcatatcatgaatgcgttcataaatgttcttacaccctg

SEQ ID NO: 247177 - DNA, 252 bp, Glycine max
tcttaacaaagctctctaaaggatactacctagtatataatataagcatgtgtaacactagttgtaactttgaagaaagagagtcttgcgatacacgactcaaagcggaacatcccgtccctattttaatacttaaaaacagcgcgtccccctctctctctctctctccctttctatgcctacatagagacatactctcaagcttcttatccacggctaatccttggcggaggaagctcttctctcatggcc

SEQ ID NO: 247178 - DNA, 425 bp, Glycine max
  unsure (1)..(425): unsure at all n locations
cctgcagcatgcaacnangctccaaccaggctaggcattagaatatgctctatctcaataagaccaccgaaagcactcgtcagtatttcaaactagccactctaatgtcgcttcatagggataggacttcattgaaacattcaatccctaaagggaccttggctaaacacatacatgcatatccattttgttggacaacaaatgctctagagtacgtaatatataagagcgtctatgcttttaacctatgtggacgttaaaagatccagcaaactaagtttttatgaaactctggaacacaattccattaaaagagcattggaagctaagttaaggtaaagaaacctgtggactaacgtcaaagttaaccaatgggacacgcgtgcaatccaattgcgtttgcgtcataggtataaatataatac

SEQ ID NO: 247179 - DNA, 340 bp, Glycine max
  unsure (1)..(340): unsure at all n locations
accttctgattgtaatagcaccatgtcttcttattattccacggtgccactcttgtngagtggttttattacaattctctcactcgaaataaaagtccatacttgtgttatagtgactctcaattctctttggatatgcaccacctatgggcttgttctaatatacagaaattaaagtttaatgaagtcaaatctctacgattgtggctgcttcttggctgaccaacaagtngcccaactttccatatgtctccgtgtcttaattctagctctaattaggtataatgacaccattcatctgtatgattaatcccgagtccaattaagtctaatgacacca

SEQ ID NO: 247180 - DNA, 383 bp, Glycine max
  unsure (1)..(383): unsure at all n locations
gcnagcttnaaccaaggggagatggtccatttttagtgcctgaaagaatcaatgacaatgctggcgaatttgagctgcccggtgagtctaatgttaattccaccttcaatgtctctgatttatctcatttggatgcacatggagaatcccatttgaggacaaattcttctcaagagggagagaatgatgaggacatgaccaagagcaagggcaatgatccacttgaatgacttggaggacctattgatgatgacatgccaagagcaagggctatgatccacttgaaggacttggaggacctattacaatggctatagcaaggaaagccaaggactcctcttaacaagtgctgtccatactattaaattcaagcccagtttcaa

SEQ ID NO: 247181 - DNA, 445 bp, Glycine max
  unsure (1)..(445): unsure at all n locations
agctttaatacaatgttttatagttattctcttaaaagttcaaactgtaaagagatgtgcccaaccatgtatgttaatattggcagtagatgaaaatacggaaaaagggctcatctgacccatctgtggtcctatttcgtatgcatttatattcgctctatgaatgtagcgaagatactgaagtttgaataaaacaatatggagctttttcttgtcttgggttntacgctgatatttgagatagaaaggtaggtaggaatctttatagaatgaagaacaaaatctcagttcttgtatcaaagtaagtgcagactaagggttacaagaaagtcaatctcagagaaattagagagactctggactctcctaactgtctaacaattctcagcctccaaagacccttaattcttccaccctccctgtacatatagtagaccctttaact

SEQ ID NO: 247182 - DNA, 486 bp, Glycine max
  unsure (1)..(486): unsure at all n locations
ggaccttaagtcacctgaggcttgcaagcttgcttttataagttttattttgcctattccaagnnaaaggctntcccatgcaaggtatatcatcaacctccaactcagcaatccaatcattaaattcagctatagtgctggtattagaactgctgtgattactccccattctttctaaagggtgcctaatacaattgaaatcccctacaagacaccaacatgtgtcttgcgattggatctttttactccttagattctgccagaactgtctctttcccagaaggccacaaggtgcataaatattaaccacaaccaccctttgcattttaggcagccagactccacctagcataatgaaatccttgtcagaaaaacgaaagtcaacctgaaaggtattattattccaagcaaaaagaaagcccccagcagcattcacagcaagctgtcattcccaagccacatcaagttgaccccacagagattggc

SEQ ID NO: 247183 - DNA, 462 bp, Glycine max
  unsure (1)..(462): unsure at all n locations
taagctgactaggcgagttgattntatccttagtttcactttagttattagtcaattcgattaagaatgagaaatcccaaagagaaaacgtccgattgattttccgctttattttactaaaaaaagatgttttttgattattatattattttttatctctttttgttttccaacgtggttacggcacgactgaacggtcggaattcattttaaccgaagttaacggataatacaattcaaacgatcggtggaaatttattttatttttaagttaagcgagaaatgacttaagtaaaatggcttaagcacgtcaaaagggggtataaaaagtaaatggaatgagaataaaaatacacaaaacacaatgtggaccaccatgggtacatagaatgaatcgaanagggtggttcgaggtacatacccgttgaagattgaagaacgatgaagaacgaatgaagaacg

SEQ ID NO: 247184 - DNA, 447 bp, Glycine max
  unsure (1)..(447): unsure at all n locations
atccttaagcaccgcggctgcagctttaccattacccgacaaaactttntactcggatgtctgattgagtcccgtaatataacgagacgctcgaaattgaatgttgaagctctgaacttgttcaaacgacaataactttttactcggatgtctgattgagtcccgtaatatatcgatacgctcgaaattgaatgttgaatctcagagccaattcaaacgacaataactttttactcggatatctgattgagtcccgtaaaataacgagacgctcgaaattgaatgttgaagctctgagccaattcacacaacaataactttttactcggatgtctgattgagtcccgtaatatatcgagacgctcgaaattgaatgttgaacctctgagccaattcaaacgacaataactttttactcggatgtcttatngagtcccgtaatatatc

SEQ ID NO: 247185 - DNA, 404 bp, Glycine max
gagtacaatactcaaataccacgccgctgccccccacacacacacacaaacttaagatgggtgagcttgaacaccttcagtttgcccctaatgaactgaaatcttgcggatgagaggggctttgtgagaagatccacccactgatcctgagctggaatgtgaattataaagcttgttgctgagaacctgttctctgacaaaaaaagagatcaatctccatatgcttggtccaggcatgaagaataggattatgtgctagtgcaacagcactttgacttttattgtcacagagaatgagaggtttggaagagggcacgccaagttcttgaagtaggtttgaagccacagaaatcagccaaagccgaccaatcttctgactctgcctcaagctagacgaacaccac

SEQ ID NO: 247186 - DNA, 456 bp, Glycine max
  unsure (1)..(456): unsure at all n locations
agctagaactctntgaatgcactatggtttccataaagaatccaacacacagcatcggacgtcaatctacccaaacgcttacgatacatgacactggtaatgctttcccagatttccaacaacaggtacgtggttntctctcatcataatcttcagtagcaatacacaaagcaatagaaggaaaatgctcgtagatccaacactacacatattttgaaaacaaaaaaaaaattcaaaacaatagtcaacataaaatacataacagaaataaaaaattcaattcaatttctaatcacatgtaaaagtgtgatatatcctgcaagtntcctgacactactcttagacgcatcattcgaattgtcatacatatggactanggcggaagctccccatgcgtagcttccactctgggtgaagtcacgaaaggcgtccaagaataccacatgcaagtgtgtg

SEQ ID NO: 247187 - DNA, 443 bp, Glycine max
  unsure (1)..(443): unsure at all n locations
ccctaatcgactgcagcatgcaacttaatactccagtcgtatttctctttaatttcaagccgttaaggaaattcttcaaatcaacaaccaaaaaagtctcaacttttgcaattcatcttatgtcaacaatcacaaacacacaaattgaatctgaaaaactttcttggcttgtaatgaggctgatgcaatcctaccccccaagggcattggacagaagactccaagaagatttgggacaaatatgcaagagaaggccctagggttctcatgagccttaaggtagatttcgggcctatgggctaagtatgagcccacttatctttgtacatattagattaaggtttaactaattctgttccttgtatttagggctccataatgtangtagggtacactacaaatataagatatttcatcccttgtattgttaggccacctacact

SEQ ID NO: 247188 - DNA, 461 bp, Glycine max
  unsure (1)..(461): unsure at all n locations
agcttctaggttgggaagcaaaaccttcttattttcatcttgcaatatgcagatgacacagtttttgttggtgaagctttgtgggagaatgttgtattcttgaaatccttgttgagagggtttgaaatggcctcgggtctgaagattaattttgccaaaagccaatttggggtggtgggggttcagcctaattggattcacgaagcagcccaatttctaaattgtagacagatggaaatgccttttaattatttgggcatgcctattggaattaaatcttccagtaaggttgtttgggagcctttgatttctagatttgaagctaaactctccaagtggaaccagaagaatctatctatgggtgctaaggtcacactcataaagtctgttctcaatgctctgcccatttatcttctatccttcntcaagatccctcacaggatagttgataggttggtgtc

SEQ ID NO: 247189 - DNA, 387 bp, Glycine max
  unsure (1)..(387): unsure at all n locations
agcttgctaatccaatctgtatgctttgattcattccnanccccatcttgccaaagagttaagtactggattttgtagagtgttccattcctatgagggaagggaatatcagaatctgaaaacttgctcatcattccaccataagggttccaaatcatcaagggactatcttcttccagcaatctttgccacaatccctcaagtccagtttctggtattggatctctcacaaaatctgatttggctttgaagtagttcttgaaagttgactttccttgaagcagaacttcagggggggtgtcatttggatagccagcaatatagagcacagacttgatccaactagtttcaaggcaatcttttttagtccaacccaattcaagaaag

SEQ ID NO: 247190 - DNA, 322 bp, Glycine max
agtgggacattactctttaaagcaaaaatggcatataacctcctcccataaatacaaacatcaatgttaatttagagccagcttatgcgcctatttccttacaaacgttctcttgcaccagacatttaaccgaaaaaatgcacccatatacaatcaaggcagcttcgttacctagattatttacacgtacctccaaggtgtatttgttacttacatcacacacatctccttggctaaattcacatacatgcatactcaaagcattttggggcaccaaaaattgcacatgtgcacatcttggcatttctaatacctatacata

SEQ ID NO: 247191 - DNA, 385 bp, Glycine max
tttaacatatctaatcactctatttgcaaccttgagatgcatttcacttgcacaatgcataaatcgaaacaaaatgcttacaccatttaagatgtcaagctgagttgctgaaaggtacaacaaacatccaatcatgcttttgaagggtgcttgatctatcttctcgggtccatctgtcttagaaagcctttccttatgattcatcggagtgttcatttctttgcattcatcaaggttaaacttctttaaaatctccttggatacctttttggcagaaaagacttcatgtctccttgttaattccattccaaaaaaacgtattaaccagatctgtattgaaacccacatatctatattttttctgaactctcacaagaatgaatgc

SEQ ID NO: 247192 - DNA, 73 bp, Glycine max
agaccggcgccggcactgccaccccccccggggttgaacgagctcagcccacacgcgcgcaccgaggcaaaaa

SEQ ID NO: 247193 - DNA, 451 bp, Glycine max
agcttattctgaatttgaagctttttcttattagataaaggagaattcgggtctgatcttggttgtggttcgaaatttacggctatcatttagtagtaattgtgtcattattgaaaagagaaattgtatccaaacatagaattttaaaaataaataatttaaattaaaacatttgaaattctcataactcatcccaacatactctaataattacttttatattattttttaattaacactagagttttatgtcgataattagtctagaataagagtttgcattaaaacataatataaattatgataatgaaactttatatagttctgattaaataacaagctacaatacctaaacatctttgtttcatatagactaacattacataaatatccgtattcaatttattcttcattttgttggggggccgctctcctcccccgactccccgtt

SEQ ID NO: 247194 - DNA, 442 bp, Glycine max
  unsure (1)..(442): unsure at all n locations
agctctataccctgaaactcagtattattttgtcttgatctgagaacctgagacttcatctttaaagaagagaactttcccacgccataaccgnntctacaagtgttggaaaccgttgaaacccttcgatgatgccgttgaccaaccccatgctcatgaggaagaagaagaggaaaccaaactcgccttggtcaaaacctcagccatttaatcttacagaaaaccacatcaaaatgaaacacaaaccaaagaaagttctctccttttgggttcactaaattgtctcgacagaaagagaatgagagagaaacgctcttttttctagagtgcagaacaaaaagagctttatccacaagaagtgtcaaggtgatgccagatcgacgtgtaaagcttgctggttgaagtggaaactgacaaatatatagaaatttaataaggttga

SEQ ID NO: 247195 - DNA, 408 bp, Glycine max
  unsure (1)..(408): unsure at all n locations
agctcctaatccaagacacacacttggtgtttattctcnnccccccatggcacatgccctagaggatgagacctcctttcacctcttcacctcgatctaccgcggcatctccatggaggaaaatccccatcgaaggacctcactgaagctcaaagacccaacctgcatagaagcttcacaagcgagcatccgtcataaacactgctttgcacttgctgtataaaaccatcagcgcaactccaatcatgattcgagcgactgataaagcagattatataaaaatatattcctataagacaaaaaaggagaacaatggttatgccgctacagtggcagatccaggaccctagggtagcaaggatattctgtattaaaacaaagatataaagtgttagactaattactcat

SEQ ID NO: 247196 - DNA, 413 bp, Glycine max
tgcagcatgcaagcttggacaatctaatataagaagtgattttctattagtcacagctgacagccactccagaagcatttcaagattgccgcaatatttaataatcaaggccctgaaggagttggcagttacttgaagccattgaggtaaggcccccagctgtgtgaaagcccataatccaacacattttaacttcaacttgaggtctggttcttcatgagggtccttccacagctccaagtcaaggttaacacagtcttcaacaaacagaggttctaattcaggaaaatttgtaacatccagtggcaaagacgtcaaactatgacagctagcaacatacaatggtttaagagcagggaacttcacgcctccaaagatagactccatatataggcttgattcaatacacagac

SEQ ID NO: 247197 - DNA, 190 bp, Glycine max
tatttactgacactcattttaatccttactctggctaatattcgctaatgaaagtttgctattgctactaattgtctaattcgccaattttgtagtagttttctgatggaacaacgtctgatgtctaggccctcacaccactttgcatgaaatgggaaccattttacatgatatacgacaaaatcgtttc

SEQ ID NO: 247198 - DNA, 443 bp, Glycine max
  unsure (1)..(443): unsure at all n locations
agcttctaaaacctccaaatatttattntttagtgctcttctaatcatacctgaggtgtataagtactcatcatatcgaaggtctccccttccactacaagctntaaaacttgatccaatctcctaacctttttacatccacaacatcactccttcaacacttttctacaacatgatagctgaattgggatacaaagtgtgaatcacaaagtgacatgttagtctcaataattttaattttagtttcaaagtatctttattagaaaatatcattatttaaatttaataagaanataaaacttgattataataaatctagatttactttcgattttttatattttgataacagagatagaaaagtcttatgataaaagtgccaatatactgacggccanagtacctaacggccaagtatggtcttgcttgacacacaaagtcct

SEQ ID NO: 247199 - DNA, 463 bp, Glycine max
  unsure (1)..(463): unsure at all n locations
agctntntggagtanaaacatgggaccactctcattntattttaaaaaggaagncgtatttagtcaaggtcttagagaccatacaagtttcctaacgatttctaattatgtgggccattaagtctatcatatgctgacaatagccgagaagcccatgaatctctttgggggcggagtaggtgtttgccatcgccttggccttggctaacaatcggggaagttcttgactcgcgttcaaggtaagagcaaaccgatccatccacatggttgcctcttggtgtaaaaagtcgatcacccctcctctagcctctttttctgtgtatacttgggcatattcgtccgcaatcctatgctcgagagccgcggttagacctaactcttcttggtacttgacgatgatagctagcatgtaggtctctcgttcgcattaacactgagacaagctttttttggaccttgaaca

SEQ ID NO: 247200 - DNA, 347 bp, Glycine max
cccagccacagcggaaagacaagaaagatcaagagtaaccaacctcgccacctgagaaatctctattggaagctgccccacaaagcccgcataagacaaattcagaaaagacaaccgggccaaccggttaaacccagacgggatgacagaactgaaattaataaaagccaaattcaactcctggagaagggaagaccgaaaacaacacgtgcaacatcaaatccaccacggatgaattctccacccaaggcaaggccaaagacacgtccctcatcatcacagcttacaccgctccaatcacaggactcaacgctgagatgcccaacccgagggcggggaaacacaag

SEQ ID NO: 247201 - DNA, 409 bp, Glycine max
  unsure (1)..(409): unsure at all n locations
agctntgaggtcatacacacatagaggcttatgatttgtntttccctattcaaaacaacccactgtgcgaaataaagttcttttatcaaattacacacacatccgagtccattcagggcttcgggaaaaatcttcagtgcattcacccttcaagtgcacacatttttttacttccaaaattcttattatgtgatgacccatgaattttccaaagaacactggcggtcattttctttcaaaagcgcgtcggcttttagatttttcgtttaccttttctctttcaatcaattgtttttttcaagcaaactttgttggaaaagggatgtgacctgagctaagtgggtgatcgagattacacttgatcaaaaagaaatagaggggtacgaaagcgaatacacaagactcccta

SEQ ID NO: 247202 - DNA, 398 bp, Glycine max
  unsure (1)..(398): unsure at all n locations
aaaaagacaatggggtaaatatagaacaaactctcacctcacacaagactataacagtaatctaaactagctcaaactgggtttacacctaaaattccaccgaatcaaaattagactcctcaacacccaattctaccctaaaaatgaccctaggtttcactgtggtcacacacactcctcatttgcacaggctaagctttctcttaagtcctaaatgacattccaaactaagattaactcactgtaacccccaataaccactgaatccagatttagccttccaactctcagagcctcactctntgtccactcataacaccacattctcactctctaaccctaggttaactctaccctgcatctctagcagttctccataatcaatctcagcacacaaa

SEQ ID NO: 247203 - DNA, 496 bp, Glycine max
  unsure (1)..(496): unsure at all n locations
ccggatccttaagtcacctgaggcatgaagcttgtaaggatctagcagatattcattctaacttccacctataatctaatcagaatgttcccctggaggcgccatcgtgtgccacattgcaaaataaaaacaactcctagtatcagcaaacagccccaatcttcatacaacaatcacagtatcacaccatatgttagcaacccatgtattagctaacacctttatcatacacaccctctactatacattctgaaaaagtgtgaatgtcacaagctntgtgaatatcaaatttgaaagataggggatatatttttcgtatagtaccctntgaaaactaaggatcacattataaataaaggatctacatttgataaagtcactgtatacaagactaatcaaatcagaagagcctctcatagtatagtagaaaggattctagtgatgaatttgtaaatacaagctattggtctgcggtatgagaatttagtaggatgaa

SEQ ID NO: 247204 - DNA, 466 bp, Glycine max
  unsure (1)..(466): unsure at all n locations
agcttatgaggccaaaatatgatttatattgtcgccaataatctaattctcaccctaatctagtaaattctgtccaaaatacaaatgaattatacataaatacttatgacaacatggagagtactaaaatcccttaaacaatgtcacatgatcatgatcaaaacaaaggaatcaaaatcataggttcagaaaatacgaaaacattaagagcactcaattttatcaagcaattcgcatcaggacatcaattggcccgtcaaacataacaatctcgtgattataatcataaaggtagaattacaatacaataaacatctcaaaataaattctaatttgatcatttaaggatccctacacatgtttattctaaccccaatngcgatacactcatctcttacctctaagtaagctcacgtgtgtagtctgacaatgataacggtgtctctagtggtccctaagatcctca

SEQ ID NO: 247205 - DNA, 411 bp, Glycine max
ctgcagcatgcaagcttagcttcattacattgtaatttagttaataattagtgtggggaggaacataagttgtatcaataaataactcatttatgctacccgcatatatggtgaagtctactagtaagaaagagataaaggaggagagggataagataaatttattgtgaaaatctgcacaagttatctataaaaaatgtacttttatgttttcagagtttccattttcattgcatttgtgggagcacatcagaatcaagtatataagctatctgtatactctataatctaatgatgtgcatccaattaactttataatactggttttcttgatgaagttgctaagctatcagtatacttgttgctttaattagagaatgatgcgtgcacaatatctaatacgaggaggaa

SEQ ID NO: 247206 - DNA, 309 bp, Glycine max
agcttatcaacatggagtagaagagtctttgttattttccttaaaacattcagcaaccacagatggcaacattttctgcccttgcgtcaaatgtgacaatgggaggcgctcattgttggacgacattacaacgcatccgatacgtgatggctttagccaaacccacacaaagtggatatggcatggcgagttggctggtcatacaccaacatgtccagctcatccggttgagctacaaacccgagatccatggaagacatgacacgtgaacttgggcaagaaggctctcatgaatgtcaagcaaatatt

SEQ ID NO: 247207 - DNA, 53 bp, Glycine max
ctgaaccccttgaaccgaaacatgtggcttttttttttttctaacgggatagg

SEQ ID NO: 247208 - DNA, 468 bp, Glycine max
  unsure (1)..(468): unsure at all n locations
gacctctgagncacctgaggcatgcaagcttgctnttacaagagagttaagccatttttttattgtgcagngntttatcgcgacttcttctttatgtatgttcctttttctcttttatctttggtttggccatatttagatataacctttgatatgttattatgttaggtttgtgtctgctatctattacattcgtagttagaaatattttgttgtgtctatgtacacatggcgcctacacctttgcacacacattaaggtattagaccctatactcgggtctatgtgagacatagggaggggaggttgatctgtggtcatgctgggtctccgactcgcttgatatagtggaacctcatctatagttttcctcttttgatgatgcattgtcgctggtagttcctattcgcccaatggtgttaccaaagaaggtgatttttctataacccttagaaagtacataccacc

SEQ ID NO: 247209 - DNA, 339 bp, Glycine max
acagatggtgcaggaaattcttgcgccggacatatacctgacaggaacattctggtaattaatataaaccagaaaaagttgagtccaagtaaccaagagaggctctatagccagaccaaaaccacccatagttgaaagcctgcgaaaacagtgactaaaaaataagaacagaggaactaacgcagcgtaatcctcacatgaaggaacttataaatacttacttattcttgacaaaatggaccttgactcggggtaattctgcaaacgcaggccaaattgtcgcatttggcgtcccagaattctagaatctgcaagtaactacaaatgtaatacgcctac

SEQ ID NO: 247210 - DNA, 456 bp, Glycine max
agcttcaccaccaagaatgtgtcttggattatattctcgcagaggatgcttcaatggaggaaaagaaagagagaaagcggggagcaccaaattgaaggaataaaagagggagagaagtggaactttgaagtgtgtctcataagactttcaaagttacaaaaagtgttacacatgcatctatgtatagactaggtagcttccttgagaagctttcttgagaaaacttcctagagaagcttttttgagaaaacttccttgagaatctaaagcttagctacacacacccctctaataactaagctcacctccttgaaaagcttccttgagaaacttccttgaaaagattcctagagaagatagagcttacctacacacacctctctaatactaagctcaccttttagatgagagctagacttagctaccacccttatatagctaactcacccatgccaa

SEQ ID NO: 247211 - DNA, 461 bp, Glycine max
gcactcaaggaccagccttgttttttgaaaaccgctgtataagagaactctattatggaagaagactctcccagctttccttctgctctaagacacatgccctcaaaaggtccttcaatgactgaaaggtctgttcaacttggccatcaatctgaggatggtaggttgaactcattctaagcttggtttccaacactcggatcaagctctcccaatatctagaggtaaatctaggatctctatcagatactatgctagatgacacaccatgtaacctgacaacctcacttatatacaaggcggtcaacttctccaaggaaaatatgatattaatgggaataaagcgagcagactcagtcaatctgtcaacactaacctacatagaatctaaacctctaggggttctaggtagtctgacaggccatcatcttctcttattttctaaaccctctctgaccatt

SEQ ID NO: 247212 - DNA, 420 bp, Glycine max
  unsure (1)..(420): unsure at all n locations
agctttctagcttntcattggtgtatttttatctccttctggagctctaaattgtgggggtgtgctcaaatatgtggggcaattttgatttattaggggttggtatgagatggccctaggcctataatgcattttgaaacaataggacatgccacattgtccccgttctcttgctattgatgcctaaacgcgcgcccaccaagtgttcggtgaaatgcctcaatggcattagcgtgtgacttttgtaaggagacaacccatggggtattttggctcgtgcatattttctatttttttttggaatatgtattcattcccgaanaaggctagagtaattgccccacatatatcctattcctagaaactgaaattttctgcanaaagagcacaaaaggaggtgcatattgggtaaagttaccc

SEQ ID NO: 247213 - DNA, 463 bp, Glycine max
  unsure (1)..(463): unsure at all n locations
agcttattacacgccatcttcttgcttctacacccncncgcctccctctctctttatttccgcaaattttggtactcttggactttggtcacaaccttctaataaatcacatattcttttatctttaattntcttctggtatacacagataattatttctgtttgtaggtgcttggtcaattgcgtaccagagttttggtatctctttagcatgaagtagatattgcatttggttacattaaaggatataatttcgtatttttatataattgtcttcccagtgatttttgctacgacatagaagaacacttttgaccatgcgatttactgagtgaaataagaagaaaaaagtaacaaataattaataacagtaatataaataaaatgaaaatagagttgataaaaatagtattatatagatgaataaaatnnttagaacaagtaaagacattctctacgtcta

SEQ ID NO: 247214 - DNA, 461 bp, Glycine max
agctagcttgacgttcaaagatgtcaacattgtgtttgcacaaaacacatttagcactatagcaactatacaaacagttgtcaacaaataatggattctattatataccttcaaaaggttatgtctgaatttcttggacatcgtcctcgtgatatcaactgagaccacataaccgggaccatgtgcccaaggaggataagttccttgctccattcctttaagggagcaagcaataagataatctcaagttagttacaaaatagctatccctgtctagttgatgaataatcaagtttcaatcataccatgggaaatcatatttgttatcaatgaagtacatactggcacaaagaaaccaacactttcaacacatttatttacaagcaagccttattaacggagttgcatatcacataagctaataataagcatatcacacaagaagaatatagaacatcact

SEQ ID NO: 247215 - DNA, 334 bp, Glycine max
  unsure (1)..(334): unsure at all n locations
cgctcgatntgcgagcagatcctaccttattttttttctgtttatcactcaactgacgcacggacactgccaaagaaaaaccgccgatcgcattttttgattatttcattcaaagatattttgattacttcatcattattcttcttttcttggctcaactgggattacagcgtgaatgaccagttagattctgttttatcagggactaaacaagattaccacgcaaaagatcggttgaaattcattttatcattcattaggtgagaaaacggcttaacataaacgattaaggcacgttaaaaatggaagaaaagaaaccgaacttgaacgaaat

SEQ ID NO: 247216 - DNA, 462 bp, Glycine max
  unsure (1)..(462): unsure at all n locations
agcttctagtcgtccatagacctcctctgtggtactgtctancaaacgttgcatctgtgcattcatcgcatccactaacagacgttgagcgccgtccaactgatggtactcgtcaccaccatggtagacgccacttccagtgaaggaagataagtctgggtagacgccacttccggttaaggaagataagtctgggtagacgccacttccaatgaaggaagataagtctgggtagacgccacaaggattaccttgataagtctgataattggttcaacaaggaacccagagagaaactctcaccaaattttatcaaaatgccaaaagttntttttattcaaaacaaaaaccaatacttatagtgtagctgaacaaaaagataaaaatagacatgggccttctaaacagtttgtggcanaattagaataaaaataaattataactaanaacttatttaacttg

SEQ ID NO: 247217 - DNA, 461 bp, Glycine max
  unsure (1)..(461): unsure at all n locations
agctttgagcanattcaaacgacaataactttntactcggatgtccgaattaatccagtaatatatcgagacactcgtaattgaaaatggaagctctgagcaaattctaacgataataacttttttctcggatgtcggattgagtctcgttatatatcaagacgctcaaaattgaaaacaaaagctctgagcaaattcaaacaacaataactttttactcggatgtccgattgtgggcagtggtatatcgacacgctggaaattcagaacagcagctcttagcaagttcaaacgacaataacttttttctcggatgtccgattgtgcccatagtatatcaagacgctcaaaattcaaaacaaaagctctatgcaaattcaaacgacaataactntttacttggatgtccgaattaatcctgtaatatatcgagacactcgtaattgacaacgaatgctctg

SEQ ID NO: 247218 - DNA, 234 bp, Glycine max
gcccgggatatttgcgactctgaatcctttacattccaagaagtgccactacatcaacctagcgatctaatgcatttcataccatcactgcaccaacgaccccctcaataccgcagtactgagaccacctgatatatgctaccataataaacaacatcgacaatttcctcatctaagggtaaactctaaagcaaatcagtccaagcctacggacatatcactctgtacacgaat

SEQ ID NO: 247219 - DNA, 471 bp, Glycine max
  unsure (1)..(471): unsure at all n locations
agcttgtaacagttgtgaatcatgccgatttcatgtaaaagtagttcatcactattttcttccataactacaccggtaatgccaagattaatgtgtgtgatttgcattaaaaatgggaaataaggtcaatcattaaaagaaatgcctaaactagtggaggagactgcagtgactaaagagagcacacgactctacagacttgcaattgcaatatatcagactccttataattatatttttctaatatgatttcaggttgcaagaattcttcattgagtaacctcattgagtagctatatatgcatatagctacaatgttgacattnttggcaagaacacatcttggtacctccaagctaatcaacatacgaacaagagcttgaagaggaaaaaccattnttcacataacctagaatgataaggaggttcatatagccttacattaaatatcagtcccttaatactatatca

SEQ ID NO: 247220 - DNA, 472 bp, Glycine max
  unsure (1)..(472): unsure at all n locations
agctcgacatctttcatctacactatattgttttttcattccatcccttagttttctcatcttacatatgcatctactattagtatctaaggaaagataattaatttaaatggtgttttggatgactatttcaatttatgcatccattaacttattattacgcattcatttattgcatttataaattttaattttatcaatacaatatcttatttataacaattcgtaaattctacctcacttattcattaatacatatttatgcactttntcttgcaaagtgaaggtactttagacaatcttttattttattctataaactatattaattagttgaactcttaatagagagtggattttaaatgctaacctactattatcattataggaaaataatggatttatggactttattcatgaaccttcgaatttatatatccattaattgattataacgcatccatttatcata

SEQ ID NO: 247221 - DNA, 436 bp, Glycine max
  unsure (1)..(436): unsure at all n locations
agcttccataanacgaaattatgtaatatttaccttgtatttttctcaaatattttctccttgccttttgttgtcatgcattcccttctataggtttatcctacaataatgcattgatcaacaattttttcacctaaataatacaaataaattaaatatttatccaaataatacaacccaaaaaatatttatcctaatgacacaaaacattgttcatgtgagaaattggtgcccccaaactgatttctcacctacaatttaaacgttatgaaattggttcaattctcattctgaactgacttttaaaaaacacaccttatgaaatcggttcttatgaaatcaattgcataacgtcattgtttttctaaaccaccttatgaaatcaattccacacatggaaaacaaaaatcattcttttataacaaaaactcagttc

SEQ ID NO: 247222 - DNA, 467 bp, Glycine max
  unsure (1)..(467): unsure at all n locations
agctntataagcaaggagtaaaattttattatgataaaaagctttcaaaaaggaacttccagcctggtcaataggttttattatttagttatagattaagattgtttcctataagctgaaatccaagtggtctagaccattcatcatcaaagaagttatgccacatggaatggtgatattggaggatccagccaccaaaaggacatggaccgtgaatggtagcagaatcaaacactacttaggtggtgatttcgagaggctaacaactattgtccaactacaagaggcttgaaccacaacaaagacgtccaacttaaaagacattaaagaagtgctcctgggagacaacctagtatttctgaactttgctnttaattntcttttttcctaattacatatatgtgttgtttaaatatctatttgcttgaactctttttaaactattaggagtatacttaattataagt

SEQ ID NO: 247223 - DNA, 357 bp, Glycine max
agcttctaaactacaataactatgccgatgtatgattcatatgctatattaagaatacaatttagttataggttgctaatgacctaatgtataatcgatctttcaggttagcatggcaaccaaaatggcaactgttgataaagcagaagaacttcttgaaaagcttcgcaggtcttcctgggatgctgcagtgcaaggtattgtgtataagatgtgcttattttgtgtttgaatcaggctttaaattgtgtgtgtgtgtgtattatgtatggggaaaatgcattgcatataagctttctggagttagcctttcattgtcattatcctaaatgcttaattatgttttagtccttgaaa

SEQ ID NO: 247224 - DNA, 437 bp, Glycine max
  unsure (1)..(437): unsure at all n locations
ctacacatgccgacaagagaaaggtcaccttataaaggaaagaaagaagcctagcccatttacaagggtagggatcatagatgaaaagggaccctatctgccacatttgcaaaagctttgtcagcgtgggatggatgcacgagaatcaggttgttgtgctagacgaagaaaccaaccaagagtagccaagtttggtgcagctgtgctccccgggtttcgaattgaagcattggtggatcgtggagtgacccgagatngcggtgtcatatccaatgtaatctagtagttngaaccctattgttgggcctaggctttanggtctgcttcttttngtgggcatacctctttccttaatgctcccgcaattataaatatacaaccctctttatttgatatngtccctctcgcactntcatccattttcattcttctacata

SEQ ID NO: 247225 - DNA, 416 bp, Glycine max
tctagataagataagatctagatgaaataatatctagatgagatcaaatctaaataatatctagataagataaagtctagataagataaaatttgatagaataaaatagtcttccctcttcaagtccaagcccaattctggattcaagcccaatgcttcattaattcctgaaattagattaaaaacatcaaattagctgaatgagcccagataataaaactacctaattaatttgacaattaagactaaacaataattaaaatggcgcaaaaagggttaagaaataggagaaaataatggcacatcatgcagctaagccagtgaggcagccacagcggcgactcaaccccgtcattctagatgtggtgaaaaaggaagtgaccaagctcttacaagctggaatcatctaccccatt

SEQ ID NO: 247226 - DNA, 482 bp, Glycine max
  unsure (1)..(482): unsure at all n locations
cctataaatctaagcttacaatgtagttctacatctttgcagataatgcaaacaattggatttctcgggccagctttcttcttaactcaattgagccacgctaattctcctgtgatggctgttttgtgtatgacatgcagtcangtttgcttcttgttttgtatttgagatatttttaattctgagaaggcagtctctttgtaatcctaacataaaatctgcttatatttgtgtctcttcttatatgtatctggagaaagttacttaatacttgtataaagtttctttaatttaagtatctcacttcaataattttattatgattattagttcatactgcataatctgaanatntgactggcaaatataaatattcttggcaatggtgtcttggaacttctcttgatgagcataactacacattctcattttgctaagtcttcatataaagttagaaagtgttggttcatccattcattcca

SEQ ID NO: 247227 - DNA, 424 bp, Glycine max
  unsure (1)..(424): unsure at all n locations
agcttttaaaaccgtaaaggtttacattatgctcgtcgcgtaaatgtcggggcgttcctccactcgccaatttcccagttggaaatcaggagggcatggtcgtaccaaatccagcgtattcggaacgtcatcttcgtatatagcgacgacttgaccttcgtcccccaggctcgcgcttataaagctcttacttatgtggcagggtgggtttccttcaccttcttgtctcaaccgcgagccttgacttccgctcttccttccggcaacgctcctctntatatccgcctgagtgggcttatagcgtaacccatgcttcccacgatttcctttggcatttatcaggctagttatgccgtcgttgtctttgcctaaacccattccgggttcgtaaccgctccccaacataactcgagccatcattact

SEQ ID NO: 247228 - DNA, 491 bp, Glycine max
  unsure (1)..(491): unsure at all n locations
tgaccaatcccgacccaacccgggcatagtcggtcagtgagaacctgtgatgtacctaagcaggcgagctcctggcagtcaacagataaaaggaacaaagaccacaaagcaaggaggcttgtggtggctggccagctgtgaaacttgactgatatgtgagatatgatctctggtaatcgattaccaagggtgggtaatcgattacaaggcttaaaaatgaagacaggaggctaagatggtctctggtaatcgattaccaaggggtgtaatcgattaccaggcttgaaaacgaagtcaggaaacttacggagcctctggtaatcgattaccagcctgtgtaatcgattacacagagggatgggtcactggtaatcgattaccacgcatgtgtaatcgattacacagcgcattattgcatatttcatgtcctgaggctgtgtaattcacgtntagcctctggtaatcgattaccaacgctgtgtaatcgatac

SEQ ID NO: 247229 - DNA, 354 bp, Glycine max
gcttcaccggatgatgccgatcgaacatttccttatcgacatcatccaattgttattcagggattgaaaagaataaacaatggccggtgtcggtcgttatatggccccgactgatatctttcagcctacattgcgcaatttcttttacaaacgctggccgataatgttttttttttggtagaggaagttctttgttttggtgttgcctaaaaaatttacaacgtaggtcggctaggtttttccgtgcgagctcaaccgggggttcgttccgagttacattggcatgttgttcttctcatttagaaggccaagaagacgttagcccaccccagcataaacaaaaaataacattat

SEQ ID NO: 247230 - DNA, 468 bp, Glycine max
  unsure (1)..(468): unsure at all n locations
agtgcgggttcgggagacaaaggtcaagcgttcgcgatatgctaagatgatattccgagtactntggatttggtacgaccatgctctcctgatttccagctgggaaattggcgagtggaggaacgccccggcatttacgcaacaagcataatgtaaacctttacggttttaaaaagctctatagttgggcctaggctttagagttttcattttgttaaggctttgtgtcttttgtttttgaatttataatacaaggatctttcttcatctgttcctggtctctacccattctcattcatttgcatgtttacttctttntctaaaacggcagattcgatgacgagtcccccgaaggtactaatacctgcgacccgtctatcaacttcgagcaagaaatgaatcaaacggaagatgaaggagatgaggatgtgggaacttcttcggaactagaaagaatggtcgcccatg

SEQ ID NO: 247231 - DNA, 438 bp, Glycine max
  unsure (1)..(438): unsure at all n locations
agcttgtgctntaacctgcctcagtaatataagacacatgtgttaaggcgcctgcgacaataaactagctgtgtgtgtgcaagtctgaaggtgaatgttctttgtttcaattctttattccttattgttattgtcttaataaggttagaatagaaaagttattggaagaaaattaaggattagctcacctttgctgatttgaatagttcatcaagaacctcggacaaagttggatgtgcatgaactgcaaattntatgtcctgcattgtaccacaaaacggtgaaatttaccaaacaagcaggataaataagagtgaagactttgtgactattattagtaactaaatgccaatacacataaatgtggtagaaaaatttacctgaatacgtgtccctaatgcaattgcattggatgcttcatggatgagatctgctgca

SEQ ID NO: 247232 - DNA, 473 bp, Glycine max
  unsure (1)..(473): unsure at all n locations
ttagagaatatcccatgaactctataagatgagaatggagatggactacgatggtgagaaaacagttctaaaataacgaaaatagtgttgtatttatggtctttgtattcaacgtataatctctggaaaaatcttatttgtttatccatgtaaggagtgaatcttggtcaatttctagccaacacgagaggcttctatttttatgaattttcctcacctaaactactcaaatgagttctcacataactttcaaatttgttctattttttttgtaagttgtgattttcactctagtatctcaattatctatgttcacctattatctaagttgacaattacttttagtcattntgataacgttntacaaacgtttgttggaattttagaggatctttataaaacattaataaccacccggatcacattatattagattatcaagaagaatttatgaatacttgaatccataatga

SEQ ID NO: 247233 - DNA, 309 bp, Glycine max
tggcaatgaacaatacttgtaactttgattagtttatgaaaacttggtgggttgccaagaattggacgtattctcgggtttgagatgaaccaacataattctttgtgtgcttctctcttttgttttaactgacaaacggtttgaatttgcttttggatgtaatatcttttttgctatacaaacgacaatatttttatcattgtctaatagagtttgatctctaagtgttttaggtctcttatatcagacaataaacatgttttcaacagtagaaaaagtttagatctctagaacacaattcagcccctt

SEQ ID NO: 247234 - DNA, 492 bp, Glycine max
  unsure (1)..(492): unsure at all n locations
ctatgcaagtttctggttttctaaaccttgaanacttgtgctattcatcttttcattctcttctccctttgccaaaaagaattcgccaaggactaaccgcctgaattctttttgtctctcttctctcttttccaaaagaacaaaggactaaccgcctgaattcttttgtgtctcccttctcccttgtcaaagaattcaaaacaacacagtctgagaattcttttgattcttcccattccctaatacaaaagcgttcaaaggtttaaccgcctgtgaattcttttgtatccccattcacaaagtatcaaaggtgtaacagcctgagatctttgtcttaacacattggagggtacatcctttgtggtacaagtagagggttcatctacttgngtttgactgagaacaagcgagggtacatctcttgtggatcagttctagaggagggtacatncactatgttcaaagagaacaagggagggtacatcccttgtg

SEQ ID NO: 247235 - DNA, 467 bp, Glycine max
  unsure (1)..(467): unsure at all n locations
agcttctatcanagctgtggatgacaacattattaatgaggtcattattgatctcacgaacactggtgttatgaatgaaactccagaggtgcccaacacaactttggccaatgaggttgtccatcaagacaaagaacctgtgtccaagcagtccaaaacctcaaaatgaagcaacgccaagggagaagggtgcacctgatgttttattgtctactcaactagttcaactcctacctcactcaattatgcttctccctctattgtgaccataaatcaagtacaagagatgataggtcaagcaattgattcctttgtcgaacaatacatgctagaaaatgagccatttatgctttcaatgcanaatgtcatcaccacacagttctctaaccttagtggttgtctacttcaaaatctacaacaagctcanatgactattgtcatacnctaatttcatctggggaccatct

SEQ ID NO: 247236 - DNA, 316 bp, Glycine max
tctctatatcagttgcttcgccaaggatctgtatatgtgtattacatttgttgttctgggagaagtttgtattatgtattgtgcataagatcaaagaataattttaggtgagagtctatttcactgtaagggcaggacggacgacatcagcgtcctatcttcgctatcctatgatcttctatgaaaggttattactcacgtgcacctgtcatacgataattctgatcactgattattacttgatgacatgcaacctatggatgaccgctactatatactcggcgtcctctgttgcacactatatgatgtcccgaca

SEQ ID NO: 247237 - DNA, 478 bp, Glycine max
  unsure (1)..(478): unsure at all n locations
gcttgtctcagcgtntatgcgatatggataccaacatgctatctattatctcctagtaccaagaagagtgaggtctagccatggcccaccagcatataatcgccgacgagtatgctcaagtatacgccgacaaagaggctacacgaagggtgatcgactctttacaccaagaggcaaccatgtggatggatcggtctgctcttaccttaaacgggagtcaagaacttccccgcttgttagccatggccaaggcgatggcggacacctactccgcccccgaagagattcatgggcttctcggctattgccagcatatgatagactcaatggctcacataattagaaatcgttaggaaacttgtatggtctctcagaccctgactacatacgactttctttttgaaataaaatgagttggtcccatgtttctacatcaagaagcatgtgcaaatcaaatcactcctacatttcatctcta

SEQ ID NO: 247238 - DNA, 309 bp, Glycine max
aaacatattcttctttcttggttatccttgactccatctcagtgaatcgcatgtccacttggtactcccaggtgttatacctctcagcaactaatgtttgtaaaccctcatagctcgtccaaatcttctgacgaagaaacgaatcttcttcaccatgttagtgtccttcttcatcgatgggttgaacacccttttttaccccagagccatcattctctttacggtaaccaaaggaatgcatcactgccttacctattagaaaggatctcttgattgaaacataatgttcacaatcaagagggatgttga

SEQ ID NO: 247239 - DNA, 482 bp, Glycine max
actgaattacaatgttccaattgatttcaaaatgttattatcgattacaatgatttggtaatcgattaccagtatgtttgaaagttggaattcaaatttaattgtgaagggtcacatcctttcacaaaaaatgatctggtaatcgattaccagtatgtatgaacgttggaattcaaatttaattgtgaagagtcacatcctttcacaaaaaagctttgtgtaatcgattacactgatttggtaatcgattaccagtgatagtttctgaacaaaatcaaaagatgtaactcttccaatagttttcaagtttttctaaaagtcataacttttccaaatggtgtttaacgttttctaaaggttataactcttctaatggtctcttgactagacttgaagagtctataaaatcaacgctttcatttgcatcttattaattcattctctagacaacacactgtttccaattgatatctgaatctctt

SEQ ID NO: 247240 - DNA, 508 bp, Glycine max
  unsure (1)..(508): unsure at all n locations
agcgcggangttgacacgatgcgcagcatgatccttaagtcacctgcaggcatgcagcttgntaacacactggatgaagactatattatatatatatgcatatatgtatatatagatatatatatatatatatatatatatgcacatatatctatctctatatatatatttgtatatctgtggtggctaatgagctggcctacccccattaatatgcgtgcgcttcatagcacgctttccatctgggaacctgtaaggccacctgcatctactgaaacgctaatatcgaccgcacgcgagaaacgtggccgtgatataacccatagatgcacttttcttttaatgtcgcctgctacaagattattcttatcttgtgtccaaacaacgcttttggttcacatatgtgcgtaaatatactatgtcctgcccgcactcatctgatacggtcgcacacggaagcattttntattcaaaaccaggttatccgctgtattactcaacatccacg

SEQ ID NO: 247241 - DNA, 395 bp, Glycine max
acacatacatacccacgctccgccgaatatctcatgatctcatcgataactcacaagttctattttacgcgcgcaaaaaaaatatgtgaactcgactcactaaaacttgcatttctcacagtctctattgaataattataccagcgtcatcgcacccaactcatactagcttagtcaacccattggctcgggaaccatacacacaacccgcccaaaccactaattggattgcatatgcctatattccgcaacaactcggcccaataacatactaatacgtgactccgtgatctacttgactcacccgatcatgcactctatgtttttattcttaaaggtgaaccactccacttatatgagacaattccacttctatcttacacttgtgttataca

SEQ ID NO: 247242 - DNA, 598 bp, Glycine max
  unsure (1)..(598): unsure at all n locations
gtcctcctcctcttcctctantctttctctctttactcatattattttttttctatatancacncccgcgcgcgcttgntgacttgcatatccctcgccantacgcgacactctanaatactctatctcgagtgtcgactctaatgttacatgatgctnctgttaatattatatgcttatcctctatcctaaaatattctgctgtgtaattctgtataacattgatgtctgatgaaattatttgtctcagtgagcgtctttcccctcttgtgaatgtctttgtctgttgtcgcttgttacctgcaaataatatgtgggctgtaagattctatttgctagttcaacaggggggaactcttatcttgattcgacgttcctgctgagctggattgctgaatcatagtcaccctactcaaaatccaagattatgatgcaaccactgatgtggttgtactggcacaattcgccctataacagttatcgactactgacctccacagactcgccgtccacccttaaatctcaaagactgactctcgccgtgccccatacacctactttctcaaccatattcttctcggcacatcttagattcccg

SEQ ID NO: 247243 - DNA, 433 bp, Glycine max
gcagctcttagtctcaactgatgaagataaattcgtggctacttcatgcactcctctaatgacaatagcatcatttctggcactaaattgctaggagtttgaagccatcttctcaattaaatttctggcttcaacaggggttatgtctccaagggctccaccactggcagcatctatcatacttctctctatgttactgagtccttcataaaaatattggagaagaagttgctcagaaatctggtggtgagggcaactggcacatagttttttaaatctctcccagtattcatataggctatctccactgagttgcctaatgcctgaaatatcctttctgatggccatggtcctggaagcagggaaaattttttctaagaatactctcttgaggtcatcccagctcgtgatggaccttggagcaagctaatat

SEQ ID NO: 247244 - DNA, 497 bp, Glycine max
  unsure (1)..(497): unsure at all n locations
tgaagttggattctcanatcttaataagaacaaatatagtgaatgcaagtcttagtttggtatttctaaatttcagtatttttataaagtccagagtgtttgtgaggaagtgtaacttcaacaatcgacaaaaatttaagataattagagaatatggttgttcaaaaaaattagagaagcaacaggaacaagaattaggtttttatcttttggcagaatgtgctaatgagttgacaaaactacagaaaagatgcgtgtccctgtcatataaatttatgcatttgcaaaaacaaaaaagaaatacacttcatctacttttgatattattatcaccatatacagattttaaaagggatcaattgaaggttcaagtgacctcaaagctcaccctaaggctaatgggtgaacgactgatcactgaaaatagatggcatcgtttcaatctagaattgcctcttctttttattatgacactgacagtgtgactggcaagttta

SEQ ID NO: 247245 - DNA, 440 bp, Glycine max
  unsure (1)..(440): unsure at all n locations
tgcaatcgattatgataatgttgtaatcgattaagatagagagttttgccttctgaagaaacttttctaacttacaaaattttcttttcacttactcatgatgatgcatgatgcataaaagatatgatatggactaaaatgcaacatacaatataacaaccaatacaaattccatttaagagagttgtgcatgtaaaagacaaagcatcttcaagcttttctccaagcttcaagctttagtcctcatgttngttatgttgctccccctatctctaacanagataacattagccacaacatcattcttagccaaatcaaatcccgaggagaagctggtcatatacctcttggtctccaatgaaattgtgagtgcggccgtcgtttaggagcatggagaagttcaaaaaccaatttatttaataactngagtccaacacgag

SEQ ID NO: 247246 - DNA, 499 bp, Glycine max
  unsure (1)..(499): unsure at all n locations
cctatgagactaagcttaagaacaacatagagttgggagttgaaaagcttgttctttttttattattgaaagtgagaacacaaggtgactatttatagagaaaacaattataactgcttgtaattgattaaatcgcctacataatcgatcatctcgaagaagtaattgattagattctcattttaatcgattaaaatgttcttctcaaaacctgtaaagctttcaagaacaatataatcaattagattcttgatttaatcgattaaagtgttcttgtcacttctaggaacactttcaagaatgatgtaatcgattactataccctcgtaaatgattaaagcagagaccctaagaaaacatacatggtctcaaaagaatagagtaatcaattacagatacatgataattgattaanattgagttatgcactgaagatgtntctcttcttagaaacaatcttcctacttctacatgataatgcatgatgtacacatagata

SEQ ID NO: 247247 - DNA, 456 bp, Glycine max
  unsure (1)..(456): unsure at all n locations
gctttggagtntccaagtgccaattcgtcttcttctttagtccagtcttcttctggcttcaattcttcagtgggctttccttctgtgtccagcatcttgggatgttcccagcctttgatgacagctttccaggttctgctatccagtgatttgaggaaggccaccattcttgctttccaatattcatagttgcttccatcgagaattggtggtctgttcactggtccgccttctttctccatgttcatcagaatttatctccctagatctcactctgtgatttcgagtgttggctctgataccaattgaaattctgataccaggggacagatgtcgtacaggatgtcacgacatcacgcttcagaacatgcagattatatgtgtccgtatgaacagattanactagtaaataacacaagagaattgtttacccagtgctgtgctacctcacctaca

SEQ ID NO: 247248 - DNA, 451 bp, Glycine max
  unsure (1)..(451): unsure at all n locations
gatgatgctctaatggagganaagaaagagagaacgggatatcgttaaattgaacgaataaaagagggagagaagtggaactttgaagtgtatctcataagactttcattcatcataattacaacaggtgttacacatgcttctatttatagactaggtagcttccttgagaagctatcttaagagaacttccttgagaagcttctttaagaaaacttccttgagaagctagagcttagctacacacacccttctcataactaagctcacctccttgagaagctttcttaagaagattcctaaagaagctagagcttagctacccataccttagctaagctcaccttcttcagatgagaagctagagcttagctacacaccctttatatagctaagcagagaaacatatgcacgaaaacatgaataacaaaacaagtcttactacaaagac

SEQ ID NO: 247249 - DNA, 408 bp, Glycine max
gcttggtggagtatggggcacccgtcatatgtggttctatgtggcgatcgggagatggagcaaatcaactctcccacttccacaaatcaaacataaagacaccatccccagttgcccacctttcaactgagctcacgcactcctacgtagcccttatcctcgttcctctcagcatcgggtccccatcaacccctccaagcttccacaatatccaatcaggtcaatttcaaatatcatgaactaccctaaaccaggaaaacagagtagaggcaggaaactctgttcaaaacccactcaaataccacagctttccttactcatataccccagtaacattctcttcgttccgattcgtcaaccggtggatcgccttgaaaatttactggaggttactagtatataaatata

SEQ ID NO: 247250 - DNA, 433 bp, Glycine max
  unsure (1)..(433): unsure at all n locations
agaaagagagaacgggggttggggggagcactaaattgaacgaataaaatacggagagaagtggaactttgaagcgtatctcataagacttttataatgttacacatgcttctatttatagactangtagcttccttgagaagcttttttaagaagacttccttgagaagcttctttgagaaaactttcttgagaagctaaagcttatctacacacactcatcgtaaaactaacctcacctccttgagaagcttccttgagaagctagagcttatctacacacacttctctaataactaagctcacctccttaggaagagaagctagagcttagctacacacccctataatagctaagctcacccccatgacataatacatgacaatacanaaaaatcctactacatagactactcacaatgccctgaaatac

SEQ ID NO: 247251 - DNA, 386 bp, Glycine max
agcttcctataatcaaatgcaaaatggtcacttatctatagggacaagaaaatgaaattctccaacacgtctagctaattgagactagctagtcacttttttcgtgcaccaaggtgcaactctaaggtcaattgttattcagttatgtcaaacataattaaaactcagaatcataataaaataagtaaataaaaacatgaagcaaatcacgctcgtgaattacgtttatgttaattgcagtaaataaaggaggcagccacaacaaaaggtgtttgctgctgaaggctacagtttgatcctttgagagacaataactgaataagaagaactaaatgggtgtgtcatgtgtgtaatacattgtgtggacagatacaaattgaagtaca

SEQ ID NO: 247252 - DNA, 436 bp, Glycine max
  unsure (1)..(436): unsure at all n locations
aacctatagtgagtcgtattacaattcactggccgtaggttacaacgtcctgactgtgacaaccatggcgtgacccatcttattcttcttgcagcgcataccactttcaccagctgacgtaatcacgaataggcccgcaccggtcgcccttccctacaattgcgcagcctgaatggccaatggcgcctgatgcggtatttactccttacgcatctgtgcggatgatacaccgcatatggtgcactgtcagtacaatcttgtctgatgctcgatagttaagccagacccgacgcccgtcaacacccagtgacgcgaaccccgagacgtgagaattaaaggagagatgatcgatgatgaaccacaacccttaatttgcagaacttgacattactaatgtatatctcgtcaggaccatcaaagtgtgacactgagtgcn

SEQ ID NO: 247253 - DNA, 415 bp, Glycine max
  unsure (1)..(415): unsure at all n locations
gaagaaattgtagctnttccctctgttgtcttggactcagganaatatttcttcaaaaacttttccacaactttatcccaagtccttaagctattacctttgaatgaatgcagccacctcttggcttctctagataatgaaaatgaaaataagctgagccgaatagcatcttctggcacaccgacaatcttgacaatgttgcatatctcaatatatgttgccaagtgtgcatatgggtcttcattgngtagaccatggaacaaattgcctcgtattaactgaatcaaagaatgtggatatgtgatattgtgggcctgcacctctggccttgcaatgcttgtaaagaactgtggcacagcgatgctagaataatcttcaagggtcaccctgcttggttgctcttcaaccataatgt

SEQ ID NO: 247254 - DNA, 431 bp, Glycine max
  unsure (1)..(431): unsure at all n locations
tcgtcccttatttgctataaatagggggagaagtgaagattattatggttcanccccttaggcacttctctctctttcgaatttgcttaggaaaattgtttccgtgaagaaaatccaagtcgaggcgcttccgtaatgtttccgtaacgtttccatgagtaattacgcgaagattctcgaccgttcttcaagattcatcgttcgttcttcgttttcttcagtcttcaacgggtaagtaccttataccaagcttttcaattcactatatgtacccgtggtggtccacattttgtttcatgtatttttattctcattttcatttactttctatacccccttttgatgtgcttaagccatttatctaagtcatttctcgcttaatttacaaataaaataaatttccaccgatcgtttgaattgtatcatccgtt

SEQ ID NO: 247255 - DNA, 517 bp, Glycine max
  unsure (1)..(517): unsure at all n locations
agagctcgctcactaaccatggcatatacacaacgcgagatgttctcttcaacctcacaccacaaggattcgcatcaatgtatactctcaacctctaacactctaccantcgatacaaactatggatacggataagcgagactccacccaacaaccccggcctgctgcgatgacctatccacaacaatactagcacactcgtgcataaaccactatatcgcaaccgcacttattagacatactgatcgcagaagacaacacccaatctaccggctatttcatcttctcgacaaaaaggagtagcacacactggggtggcgacgagcctactcaccatccatatactccactgagcgaccacacacagttcgctacctcaaactaacgtgtcatcctccaatctttctctgaaccaccaaccaaacctcctaaccactcttttatttcttcactcccctccaccatgatgcgacaacacacaggaacatgctatacacttccagtgcgaagcaatacg

SEQ ID NO: 247256 - DNA, 407 bp, Glycine max
  unsure (1)..(407): unsure at all n locations
agcttcacctattggtcctcctcatagttgttgcatgataaaacatgctctatnttcatcgcccactccaagtaggcctccggatcattctttcctttcaatggaggaatgttgagtgtaataccttcaattcggctatgtctacgaacaccatcattccctcttctcctcctttcttattcattaagatctgtattctccatttgattcaacctctcatggagcgcatcatctcgttgtttcattaacctctccgaatgttgcctctgagcttgcatttggaattgcgaaagccccactccatcattgagattagtgcccgacatctcaaacatacgactctgacgctgcaagacaattatagttgttgattgactacctcacccactcaagagtatcacacaaac

SEQ ID NO: 247257 - DNA, 197 bp, Glycine max
tccttctttcttggcttattctctaatggatggcgcgctcccttatcctattctcctttgccttccgctgcatctccatggtgaaaaattaccattgtaggacctcattgcagctcaaatatccagcctccatagaagctccacaagcaccctttcatctattcagatgacattgtatgtaatattcatgccgctta

SEQ ID NO: 247258 - DNA, 576 bp, Glycine max
  unsure (1)..(576): unsure at all n locations
tcatcaatacantnctntccnactgctcacaatntttatatatttattttctccctccctnncccccgcggcttgatgcatgcnantcctgcactnanccgacacaancaagactcaacctgcgaactgnctctttatcagcaagtagctcattgttttactattgtagagaagtcactgaagaacctctgatagaagcccgcgtatcctaagacactacccatacactaggcgttataggaggaggtaaatcctgcatgacatcacacttggcgtggtacaccttaatgcctcacgctgagatcttgtggcccaatgatatccctactcggaccatgagatgacacttcaccttattcatgaccagaattgctccaactcatcttcacaatacgagctccagatcaactctaggacacaaaggatagccgcaaatcgagaaatcgcacatgaaacttgatgactataaaccatgatgcaaaaagctagcacgtactctaaaagtggtgtgcttacataccagatgaatctttcgatgcaagacacaaacggtatgcgaagagcttctctgtcctc

SEQ ID NO: 247259 - DNA, 448 bp, Glycine max
  unsure (1)..(448): unsure at all n locations
agcttgaagatgtgtaacctgccatcttctcatattagaactgatgtagctccattgaagcttgtaggccttggatcttcttcatcaatggagtcttttgcttcttaaagtttgatagcagcgtaatggagaaggagaagggtgattggagatgccacttcaaggagaagatgagtctataagaagctcaccaccataggaagccatggataatagcttgaaagtaagagaagatgaatggacggagagggagaaagggagcatganatttagtgcctctaaagaagtttgaactttgaagtttaattctcagatgatcaaagttgaaaaaatgcacacacatagcctctatatatagcctaagagtcacacagaattggagggaaatctgaatgtctattcacattttactagaatttgacattgaatggtggagccaaatttcact

SEQ ID NO: 247260 - DNA, 480 bp, Glycine max
tgcaagaagctctatgtaaaaagttgaagcttagttcatcttatcaccctcaaacagatggtcaaactgagagaaccattcagtctttataagaccttatgagagcttgtgtaatatgacaaaagggtatttgggatgagtatttacctctagtggagtttacccacaacaatacttttcatgctagtatacatatggctccatttgaagccttatatgggaggaagtgtagaacaccattatgttggtatgagactggtgagtctcttttgatagtgttgagtctggttgcatccaagtcacattggactgtaccaaacaagttaaattcctgaggttttgatgttaacaaagtataaattttaagtactaacctttcatgcttaagttacaagctatcttatctctgagatacaagcagaaaagcatgaacataaaggttctggacaataggcaaagtatcagtcattggatgatact

SEQ ID NO: 247261 - DNA, 435 bp, Glycine max
taaacatccaaatatcatgaactatccaaaaacaagaaaacagggcagaggtagaaaactctgcccaaaacacaaccaataccacaactttccttactcaaatacctcagtaacattatcttcgttccaatttattcaccgttggatcgactcgaaacttttactggaggtccctagtacataaatctacattttgaccgttgggatctgctagaaaacgtccagaaccgaatatgtacaaccctttccacaaccagccatgcataagcattttctgcacaaacacaatagcaaaattctgcataatagtgcagattttcgaaatcactctagccttcatccaattttgcccaaattggatcctacaagtcctaaatcaagtataaatcatacctaaaccaaagacaagcttcagaccaaagcaattcaaaatct

SEQ ID NO: 247262 - DNA, 481 bp, Glycine max
  unsure (1)..(481): unsure at all n locations
tgaaggatataaaatgtcttcntatttttccttccttaaatttcaaatgttagtgattcaaataaagaaagatataatttaaatttgaaaagtgagatcatgcacttccctttgtggctaacagagactttagtacctatgttggacgtcatttgtgaggatataaaatgagtgtgtaagtaatgttatgtctagtgaatgtaagcaagaacaactcagtgtgtaatgttcgaactcggcaagtgcaccggatcgcgcaagtagtataaaatggtaagaattgagtatcgaaatcttggggaacttgtgttacttggtaaagctatattcagtgaataggtgtcttgtatgaaaagatatgtgtggactatgaacatgtatgtaaactaactattaaaaaggaaaatcacgtgagtaatgatgtgtaaagacaagtagacaacatgttggtcttcctattaggtgcctgatatgttctatg

SEQ ID NO: 247263 - DNA, 401 bp, Glycine max
  unsure (1)..(401): unsure at all n locations
agcttctctatttaggtctcttatcttctttgcgatccgtttcttctctctctctctctcccctacttccnccactttttaagcttcactttcactgtctctgtttgttagggttgctgttcaaacttcacttcatcttttcatgttttatttataaaaaaaatatattttaagaagctgatgtgaggggagctgcgtctgtgtgtgcctgtggctctttggacattgaaactttgttcaatgtttgggaacaacaaagagattgtgtatcagtgcgcttcanggagataaaagctagtacctttgtagggttntgtntatgtgacgaggaattagctataatagttgaatataataataatctaatgatattgttggtgttcgatggtatcttatctctc

SEQ ID NO: 247264 - DNA, 491 bp, Glycine max
  unsure (1)..(491): unsure at all n locations
cgtacttcattcaatgaagaaatgttcttgtttacgtgtgggtgatagatgtaagagtgagtaatattaagagaagaggaggagatatgagatactacctgcgtactttccaacaaaggcagacatggttaaagcttattggatatatggcgggaaacagataacagacaacagcacgaaaaaggagttcagccagaccaaagctatatagataaaaatctcaaaggaatataccaagtggtatctacccaacccatgcaaaggaaccacgtgtccagtgattagcctaacgaacgttatcactcttggataaagcaacgagtgatccttcccttgcccaagtggcacctcatcctccgtttcaataatatatattccactcacctcatgatatataacaaggaaattttgtggaaagctctcacccgtcaccctcttggacttggctntacatattaagatatcaacctacaggctattatgaaaattgt

SEQ ID NO: 247265 - DNA, 462 bp, Glycine max
acctgcggcatgcaagcttacaatgatatcgttaataagaggaattttctctacttgcagcgatttgctagcttacagaatttggttctcataatggtgcgttagaagagctatgtaatcttcctctaatatctcttggtaatttggagttgtctaatctacaactattgtgtcaacatgactgattcgtattgctctgtcttgtctgcatgaaaactagtttgaacaggatacaattgtaataccacaggaaacagcttggtttggctattatccaaatggagccctccatcccgttgtaccagttcaacaggtaatttaagcattccgtatctgtagttaattgttgcaaatgtcgcatactcaacttcttagctgctttgctgctgcctgtgactccataatactctcacctccctcctacatgagatatgagtgtatgacaactgactgtggatcacc

SEQ ID NO: 247266 - DNA, 489 bp, Glycine max
  unsure (1)..(489): unsure at all n locations
cgagcatgtntggatgaagatggacacacaagaataatggaacacttctctctgtaataaaggtaacccgacattcgcaacttgtcatgcactcattatctagccacttaacccaaccatatattttgtgatcttgatatcaatcaaaatcgatccattaaatccacacctttcctttctttttcttccaacttcttttcttctgtcgtttatatatagaaagaagtcttgagaaattaagttcacgttaaataaacttttcttcttaaaatgcatactctgtnnttttgctactcgataataaacatttgttttttttagcaattatacgctcttaatttgctgtttcattgccgcattaagccaaattaagtatttgtttttaacattgagcacaactatgttcattatcaatctgtgtaaaacaaatatcttatgcttattagcatctaatctattgaatcaataaactatatataacggaatcac

SEQ ID NO: 247267 - DNA, 391 bp, Glycine max
  unsure (1)..(391): unsure at all n locations
gcttgagatgaggaagtgtagaagggtgaaactttctgcttntattcgttgaccacagagtggtacctggagatatgtcgcgggggtcaagagaccttggggacgccaagtggggtgctattgcccaaaaccaagcttgaccaatcccgacccaacccgggcatattcgatcaatgagaacctgtgatatacctaaacaggcgagctcctggctgtcaacagataaaaggaacaaagaccacaaagcaaggaggcttatggtggctggccagttgtgaatcttgtgtgatatatgggttatggcctctggtaatcgattaccaagggtgggtaatcgattacaaggcttaaaaatgaagacaggaggctaatatggtctctggtaatcgat

SEQ ID NO: 247268 - DNA, 482 bp, Glycine max
  unsure (1)..(482): unsure at all n locations
tatataacttatatcctaatgtcacatcctatcagagcgttgtgttcccgtgtcctctagcatgaggttcttcatagtcatccacctattcatctggctccctgaacacaagttcaagatcatcacaggatccaaacacaacaacacacagggagtgagttatcatattcctagctaatagaaaaacaagacaattaaatatacatattatataaatgagataccacttgcttaaacatagctcacgtaacttcaccacttcgtcattcaaaattcacttttcaatcatcaatcacattacacaagaatcccacacttcgatcaagatataataacacatcaattagcaagcatatgcaacagttatgccaagactcaatcctatatgcaatgtggtaccatgtcagtcgaaaaccaccctgnggcgcttangagtacataacaagacacaccacaccatgggtttgtcaggtcactctcac

SEQ ID NO: 247269 - DNA, 368 bp, Glycine max
  unsure (1)..(368): unsure at all n locations
acatctacacaacatggggttttcattctattccttatttttctcatcttagtttatgatcttggttaagtctatcaagaaaggtgttatgttgtaagttcaaatcatggattttctcttgtagggttcaagggattaagggtagttctagagatttgtttgtgcatagtgtttgtttagtgattgttcttaaggttcttatatcacattgagtgtattttctcttaagaattgaatcagtataaaccctcgtctcgattctctctatcctttatcttgtnattgagttgttcttgatatagtattgtgttggcatctgaacctgtaattggacgtgccattaaaattcttgttttgaataaaactga

SEQ ID NO: 247270 - DNA, 487 bp, Glycine max
aagcttgttattaggactgcactgctgaacttgttgagaataggtgttgaatatgaagagttagcttcctgtctactctatgaaggaatggcacgctacatgcatgatcacaaaactgaatgtaagtatgctccagaaatgcaatcaagagctcaggcttattacaaatcagaatgaatcaaaactgcaacagctcttgaaccaaatacattgaaaacaaaaagccaactatagattaagtccaaacaacttgaagatgtacaaaggcacacggatcaagcttacctcgaacccaaacaatgacaatggcagtgagatctaaaataatggcgcggagacttgaagctttcctcctatctcgatcaagtcaccacgaaatgtacctacggttaaccgaaacaacgcagacctagtacgttagatgaaatgaagcttagacatcaaatagtttacctcactcaaaatgacaccttgcgagcaaaaacct

SEQ ID NO: 247271 - DNA, 253 bp, Glycine max
  unsure (1)..(253): unsure at all n locations
tacttacttgttggtgtttatataaaagcgccgaacggaatcaaaaaatgcgaatagtgatgacccttagactgccaactcgtaaatcccgtgggtatggcttttgaaagggggaaaagaattttttgaatgaaaaaaaacgtcccccctttcgtcacttttatattttggtgcagaggtggctcgcccacgcgagctaacctgcactttntnttttttttattttttttttgaggggaacatttaaacatgc

SEQ ID NO: 247272 - DNA, 476 bp, Glycine max
  unsure (1)..(476): unsure at all n locations
cggagaggatgcttcaatggagganaaganagagggagataaatagagaggcgggagcacgacattgaaggaagaaaaagggagagaagttgaactttgagttgtgtctcacaagactctcattcatcaaagttacaacaagtgttactcatgcttgtatttataaactaggtagcttccttgagaagttttctagagaaaactttcttgagaagcttctttgagaaaacttccttgagatgctagagcttagctacacacacctctctcataactaagctcacctccttgagaagcttccttaagaagattcctaaagaagctagagcttagctacacatacctctctaatagctaagctcacctccttgagatgagacgctagagcttagctacacaccccctataatagttaggctcacccncatgacaaaatacatgagaatacacaanagatccctactacaaagactacc

SEQ ID NO: 247273 - DNA, 441 bp, Glycine max
  unsure (1)..(441): unsure at all n locations
agctnntaatttaattgtcataataattagtaattacactatattacaacaaagtaaatatggtatcctaaagtatntttactttntctaatcattatagtcaatctcgatgtctaattgtcccaaaataatctttgaaagcatatactattaattatctaggggttcgggatacatagacggtagtgttggaaatcttaatctttaatgtttattgattaaaatatattttttccttataaatataaaaatgtttgaattttttttttttgtaaaattttagtacatattttgtcctgataaaattgaaatgtatcacttttttgcttgaacataagtttggataaatctaaatctacgatgatgacctnnttacattgtatacatataaatgatgtaaaatgtgacattntttatatcggttgtgcatataaccgatgt

SEQ ID NO: 247274 - DNA, 174 bp, Glycine max
aaggacaacgccttataactgaccagtatgcttatattggactatatggacgattcgcagcatacaatcatcatatcaatatatcgcttttgcatgaactacatatgcatgatttactcatcgcatttgacgatacgtaagagctaaagcctgccttttgtctagcaccccaac

SEQ ID NO: 247275 - DNA, 348 bp, Glycine max
gatcttaagtcaccgcggctgcagctataagaagataacttaacttttttttgtagaaaattcaaataacaacatgtgtgtgaatcatatgatatagaacataagtaagacttccacttaactaagaatctatagggaattacacctatatgtgcaatatgctcatgaaaaaactctaagtgtttgatagttagcatggaatgagtccctatatgttctataaaatatgtattttttgaattgtttatttaacaatcaaatactttatgtcaacaaactattacttggttgaatcctttataagacctgctacatattgtcccaatatacatccgatgactacttaat

SEQ ID NO: 247276 - DNA, 469 bp, Glycine max
tattacagagaatcgtaactcagaaggtcgttctggtatatatgttttctaattaatttgagtgcataaattctctggtcatttaaagggacggaatatatctgctcgcaccaaattaaaacaaagaactgactaagaattgagtcttgcccggcgcttcagatatgtcagtgcaaagattgcactgtgttttgaagtctgctgccaattatgcttattaactcagctcatacaaatgattctatatatagactaatatctaattaatatgttatattttatcgcttgcaagtgcagcttattaactatctggtaatctatctaataatagttggtttggtcgagatttgataagttgagaatgtcaaaaagaaacttagtaaaacgtccgagttgcgatactactctgaccgatatctattaatctatatatccttaattgagccatacgtgtacatgtatatacttc

SEQ ID NO: 247277 - DNA, 430 bp, Glycine max
  unsure (1)..(430): unsure at all n locations
agcttcatggtgaatcaaaggtgattcanatgtgttttgatgatcacaatgatgataacaaaagatgatggcaaaggtgatgacaaaaagctcaaaggtcaatcaaagaacaactcaagtgaatcaaagatcaatcaaagaacaactcaagtgaatcaagaacaatttaagagttcaagataagaatcaagaagaattcaagactcaagaagaaagtttagaatcaagaatcaagattcaaggttcaagatctcaagaatcaagatcaagattcaagactcaagattcaagaatcaagagaaggcttaatcaagataagtatgaaaagttgttttaaaaaattgagtagcacatgatttttctcaaaacatgtttaccacagagtttntactctctggtaatcgattaccagattttggtaatcgattac

SEQ ID NO: 247278 - DNA, 442 bp, Glycine max
tgtatagttccctaatttatggctcatttcggagtaaatttataaataaatcttgttttatggttaacgttgtctctataacatttccattggatttaatgacgaaatgtgtgcatttttatgtaaaaaaaaggctaagttttgaattgcaaaaagtagcagttgggctaagctcaacagttgggctaagcgcataaccactgctaagcgcagcttcagcgcacttagcgcaaaggagaatctggtagagcatcagcatcaaagtcacgcgctaagcgcaagatcagtgtgttaagcgcagaggtgccttcagccaggctaagctcgagactggcgctaagcccaatttcacttactcgtgctaagcgcgagggtggcgctaagcgcaatgtcacaatttcagagcctatttaaagcactatttgtgcagaattatggtaca

SEQ ID NO: 247279 - DNA, 333 bp, Glycine max
tctgtatggtggtcagcagaggagcacaaaccacaaacccttgcgacaggtacatatttatgattcaaggccagctgggttaccaagttgaccaacgcatacagtttgccttcaagcttcttagtttcagatgatgcagatgggtttgtagctacctcatgcactcctataatgactatggcatcatttctggcactaaactgctgggagttggaggccatcttctcaattaaatttctggcttcagcaggagtcatgtctccaacggctccaccactagcagcatctatcatacttctctccatattactgagtccttcataaaaatattgg

SEQ ID NO: 247280 - DNA, 331 bp, Glycine max
  unsure (1)..(331): unsure at all n locations
tctagccaaatggacttaccttgaattaattcctttgatagccctgttaagccttgtttccccttccttgttttgaagctcactacaagccttaaatganaaaccatgatatcaccatatctttaaggaattttggagctttggaattgttttgggaataagtgtgggggggttttttttgtttcattggataacttgatttgttggctatgcttcgtgatgaattttgggccatacttgatgtacattgtatattggttaaatgttggacatgctgaatgaaatgttgtttctcacaggttatattctaaaaaaaatttaaaaaaaattc

SEQ ID NO: 247281 - DNA, 455 bp, Glycine max
  unsure (1)..(455): unsure at all n locations
agcttgtgcaaatcanatcactcctacgtctcatctctagcatgcattttctttctttacccactcctcacgtttggttttttagggaaaaaacaccataactaaacgcgccgcaagggatccctatcgcaccagatccaaatctagaacgatgggtgatcaagaggagacacaggaacagatgaaggccgacatgtcggctctgaaagaacaaatggcctccatgatggaggccatgttangtatgaagcagatcatggagaagaacgcggccaccgccgccgctgtcagttcggctgccgaagcagacccgactctcttagcaactacgcaccaacctccctcaaacatagtaggacggngaagggacacactgtggcacgatggcagccctcacctgngatacaaccgagcggcttacccttatggattgccgcccaactattcaccaccca

SEQ ID NO: 247282 - DNA, 482 bp, Glycine max
  unsure (1)..(482): unsure at all n locations
ctagctgaatnnggttggtcctctgatggttcgtgtatattgaccaactgccctaagatgttgaacatggttagtatagatacatttccatttgatatgaccctacctacttcaaattaaagggattaccatccaatcttctcactgcctattaaaccttaacttgtaaattaacatagagaaatatgataataataactgctacacatgttgttttcttcatacctaactaactgtgtgacctaagagtaagtagtacccaaacgaaaacataagtttaatgtaaatttctttttatgcctacactttattaaacaatatatatatatatatatatatatatatatatatatatatatatatatatatatatatatatatatatatatatatatatattcaatctctattagagagacacaaaacanaagcatgctatacacncacataaccaagaattcaatggattctctaaaaaaccg

SEQ ID NO: 247283 - DNA, 425 bp, Glycine max
gatgataacaaaagatgatgacaaaggtgatgacaaaaagctcaaagatcaatcaaagaacaactcaagtgaatcaagaacaattcaagagttcaagataagaatcaagaagaattcaagactcaagaagaaagtttagagtcaagaatcaagattcaaggttcaagatctcaagaatcaagatcaagattcaagactcaagattcaagaatcaagagaaggcttaatcaagataagtataaaaaggttttctcaaaaattgaatagcacatggtttttctcaaaacatgtttaccaaagagtttttactctctggtaatcgattacccgattgttgtaattgattaccagtagcaaaatggatttgaaaaagttttcaaattgaatttacaacgttctaattatttcaaagagtggtatcgata

SEQ ID NO: 247284 - DNA, 495 bp, Glycine max
tcagcttgcttgctagaatttcagtcctttttgataactgcgaaatttatgttaatttgatagtcatttttggctaataatgagtgcaatttcttcactttactattgtttttaatgaaataacgaagaaattaacatctttgcaatttttgattagcagaagtcaaaagaagaatatttcaagtgctttagagaaaaattgatgcaagaattgaagaaaaagccttgaagaagaattggcagacttagacaactcgctcaacgtgcaatccaggcttagtgtgcactcttgcttagaggacaagttcaggcttagcgcacagctcgctcagcgtgcaacccaggcttagtaggaagaagacccacaaggaagcccaaaggcgcgcttagcacgaaagctcgcgctaagtgtgaagtcaacatgaaaagtaagctaccttacgcctataaaaggagtaagaagcataagggaaaggcacatcgagtcttatagct

SEQ ID NO: 247285 - DNA, 478 bp, Glycine max
  unsure (1)..(478): unsure at all n locations
agcttcngaaagaggacctctcactaattcacatattttctttatttggttgtagagaaattatatctcttcatcacttttatatctttctaaatacgtgttcgcttaattatactgaggctttaacttattatttatgtaatcaagtctgctttcattttcatttgtatccttttttatcttaaaattcatttttcaagtatccatatattgtgaactttcttaattggtactacactattcgaccaatgcctttaggtttctatcaaaggatttaaattacttattatgttatatctctctctataagtcctatggtattattaataatatatataatntatacattatcattactaaatataaaatttttatacattatatatgtttatcttttaaggttgcaattttttactaattatntctacaattgaatctcataactaatttagggttccattttaatggttctatcttc

SEQ ID NO: 247286 - DNA, 480 bp, Glycine max
  unsure (1)..(480): unsure at all n locations
gcgccacgaacacataactctcccgttgattattntaatttatcttttgttattcacatatatatgggatatgtaaacactatctacacaaaataaattgcactaattagataactaagtataccatagtttcttctgttgctttggaacttagcacgcacttgtagcctagcaattntttatcagacacctcatcactttctgcttctgaggcttcactaccaccgaagtactgaaccacacaacctgaaatacatattcatacaattatatatatttatatatatatagcgtacctagtggtagtgcatgaggctgaaaaatcaagaatctctatattctctcacagtggaagaaattaaaataatatgataacaattctaatatgcaagcaaatgcaaataatcaacatagaaaactcacatcgcaaggagttggccagtttgtcgagggttcctgtgactaatacaaagagttcga

SEQ ID NO: 247287 - DNA, 491 bp, Glycine max
  unsure (1)..(491): unsure at all n locations
tccggatcttaagtcacctgcggcatgcaagcttgatgtcattcanaagagactatgtcgacctaaatgatgactgaacatgcattgtttatctaatttattcattatgcgatataatttgttgaagccattaaaggataattattaagtactcgttgcgttaagaaaaaaattagctggtgcaaccaaaatcaattatgcatgtacgatacatcgttgtcataattgacaacacataatgatatgcatgcgtattaaagtttgagcgtgacacgacattgactgacttgacaacacattctgatgcacgacattggtttagtaggaaacataaacacgaaacatgttcacgcgtgtctatttttttataaaaaaaaagtgaagcaatctgtcggtgagaaccatgttatatatgagacacgaaaaatggctataaatcacacattatcttgctttcacatactctnccacatgatacataaagtatgaca

SEQ ID NO: 247288 - DNA, 465 bp, Glycine max
  unsure (1)..(465): unsure at all n locations
gcttcatcatgaatacccatgtcatcctggagttatcattgatgatggaaatgaagtaccttgcactctcccagtgatggaactctcaaaggcccctagcagtcataatggacatagtccaatatggcctttgtagtgtgcacaacctttgggaatttcgttagataccgtgctcacaaaacagaagaggttccaccttatgatttccgtgtaagccttgcttgctcaaaatttccagttttttttacactcatgtgacccagacacagataccacaaagaattattattggacgagccattgggtgcatggctcccaacttgtgaaactgttaaaatagagcctatcacattggacccttgaaggatgtancaaattcctctcttggtttgctgcattagcacaaactttcctttccctctgatttgataactccacttanaccacaataaaacctttcaatca

SEQ ID NO: 247289 - DNA, 360 bp, Glycine max
  unsure (1)..(360): unsure at all n locations
tcagtattcaagactcataactcaagattcaagaatcaagagaagacttaatcaaatagtataaaaggtttttcaaaactgagtagcacatggattnttctcacaacatgtttaccaaagagtttttaatctcagacaatcgattaccagattgttgtaatcgattaccaatagcaaaatagatttgaataaagtttcaaatgaatntacaacgttccaattgatttcaaaaagttgtaatcgattacaatgttttggtaatcgattaccagtgcctttgaacgttgaaattcaaattcanatgtgaagagtcacattcatttctcataanaactntgtgtaatccattacactgatttg

SEQ ID NO: 247290 - DNA, 472 bp, Glycine max
  unsure (1)..(472): unsure at all n locations
tacgtgaaagtagtataaagaaatactttagaagttaagttattcgatagtagaatctttatgacataaatagaatgcatggtcgaacattaaaataatggcatgtggtaggtcatacatacataatctttgtataacctgatagaatcaaatgaaaagtaagggatatattacaacataaacaagtatatgaattcatgtcatcagaatagaaatcaaaatattctttacaacataagataaatagctaaactaagctatgaactcgtttgagtagtctacgttggggaaattcttaanaatgagagtcttgtttgtcgaatctatanatnggcaggggtcctcctaatacatggatagacaagtgaaaattttcccaagatttacatcaacacacaagcttcnatccaatctatctcttcacaattanaatataatataacatatattcatattcatattaatatcatct

SEQ ID NO: 247291 - DNA, 429 bp, Glycine max
  unsure (1)..(429): unsure at all n locations
acatgtggttctatgtggcggttgggcgatggtgcaagtcaactatccacatccacaaatcacacataaattcaccatccccatatgcccaccttcaactgagctcacgtactcccacgtagcccttattctcattcttctcaacaccgggtccncatcaatccctccaagattccataacatcccaagagattacatccaaacatcatgaactatcaaaaacaagataacagggcagaggcaaaaaactctgcccataacacataccaataccacagcttttcttactcacatacccagtaacattctcttcgtttcgcttcgttcaccgttggatcgactcgaaaaatttactggaggtccctagtacataagtctacattntgaccatcgngatctgctagaaaatagtccaaacccaatatgtac

SEQ ID NO: 247292 - DNA, 372 bp, Glycine max
  unsure (1)..(372): unsure at all n locations
agaactatgattattgaagaatatatctatgttgcttntgatgagactggccctataaggccaagaaaagaaacacttgatgatattacaaattcattataatatatacacattgatgagaaaaggcataaacgcaaaggaaatggtaatgaagaagactttcaacttgatgaaaataaaacaaatatatatcttccaagaaagtggagaacttcaagatattatcttcttgataatatcatcagtgacatctcanaaggggtaacaacttgacactctctcaaagatgcatgcaataatatggcttctgtttctttaattgaaccctaaagtctaaatgaagccatcattgatgaactctggatattgcta

SEQ ID NO: 247293 - DNA, 426 bp, Glycine max
agctagcttccttttgatctctgacacgtctcttgtacttatttattgtgcaacaaaggatgccaagtatctcaaagcggctaaccaaaagttgcatgtcatcaagtaataatccccggacgaaattatggtatgacagatggctatcaaactcatgggcggcactggacccttccgccgaggcgtccctcctagatctcttcgtggaaagttttttcggagccattttctgcgaggacaaacgtttggagagtgaatttacaaggaaatgtcattttagagcaaaaatggcatactaatcttttcgacttataacaaacttacgcacatatttccctgaagaacaacgattatgaatgtgcatacacgcaaaatatcttactatctatatcgatatacaaagatattcaaaacatttcaactact

SEQ ID NO: 247294 - DNA, 539 bp, Glycine max
  unsure (1)..(539): unsure at all n locations
ttttttttngggcgtaatgatgcatgatacacncacgcgagagatagaatactaagcttctagccaatggacttaccttgaattaattcctttgcttgctctcttgagcctatattcccctttctttgttgtgaagctcattacaagccttaagtgaaaaaccatgatatcaccttacccttaaggaattctggagctttggaattgttttgggaataagttgggaataagtgtggggggtatgtctcattggaagatataatttttggccatgcttaatgttttattttggccatgcttgatgtatatatatatatatatatatatatatatatatatatatatatatatatatatatatatatatatatatatatatatatatatattgtctagttcatgctcgtaatatcacatacgcactgttaaaaaacatgaaaaacaacattcgctngctgtgtattctcacatttgtactgtgcataaaaaacaaaagtgagtgttatatgtgatgttctgtatgacgatctacttcgacg

SEQ ID NO: 247295 - DNA, 258 bp, Glycine max
  unsure (1)..(258): unsure at all n locations
gcttgtaactaatactntacccgtaacagttgttatataacaaatgacaacaaacacatatttagcttcagttgttggtaaagcgattgagttttgtttcttgctttcccgagatattatataaggtccaatgtaatggcatccaccacttgtgcttttttcttcaactgtgtctcctgcataagcaacatcatagtattctattaccctagaatcttgatctatcttataacataaactctggttaatggtgcctac

SEQ ID NO: 247296 - DNA, 392 bp, Glycine max
tgactattcactacattatcttccttctaaattgtgtgtgtgcctacatgaggcaaaggaggctattcgacgcttgaagcatatacttgatgctctacttgattgtacatgttcgtttgaagacatacaccttgatgacaaaacgcatatctgcgcacgaaatggtcatgaacaacactctcaacttgatgaatataaaacaaatatggatccttcaacagagcgcagaacttcaagatattatcttcttgataatatcatcagtgacatctcaaaaggggtaacaacttgacactctctcgaagatgcatgcaataatatggcttttgtttctctaattgaacctacaagtttacatgaggccataattgatgaactcttggatattgcta

SEQ ID NO: 247297 - DNA, 312 bp, Glycine max
ggaaccacatgtctaagtgaaagaataatgattggcgaactcctcttaccaccaaacacctcattaatgtctattatatttatctgcctctctcttgccattatagatcacatgactgatcgtacttacacctttctttatgtctctcactagttgaccatagtcaaagttggggttattgtccaccataatcttttgctgagtgaaattacttgaatggctaacctccatttcagcatcatcaagatatccaacagtcaactttgcaatgtcaaccaggaatggatcatccatagagctatgttttgatga

SEQ ID NO: 247298 - DNA, 591 bp, Glycine max
  unsure (1)..(591): unsure at all n locations
tttctaccttcacatttgccncaccatctctacacttttgttcattannncnnntccccgggtttgtgcatcatctcgtccggatcttanaacgactgcagctgcaactaacttgttaagagaaaaataaatcttacttatcaacctaacaatattggccaagctggatctatactatattccatataggaacgttctcatatcaccacaatactctaaatattagtaaatcacatactcgtagccgctacatctagttctatatcaaaatgaacaatcctctttcgaaacagctctgattcaaacgagttgcacccaanatgttgaaccatacccctccctagacctattaaacgctagtatcactatcataatcacttccgctgatacatttaccctccggcccaataattcttacacggaaacttaaaactattttcgtcaacgcacgaagccccactgtcctgggttcattccaacaggtctggaatacccttcacaatcagggtctagacggccacattcaactataaagagtcgccggaaacacaataaacttcccagacttactaaccccgccttccgacttcc

SEQ ID NO: 247299 - DNA, 81 bp, Glycine max
  unsure (1)..(81): unsure at all n locations
actaagcttgacaatatggtaattgaggaatcaattgttgagggattcacatccangcatgtatgagtgggaagtttccat

SEQ ID NO: 247300 - DNA, 453 bp, Glycine max
acttaattcaccctccttcttaagttattgaggtcacttatccaacaaaagatgctagtatatggctcctgtgctttttaggcccaatgatatgacctaatagtgatagttggccgactctattataaaagttcctttcacagcacgtatttgactataatacccttgtacctattcttcttaatgttaaaccttgtcattaactcaatggatcctcttgtaggcattctttctccagcaaatttgaagagcggatcatcgtggggctaaagtattgattcaggtatgtctatctgcttaaatgtactccaaaataagatatccaccgagcttccttaatgaatgagggttttccataccaagtagttgtttgataaatctggatttgagtgtattttggtgtgaagtttcatgtcatattcatgcattttaatatattttatttaataaatc

SEQ ID NO: 247301 - DNA, 448 bp, Glycine max
  unsure (1)..(448): unsure at all n locations
tatcacagactcatctatgaaggagaactctagttttcaggaccaattactttatttcaagggtcgtctattcaatacctgatcatagcttcaagtctagaaacattaacaagggtttatgtgaaatctatgtcttcttgtgggttaaagccttgagctactaacatagctttgttccttactaccttatcttgttcatccaatttatttctaaatgcccatcttgttcccaagatgcttttgttctcaggcttgngaacaagcatcttgacatcatttccagtgaactagtggagttcttcttccattgcaataatccaattattatatgtgattatttcatttatcatcttacgttctatttcaaacatganagcataagacataagatctttaaaatgatgatctggttttgactccttcagtctgatcttcaataatctgatct

SEQ ID NO: 247302 - DNA, 391 bp, Glycine max
  unsure (1)..(391): unsure at all n locations
agcttgtgtaggatcaccgatcttggttcgtttggactcctaacaagtctgagcaagcggaaatggttnttgttgattatgaggtatattttgtgctctctatttgattgttggattgttgttcatgtcatttattgattatatagttcgcatatttcagggtgatcaaattcatgctatttgtaaatcggaccacctcaagtcttggaaagctgatttgaaagagaattgcacttatgttatgcataatttcaaagttgttaagaatgatggccaatttagagtgtgcgaacatgagtacaagttatttttattggagtgacagttgttagagaagctgatttcatgaactgcttttaagaattagatttgtgaattgcaatgttgtgct

SEQ ID NO: 247303 - DNA, 484 bp, Glycine max
  unsure (1)..(484): unsure at all n locations
ngcatacaagattctncttgcttgacacttcataaccttctggttgggttatatagatgtcttnctctaaatccccatgcaagaatgcagttttaacatctaactgctccaagtgaagattctctgcagctattatgctcagaataactctgatggtagtcatctttacaactggagagaagatctctgtgaaatcaattccttgtttctgctgaaacccttttaccacaagtctcgccttgtatcttcttctaccgttagattcttcctttagcctatagacccacctattctgtaacgctttctttccttctggcaatntagttaaagaccacgtcttattcttctgaagggatgtcatctcatctttcatcgctagctcccactcaataatgtcattcccttgtgtagcctcactgaaacattttggctcaccagcatcagttaacaacaaataatgcaatgaacgtgaatacctatctgg

SEQ ID NO: 247304 - DNA, 410 bp, Glycine max
  unsure (1)..(410): unsure at all n locations
caagctatacaaatngaacntatactttgctnatccaataagattagatttatatacttgctagatgcatagtctattaaaaagtaatattacacgaagttttggattattgaatntagtctcgtagcagtttattatttattataaattgaaaatcctttttgaacactttgtttaatcgggttgtactagttattgaactaaccattacttgacctatntaatgtagtatacatctcatatcatctcactgataatatttctctctgcaccataatttcaacatggaatcaaagaagtatatcagtcaacgcatgatgcctcattttgctgtgttttctctccagcagtgtttggaatagctcttacattcagtggtttatgaagccaatactaaagtaagaaaagtg

SEQ ID NO: 247305 - DNA, 480 bp, Glycine max
  unsure (1)..(480): unsure at all n locations
tatgttgctaacttgaattcaggggtcaggatgataaaaggctttcttaatcgcatttgagaacaaatttcaagattnttatgaatttattgagcattttgcactcagcatattgatgtttattgaacactgaaatcacacttgttgttccagacacaaaagtcccctttagagagtatcctcttttggggataaatgtatgttcatgatctaatctattatgttatcaattttggtaaaaaattattctttattttatttattattttgttaaattgttaatttgattagtccttgattaaaattagaaacttgttatcatggtatagattatgataatgagaaataagttttataattctaatctaaattattcttgagataactctatgatataattaagacttgagaattaaatgaaagaagaaaaaaaatttcttaagtcattcattgattaagtataatggtgttaattattat

SEQ ID NO: 247306 - DNA, 484 bp, Glycine max
  unsure (1)..(484): unsure at all n locations
taagccaacccctnttctcatacaaaacatgttgatgttttactctatcaatcaccaacaagttgaaacctaactatatgcaatgattaagaaaaacaaagaaaaagagcagggttgcctcccagtaagcgcttctttaacgtcactagtttgacgcatattacctcaaaggtcttgtaactacagaatggtggttaatctctcaatgttcccaccttgatacaacttcaacctctgaccatttactatccatgttctgcttggagtttctgattgcggattaaataattccactgctccatatggcttgacttccttgatggtgaatggtccagaccatttagactctatcttgcttggaaacaacttcaatcttgagttgaacaacaacacttgttatcttggcctagagtccttctttagcagcttcttgtcatgataagccttcactttttctctgtacaatcttaaagactcgtatgca

SEQ ID NO: 247307 - DNA, 467 bp, Glycine max
  unsure (1)..(467): unsure at all n locations
actctattaaaattagtttggtgatgtttttgtgtggtgatgatgaccgttaggatgacaatggtggtgatgacgttgatggttgtagtggtgtcgatcgcggcggtgctaatggtgatgatgatagtgacattggtggaagtggtgattgtgacaggaatgttttctttttaaaaattaaaaaccaaattcttacatttataattgattntgaaattgaatataaaagtttttgaaattgagttaaagattgtttcatcaacattttagttaaacacgttttattttaaaaactacattaaaaaaaaaacatacaatcactcaaaatgtacccttaaacattaaattttactcaggatataaaacctctactttttcttttcaaacttcaacctcactttatataagaatattcagatattgtcatatttccactgaacttgtagattctaaaatgtaaatatata

SEQ ID NO: 247308 - DNA, 493 bp, Glycine max
  unsure (1)..(493): unsure at all n locations
ntgaagagagaagatatgaacaacttatgtgaatcattctttctatttaaagctctntgtaaaactttgtatagatactaagctcttagaataccttgcaaaccttgagagaaaagactaaagtgatgagtgatatatttgtttctaagacaattacatattagtcattgtgcagagttccaacaaatatttttttgatttgtttagaaccaacagtggtttggtaggaaaaagaatattaggttaattaaagcttgcgatagagcttatctttgtaagatccagaagtggcaatgaagaatacttgtaacttttgttaagttagtgaaaacttggtgggttgttaatgtgacatcctagaatttctacccggcaatttgtaagcgttacattntaaataatcatatatatatatatatatatatatatatatatatatatatatatatatatatatatattcttggtagaagtatgtacattgcgggagaag

SEQ ID NO: 247309 - DNA, 431 bp, Glycine max
  unsure (1)..(431): unsure at all n locations
cactctntgtaccaccaagttcctaacttgatcacttttaaagtcctgctgagtgagtataaagtgacttgcaacaatttggtgagtaattaaacactcatctgtatgtncaaatttaaaatcatatacatatctaagatgaatttaatgttaattntagaatgtgtcgagtaccatgtactcatttatgaaagccgtatgtttcacctatctgaatttggatgggattacagagtgcaagattgtttataataattggaggaagactacaaaaattggaaatagatgaagcacttttgcacaatcataaaatctgcaagctggtatttgagttctcagatacaacttctaacatttttattntggaattgtttgtaattaaattacattatattatactattatctgtaaatncttgttatatgtactct

SEQ ID NO: 247310 - DNA, 487 bp, Glycine max
  unsure (1)..(487): unsure at all n locations
ntaaccttgagctagcgtatactagtgccaaagaatggtatggtaggatagctgcatatagctgatgctgcatagcgtggatcttaggctgcattgcttgggaaaacattggtgagattatttggcttgatgtgcttgagggaaataaactgaagctctcatagttattggtactccagtttagattgcttttattaaaactctctaatgtctttccctattttaaaagacaaaataattcctgatttttaatattactttattagtttatttgtgacatagcctcatagctcgaataattaatggaatttataaatgctcatcttattaaaatacagcctanatattcagatattattaattgttagtaactcttacatgaaccctattggctattattaaatttgacgcattcatttttattcttataaagtgatatcatactcccttgcttcatgacatgtgtatcttctatatatatacatgc

SEQ ID NO: 247311 - DNA, 167 bp, Glycine max
  unsure (1)..(167): unsure at all n locations
ttatgtgtgaacttttacgcacttggatcatattgaaaatcattgtcaaaacttaataaatgaagttggctttagccatgttataactatcgaacaaattgacattaatcagcatttaatcagtgctttggtggaaaagtggagacccganactcacacgtttattt

SEQ ID NO: 247312 - DNA, 463 bp, Glycine max
  unsure (1)..(463): unsure at all n locations
cttatccanggctcatctnnggtggtgaagctcttctttcatggcttattcccgagtggatggcaccttctctcaacttttcttctttgtctttccctgcatcttcattgtggaaaaataacattaaaaggacttatttgagctcaagatcagccttcataaaagccccacaagcaagcttccatcaagtggtatcggagcacaagagcttcaagtaggtgctccttanaccctcattaattnntttttggcttaccttctcttccatggggtgttcttcattntatccatgtatctcttcacatgtcttgtgctanatgttgtaacatgattctttataattcactgatgatcttgtataaaagctgattattnttatggtcannattctgtcatgtcttgaccatgagtgtgttagttaggtccttgagtttgcttgtatttttgtgctgaacttaaccan

SEQ ID NO: 247313 - DNA, 400 bp, Glycine max
acacatatactgcaatcgagtaccatatctatatttcagaaaatattctcaaccgtcacatctttatatgtggatcttgactggctatcaaaggcctatatatatgtgacttgagacacgaatgtgctaacagttctttggatcacatacgtcttatcctcttaaacagcaaaatcgttttatcctcttacaaataccttggccgaaatacttgtgattcaataaagaattatttgagtgctcaaattgttcaatctatctctttcaagagagatctcttcttttcttcttcttcattctgaaaagggattaagagaccgacggtctctcgttgtgaaagaattctaaacacaaacgaagggtcgtccttgtgtgtctagaacttgtaaaaggaatttac

SEQ ID NO: 247314 - DNA, 297 bp, Glycine max
  unsure (1)..(297): unsure at all n locations
aatggttatggttagcttattaagcacttattaaacttttcacactggtttatnttgatatgtttcatgtaccaacttaataaaaataagttctctttttaaactaaaaagggtcgtaagtcattttgtaaacttaaccaaacagttactctattgcctatatgataaaatatacccaataagtgtgaattaatttgggtcagcgttctttaaattgactttatagtagagtgatttgtatataaatgtttttattctaaaagtaaattaacatcaaattttaatataaactcttta

SEQ ID NO: 247315 - DNA, 120 bp, Glycine max
aactcgcattcagctggcgtgtccaaataccaacgagaagttataatgagtatttgctcatgacgacagtcatactacttaaatatctctcgcaagcgtagacattactacatagccact

SEQ ID NO: 247316 - DNA, 166 bp, Glycine max
  unsure (1)..(166): unsure at all n locations
acctcctagactattcatatgcattcggcatataattctcacatgctctctaccatagagtggctttggaacacctgagcctcacatcagtgctcctgacctacacattaactttcttntcgctcaccttctgtctcatcgatgacattaatgcgaatacatgaac

SEQ ID NO: 247317 - DNA, 470 bp, Glycine max
  unsure (1)..(470): unsure at all n locations
agctnntataattgaattaaaacgttcagaatcttctggtaatcgattaccatatatgtgtaatcgattacacagggcaaattttgaattgaaattttaatagctgtttgtaaatcagttctggccactggtaatcgattacatcctctggtgatcgattaccagagagtaaatttcttgtgaaagactttttaacttaaaattcttggccaaaccttttgctacttcaattggaattcccttcctatttaatataccctttctaagactctatagacagtcttgatcatccatctcgaatatctctcaattctttgtcttgaatgaagctttgagacgcatgtgatcttttggcatcatcaaaacatcggcttgatcctttagctacaatcccccccttgtgatgatgacaatccttgaatcaagacaaactatgtactagatgattatgcgttcacacaatccttact

SEQ ID NO: 247318 - DNA, 266 bp, Glycine max
gcttataatgtatcgctacgctcgaaattaaacatccgaaactctttatatattcaaatggtcataacgctcctcacggatgtccgatgccggcgcataatatgtcgagaggctcaaatattaacaacggaagctcttgagaatttaaaatggccctaaccttgtaaccccgatgtccaactcacgctaatagtatatcgagccacttaacattaaacatgtgcaactttcacgaacattaaatggttataacttttcacaccgat

SEQ ID NO: 247319 - DNA, 455 bp, Glycine max
tcaacatcagaccacttcacaggtgctggaactattttatatggatctgatggggcctatgcacgttgaaagccttggaggaaagaggtatgcctatgttgttgcggatgatttctccacatttacctgagtcaactttatcacagagaaatcagagacctttgaagtattccaagagttgagtctaagactacaaagagaaaacgactgtgtcatcaagagaatcatgagtgaccatggcagagagtctgaaaacagcacgttcactgaattctgcacatctgaaggcatcactcatgagttctctgcagccattacaccacaacagaatggcatagttgaaaggaaaaacacgactttgcaagacgctgctatggtcatgcttcatgccaaagaacttctctattatctcttggctgaagccatgaacacagcatgctacatccacaacagag

SEQ ID NO: 247320 - DNA, 421 bp, Glycine max
  unsure (1)..(421): unsure at all n locations
tgattaatacttgtaactngntgaagttagtggaatttggtgggttaccaagaattggacgtggtcttagtggttgagacgaaccagtataacttcatgtgtcttatcttacttgtttttctttttcgtgctttaaactgactcagagtttgaatttgatttttgcttttgaaaatttgtatctgttctacaaaatctaaggctatcatctgaatcgttttgtgaaaatntgatctctattcttttacgtttttattattagacgataatgttgttgttttagaaaaaggctttaaaatttctaaaaatcacnaatccgacccccttcttatgatattttcctttatagtttggtattagagctcaccctctaaggattgagcacctaacaatgtctagaggaaaagaatctgatgacaga

SEQ ID NO: 247321 - DNA, 395 bp, Glycine max
  unsure (1)..(395): unsure at all n locations
tcttgcgtagccgctcttggtgctcacgaaatcccaaaaacaaatccctcttattactagctantttgaattctttagttcctgaatgtacaaccttcaaattgttgctcgttcccctatttcttttttgcaaaaaagaaaatcaaatgctgtcaaaacatggatgaagtcctaagaaaatcaatatcaaagaaaacatggatgaaatcacaattaaaaagcacaactacctatctttcagagtcctttggttaatttgtcttgtctccttatgtggtggggttttgtttaataatcttatacttttgccttccaaaaaaaacttatcactaatcctcttttcattaatcctctcttcaaaaaaaacttatcacctgcctccattactcctcttc

SEQ ID NO: 247322 - DNA, 475 bp, Glycine max
  unsure (1)..(475): unsure at all n locations
gcttgaagtatggactgaatgcatganatngatgatgatgacggccatgnttgattgtgatagccacttatccaaaaagctaaccatgtgcttgaatgatttatcccttgcacccatatttgagctgaatgaatgtttgattgatggaaccttaagcctatacgaatttatcttcttctacattttcttaggttgtaggagagcatcatccatagaaaagcttggtttaaggcaaaatcattccaaatttggtggagttatatgtcaaagcaaatttgtcccaaatttgggggagacaataggtaagaaataaaatgcttaaaacagagcatcatatacacactgttttctatatatataaaanaataggagaaaaaactggaagtacaataaaagtgttcaagtgtgtgtgctgcaaatcaatgaanagaaactaagtgcctaaaaagaggcaagtattggtgtgggaatgatt

SEQ ID NO: 247323 - DNA, 482 bp, Glycine max
  unsure (1)..(482): unsure at all n locations
ggtcttcgccagtgaaaggatcgatgtggatcttatntttaaaggcaaatctgatcatcctactaggacgactgagaaaactggggcaaataaagagggtgaggataatggagaaacccatgttgtgactgccattcctgtacgaccaagtttcccaccaacccaacaatatctttactcagccaataacgaaccttctccttacccaccacccaggtatccacaaaggccatccctaaatctaccacaaagtctgtctaccgcacttccaatgactaacaccacctttagcacaaaccaaaaacaccaaccaagaagtgaattttgcagcgagaaagcctgtagaattcaccccaattccagtgtcctatgctgacttgctcccatatctacttgataattcaatggtagccataaccctagccaacgttcatcaacctccacttttctgacgatacgactcgaacgcaacgtgtgcttat

SEQ ID NO: 247324 - DNA, 466 bp, Glycine max
  unsure (1)..(466): unsure at all n locations
cttctattttgtgcttgtagacacaaactctgctcatcgagggagaacagatcctataacctcctgccgcggctacatcacccgtgagctgacgctttctagatccacggaccaacttctacatattgacttgctacctcccaatgaagggaattaccttttatcgaacgagtgagacagttgcactattacatagaccaaaattcagactcgacgctagacataaccatggccaacagagagcgaattcttgaggacctatcacatagtttcgataggggctgctcctgaacgtaccgtgcaacctacatctgataagctactatatggctatgtgcagaacgatcctgacgtgcgagaaacaggactttgtttgcttagcgaatattgctaactagaaaagcgaccagcattatgttctctctcgagctcatgattacccctcgtgaacagaaaccacatcctn

SEQ ID NO: 247325 - DNA, 66 bp, Glycine max
aaaccttcatttttctttcttcttatccgaatcacctctcgctgaggccaatctgcctgtttatcc

SEQ ID NO: 247326 - DNA, 378 bp, Glycine max
  unsure (1)..(378): unsure at all n locations
agcttaaacattatactntgagcgtctcgatatattactggactcaatcagacatctgagtaaaaagttattgccgcttgaattggctcaaaggttcaaaattcaatttcgagcgtctcgatatatttcgggactcaatcagacatccgagtaaagagttattgtcctttgagttggctcagaggttgaacattcaatttcgagcgtcccgatatattacgtcactgaatcggacatccgagtaaaaagttattgttcgttgaatttgctctgagcttcaacattcaatttcgagcgtctcgatatattacgggactcaatcagatatccgagaaaaaagttattgtcgtttgaattagatcatatgttcaacattca

SEQ ID NO: 247327 - DNA, 438 bp, Glycine max
  unsure (1)..(438): unsure at all n locations
tactaagcttaagccaattatacgacaataactntttactcggatgtctgattgatgtccgtaatataacgaaacgctcgaaattgaatgtttaagctttgagcccattctaacgataataactntttactcggatgtccgattgagtctcgtaatatatcgacacgctcgaaatngaatgttgaagctcttagcctatttaaacgacaataacgttttactcggatgtccgattgagtgacgtaatatatcgagacgctcgacaatgaatgttgaacctctgagccaactcaaacgacaataactntntactcggatgtcctgatgagtcccgtaatatatcgagacgctcgaaattgaatgttgaacctctgagccaattcaaacgacaataactttttactcggatgtctgattgagtcccgtaatatatcgaga

SEQ ID NO: 247328 - DNA, 387 bp, Glycine max
tcgacctctatatttcttatccaagtccttattactactaatagacaaaccttcaggtggttgcacgtatattatctcactcaaatcaccattcagaaaagctatcttcacattcatttggtgcaactgcaaatcaatatgagctactagggccataatgattctaaaggaatcattcgttgatacaagagacaaagtctctttaaagtcaacactctccttctgcataaaacccttttacaccagtctagccttgaatatctcaatgttaccatataagcacttctcttcttgaagacccatctccaattgattgccttcaaattctaggtaattcaactagcttccatatgccattaactgacatacattgcatctcttcattca

SEQ ID NO: 247329 - DNA, 469 bp, Glycine max
  unsure (1)..(469): unsure at all n locations
tatgcctaagctaattataacttgtgaagaagttcatttcatttcttcttattttcttcttatacttcactgttacgtatcagtgaagtattcaagagtattggtattggataggcatggatatggatacatgaagcaaatgtgcttcatagtatggtatagactaaaacgctattgttaacattcatcaattcataattctttaaacttggatgttttataatttgcggtccttgattctctatatcattnttttttgggtggaactcgggtgattctaatatactatagtttctctgttttaatagtccacaacatgtaagtttttgaaagcatccgtaactcatgatattggtagtggtgtttctaatctgtgctcatgggcacatgttaagaacacanaaataaagttaattagaagcattaataggatacatttaattnttcttaacatgtgccatcgaaacac

SEQ ID NO: 247330 - DNA, 469 bp, Glycine max
gtcacctgcggcatgcaagcttcataaattcaatatataacatattatctgaatcgatatgatggtgacagggcgagtaacccatataaacaaatattgtggttcaaaattctagcttgtgagattgatatggtctaagaaaaggataacaagcacaagaaaatacttttatgaatgtgtaatcaggcgttatctaaagcaaaaaatgatatggagtatcaaatttgattgtcagactcagtagatatctaaacctaaatatgacataagaaacagtcagcacagagataaattccaacaaaagtaacatacgagcatggatcaatatgattatgatttgtgaacaaatagggaaagttttgaattctaatatacattgcgacaaaaatgattctagtggccacaaaatacatgataatcaacttttattggatcaagacagaatataacattcaaaaccacatatcct

SEQ ID NO: 247331 - DNA, 473 bp, Glycine max
  unsure (1)..(473): unsure at all n locations
tcatgatgaatcaagaatgatttaatgatcacaaagatgtatgactttaagctcanaagtcaagaacacttcatgataacaaagataatgatctcaagaatcaaagaatgagttcaagattgaatcaagaacacttcaaggttcaaaaggaaatttgatttctagaatcaagaatcaagtttcaagattcaagttccaagaatcaaaatcaagattcaagaatcaagagaaggctcaatcaagataagtattaaaaagttcttttaaaaactgagtagcacatgaatttttctcataaccttttatcaaagagttcttactctctggtaatcgattaccagattattgtaatcaattaccagtagcaaaatggttctcaaaaagctttcaactgaatttacaacgttccaattgatctcaaaatgctgtaatcgattacaatgatttggtaatcgattaccagtgtgtttgaa

SEQ ID NO: 247332 - DNA, 410 bp, Glycine max
  unsure (1)..(410): unsure at all n locations
agctntacagatttggtcttcgccagagaaatgatcgaagtgggtctgaaaagaggcaaatttaatcatcctgcttgggcgaatgagaaaactggggcaaatgaagaaggtgaggatgagggagaaacccatgctgtgactgccattcctatacggccaagtttccaaccaacccaacaatgtcattacttagccaataacaaaacctctccttacccaccacccagttatccacaaaggccatccctaaatcaaccacaaagcctgtctaccgcacttccaatgacgaataccacttttagcacagaccaaaacaccaaccaagaaatgaattttgcagcgaanaatcctgtaggttcaccccanattccgatgtcatatgctaaacttactcccatatctacttaata

SEQ ID NO: 247333 - DNA, 391 bp, Glycine max
tctagacaaacttaaacgaaacttcgtacttagatccctcttagtggactaggctcatctgaatcaacttacgaacgtgtagactaagtgcacctaagcttgatcttcacatccctcctgttggactagacttacactaaacaacattatcatcacagcatattaagaaaactaagacttagtcctcatatccctcttgttggactgaggaacaatcctgcttctatcaagctctaaggcaacagtacatataccactgctaaagtcacctaaccatgcacaccaatgggtgatcagaccaggagcgtacaaaatttaatcactgcatgaggccttgatcacaatacacacaatcaattagatattaacggaattacatcagttgttcctt

SEQ ID NO: 247334 - DNA, 417 bp, Glycine max
  unsure (1)..(417): unsure at all n locations
agcttntgtatgcntttcattctttatttcatgcttcaggtgcaaacaggagtaaacaaagaagcaattaatatattaaacaatagagtcagctactatgaaaaattatatattaattagttcagctaagcggacacaaagtaagagaaaaaatctttcactattaactaatgacctcggttgtgcacgaccggggacaatgtacaattactcaaatttcaaattctcttttgtatataaagtatcacatcaaaagtcaaaaccatcagccattatcaactcttgtgggatttcgtgacttggcaacgtaggaggaacacaaacacaacacagccatgaatgcaaaccttctcagaaacttgtccttccacgcgcgccgtcttcgcttctctcccactcctacagttacagcaccca

SEQ ID NO: 247335 - DNA, 421 bp, Glycine max
cggcatataggggaagcagttgttccaagagcactcatgtattcttgtaaggatattgtgaagtttaataaggaggtttttggtagcgtattggggaggaagaaggagattgaatggcgccttaagggtacactgccttttttcatgcccacacagtcattcatcgaaagcggaatcgtattcatggaatgcttgtgttatgtggaagctggtgcactgatgcccaaatccttaagcaagaagcattgaagtacttttagtcgttgttttgcacaacggaagcgataagtggagagctactgggtgcgaatgtgaacaaattgccacatgaagcacgattgaggctcattgaacctgtgacgaatagcgaactatatgcgacactcatgtccatgagatcatactgtgggagatgatgtgt

SEQ ID NO: 247336 - DNA, 414 bp, Glycine max
  unsure (1)..(414): unsure at all n locations
agcaagctttgttntcaatttcgaccatctcgattattaccagactcatccggacttccgtatataaacttattgtcaattaaattttctcagagctttggatcaaaattttgagcgtctcgatatatcacgggattcattcagacatccgagtaaaaaattattgtcgttagaatttgatacgagcttccgttttcaatatggagcatctctcgctaaattgccataggctatctggcatacgagaaaaaagatattgtcggttcatatttctaagagtgtcccttttcaatttggagcgtctgaatatatgactggactcaaccggacatctcgtgtatgaagctattgtcatcttaatttgctcacagcttctactctcaattgtgagcgctcattatattacccgattca

SEQ ID NO: 247337 - DNA, 266 bp, Glycine max
atacacggatgtcctgttgagtcccgtaagatatcgagacgctcaaaatttatatccgaagctctgagaaaattgaattgacaataactatatacacggatgtccggttgagtcctgctatatatccagacgctgcacaatgaaaacgaaagctcgtaggaaatacaaacgacaatgactatttactccgatgttccattgaactcggtcatatatgaagacgatcaatactgagactacgaagcgttcctcaaattgaaatgaca

SEQ ID NO: 247338 - DNA, 465 bp, Glycine max
  unsure (1)..(465): unsure at all n locations
agcttcaccttctggtcctcctcatagctgttgcatgagataacatgctctattntcatcgcccactccaagtaggcctccggatcattctttcctttaaatggaggaatgttgagtttaataccatcaattcggttttgtctaggaacaccatcattccctcttctcctcctttcttcttcattatgatctctattctccattngattcaacctctcatggagcgcatcatctcgttgtttcattaacctctccaaatgttacatcaaagcttgcatttggaattgctaaagccccactccatcattaagattagtacctgacatctcacacaaacaaatcaaacgcaacaagacaattatagtttgtgtttgaatacctcacccactcaagtgtatcacacaattatggcttttctctaatgaaacactcttaccttctaccactcgtagtccccttgagttc

SEQ ID NO: 247339 - DNA, 415 bp, Glycine max
  unsure (1)..(415): unsure at all n locations
tcttatccaaggctcatcttggtggtgaagctccttcttccatggcttattccctagtggatggcgcctcccttctcctcttctcctttgccttccgctgcatctccatggtgaataatcaccattgaaggacctcattgaagctcanagatccagcctccatagaagctccacaagcaagcttccatcaattaagatcacattgtatgtaatttccatgccgcttatccatanttgatctatgtcatcgagtatgagtaacagtgatgatcattgtggcttagtcaagctaaattatgatgaanactgccgtggtttcctgttgctatatgagatggaccacaatgtataaaaggagtctaaaagtaaataacgtacggttgcgcgcctaaagaattatgtgatataaatgtct

SEQ ID NO: 247340 - DNA, 343 bp, Glycine max
tgagaataaataaacatcaatggtgatgaagaataaataatattagttgatttaactattttacagttaataatctcaattgttgataagaaaatcaatgacgtgcatgcataacaaatcatgtctaagatgaaataccaacgctaattttggttttatatatatattagcaactgaaattacttattctattctttgaacagaagaatcataatattggtataagatttacaggtttttttttaaagatatgttctacagtttacaacaggaggggaaatcacaattaccaaatgaagaaaaaaggtcaaactgattgatctctgtgtactgaattcaactc

SEQ ID NO: 247341 - DNA, 412 bp, Glycine max
tatgctctgcatatgcaatttgtatacttatatgcggggtacataaaagcagattgctggttgctgtatatgttgggttcgtttgaagttatttttaatgtattgactgacgatgaaagattaacttatattcatgcagatcgatcacgtgcctctctatggaatttaagttacttgaataaaaatatcttgtaagcattattccaaatttactaatgcaaaaagagacgtgtatgggacgtgcgcatgaatgtgtcaagacgaagataccagtctttcagttgcacttagtcaatctcacataatttattacgacatctgatgaaacacacaaaagatcttatacttctcagtgtaatctccctctactttcttccattcatagtctaatgtagaaatatttttctattgt

SEQ ID NO: 247342 - DNA, 447 bp, Glycine max
  unsure (1)..(447): unsure at all n locations
agcttctccatgcctctgggaaccacanagaatagtggtagtcctgtctgcttaaaacaaaacaagttatatcacagattatttcaatacctattcctttatcaaacattttagtaaacaccataacataatgaaagactagttggaagacataaagacaccgtatcaccaattcaaatgccagctagagaaccaaaaaataaaaaataaaaaaccactatgaatttactcttggaactgaaaaccacactgaaactgttccgcgaaaccctctggttcacaatcccattgacactattgttgctttgcatggtgccccgaatctgcaaaaaaatggtgccgtatccaccangcccaaaaggcctacgtacctctaataggcaacatgaacatcatggagcaactcacacatagaggcttagcaaacttagcgaagcaatacgacag

SEQ ID NO: 247343 - DNA, 453 bp, Glycine max
  unsure (1)..(453): unsure at all n locations
cgctagaatgctntccaaaatctaagatacctatctaacactatataggtaggtatgccatgaagcttaagtatctccttattgtaaatgtctgctaatttgtccaatttgtatgtctccttaattggtaagaagtgagcagacttggttagcctgtccacaaccacccatatgacctctagacccaaacgagtttttggaaaacttgttacaaaatccctagaaattcattcccatttgcactcaagaactcctagaggttttaaagttcttggttttgaagttgttccttcttaatcaactctntaatgtcactaccgatctccaatctattcaacttcatgatcaatgcattcaaattcaagtccctaaactcctctatcaagttcatcttttacaccatcaagctagacatgtgcaaagacttcctactgagaggatcagccactacat

SEQ ID NO: 247344 - DNA, 413 bp, Glycine max
  unsure (1)..(413): unsure at all n locations
gttagtatcatatacgacaagttagaatatatttccattgagctggcatatatgtactaaataaattcattaaggcaacaaaatggaacggcccaccaaaccacacacatgagctggtggaccaaaccctaagtaaggagtggggcctgttatagctacagatgcttgagtcattatgtgggtatgcttcctaagaaactntgttttctttatatgaatatattaatataccttccttccaaccaatgaaatcatgtataaaatcaaactctgttntgtaacatagctacttaaaagttaaataactattaattntactttgttgacaagcctcttgtgtggcaattttatttcacaggggtaacaccnttttagagaaagtngataattaacttcaacagatggacaacata

SEQ ID NO: 247345 - DNA, 466 bp, Glycine max
  unsure (1)..(466): unsure at all n locations
tgtagaacaccaaagatgtaagaacaaaatttgaaagaagtgttatatttgaaacaataagagctaatatacaatcagatacctgaaagtgataatttatgttgctatgatccctaacaatgtataattagtccctgttagattacatttatctttacatgatcttgtatatattattacacaaaaacttatgattctgattgatatgtaattacctaataatcagtaattgattgatatgtaatcaatattgattctgatttctccattataaataaagatgagatgtggtcatctaagacacaaaattacagtaaaactaaaacactgctatatggtatcaaagcttaggttattcttgacagaggaataacaaaattcgtcctccacaacctactgtcccagatggacctctctgctagtcatcctatccagcaacctattntcacatccagaggacctttct

SEQ ID NO: 247346 - DNA, 385 bp, Glycine max
  unsure (1)..(385): unsure at all n locations
tgcataacccncacacctactctattacaaatcaccacaacccccaacgccagcgccaccttcaaccgaatcctcatcctccctttcttcacatcaattatataagacttcccatccttctcacccctccttcccttcactgccgtcaacatatgattctcctgcaaatcaagcacatagctaaccatcccactcaacaatatgtctataaatccaaaccccaccaacacaaacaatatagagaaaagcttagtggctgtactattgggagtgatatcaccgtaccctattgtgcacattgtcactatacaaaaatacaatgcatcaactataggatgagtctcagtagctgtaaaattatgacgattgaaccaataaatgacaa

SEQ ID NO: 247347 - DNA, 486 bp, Glycine max
  unsure (1)..(486): unsure at all n locations
aagcttaatattatgctatctttttttgttacatcatcattttgtttctaatatgcaatcttattattttaagagaaataattataatataaatcatcaaccaacacgatccgtgcacacacggttcaccgactagttaatcatcaatggcaataacaatgacacctcccgctctgattttcttctccgagcgacatgctaaattagaatttaaataataatgggaatcggatgcattcttgtttgattcaatgccgaccaaacataatcaacatatcgacagaaaaagggtaaatggaatataaatacgagaactgccatcgtcgatgtatatattcatctacctgtagaacattcgacgacttaaaaataagcattatcaacagaacccacgttaaacaatgaccctcatcaattcatacagcanacacatgaacaagtcaatggtttttgactgctccacantttacactcgctgaaagccat

SEQ ID NO: 247348 - DNA, 386 bp, Glycine max
  unsure (1)..(386): unsure at all n locations
agcttatataanaatcataaaattaatttcatgactcacaccatacaaggtttataattgtaatgatatgctctaaatttcctcaataatgttgacgaaacatttggatgaaggccacagatattacattgagttggaagtacacgttgttctcctttgttaaaggagaagaagtttcacctttcttatccttgaattgatcttcacaggtatggtctangcagttccaaagtatgcacacattttatccatatatatgctctttctactttgcaattaattgaataaagcccaagatctaaactacaaatatgaggctgactgaaaaattacaattaacccagtgctgtccagtcaccatttgaaattccttaattttgccccct

SEQ ID NO: 247349 - DNA, 437 bp, Glycine max
  unsure (1)..(437): unsure at all n locations
cgtaatgtatatgttacaatgttcttaaatttctaanaagtctttaagatcaacctgtttacgtaagatttctcagaaagacttctaacaaaataagaaaagaaaagtttctcataattactcttataaaccagctaatgatagaagctctttcatattagtttttttcataagatatttttagattatgtataaactagcattaacttatagaaaagtttatttaatttttctctttttgttttctttgtttagtagtacttctaaatacatttatccagatagacccttaatattaatatatatcaacaatacttagaatcttatgagactgagcacgattattgtacgcaagtagtatttgactcctacggttctctatttgatctcttgcaatctgagctaacatgaccgtggagtaaatattccgaaatgac

SEQ ID NO: 247350 - DNA, 345 bp, Glycine max
  unsure (1)..(345): unsure at all n locations
agcttaaccgcgagagaatgatcgtacatcccaatgacttcgtgcagcgcgagcttcctgagctcctgttcggggccatttcccgtgagccagcctcggaagacccctttgtcgaggagataggcgatgcgcttcatggtggcctggcgctggtgctccatgggctggttgtagtcggggcagacgaagaatcttccggcgcggtggcggcgattgaagagggggctctggacgataatggagaagagccagtcgcggtcctcaaggttgtggcagtccatcagttntcgcatctcgcgagtgtcgaaagagatggtgttggagagctccggcggggagtagctc

SEQ ID NO: 247351 - DNA, 496 bp, Glycine max
  unsure (1)..(496): unsure at all n locations
tcatcactaaacatggacatgaatngttcatcatcgaacctctctaactcgttgttgccgccgccaccaccaacaacactgccacctttgcaatgatggtggtccagcaatggtgcctatattatagtgacggagtcgctcaccgaccgccggggggccccgcgcctcgccactgagaactcaagaatctcatccacccatgaagggttttggtttgatgacgtggtctggagggaaggcatcttttggtgaagagaagaaaagtctggccaattgcgtgtcatgtttggaataattggtggcaattgagccatcttttgagtcacaccaattaatcaacacactctaacaagaagatgacaagatgaagatgaagaagaagaataagaatgaatgagagagaaagagagaactatatatattaaccaaacacacaacttggtatatatnttttcgatatctaagcatatatatacctcgtatgcgtgtgatatat

SEQ ID NO: 247352 - DNA, 255 bp, Glycine max
  unsure (1)..(255): unsure at all n locations
ggatccttaagtcacctgcngcatgcaagcttagcacacagagtttgtagcccaggcctgtgtgacggtgttgactgngccaacattaaccgcaccgtttgatcgaatatattggatgtgtttgattaaatgtgtacggatgaattttcttaaacataattttaagtgaaactaatcctgattaaagattaatgactgtcattatatctacatcattttattacagttcagttacgagaatgaatataattcaat

SEQ ID NO: 247353 - DNA, 488 bp, Glycine max
ctaagcttagatttgaaagagttttagaaattacgaaactgttgttaaaggaaaggagaatagagtataagtatgactgcaagtcacatccataggccttatagtttttcccagagaaagtcttatgtccattatgcaaatgttctgtcaaacaagtggtttcgatctgggaacgagggaactagttcactttctaaagaatttgaagttaatagtttagaacttcaaagaggaggaactactaaatgttccaaaaagggattctatgactaccagaatcctccataggtgaataagaacatgttgaaaacccaataaaggaggcatcatatgttgaagagggatgcaatattggcaatgcaacaaaagagtggagttagaccaataaccgaacgtccacccctacgtttcataaagaaaatatcatacaaggaagaggagaaggacattataactaactcttttgagttcggttctgattattcttt

SEQ ID NO: 247354 - DNA, 353 bp, Glycine max
  unsure (1)..(353): unsure at all n locations
agctntcaaataannaattggtgttaaaaaggtggtagaaagtgttataagaatgctcaataaactgttatggagagaagtagaaacacttaatttatactagtttagtcaacctaagctacatctagttctcctttactcacttgtaaagggttccactaatcaaaacttgattacaaaacaagtattctaaccttccactcttggctttacaagtattcttcataccacttttggtaccttcttatactccccatgaatataagaatcaaagtattgtttaacactaaacactccttgatgcaatcctacccaccaagggcattggatagaagactctaagaagtttgggc

SEQ ID NO: 247355 - DNA, 482 bp, Glycine max
cgagacttcaagatatgaactccttgttcctttgagcatttcatgcaagcttcacttaaggtaagggggagttttccacttcttgaaccttaacctttttgtctagcaaaatttatgtataaaacaagtttaaggtcttttgtaggattaaagttactttggatatgttggatcaagtggcctctgaataattaagaaggggggttgaattaattattactgaacctttactaattaaaaatgtacccttcttaggcttttactataatgttaagaaagtaaataacagaaatggaaacttaaccaaaagtaaaagcaataattaaagtgcacaacggaaaataaagagtgtatggaagaagaagacaaacacaagagttttatactggttcggcaacaacccgtgcctacattcagtccccaagcgacttgcggtccttgagatttcttttaaccttgtaaaatcctttacaagcaagatc

SEQ ID NO: 247356 - DNA, 235 bp, Glycine max
  unsure (1)..(235): unsure at all n locations
tccttacgcatctgtgcggtatttcacaccgcatatggtgcactctcagtacaatctgctctgatgccgcatagttaagccagccncgacacccgccaacacccgctgacgcgaacctcttgcggccgcatagaatataacttcgcatatcgctcgccttcgaagttcttatcgattaaccccgactctcatcgttctctgttacgtctataaccgagaaatcgaattccctccg

SEQ ID NO: 247357 - DNA, 391 bp, Glycine max
agcttatccttatggctggcctccggacttcactccccgtgccactccgaaagatttaagccaagcccctacttttgaggggcaactcccgccttgtgacgactattccgggcaagacgatgaggaaggagatacccatctcggccccctgctccaccttaatgatccgtccccacatgaactaccccaaccgaacatagtccgccatattccggcctcacccacacccgtaaaagaatctgttcccttcgcggaagataagggaaagatagacgcgcttgaagagaggttaagagcagtcgagggccttggcaattacccgttctcggatttagcggatttatgtctcgtgcccaatatcgtcattcctgccaagttcaaagtaccggac

SEQ ID NO: 247358 - DNA, 473 bp, Glycine max
  unsure (1)..(473): unsure at all n locations
ntacagcatattttagtaatgacccactaacctataattaatataacttaatgccattaacctacggaattaaaaaaaacttaatggctgagtgtaactgaaatcgtggcaactaaaagtcacccccaacagccaacaagtcagccaccatttggtctcccaaaaggctgatgcctaggttgccaattgggcccttattacaacttgaactaaacctaactaaagcccttttagttgattaacccaaaacatatttttggtcagccaactttacaaggattgggccattatttagacaaactaaacactctaaaattgagacaaggtggtgtcatttagaccttctacatttgggccatgatacaactcacaaccttggacttttctccttgaaacttgngcttgtattcaaatagtatggacagcacttgatgaagagcttccttggctttccttgctctaacccttgtcat

SEQ ID NO: 247359 - DNA, 495 bp, Glycine max
cggcattgtgctgctatcgtctcgacccggatccctaagtgacctgcagcttgcagccttgtgtgatcgaatacacttattttgttatttattaccaatgatagtttcctgaataaatcaaaagatgtaactcttcatatgggttttgacctctttcaattggttttaaatttgtctaaaagtcataacctttctaatgggtctcttgaccagacatgaagagtctataaaaaccaagctttggtttgcatttcaatcattcattcaatcaagtccatcagtcttatacaatccgttacaagccttgaatctctttaacttcttcttttctttgtgccacaacttttcaaagtttctagtttctaaccttgaaacttggctattattctttcatctttctcccttgccaaaagaattcgcgaggactaacacctgaatcttttgagctctctctcctttccaaggacaaagataccgctgaatctttggtctcct

SEQ ID NO: 247360 - DNA, 481 bp, Glycine max
cgcttctcctgaatatcaaatgcattctgagaataagaaatggacaaataaggattggttagaagagcactaactaaaattaaattgaatttgaatttacgaatgtaggcaacattatgcaagagtgaggtattggttaagcaaatcgaaccaatggcaatgataggtataacatcattgttaggaagagtgacggttttatcataaacaagttggtaagatcgaaaatgatgaacggaacaagaaatatgaatgttggcaccagaatctaaaagccaacaatcatgaagaaaattagaagtggatgtaaaaaggatcataccactggcagaagacacaccttgagggatgacaacattggaagcatgactctctaaaagattcatcaatcggctatatcgttgggcagtaagtcgaaactgggaacccgagtcaccagaggaagatggtgagtaagacatatcaacagatacttgagcaa

SEQ ID NO: 247361 - DNA, 399 bp, Glycine max
  unsure (1)..(399): unsure at all n locations
agctntgcagcatagtggttgtgatttgtgagctctgggcatctggtcctgctgatgcaaacggaggcgctggagtagatggtgaagggatgtcatctgttctggccctggttttcctttttcttgatgccatctataatgaaaagaattcaaaattcaccttagattacatttattcaagttgctgaaattgacgatgggcgcttagcaggatacaacatgcttagcgcgccttcagaaatataacacttccacttagcgcaacagggtgcactttagccaaatcaaggccctaaaaggtatgcgctaagctcagcagggttgcgcttagcgccaccatgaatttcagaaaattcactaagtacgtgagcttagtgagccaggctcgcttagccccat

SEQ ID NO: 247362 - DNA, 315 bp, Glycine max
ttaaggacgctatgacactccaaaggaagaatactaatgaatgaacttgctatcggaactgtagtaattgaagtgactcaataatcatgactctcaccaattaggttgtgattggagtcttactggattatatgaatggaagttaccaataacgaatgtgaaagtcaaggttggctgtataaaaaaatattaattagtaccatatggtctgtacaaggcgaagacaacatatatattggtaccacacaaataatattagtatatatacatatatgtaggcgcgcccatcatgcttatgaaactactaataaacct

SEQ ID NO: 247363 - DNA, 431 bp, Glycine max
  unsure (1)..(431): unsure at all n locations
gcttttactcctgattctntggaacttacttatctcctaattctttggcatcatcaaaataatcttggaagacattgcttccatagggagtgctacttgagctgccagatccctccacctttgggcgtattctttgaaagattcatgctcctttttacacatgttatgcagctgcattctatccagagccatatcaaaattgtactgatactgcctaatgaaggcaaccattatgtccttccaggaatggacccgggaagattctagattggtgtaccaggtgacggctgccccaataagactttcttggaagaaatgcatcaagagtttttcatccttcatgtatgcccccattttcctgcagtacatcttcaagtgattcttggggcaagtagtccccttgtacttgacgaaatcttgcaccttgaact

SEQ ID NO: 247364 - DNA, 474 bp, Glycine max
  unsure (1)..(474): unsure at all n locations
ntgtgaatggcatccagagatgcaccttctaatattcgctctttggaggtttcacttcaggcgaagggtctcttttgagcttctcaaaaagatctttagggatactattttgtgtgctcttcttatccttgcacttttgaagattttgccaagcttctcttggtttaacctccattgatggacgaacccgttgttgggtgccaggtgcaagccaatgcagtttcatcttgataacttatggttgcacttgacgtgtctattgtggtagtggtaaatgagctatggcatctgttggaagagtcttgaaggccttagatggtgtgtgctcatagttatacttctttcatgttgaggcttggacaatgatggtttccttctgaagagactcaatggatatggactcatggaaggaagattcagatattggattaccaataacgaatgctaaaggaaatctttgagcatttgtcaatg

SEQ ID NO: 247365 - DNA, 438 bp, Glycine max
  unsure (1)..(438): unsure at all n locations
gctgcagctatgacaaaaataatgcccccagatctttttacataccagatccattgcaagcatggcagaacccatatattgncgttgcaaaaggtacacaacaaggattcatcttcttatatgagactctgaaaggcttcgatggcatcattgaacacctgtgtaatacacaaaagtacaacaaagcagtaaacaaatcaaggcaataagaaaacaaaatataatacgattcctgctcctttctgattgcattttacagcaagtttgatacacacaaccaacaggggagacaacttcttaaagaggtcatgacgcttctgcatataaaaccaaactactgaatgtcggcaaaggcatctttctaagtattgaatctcacctaaaagagagtcaaataagtaccttatgccacattgtgaccaacagacgcaactttct

SEQ ID NO: 247366 - DNA, 458 bp, Glycine max
  unsure (1)..(458): unsure at all n locations
agctntaagttggttggtgccaagtaggtaaccttttcaccatttttacctgtaaatcgtntgtaaaaaatttgatttgtaacatgcaatacttacatataggagcaaaaggggcagagttcattgcatatgctttgaaatacaataccaccaaatcaatttgtgcaggtgatgtattttgtgctattgtttttgcccaattttatttttctttccttttatatttattttcatggatctgtatatacttcacatacagagtgctttggctgatacaacaagagaccatgtctttaagatgatcgaaaaggaaatcaacatcttccaatagaaaccgctacaacagttgcatattcttctattgaactattggatgatacagttgacccacaagagttaacctattaagtttattgttatcattgctggtatagtttcctaaactaaaggcatcatgt

SEQ ID NO: 247367 - DNA, 432 bp, Glycine max
  unsure (1)..(432): unsure at all n locations
gctttgtctcccaggaatctaaagaataaanatgagaaatattgtgttagtggtgattattcagtaataaggacactaatacatttttatgaatttaccacacgcagtaacaatcacgatgcctgaaaaaacgtcgttgaaggatcgcggtggtaattttgtaatttttaggacttcatacaacgacggtggttgaataaccgatttggaaagcaggtttatatgatgacaatgacagctttattcagaccgttgtagttgtaacaatttacaaagatgagtttaccatactcaccgtctttgaataataaacttttattaaattaaattttttccccaaatcagacaataattaacaaggtgtcctcagttgaaggttgtcgcgcgcgcattatctggctggttgtttgaaagctatcgttcatcgttgtc

SEQ ID NO: 247368 - DNA, 472 bp, Glycine max
  unsure (1)..(472): unsure at all n locations
gcttctcatggaagctacctagtctataaatagtagcatgtgtaacacttgttgtaactttgatgaatgaaagtcttatgagatacacttcaaagttccacttctttccttcttttattccttcaatttcgtgctccccccttctctctttcttttccttcattaaagcatcctcttcaagcttcttatccaaagcaattcttggtggtgaagctccttcttccttggcttattccctagtggatggtgcctcccctatcctcttctcctttgcctttcgctgcatctccatggtgaaaaatcaccattgaaggacctcattgaagctcaaagatccagcctccatagaagctccacaagcaagcttccatcatcctatggtgacgatcttnctctagactcatcttctccttgaagtggcgtctcctctctctcttccgtctgcattccgctgcattcatcttcaagaagc

SEQ ID NO: 247369 - DNA, 455 bp, Glycine max
agcttgttagaactatcatcacatgactctttattggcacagaataatttgctttctaagcaacttgagatcttaacagaaacacttggtaagtttccaactaaactgtctattggtcaacctacacattcttctgttttgcaggttgcaggttgcaagttgtaccatctatggtgaggctcatgaaacaggccaatgtattcccagtgaagaacacactcaagaagttcactatatgggaaatcaacagagacaaggatatactcaaggaggattttcaggcttccagcacggtccttataaccaacaaggacagtggagatcacaccctggcaatcaattcaacacagaccacggtggaccttctaatatgccaatccaataagggcctaatatctcttagaggactactaagttggaagagactttgactcatttatggaggtaacaatgtc

SEQ ID NO: 247370 - DNA, 302 bp, Glycine max
gattcgacccacgcgcgtgtagaatagactgcatgggcattctccttctatctttctgccccctgtgccccgatgctcttggcattcacgattgtggaggaaacttaatcaaactttcctcttttcatatcctacctaagactctttccccggcaacaccagatccgcatagctggaccgcatgtaacctactagctttctatagtagaacactggcagagtgtgtaccatcatggggatcatctctctctcatccatgggatgagctacttgagccgcccaatcctccatcgctgcgcata

SEQ ID NO: 247371 - DNA, 461 bp, Glycine max
  unsure (1)..(461): unsure at all n locations
ctgtggaccttacagttgtgccacagagcatgagtcatttatcttactataaaacaagctttgcaattgttgcacgagggcttctaagcttggtgttactcacaaaggcaaatgaaataggctgcctangccaacgacaaggatggtgacaagggtgacaagatgggtggcataggcggatgattccattattattcttacatgtagtatggaaaattttctgttgttttgacatatttttttagttgatggtatgtttgatttacttattctttgtgttcgtcaactatttaaacaacacatgcttactacttagtattaacaacaatgttttcttcaattgattcatataacaaacatatatgtaaactacaactaaagatacacttataatacatactctttctagaaatataatacataaacacactactatcttgatacagtanaaacatgactac

SEQ ID NO: 247372 - DNA, 344 bp, Glycine max
agtctcacgattgtcacgtgctcatgcaacaattgttagccgtggctatacgagacatcttgccaaacaaagtcaggttaacgataactcgcctgtgctttttcttccatgctatatgtagcaaagtcattgatccagtcatgtttgatgagttggaaaatgaggccgcaattaaactgtgccagttggagatgtattttccctctgctttctttgacatcatgattcacttgattgtgcatctggtcagagaaatcaaatgttgtggtcctgtttatctacggtggatgtacccggttgagcgatacatgaagatcttaaaagggtatacaaagaatctatat

SEQ ID NO: 247373 - DNA, 415 bp, Glycine max
  unsure (1)..(415): unsure at all n locations
ngagtactatgaaactctctaactcgacgacactaagattcacttcctctgctcgaggatgcctcgtccaatatgtcgacatcagctacaacactagatgagtgtgcctcaaaacattctttattttctcaactgcctgaacgcgagcatattcatgctttacgtatacctcatagctgagatccatctcgaaatacgagctattacgtgtctaatacctttggcgcttgatacgaggactgctctttgcagacagagagtggcgaccaccaacgctatctgtagcatatctctatacaagtcatatcctatcctgtagcatagtcgatcaatgctgacttcctcattcatagtgcaagatacctatatctcgtgcgacaaaaggacttatcaactgcgatacaccacagtctaa

SEQ ID NO: 247374 - DNA, 322 bp, Glycine max
  unsure (1)..(322): unsure at all n locations
taattcactccccacaagtaagtgcaatttcccttggtcatttggctctccattgatgtgttttggtgctttagttgctcactctttgcaaaattcgtgaagcaatttgcatctgaatccatgcttgttttgtggagttgaggacttgaatgaggaggccttaagcctatattgtattctgaaacaatggggcatggcacattgccctcattctcttgcaatatatgtncaaacatgcgcccatcaagtgctcggtgaaatgccccaatgatatatgaatatgaatttgcaaaattgtgatgcgtgggctgttttatgtatg

SEQ ID NO: 247375 - DNA, 270 bp, Glycine max
  unsure (1)..(270): unsure at all n locations
actcaagcttgcagattctcacgaaacttaccgaaacgtnttgattccctcgcttagatttcttcacggaaacaattttcaagcaattgaaagagaagaatgcctaagggctggaccctttcttcttcacttctcccctatttatagcaaaataggggaggggtgccgccagctcgcccngcgactcactccccggcgagcaggtgcttctccaaacaccgctttggagaatattcagaggccaccggcctggtgcttttcacccctttt

SEQ ID NO: 247376 - DNA, 421 bp, Glycine max
  unsure (1)..(421): unsure at all n locations
tcgtccggatcttaagcacctgcggctgcagcttgtatagttcccaattggggtattttgtagtgatttttgtaaataaatcttgtttntggttaatgctgtctctagaacatttccattggatttaatgatgaaatntgtacattctcaggtgaaaaagaggctaagttttgaattgcaaatgtagcagttgggctaagctcaacaatgggctaagcacatacctaccgctaagcgcagcttcagcgcgcttatcgcanaggaggatctggcagagcatcagcatcaaagctgcatgctaagcgcgagatcaatgtgctaagcaaagtaggtgtgattgaggccgtacccgaatcaaataaacattaaaaatacagtatctaggaagtgatcctaggtcgtctcccaacgagcaatggtc

SEQ ID NO: 247377 - DNA, 406 bp, Glycine max
tgctaacccatggaagctcctaatatctcccacactatttgtggtgggccattcttggatggcctagatattcttagggcccacttggaccccatttctaccaactacaaaccctaataaaactatattatctacacaaaaggtacacttctctatatttgcatatacggtgtgtctcctaaggactgaaagaactttcctgagatgtcctaagtgatcatactacgctccaactgtacactaaaatatcatcacaataaaaaactgcatatctacctattaaataccttaagacattatccataagcctcataaaggagctcggtgcattactgatcccaaaaggcatcactaaccattcatacaaaccaaacttggtcttgaaagcgaatttccactcatcacc

SEQ ID NO: 247378 - DNA, 423 bp, Glycine max
  unsure (1)..(423): unsure at all n locations
agctttaactnttcgagtataatgaataagtcaaccttgtcaccaaaatttctcgccgactaatgaaatattgctctcttaagtatcacatcaaatgaacaaatagaagatagaagctaatccaaatgacaatttgtcgttggaattattaaaattgtccagattccagaccaactgttcggtcagattaattaattatttacgtctggaacaagataaaaagaaaaacaaaaaanaatgcaaagggccacatcaatgcaaccacccatttgttttctaatacactaaagaaactgcctcctttgagataatgttttaggtaggggatntgatgcaatgagaagtaattaatcaaggacacgacataagtaatcctcccttcaaaagctttttttctagaacaatcgtgactttatacagtct

SEQ ID NO: 247379 - DNA, 403 bp, Glycine max
  unsure (1)..(403): unsure at all n locations
ntcacttaaagtgtatattcatgtttttatcaatagttttgatttatttatttaaaatgtataagattgatttgaaaataaacgataaaacgtggaaaataaatgatgaatttaaatcccttcattaataaaaagtgaaaatgaacatttattaataaaaataattaagaatcaacatacttgttactgcgtattgtttatacaatttttgaaaaaaatcatctatactcttgagctggatgaatgacgcttctcgtaaaggagattcactgtacatacgtcatatatcaaaggattcctgtcgtgtctgacaattatttatctattttccacaaactttctggatttaaaagagaaaacggactgtacattcgcaatctgtgtgcgtatgtatgtctgtcgc

SEQ ID NO: 247380 - DNA, 291 bp, Glycine max
agcttaaggtccgtttactatgacataatgttttttgtttttactttcaattatgccttgttatcaatctattccctgatttccaagatttcaatacaaactcgtgaaaacaacttttagattgaaaacaagattgttatttaaactgaacactgaaaataatacagacccttaattgtcatcatattcagatcaaaaacagaatggaaaacaccaagtgcctttagattgaaaaacgacgaggtttcccttgttccatgttgtcatgacaccgacaccgaggaagtgtgt

SEQ ID NO: 247381 - DNA, 433 bp, Glycine max
cgagcatatatgtcatatgaattgagctagtacaaatgtggttaccagatagaaactaaacgcggttcgctggagacgcgtaatgcgtctcgtgtgaacttacgctctatgtcctgtgtggggccacgtgcagtggtgctatgagttatctacgcacgtggactacatgactgtattcagcgatggcaaccgctattgttcacccctgaaaaaagcacaaagatccactgtggatgccttgatgcataagaagagaacatcactgccacactggccatagatgcatcatgtgtcgagtgtgtgaacatcatgcactacggccctgcatggtgctgcatgcaacggcgatttgacttggtgcacacgtggatcgtgctcggcaatggctacaaaagactaatgtgagctcctatgaaaaggtgtctggaagtct

SEQ ID NO: 247382 - DNA, 432 bp, Glycine max
  unsure (1)..(432): unsure at all n locations
caagctttgaatgttcatcgttgcaacaaacacttactggttcgaaatttgcagaaagtaaaattgtttaacagaaatcgaaaggctggaaataactatgcaaggaaaggaaanatgcagaatgtaaaggctcagcgagttcattcgatcgaatgaaccatttaaaatgcaggaattataaaacgaaacgtaaattgcattcgaaatgtaaagtttacaaaaacttataatggttcacaaacaaacatacattctccttgtgtactcgtttctctctgcgctggatactntgagtgtataaggattctgtagaaatgatttgcgaccctcaaaaactaactaaaactgctatatatagacattcganaataaactgccctaacggtcgaacattatccgaatgccaagtgtcctgccacgtacatcttacat

SEQ ID NO: 247383 - DNA, 467 bp, Glycine max
  unsure (1)..(467): unsure at all n locations
tcactgcgtgaagcttattgatacgagcttatggaaaatgcgtatattntaaagagctgatgtgaactttctgaagtggtttatgactttccttnaagcccttttaatcgtgaaaggagaacggaagggagggagaggtcatgggttcgaattccccacctacatctaacaaactaacattttcggataatttttttttccagaaagagttataagaaaaggtaaaattaagctttttccgtaagttaaaattaacttatgcataatttaaaaccagcttttggagaacctaaagtgagcgattttctatagaagtatataagttgatctaagacttagttcatcttactttcatattttcttcttctataagtgcttactgagaaatttatcctaacactgcctaaattaaattgtttaccccaacgtttccccgcctatgccactttcacgagtcaaaataaact

SEQ ID NO: 247384 - DNA, 318 bp, Glycine max
cttttattgttgaccacagagtggtacctggagatatgtcgcgggggtctggagaccttggggacgtcaagtggggtgctattgcccaaaaccaagcttgaccaatcccgacccaacccgggcatagtcggtcagtgagaacctgtgatgtacctaaacaggcgagctcctggcagtcaacagataaaaggaacaaagaccacaaagcaaggaggcttgtggtggctggccagctatgaactctgattgatatgtgggttatggcctctggtaatcgattaccaagggtgggtaatcgattacaaggcttaaaaatga

SEQ ID NO: 247385 - DNA, 509 bp, Glycine max
  unsure (1)..(509): unsure at all n locations
cgccgcgtnnnatgatccctgctattacggccctattaatactcaagctgattggatgtaagatacatcttcttcaccttagtcattctttactccatttcattgaagcacatatccacttgcagttccaaagtatcaaacctctcaccaacaaaggttttgagaccatcaaacctttcccaaatcttcgaaagaagagatgaatctttctcctcatgtncttcttcaccaatatttctagcacccttctttacccatgatccatcatgctccttaatataaccaaaggatgctatgacttgagcgccctataagaatgttctcttgattggacataacgtcataatcaaagggatgttgaatgtgaacgaagaggtacaacgtgcgataggtatgcgcattcatcgcatgcctatgctgcatatctacaagagtgcctatcatttgaaccttatgaagccccatacatgagactctcaaacctggcaagttgagactngagcaatgcg

SEQ ID NO: 247386 - DNA, 293 bp, Glycine max
  unsure (1)..(293): unsure at all n locations
atactctcttttctctctcccttcctcactcgtcttcttctctctctccttccccaccatcagcgtgtgtctctaacatccaatgtaaattgctagctaattgctcttgcataataaatacatataatcaatccaagggttcattcattttaaaattgagtaaaattaatttaattaatcattaaatgtagtttgaaaccaataaatgcatatatttttaggagaaatataaaatttcttacagcaaattntataatattttcttggttgcagacattattcatgttatttta

SEQ ID NO: 247387 - DNA, 197 bp, Glycine max
  unsure (1)..(197): unsure at all n locations
ctgatatataacccactctataatntaccactttaaatagattatttcttttatggattgactatttaactgtatggctacacacttatatatttaaagctttatgtatatatattgcctggctaataggtatacaagataaaactctaaccttatgaatttgagatatgaatgaagtcttatgtagtttcctgttt

SEQ ID NO: 247388 - DNA, 361 bp, Glycine max
  unsure (1)..(361): unsure at all n locations
agcttgaggataaagacttcccaagctatntatcttctctctcagagaggctttttctcactctaagaagtggattcactcttatcttggatggataagaatgaaggctcctacccttatttatactactccatctccacaataaatggtggagatttcttgtatcataaggtgaagattaattctctagaatgctccacacattctaggagtttctacactcttccatatccttccataaggttccagaaagtttcacacatctctagaatattccagaggtttccacattcttccacaagcttctagagagttctacactactctagagctctccagagcgttctagaanattctacac

SEQ ID NO: 247389 - DNA, 431 bp, Glycine max
  unsure (1)..(431): unsure at all n locations
gctgggtctgatatttttatatttttatagttcaagcatcggtttgttacctcctacaagcctatttttaggcttgtgcccgacctttataaaagtctgtcaggttcgtcagttcatttaaagacatatttcatattagaacgtgtaaaaaacaataattttttaaacaaaacccaagaatttcattaaaaaataataagataatggttaaccacaagatatgggcaaaattttcctacaaacattacatgtgacatactaccaaagtcttttaagtttcaccaaaaggaaagagtctatattcttactacccatttatactacattaactaaaataatttaaatcatcaaactactaaaataatgttgtaatttaaataanataattataatattatatgccatattaatataatanttttatataacat

SEQ ID NO: 247390 - DNA, 312 bp, Glycine max
gcttctcgatatgttatgcgtctgaatcggacatgcgagtgaaaaattatgaccattttaatttcccgagagcttccgttggtcaatttctagcatctcgatacgctatgtgcctgaatcggacatgcgagtgataacgtatgaccatttgaatttctcgagagcttccgacgttaatttctagcgtctcgatactctatgcgcctacatcggacatgcgagtgaaaagctattaccgttttagtttctcgagagatgccgatagtcaatttcgagcgtctagacatggtatgcgcctgaatcggacatgcg

SEQ ID NO: 247391 - DNA, 473 bp, Glycine max
  unsure (1)..(473): unsure at all n locations
tgccacggagntttccgactatgctcttgtgtggtggatcaagctacaaattgagagagcaagaaatgaagagcccatggttgatacatggacagagatgaaaaagatcatgangaagcggtatgtgccggctaattactcaagggacttgaaattcaagctccaaaaactaacccaaggcaaccagggggtaactatggctcgatttcttaatggatgtgctcatgattcaagcaaatatttgagaagatgaggaggtaactatggctcgatntcttaatgagttgactaatgatatccgtgatatngttgagctgcacgaagtttgttgaatggatgatttgttcacaaagcaatccaagtgggagcacatttaaaaggaanggagtggctataagagtttaccactctgattctcttgttgaacacaangtaagaagatgggctgtactctagtattcacactatccata

SEQ ID NO: 247392 - DNA, 427 bp, Glycine max
  unsure (1)..(427): unsure at all n locations
gagcgtgcgtttgngctccacaaccttcttggaagtaagttctaagacaactcgaacacatcgcatatgaacgaaatctatatacactatatgtatgacaacgctccatctatgtttttcattggtgagggctctatcgcatcgaatgggtacggaggaataataaattgtcatttagcgcatgtgaaaaacactctcttgataactgcaaacacgatgtaagataaatctgatgcatgtatggacagacagntgctactcatgattatggcgtgaactttcatttatgataataatgcgattgatatatacactccttatctctctcgacaactatcatgatataattattgctgccgtcgtggagaacgctcgactcgctcaaagcgcacctgttgaatatgacaaacactattgnttgtacgan

SEQ ID NO: 247393 - DNA, 287 bp, Glycine max
gagctgtcccaatgcaatgctacagcaacgtatggcacttcgcttagctctactgaaccaagctacatgtatgtctggatctagctaaactagtggaatgaaatgatgctgcgggagcagataatgatgcgtcagatacctttagttctaaggactctgcctgccactgttcattggtgtgccgcagaatctttgcgagatcctgacaggttatccaacctgaaatgtgtatgaaagagatggctagattgtggccactatgtcatagctccttatttagagaccat

SEQ ID NO: 247394 - DNA, 221 bp, Glycine max
ctggaaaatagtgcatacctaacatggagatatatttttccatgctcgacacgaagacttgctctcgattcaaccaatgcgaaattagtccttcacactattttgacagataatatgtatgttgaaatataaagtaatgtcaattgcttagataatacgtcaagaagtgtgaatatatgtgagatttatgtcataactacaagaatatcaatgattatgat

SEQ ID NO: 247395 - DNA, 370 bp, Glycine max
  unsure (1)..(370): unsure at all n locations
agctntggagtttccaagtgccaattcgtcttcttctttagaccagtcttcttctggcttcaattcatcaatgggctttccttctgtgtccagcatcttgggatgttcccagcctttgatgacagctttccaggttctgctatccagtgatttgaggaaggccaccattcttgctttccagtattcatagttgcttccatcaagaattggtggtctgttcactggtccgccttctttctccatgttcatcagaatttatctccctagatctcactcagtgatttcgagtgcccgctctgataccaattgaaattctgatactggggacagatgtcgtacaggatgtcacgacatcacgcttcagaacatg

SEQ ID NO: 247396 - DNA, 257 bp, Glycine max
  unsure (1)..(257): unsure at all n locations
cccatgaatnggcgtttcgttcatgtgtcctgcaccttcaagtttggagctatgcgtagtgattgcttagtgaaattctccattcttaatcttttcggagccccatgaattgcgttntcgttcatgtgtgctccaccttcgagtttggagctatgcgtagtgattgcttagtgaaattctccattctcaatcttttcggagccccgtgaattgcgttttcgttcatgtgtgctccaccttccagtttcgagctatgc

SEQ ID NO: 247397 - DNA, 503 bp, Glycine max
  unsure (1)..(503): unsure at all n locations
gccggtnnnntttgaaccttgagatacatgctatgtacggacacttagaatactcagcttgcactggagatcaacntgctgctctctgcttcgtgaaggtggcattccatcacgaatctcctaggaaaagacatctgctagattcctgcgattacggctgtacactaagataaacgtaagtagctcactgcttagactgatccctctctctctttagtgtatcactccgttgcgccggtgtgtcaatcttcatttgcatatgacatcgtggagcctcactatattctttctcttgttctcgattctctcgcattatgactgaggcatcacatgcttcctctgggatatatgttaatgattgaccatgacgatttgcctcatcgctgcaggcgctgattgtaccgtctgcaacgtacattaaggaaccgccgtcagaataaccctcgaatcgtcacagatgattcccacatgccccactttgcctatccgactacatcttctta

SEQ ID NO: 247398 - DNA, 419 bp, Glycine max
  unsure (1)..(419): unsure at all n locations
gcttacacagtttgtctttcttaaactngagtnttggaagacaattactaagtctttcctaactagattatttaaatgatgcatattaatgtgtgcagtcctacaatgctacaaccatgaatcatctattgtactcaccaagcaacttagctcatgaaaagatgcttgctcaacattcagcatataaatgctacttattctcttaccaatatggagagctttactggatatggcttcacttataagacaacaatttctattgaattcaatcttgaaacctttatcacaaagttggctaatgcttagaagattatgctttagtttatccacatataacacattctttatctgagtttcgtcttgattccctatacttccttctcccattatctttccttttgtattggnctcaaacatga

SEQ ID NO: 247399 - DNA, 355 bp, Glycine max
  unsure (1)..(355): unsure at all n locations
tgactntgcgagntggatttagccttagtttcactctagttattagtcaattcaattaagaaagagaaatcccaaagagaaacgtccgattgcttttttttttggtttattttactaaaagatactttttgattattttacctttttttggtttccaacgtggttaccgcatgaccgaacggtcggatttcattttaacaaaaattaacggatattacaaatcaaatgatcggtggaaatttattttattttttgattaggcgagaaaatgacttaagtaaatgactaaagcatgtcaaaagcgggtacgggaagttaatgaaatgaaaataaaagcacaccaaacaagtgggga

SEQ ID NO: 247400 - DNA, 319 bp, Glycine max
agcttgagggaaaacttgatgccttggtcaacctagtaactcagcttgccatgaatcagaaatctgcacctgttgctagagtctatggtctatgttcttctgcatatcaccatatagatctttgtccttctttgcagcaatttggagtcaatgagcaacctgaagcttatgctgcaaacatttataatagaccccctcagcagcaaaaccaacaacagtagaataattatgatctttcaagcaacagatacaatccaggttggagaaatcatctaaatctgagatgggcaagtcccccacaacaacaacagcctgtccc

SEQ ID NO: 247401 - DNA, 419 bp, Glycine max
  unsure (1)..(419): unsure at all n locations
ntgcacgtatcagtcaagtgtatggaccatatcgtagccaatgtgctcatagataatggttccagtttaaacgtgatgcctaagagcactttggagaaattaccattcaatgcttcccacctaaagccgagttcaatggtggttcgtgccttcgacggcacccgccgagaggttaggggagagatagacctcccagtacagataggccctcacacctgtcaagctaccttccaaataatggatattaaccccccctacaactgtctgttgggacgtccgtggatccactcagtgggagttgttccctctacactccaccaaaagttgaaattcgtagtggaagggcatctggtcatcgtatcaagcgaggaagacatcttggtgagctgcccatcctctatgccctatgtgggagtcat

SEQ ID NO: 247402 - DNA, 172 bp, Glycine max
acagttatttgggtctgtttggggtaatgcacaagtatagaataaccttcctgggttcctccttggtcttgcaattcgaatagctgcacgtcttccatggtggcattgccgaatgaaactaccagaaaatgcacaacaactgccacttgcagacatggacaaatcaagtgaa

SEQ ID NO: 247403 - DNA, 477 bp, Glycine max
  unsure (1)..(477): unsure at all n locations
cttttggaccttgaacaagctactaactcctctttcagaaccatgctatgtgctcgcgactggtccctctctttccttcacagcttgagttcactattgctaccccatagagcttcgcgaaatttattccggccatactctttcttgcgagccctcttggtctcttgttcaagggatcttgcngtaattgcattctctttccgtaaccccgcacactccttccgaaaagcttggttcgaggtacttacccgttgaagatcgaagaacgaatgaagaacgttcgagaacggtcgaaaccttngcgaaattcctcacgganaatgtacagaaacgtttcggaaagcgcctcgggtaaatttctttcaggaaacaatttttccaagcaaattccaaagagagagaggtgcctaaggggctgaaccncttctccactcactttcctccctatttatagcaaaataggggagatggttgccg

SEQ ID NO: 247404 - DNA, 394 bp, Glycine max
  unsure (1)..(394): unsure at all n locations
ccccactccatcattaggattagtacctgacatctcaaacaaacaaatgaaacgtaacaagacaattatagctggtgtttgaatacctcacccactcaagtgtatcacacaattatggctttcttctaatgaaacactcttgccttataccactctaattcgccttgagttcttatgccattcaagagattatggccgcaacaaagaacaattcaccaatatgtgtcacgtaaggctagagagacgaggaaaaggttaaccaagaagaaggctcacaatgtattgaataatatttggatgacgtccattacgaaatgtctgctgggttcnnnctgattccctataccttcttctcccattatctttcctttgttattggctcanacatgacgta

SEQ ID NO: 247405 - DNA, 353 bp, Glycine max
agatgtcattcacaagacactatgtcgacctaaatgaagacttaacatgcattgtttatgtgattgtattcattatgcgatataatttggtgtaagccattaataaccaattaatattattaagtactcgtttcgttaagcaaaaaaattgttggtccaacaaaaatcatttacgcgtgtagcatacatcattgtcctaattgacaacacataatgacatgcatgcgtattaaagtttgagcgcgacaacacattgactgacttaactacacattctgaaggaaacataaacacgaaacatgttcacgcgtgtctatttttttgtaaacaaagtgaagcaatctatcgatcac

SEQ ID NO: 247406 - DNA, 161 bp, Glycine max
accctgaatgtttcgaagtattgtatgaccactcaacccaatgaagtaatttcccccacaaagttggtttcttatgaacaaatacacacaacactgttcgatgacacgatttagaaccatagtttgtccatccatctggggatgatacgccgaactcatct

SEQ ID NO: 247407 - DNA, 393 bp, Glycine max
  unsure (1)..(393): unsure at all n locations
catgctactatgaataactccaccacattaagcaacacctgccacttgagcagaattggccctagtgtaaaacagctaatatttgaactttgggtctaccaatatttattattaattntttaaagtaaaaaatatcacacatgttaattaaaagaccttacatattattattttctttaaagtaaaaaaatatattttaattnttattctaggtctcattttctattggaccgacacttcagttgagattaaaaatctcactaagagaatagctccaagtatttgtattgtagcatcactaacaacatcgtgtccattggttgcagcacacaggtattcacaactattcttcatgtncggaattagtgattngatcaaaatactaatcaacat

SEQ ID NO: 247408 - DNA, 284 bp, Glycine max
  unsure (1)..(284): unsure at all n locations
tcgattacttctctcttggttaagttgttcagaagtgaacaagaacattttaatcgattacctgggtcatctaatcaattacattggtcttgagtgggtttccagatgttggacggacactntaatngattacttcattgaaatattggattactttatagattttatcgattgcaagcgggtataactattttctctataaataaccagctggtgttcacatctatacatcatgagatcattagtgaacacttcatacatctcanaaattacttcttagtctt

SEQ ID NO: 247409 - DNA, 347 bp, Glycine max
  unsure (1)..(347): unsure at all n locations
ttctccctctctctctcngtgctattctctcttcttccttcaccatngaagcttcatcaaagctccaacctttgcacaccttttctgcttcaaattacgaaaggaagccattttcngagtcgtgaagcgcacctttacgtgtggcactnttcaaattcagggttgggtagacttctttctcatatgaatttcgtgggtattgggttttgggagatatgatgggtagttttactagggttatgcattgtgatggttatttgtgaagaaatttgacgaaagccatgtaaacttgtcatgtntggtgtgagtcaagcttacccgttctgttttangggttttatgatgat

SEQ ID NO: 247410 - DNA, 408 bp, Glycine max
  unsure (1)..(408): unsure at all n locations
ccattaaatattcacttaataggcaaaataaaacttaaaaattgtgactttttgtttctcgatcgggtcaaaaggtgtcaactttgaaagcaatggacacatagttgggttctcaaaagaaggttttgttgaattcccagtaggtcttatggtcgttgcagttgatcatgaccccactattcttgataacattcttaatatgtgttctcgatgccactatcgcggtaatttcaattaattgttactatttcttgtacaaagatttgatctttntttattgatgattgtttttatgttgcagctgtggcatactctgatgcctcactttgctatttgcgaggaaactctggagtcaaaatcaaccaccaaaaaaacaagattcttgaattgtttcttatgttcttgatg

SEQ ID NO: 247411 - DNA, 371 bp, Glycine max
  unsure (1)..(371): unsure at all n locations
gctagattctattnttcacaattagggtgcttttcactttagcttagtcaaaattttaagctcaactaanagtcactaaaaataaatattttagcttttccataaataaggcttgactgccatttagaaagtgaggggggagttcttcatttggcatgaattcacagtccatcgagaggggaagcttcctttgggctccactcttcatctttttcctccctccatgtgttttgaggctacccatggaaatgggtagctaaatcctccaccattggggttagatgcaaccaaactcatattctcttctatcttttgatattntaatatatatatatatatatatatatatatatatagcattaatggtagta

SEQ ID NO: 247412 - DNA, 343 bp, Glycine max
  unsure (1)..(343): unsure at all n locations
gctatctaatacatctactgtatatttttgttnttgaattttgntcaaaaatatgtgtacgcgcgactcaaatctaatagttattatatctcatttcatgttatttcttattattaatttgttcgggcgactcaaaataaactcaaataatttgagttaagaattaaatttcttgtatactattattcattttttttgagctggttatattaatttgtgttgaactcatactattttttttttttttttaaatcaagcaacatggaatggagtagtgattggatatgaaggcgacaaaatccccgcacggtacggggcagggatcaccaataatagctcaatg

SEQ ID NO: 247413 - DNA, 271 bp, Glycine max
ctaattattctggggatgcaacttaattgaagtgtgcctcctactattcttaactcaattagaggtccttcaaaatgtgtcttgataaatatcaaattacactaaaattgttagccatgggcaccagaaaaaaaaaagtggcttacaaaagtatcaagaaacattacaatttacaacccacttagaagtctactcttcaagttaagcatttctattgactattttattttggcaagcaattaaatagtgaatcacataaatcaaaagtcac

SEQ ID NO: 247414 - DNA, 380 bp, Glycine max
agcttggagaggatgcttcaatggatgaaaagaaagagggagagaaagagagaggggggagcacaaaattgatggaagaaaaaaaaggagagaagttgaactttgagttgtgtctcacagactctcattcatcaaagttacaacaagtgttacacatgtttctatttatagactaggtagcttccttgaaaagctttcttgagaaaacttccttgagtagcttctttgagaaaacttccttgaaaagctagagcttagctacacacacccctctaataactaagctcccctccttgagaagattcctaacgaagctagagcttagctacacacacctctctaatagctaagctcaccttcttgagatgagaagctagagc

SEQ ID NO: 247415 - DNA, 392 bp, Glycine max
  unsure (1)..(392): unsure at all n locations
tctaagaagcttctttgagaagctagatccttatctatccacaaccctctattaactatattaacctccttaaaattaattacggataaaaataacacaacaaataatcaaacatcaaacataattactaataatatatatatatatatatatatatatgtatcagggtgttacataatggcattggatagaagactccaagaagattgggtcagcgatgcaagagaaggccctagggttctcatgagccttatggtagatttcgggcccatgggcttagtacgagcccgcttatctttgtacatattagattaaggtttcattatttttgggccttgtatttagggctccataatatangtaaggtaccctagaaatgtaggatttttcag

SEQ ID NO: 247416 - DNA, 299 bp, Glycine max
gagagaggggggagcacgaagatgaatgaataaaagaggtatagaagtggaactttgaagtatgtctcacaagactctcattcatcatagttacaacaagtgttacacatgcttctatttatagactaggtagctttcttgagaagctttcttgagaaaacttccttgagaagcttctatgagagaacttccttgagaagctagagcttatctacacacacccctctcataactaagcttaccttcgtgagaagctttcttaagaagatcctaaagaagctagagcttagctacacata

SEQ ID NO: 247417 - DNA, 543 bp, Glycine max
  unsure (1)..(543): unsure at all n locations
agggtctgtgnnnncnaatgaaacccatgctagtntaccngtcgctatntacgtgacactacataactctcaagcttcttcgctggaaagtctctctcctggcttgttgtttgaatgtgtttangggtggngatcggtcttcgatgtgcatcgatcggattatgaggccgattcggcgatggcctctgtggatgatcgggcgctcatggctggtacggaggtgggttatgagaacgactgatattggtctgatattgatattgatgggctaatggaaaatatggccgtgtaagaatggtaggcacaacatgagcttctgcctccatcatatactctctataatccacaggcttcctattcatgatagcgggatgatcaaatttgcctctttttatacccactttgatcctattgtcgcacaactaaatcacaaagcttgatgcatgtaaccaccatcttctctagtgcacactagtacatgctacatcattgtatcatcttatcncatcatacggggcacttgagtgcagatcctccacttgg

SEQ ID NO: 247418 - DNA, 369 bp, Glycine max
  unsure (1)..(369): unsure at all n locations
agcttcaacgagccatataacttgttngaagatatttcaaggacacacagtgatctgagttgaaaaatatctgtatgaatggacccgtttaaatcatttccacttaaatcaaagatctctaacttggacgaaaagatatatgaaaatttattcacgtgatcctggaaatttgtgctggaaagtcgtatacttcgcancagtgggagagaaaaaagagatgaaagaaggcttccatccacgaagttgacctgcagatcaattaggagcagacttcttatgccgccaaaatgataagatagtgatgaacctgtgaaaccattgcctgtgaactctaaatgggtgagaatcttggacatattcatggatgga

SEQ ID NO: 247419 - DNA, 427 bp, Glycine max
  unsure (1)..(427): unsure at all n locations
cttgaacttgacctttatagtaaacaagtcaagccgagtccggtcttaaatagaccgagccaaaggccctttgacaagcgaatcgactcgttttcatccctagccatgatatacactcattattgatggtgtcttcttgtgaatataagagctgaaaacaatggcttcaccgtgtccacctctcaatcatgcctgagcaaagtttttttctcttatgccaaaataaaggaccctgttggcctaatttgataacctacataacgttgaaaatacatagagttttcttgttctctgatatagggccaatgttaagttctggcatgtgcactgaagtcttccagttngatgtttctccatgtactggagcaatagttcctattacatcaatagccaatggttccactgaaaaccatcagaatactaccag

SEQ ID NO: 247420 - DNA, 522 bp, Glycine max
  unsure (1)..(522): unsure at all n locations
atgatacatgatganacgttgcatnacgngacctcttagatctcagcttcggcttacaattcgagcgtcgcgctatatttcgggagttattcggacttacgaacgaaatggtatcgacgttttaatgtgatgcgagcttctggtgtaaatgctgagcgctttgatatatacaggactcgatctgacttacgagtgagattgtattggtcgttacacttgcttcgagcttccagggcacaatttcaaccgtcacgagctactaccggactcaataagacttccgagtgaaatgttattgtcagtcgaatctgctacgagcatcggttntaatgttcagagcgtctcgagatagtacgggactcagtctgacttccgagtgaaatgtcattgttcgcaagatgtagctggagcctttgcttttacttttgagcgtgggagttaatactggactgaatcagacttcccagtgaatgtggttgcagtctaatttgctagaaccttgtttagaattcgagcgttcag

SEQ ID NO: 247421 - DNA, 293 bp, Glycine max
tattttctataattatattcacatggtgccgtgcataaaattcaccaaacctattcaaatatggcatatataacaagcggataacatattcgactttggcatatcacagtttaatgacataatcgaatatggctgcacataatcgaatatggctgacagggttatatttggaaaaccaccgaatcacatttttccctgtactttgaactcaaccgaacaagtgaaagtccgtctttcataccttctcattggtggagttgctttctttccttttctttgctagaaaacgaaca

SEQ ID NO: 247422 - DNA, 342 bp, Glycine max
tctcatagaagcaactaactaactgctgactcatgagctaactaacagattagtctaacagaattgtaactgtacaaacagaacaataggttactctattaattgacaccgtttcatagcctctatgaataagtggtcaagagttatatctttacagctcctatttttctagatataagtttaatttcaatacaaagaaggtgggcctgtgcattgttcacacttcaaggcccgaagaacacttgttttaagaggtctgttagatataaaaaccattcgcagagtctttgcctaagagagctaaactttgggatatttggtcattgacaatgactacaaaat

SEQ ID NO: 247423 - DNA, 336 bp, Glycine max
agcttatagatcaactcattagcgcaggtcacttgagcaaacaaaccaacaacttatattcacatcaaatttatccatattattagcattgtgagtgttgtatacagtaatggcataaaaccaaaaattctaatgagtcattggagacatctaacaaaaaccttcaaattgccccaagcatcatacatagtattgcttgacaacatcagaactcaggagcgattcccctcctcgaatctcagccagcctgcatcaatcagactttgcaccttatgtttcagggtcatacaatgctcaatggaatgccctgaaacttccccatgataagcacatgac

SEQ ID NO: 247424 - DNA, 352 bp, Glycine max
  unsure (1)..(352): unsure at all n locations
tgtaagcctaagatcttcatcatcaatggatgtccttgctttatggaagatgaatggcaacggaatggagaatgaagagagagaggagacaccacttcaacgagaagataagtctagaagaagctcaccaccataggaggccatggataagagcttggaggaagaatgagatgaatgaagggagaggaagagaggagcacgaaattttgtgctctaaaagagctctgaaatctgaagtttaatattcaaatgatcaaagttgaaaaaagtgcacacacatgacctctattttatagcctaagtgtcacacanaattggagggaacattgaatttcaattcaaatttcacttg

SEQ ID NO: 247425 - DNA, 312 bp, Glycine max
  unsure (1)..(312): unsure at all n locations
caagctttggaactagtggacagacttgacaattgtcangaaatgatagctagcaagatcattntgaggtggtcatattgaggttcttattctgagacaacatttttattagcattgtgaagtaacattagaatggtgaatctaatattagttgataaaggatccatacttgaattagatcctttngataaaggatccatacttggaaggattcaacttagctttataatgctctttgaataacctcttatagctccaaagaagattgttggagtggagcccacacaactacaagctcttggaacaagtgga

SEQ ID NO: 247426 - DNA, 293 bp, Glycine max
tctttgggaccttgaacaggcaactaactcctctctcaaaaccatgctatgtgctcgcgactggtccctctcttctcttcgcagcttgagttcattggtgctaccccacagagctccgcgaaatttgttccggccatactcttccttgcgagccctcttggtctcttgttcaagggctcgtgcggtgggtgcattctcttcccgtaatccggcacattcctctcggatgtgtgtagcggccaacttgaacttctctttggaagtttcgcctttcctaactcgcttttgagagc

SEQ ID NO: 247427 - DNA, 302 bp, Glycine max
  unsure (1)..(302): unsure at all n locations
agctngaagtgagaaagtgtggaagagtcaatcttcctacttttattttgtgaccacagagtggtacctggagatatgtcgcgggggtcaggagaccttggggacgttaggtggggtgctattgcctaaaaccaagcttgaccaatcccgacccaacccgggcatagtcagtcagtgagaacctgtgatgtacctaaacaggcgagctccttgcagtcaaccaataaaagaacatagaccacatagttaggaggcttgtgtggtggctggccagctatggatcttgagtgatatctggaata

SEQ ID NO: 247428 - DNA, 465 bp, Glycine max
  unsure (1)..(465): unsure at all n locations
cnagaanaagatggcctcagcaaattccttatttctggaatggaattctatcaatagacctccaatctttaatggagagggttaccactactggaaaacccgaatgccaatttttatcgaggcaatagatcttaatatctgggaagccatagaaatagggccttatatacccaccacagtagaaaaaggttcaatagatggtagttcatcaagtgaaagcattaccatagaaaaacctagagatagatggtcttgagaggatagaaaacgagtccatacaacttaaaagcccaaaacataataacatcttgcctaggaatggatgaatatttcannggttcanatttgtagagtctaaagaaaatgtggacactcttcgattacacatcanggactacnagatgtaaagatctnatgataatgcactactcatgagtatgaaatattagaatgaatgcaatgaan

SEQ ID NO: 247429 - DNA, 336 bp, Glycine max
  unsure (1)..(336): unsure at all n locations
tctcttgcgagtggatggaaacattatgtccaagtacccttaaagcagaccagttggttcaagttcaacttgagtggtgggggtctgctatcaaattggaaaatgacctgaactctaccatgcgggaggcatttanggaaaaggtatgttttcaattattttgattagatatgattgatattggtgtatgttgttcttataatgcaaaatatacaccgttaattaggttaattagattcatcttcaaattaactttggcctcatccaatttatcttggattctcagcgtcgtctaatttttcggaaaaccaaaaaactcacagaaacaacatttat

SEQ ID NO: 247430 - DNA, 527 bp, Glycine max
  unsure (1)..(527): unsure at all n locations
nttgaaacctgcattacgcgcttgatacccttctaagccggacagatgatacgtcaattgctcagacccagtcatggccctatcccatgtatagaactatgcagagtgctctcgacagaaacctctcatatttggccagaagaatgatttggtgataccggacatagacacagcaaatcagtgatactcgtgatctctcgcgcgagccctccacaaaactgattataagactggtgcagaggtaccttacagagccggaacaaagacacacatgttaaggatgaatgaaacatgattgacgaactagaatccgacaagtaatgacttatgtggcactagtatgtaagaaagggctgctaacaactacttcaacgactgaaaaactaattatgtgacgagaatcagcttatgcagtcgagaatatcgtcgtatatgaaatggttcacattcttgaggacgaacgaagatgcatatcgaacgcgcatacctaatgctctgtcatgaggaggaaaccatgcatagtgaag

SEQ ID NO: 247431 - DNA, 335 bp, Glycine max
  unsure (1)..(335): unsure at all n locations
taatttatgagaaaataaattccattgccccagtggtaagattttttctactctcattttttttaagaattaaatatgatatcagaaggattatgataccgtctatttaattattnttttttctattatcatccatctaaaagttatatttatcataaagtatatcaatacatatctattaattcttagtttattttacaatattggttataaagtagtggtagttccactattttacgtcagtgatccatcttncataactgatggtttagtcgaatgtagtagtagtcatacccgatatcagttacgccatatnttaatttccctttcacaac

SEQ ID NO: 247432 - DNA, 447 bp, Glycine max
  unsure (1)..(447): unsure at all n locations
gcttcttggtggtctctctatctagctgaagcaaactttctctttttacttgtactgtatggatctcctagatccattggacccaagttcaataaggccagcccaattctgcattgcatatgagaaatctatacaatttactcttttctcatcatggcatcagaaagttcagcagtatttatatttttaataattctcatacaatacatcacgaaagcttgagttgaagcaaagcgggaaaaggcacccaatccatgaaaatagaaatcaaattacatagcatattaaacaaagattaaacacacaaatcaagaagaaaagttcataaatgaagcattaataacagcaccagatctgatacatacacaattggtttcatataaatncaacacacaatgagactaaaacacaatacaatcacacagacaccttgtgaagaaacaacaa

SEQ ID NO: 247433 - DNA, 565 bp, Glycine max
  unsure (1)..(565): unsure at all n locations
ggctcacctccctccttaccttctgctttttccgtctaanactcgtgcancaccnntttcannctccccagcctgccggcccgttgatacctatattacgcgccttagataccaacctgcgatttgtctcacagtaaagatcgaacggttttaaaagggataatctgatctcatgctccgagtaatgcaaaaactactaaggccactgaaaaggatgagaatgatggagaaacctccgctgcgactgccattctatatggacaagttttccaccgacccaacaatgtcattactaagccaataacaacacaatctactacccaccaccacattatcacaaatgccatctctaaataaaccacaagaccacctaccagacactatgcttaaaacaattttagcccaaccataaccccactcaaaaggaatttccacaaacatcccttggactcccccaattcagggcattggctatctgggccaattcacccagaatncaagggtgcataacccggaaggtcccaacccccttttccgggaccaactgaaccacatggctaactcg

SEQ ID NO: 247434 - DNA, 458 bp, Glycine max
  unsure (1)..(458): unsure at all n locations
agctntaagtctaccaacaaanaaaaatattttcttttaatttttataaagtaaaaataaaaggtccaatatattttttttaaaaaatttaaaataagtctcatttgttatcgaccagtcctgcccatgaaatatatcaaaataagtagctatcattgattttgtatggctttcgtagcaactaaatcagaattgcatcaaggtggctattattgaacctttgttttaattatataaacactgcattttaatagctaaaatattttattattaagatttttaggactattaaattactacaacatatgttccaaattttttaagaatttagaatttagatttttaagaatttagatagtgtngcagttaatcgaccttctatttattttgagggttcatttatgcatacattagtagagtagaatggaatgaaataaaatacatatttgaattataat

SEQ ID NO: 247435 - DNA, 352 bp, Glycine max
  unsure (1)..(352): unsure at all n locations
acacatacctgagtnttaatttttttctttaatttaattttcttcaaagctgtgaatcaaggctaaactctcagtttgagaaacaacacatgttcaccaatttttaaacaaagccttataaataagaaataaaaatagacattcttgtaattatttgtaaacaacagaaactggagaataaactagctctcttgggtcaatggtaaattctcattntgataaactacatctattcaccagtttctatacaagtctttaaaataggaaataaaataaaaataatgccatctttgtaattatttataacaacaaaaatatcttaaaaaatcggatatgcccatagctacttgat

SEQ ID NO: 247436 - DNA, 405 bp, Glycine max
agtgatttcttgtctcggaatgacgagaacttggattgtccacactatacccatgtcctgaacgcatactgttgatttagaaaaacatgcaaagactggccatgcacacacaatatgccgacaatattgaactaaaaatcctacgaaactaacagcattggcttatgaacacaactctctaattaacataacccacaagactaccaaaaccgaagaacactccacccgtactttaactacacatcgttctcgacgttcagcgataaaagactaaaacaatcttatagtgaatacaattcgacttgtgtttaaaagcggacatgacattgattatattactcctaagactggagaagatatttgaagagtatgaagttttcacactactcctaatatggacgtagg

SEQ ID NO: 247437 - DNA, 371 bp, Glycine max
gtgttgaaaggtgaaatctttctgcttgtattggtgaccacagagtggtacctggagatatgtcgcggaggtcacgagaccttggggacgtcaggtggggtgctattgcccaaaaccaagcttgaccaatcccgacccaacccgggcatagtcggtcagtgagaacatgtgatgtacctaagcaagcgagctcctggcagtcaacagataaaaggaaaacgagaccacacagcaaggaggcttgtggtggctggccagctgtgaattttgtgtaatatgtggattgtggcctctggtaatcgattaccaagggtgagtaatcgattacagcgcttaaaattgaagacaggaggctaagatggtctctggta

SEQ ID NO: 247438 - DNA, 243 bp, Glycine max
tgaaatctactacctcacaggtgaaagccagaaggtcattacgaactcttcattcttggagaaattgaagaaaaatggcgtactgtccaagacccacaaaatttatgtgacatcctactttgcccttacaaacacatgtcaaccttacacgtcagccctgctacaagagcacagacgcctgactcttagtagtccggctccccaacaaatatgttatcttcaacctaactaatattcaaatat

SEQ ID NO: 247439 - DNA, 314 bp, Glycine max
agctttatgcttaactatgtatgggcaaaatttattactgttgctcaagacatacaagtgaacttgtaacaaatcttctacacttggagtgatcacatgtagtcctcttgaacccttaccaaccactctgtcatcatgccgagactcaggaaggccaacatgtttagccttctctaaaaattctgaacaaaattcaatggcttcttctgcaatgtacctctcaacaataaaagcttctggatgatatagattctttgtataccctcttaaaatcattatgtatcgctcaaccgggtacattcaccggtgataaa

SEQ ID NO: 247440 - DNA, 447 bp, Glycine max
  unsure (1)..(447): unsure at all n locations
cgcttatatacgcaagagcttctttcttaaagccacatcataaatatgtcataaatcgcacttgcaggtcatttaccatctaatcaacgataatatgcataatcatcacggatccatacgactttcaaaggtcagactttctaagaaattggttttgagctgcctggcntttacccctcctttgccttttgaattgtgtaaaacaagagagcatgctgatcgaagccgcaccctaatcaacaaaatattaacatgtctaacacaagaagtgatcctagcgcgttcccaatgagcatgatacaccaatgttctaacagattgtatgacataccacaaattgggggggggggcgacctccccctctcataatcaattcccataattcttagacactatcatagctactattcacccctacgatcgctataatgtacccttcccgacact

SEQ ID NO: 247441 - DNA, 276 bp, Glycine max
  unsure (1)..(276): unsure at all n locations
gctttcttcagaaaactttcttgagaagcttctttgagaaaacttccttgagaagctaaagcttagctacacacacctatctaanaactaagctcacctacttgagaagcttccttgagaagctagagcttagctacacacacccatctaagaactaagctcaccttcttgacaaaatacatgaatatacaaagataaagtccctactacaaagactactcataatgccctgaaatacaaggctaaaaccctatactactagaatggtcaaaatac

SEQ ID NO: 247442 - DNA, 333 bp, Glycine max
  unsure (1)..(333): unsure at all n locations
tgcgagattggtcttcgccagtgaaaggatcgatgttggttctaaaagaggcaaatttgatcatcctactaagacgactgaaaaactgggcaaatgaagagggtgagaaagagggagaaacccatgctgtgactgccattcctatacggccaagtttcccaccaaacccaacaatgtcattactcagtcaataacaaacctccttcttacccaccacccagttatccacanaggccatccctaaatcaaccacaaagcctgtctaccgcacttncaatgacgaagaccacctttagcacaaaccaaaaaaaaacaccaacaaaaaggaatttt

SEQ ID NO: 247443 - DNA, 366 bp, Glycine max
  unsure (1)..(366): unsure at all n locations
agctntgagcatttccttttacttttatntcactccatcatcatcactcacacatcanacactcactagctcttctaagngttctctggctctctctttcttttgggggatggagttcaacaagttcagaatcagaagctatgaggggcaatctgatagggctcaagtggaagatcttgagagaagatgcgaggtanggccatcagaaagcgtgtttctcttcacagacactatgggtgaccccatttgtaggatccggaacagtcccatgtacatgatgctggtaagtgatacacacacacaacaattactatgccactataagtcactaacttcatgggttttttcccttctcattatgtatat

SEQ ID NO: 247444 - DNA, 517 bp, Glycine max
  unsure (1)..(517): unsure at all n locations
tgctggncnaatgagctgtgaacgcttatccgtacatccgagacagttccgacgaccgatccgtttcatgacactatgttttcgctcttcttgtgtgttatagtgacttcatatacatagtctccacgatgacatactgtggtacgtgttgcctggtgcacacaattgcatacgttgagactcacctgcatcacgtttcgtaatggaacactgatgcatgtaggtcgctttatgatgcttactgaatggcattgagtccgacgaggtgaatgggtgtcatcctatgaggtctgactagttatgaggatgccaccccgtaatgatacaacactatctgaatgtatggcttttgacatgaactttgtgttcaggacgtgagacctcttgacctctctgccaaaagaattttccatccggnaagttatcctntccattcactatgagaagatctgtatttgactatacaattccgtgagataatacctgtcgtccatgagctagagcatgaggaacaccc

SEQ ID NO: 247445 - DNA, 349 bp, Glycine max
agcttgtaggtcttggatcttcttcatcaatggagtcttttgcttcttgaagatcaatgacaacataatggagaaggaagaaagatgattggagaagccacttcaaggagaagatgagtcaagaagaagctcaccaccatatgaaaccatggataagagcttgaaggtagaagaagatgagtggagggagagaaagagcacgaatttttgtacttaaatgaggtatgaaatttgaagtgtaattctcaaatgatcaaagttgaaaaaaatgcacacacatgacctctatttatagcctaagtgtcacacaaaattggagggaaatttgaatttctattcgtatttcact

SEQ ID NO: 247446 - DNA, 465 bp, Glycine max
  unsure (1)..(465): unsure at all n locations
cgcataagcaagtagtntcgtcttaattccaaatcatagatatgtcataaattgattttgcaggtcatttcccatctaatcaaggataatatgcataatcatcatggatccataggactttcaaaggtcagactttctangaaattgggtttggctgctctggcttttccccttcttttccctttttgtttgtgtagaacaaggagcangctgatcgaggccgtaccccgatcaaataaatattaaaaatgtagaaactangaagtgatcctangtcgtttcccaatgagcantgatacaccannatgttcatacagatagtangaaatagtaacaaatttgggggggggggggggnnnnnnnnnnnnnnnnnnnnnnnnnnnnnnnnnnnnnnnntnnnntnnnnnnnnnnnnnnnnnnnnntntnnnnnnnnntnnnnnnnnttnntattttnttttttttcc

SEQ ID NO: 247447 - DNA, 252 bp, Glycine max
ttttttcgatgtttgtgaaacattaggaagctgtaacaccatacaaaatagcgttgataggtaatggtcttcaagattgatctttgtgagatttctggctcattgactaacaacattggcaactttgatttgtcggaaagcattgacttgtccagcaacaatttatcagaagaaattcctgaagttggtagctcattgctgagtctaagagttctcaaacttgaccaaaacaggtttgcacacaacatacct

SEQ ID NO: 247448 - DNA, 379 bp, Glycine max
ttaaaagtttcgaaagaccaagttctatccatcacactattcaaccccccttctagtgtgtttcaatcacttcatatacctactcaccacgatgatttcttgtgttaggtcttgtcttgtgcacacaattgcatacatgagactacctacaacagtctcataaggaacacgaggcatgtattctctttatgattctaattgagtggcattgagtccagtgagatgaatggatgtagtcaaaggagtacaaactagttttgtggatgccatcccaaaatgattcaacactttctgaatgtattccttttgacatcaaattttttttcaggacttgacccctcttgatctccatgcccaaaatcttttatgcatctctcat

SEQ ID NO: 247449 - DNA, 371 bp, Glycine max
ctcggagatctgattcaggcgcataatatatcgagattctcgagaatgtacaacgaaagctctcgagaaattccaatgctcattatctttaactcggaggtctgatttaagcgcataatatatcaagacgctcgaaattgaacaacggaagctctctagaaattgaaatggtcataacttttcactccgaggttcgattcaagtgcatgatatatccagacgctcgaaattgaacaatagaagctctcgagaaattcaaatggtcataacctttaactcggaggtccgatttaggcgcataatatatcgagacgctcgaaatataacaatggaagctctatgggcaattcaatggacataacttttatctc

SEQ ID NO: 247450 - DNA, 288 bp, Glycine max
cccaattcccaaacgccaagcccaggcgccttctttcttcaaaggccccttgtccttttgcgacctcaatttacccgccgcttgggttcggggacatgagcgccgtctacttggcggtgcccaaagaaagcgctggagcccgcggcgcggtgttcgcggcgaacgtgatggagaaaggaggactggcgaggaggaacaaggaaggcagagcgaggacagagagggaaattctggaaatgttggatcatcctttcttgcccacgctctacgccttcatacacgcgccta

SEQ ID NO: 247451 - DNA, 353 bp, Glycine max
  unsure (1)..(353): unsure at all n locations
agaaattgggtgcaaattntaattcctttggctcgaaaaagttgactctggtacccggggacatctctcgtgaagacttgggattggaggattccattctaagggaagagatttatgatcaaacagatgtcattattaacttagctgcaacaactaactntgatgaaaggcatattgtatatactaaaacatcataggcttttatgcctatttaatggttttggtgccctggccttagttattattctcttgtttcttcttttaattactatctcaccttaaatttcaggtatgatatatcgttgggtctaaatacctttggtggtaagtatgtcatcaacttcgccaaaaat

SEQ ID NO: 247452 - DNA, 349 bp, Glycine max
  unsure (1)..(349): unsure at all n locations
agctnggtgcatatgatctatatgctctaactttatggggagtgttgaatatccttgtcgtttagccatttgtagtaacttagtttgtagcctttttcagagggcaacagtgcattgtcactgacatagcctctctcttctctctctctcttttgtactctatatatatgtactattttgaattcaataaagtaacgaagaaagcttttattctggtctccttcaactctatgaaagcacaagtcttgtgtttttctttggatgatgcggaggagactaaggaattgaaatgtgccgacttggcttatgttgatgtcttatatcaatgttgagcatgtgctgatttatc

SEQ ID NO: 247453 - DNA, 307 bp, Glycine max
  unsure (1)..(307): unsure at all n locations
cttgagcctttcttggtctctatgtatcctagcacataccatangctactagctgatgtgttttatccaaaaaaataaaataaaaattagagcactaggaatttatattgctttacctaaattatgtattttaaaatttcaaggaatttaattgatgcatttaaatttctatacattttaaatttcttagaattttaaaattctctatccaaattccaaacacaaccttagttacttttttcgaacaagaaattttgtaaatgaaacaaatcttattactttatctgaatgagattttttacaaatg

SEQ ID NO: 247454 - DNA, 342 bp, Glycine max
  unsure (1)..(342): unsure at all n locations
agcananaattggatgagtggcttcataattcgaatgactgtgtctgatgaagcatacgatgttactctgcaaataggtttttgactttttcaaattggttttaagtttttctaaaaatttataactcttctaaatggtcctcttgaccagacatgaagagtctatgaaagctaggctgtgatctgctcttcaagattttactttttcaatcaatcctttactagccttgaaatctctttgaacttcttcttcttcttctttgtaccaaatgctgtctgaagttatgcggttgtctaaaccttgaaaacttgngctattcatcttttcattctcttctccct

SEQ ID NO: 247455 - DNA, 484 bp, Glycine max
  unsure (1)..(484): unsure at all n locations
tgtaagattatggagtacccatcacatgtggtactaggtggcggtcgggcgatggtgcacaacaagttntccacatccacaatgcgcgcataaacccaccatccnctgttgcccacctccatctgagctcacgtactcccacgtagcccatatccttttttctctcaacaccgggtccccatcaatcctcccaagtttcctccaacatcaaagtaatacaacattcacacagcacaagctatcgcagccaagcaaaacagggcaaaggcagaaaactctgcccaataacaccaaccaaaatcacagcttttctcacttaaagaccccagtaacaatttcttcgatccaattcgttaaccggtggatcgactccaaaattttattggaagtctatagtgtatacgcctacattgtgaccgttgggatctactaggaaacacccagaactcattctgcactactctttccacagccaaccacacac

SEQ ID NO: 247456 - DNA, 234 bp, Glycine max
ctttggtattccatttcgagcttctcgatatattacgagactcaatcggacatccgagtaaaaatttattggtcgttggaattgcttagagcttcaacattcaattacgagcgttcggatatattacggtactcaatcagacatccgagtaaaaagttattgtcgtttgaattggctcagagcttcggtagtccatttcgagcttctcgatatattacgggactcaatcagaca

SEQ ID NO: 247457 - DNA, 403 bp, Glycine max
  unsure (1)..(403): unsure at all n locations
ttgagcanattcacacgacaatataattttactcggatgtcttattgagtcccgtaatatatcgagacgctcgaaatggattactgaagatctgagcaaattcaaacgacaataaattttttactcggatgtctgattgagtcccgtcatatatcgaaaagctcgaaattgaatgttgaagctctgagcaaattcaaacgacaataactttttactcggatgtctgattgagtcccgtaatatatcgaaaaccttgaaattgaatgtagaagctctgagcacattcaaacgacaataactttntactcggatgtctgattgagtccgcgaatatattgagatgctcgaaatggaataccgaagccctgagcacattcaaacgacaataactttttactcggat

SEQ ID NO: 247458 - DNA, 343 bp, Glycine max
  unsure (1)..(343): unsure at all n locations
aatgaaaattntgtgggacaggaaactactaatgtggatacccctgatgacacgatgactaatggatttattaataccctgaaggctaacattgatgatagagatacaaaagcttctaaactaatgcaaatctcgaagaatcttgaaggttggtatgttggtcttgcatgtattggaacgagtttggctgcttgttgaacaattatttctacctttaatggtggntttatctttngtggttatgaatacttatttcattggctttgatattggtaatggtaccaactcttaaccatagtcttgtgatggcgtgtgtntntattctctgcgtactactcttata

SEQ ID NO: 247459 - DNA, 455 bp, Glycine max
  unsure (1)..(455): unsure at all n locations
ntacaacacatgccactctactccaatntcttgaaggatattatcaaggaaacataagtatattcaccaggaaaacatcgtagtggaaggaaattgtagtgttgtgattcaaaagatcctctcccacccaagcataaagaccctgggagtgtaactatttcttcttcaattggagaagtcattgtgggaaaggctcttattgacctcggagccaacattagtttaatgccactctgcatgtgcagaaggttgggagagttggagatcatgcccactaagatgactntaaacctggttgaccgctccattaccagaccatatggagtaattgaagatgtgttggtcagagtgaaacattntatcttccagacagactntaaggtaatggatatctgtgaagatactgacattcctataatatggggaaggccattcatgttaactacaagatgcat

SEQ ID NO: 247460 - DNA, 390 bp, Glycine max
  unsure (1)..(390): unsure at all n locations
agcttgtgactcttggctatttctttaanactattcactttttaaaagttgtgactcttttgaaaactagtcactttaaaagttgtgacttttgaaaaactcttcagaaacaaatcactttaagaattgtgacttttggtaatttatttttcgaaagcagtcactggtaatcaattaccatgatagtgtaatcgattagacatcaacatatgtgactcttcatgtttaaatttgaaaatcaaaatgtttagaaacactggtaatcgattacgagtattgtgtaatcgattagacaagtttgaaatgatttgaaaaaagtttatcacaagctgtgactcttgaaatttgaaatctaacgctttaaaacattggtaatcgatgacatgatta

SEQ ID NO: 247461 - DNA, 338 bp, Glycine max
  unsure (1)..(338): unsure at all n locations
ntgcggatntggtcttcgccgggaaaaggatcgaagtgggtctgataaaaggaaaatntgatcatcctacttggacgaatgagaaaactggggcaaatgaagagggtgagaatgaaggagaaacccatgctgtgactgccattcctatacagccaagtttcccaccagcccaacaatgtcattactcagccaataacaacccttctccttacctactacccagttatccataaaagccatccctaaatcaaccacaaagcctgtctaccacacttccaatgacgaacaccacctttagcacaaatcaaaacaccaaccaagaaatgaattttgcagcg

SEQ ID NO: 247462 - DNA, 326 bp, Glycine max
agcttcatgatgatgaacctagcgatgttggttatgcctaaagcccaagtgattgattcaagacttcaagatcaagcatcaagaatcccatcccagattcaagattccagagaagaaatcaagaagccacaagtcaagacttcatataggattagtattaaaagaatttctcaaaaccaaatagcacagttttggtttacaaaagaattttctcaaattttctaagttaccagagtgattactctctggtgatcgattactagttatcagtaatggattaccagtgaccagtttggttttcaaaatgttttcaaaagaattataac

SEQ ID NO: 247463 - DNA, 328 bp, Glycine max
  unsure (1)..(328): unsure at all n locations
tctaaactntatacaagaatgaagctctgataccacctggtggacaagtggcctcaaatatcttaagaagggggggttgaattaagatattacaaattatttnccccaattacaaattctactttgattccaatacaagttccaagttcccttaaagatggatttctaaacaatgattcaaattaaacaatctgaatataaatggtaagcaataattaataaaagagtttaagggaagagaaagtgcaaactcagatttatactggttcggccacacccttgtgcctacgtccagtccacaagcaacctgcttgagagttccactatc

SEQ ID NO: 247464 - DNA, 293 bp, Glycine max
  unsure (1)..(293): unsure at all n locations
cattgttacttccatgaatattgatattgtatcatgcttaantatatgcatttgcttattctgatcattgcgtgttgtgtgattatttcttccatgcaggaacatgattcctatttgctgtgagagtgaaatgatgggcagcagcaccaactgaggtgagcttatatctcctttgttatgtcattatccattgttagggcttagctctaccgagttttaaaagattggctaagattntgttaaaacatcaccacttatacaatgaaggaaagctggagttgctgcacatgatg

SEQ ID NO: 247465 - DNA, 474 bp, Glycine max
  unsure (1)..(474): unsure at all n locations
tatagatgcacccttaggataccacaatcctactntaatgtaccctntatgtacttaagaattctcttaacaactaccaaatgagtttctttaggattagtttgaaatctagtacatacacaaacgctatgcctaatatcgagatgactagcagttagatatagaagagggtcaatcatatctctatatcttgattcatctacatatttacatttctcaaccgggtcaagatagcatgaggtagccatatgtgttgttgactcttgagatttctttacaccaaaccttttaagtaaatcaatgcaatacttggattggttgatgaagattccactctctaactatnttatttggagtcctaaaaattaggataactcccncatcatgaacatntcanactttccttgcatggtctcagcanattctttgtacaagatattggtagtagctncagatataatgtcatctacatat

SEQ ID NO: 247466 - DNA, 396 bp, Glycine max
  unsure (1)..(396): unsure at all n locations
agcttgtaggattatggngtacccatcacatgtggtactangtggcggtcgggcgatggtgcacaacaagttttccacatccacaatgcgcgcataaacccaccatcccctgttgcccacctccaactgagctcacgtactcccacgtagcccatatcctcgtttctctcaacaccgggtccccatcaatgctctcaagcttgcacaacatccaagcaaaacaacattcaaacagcataagctatcacagccaagcaaaagcagagcaaaggcagaaaactctgctcaaacaccaaccaaaatcacagctnttctcacttaaagaccacagtaacaattccttcgatccaattcgttaaccggtggatcgactncaaaatttactgggagtctata

SEQ ID NO: 247467 - DNA, 476 bp, Glycine max
  unsure (1)..(476): unsure at all n locations
gcacgttggtaatgggtttgccagaaagaatgagaaggttatgtgcttnttccaacgctacacaaaaagaaaaggctgaaacactccagtgtttctgctcacgggaaaggaagcgttcctcacacgccaaatgttgtatggaagatctcaacggtcatatcatggacaaatgttctgtcatgcttcagaccaaatttagagaagatcccacggtttacaaaggctgggtagcgtttttacccatacatcttcatgtagcttccttgagaagcttcattaagaggctttctcgagaagcttcctcgtggcttctttgagaagctttctcgagagtcttctttgagaagctagatccttatctacctaagatgcaaggggtgagcgctcagtgcttgatactcacagcttatcgtatgaccaaagatgcacttatcgcgaggcttgcactagcgaaacgactggtnttcagaanatcn

SEQ ID NO: 247468 - DNA, 230 bp, Glycine max
  unsure (1)..(230): unsure at all n locations
agctnttaatcataatggtcagaaatccaatggtggttctatcagtccttcgcccactacttctggtagtgatcctttcaacaaaatatttcatttttagaatttatttttgacattgacatttgagtttcaatggtgtagtactaaattttgcatttattnttaatgtgttcttttgtgcattcagctgaaggaagtttccagaatggtagaaaccaagggatagatga

SEQ ID NO: 247469 - DNA, 296 bp, Glycine max
  unsure (1)..(296): unsure at all n locations
tcgatatctggactngagcttcaattatttagttggagaatgtatgtcaattccttctttcctttgtgcaatgacctcctncttgactcatctcgacctctcttacactggattcagtgggaagattcctcctcagattgggaatctctccaattagaattgccttttatgtgtgtgtgcgtgatgtaacgttaatggttacgaccaagctaaaagtacaaaaaanataatttgaatctaaaggttttcttgtaataaatataatgggtggaaattagccataatcaaatctactt

SEQ ID NO: 247470 - DNA, 368 bp, Glycine max
agaagacatatagcaaactacacgttagccacccatgaaaatggagaagcaacataactttcagttaaataccactatttgctagcttggctcacttcctagaatacattgacaaatactttaattataagttgatttattttatatagtaagttagcaaaaatgcttgaaatggtgtaaggttgattaaaaggagacaatgtgtcaataaaatttctaaatctagcttatctccactaaatttttggtgtttgccttgttacaatagaaagtcgtacagttgaacctgtttgaattttactaatccccaattgtttaatgcaaattattagaaagttgatattaacagtgtgataaatatgtgatat

SEQ ID NO: 247471 - DNA, 553 bp, Glycine max
  unsure (1)..(553): unsure at all n locations
agtcgcttttnnaatgataccttgcatgaacgtcgactctgtagactactgaagcctatcaacgcttgtatatgtaacatatacatggattggcttattgtgatgaatgtacatggattcctatacatcagagcaaccttctccatgcgagtttgaacccctaccgtaagaaatgccttcatgcacatgtntggggactagaccactcacgagtaggttaggcatgtgatgagccatacatgtagtcacgtaccaacatgcgactcttcaactgatggacttgtaaagctatgaacatagaatttgacatggtaccgtcaatgtttaatgactatcaacttgaggaaagagagtcatgaagtgattggttatatgcaagcttaaacaagataattgattagctataacatactgctgcgctccacacactacttatacgactaataagtttatacacgggtgagttgtgtatatgtgtgctagtcaaccttatcattaacatgtgaatactgacatgaatagtacataagcagtcatttatgcttgtcacggn

SEQ ID NO: 247472 - DNA, 180 bp, Glycine max
  unsure (1)..(180): unsure at all n locations
gtctanggtcatgcctcaagggctatccacacccttacccatcccctcttcaccttgggtagacattagtatggactttgtccttgggcttcctagaacccaaagaggtgtagactctatctttgtggtggtggataggtttagcaagatgacactctttgatgcaagctccattggagc

SEQ ID NO: 247473 - DNA, 560 bp, Glycine max
  unsure (1)..(560): unsure at all n locations
nggccctcaatgataccatggtatgtacgcgatagtctggcatgctcaagcttcgtagcggtctctaattatatgggccatgtagcctctcatatgctcgctatcgctgagaagtgcagggatctcctcgcggcggagtagatgtccaccaatgcttatgccttggctagcaatcggggagagctcttgacgtggcccttcaagtgtagagagcagagactctgtcccgtgacacgagttgcttgccgtcttagactgtcaccgcagtcgagtcagagcttacctctagccctgcttactctatgtacanctagggcgatactcgtgcaccacattggtgctcgtgggccgatgctacagataattcttcttggtacttgctgatgatggctagcatgcagggatctgtcgtccataaccgctgagacacgtatctctcggacctcaagcgagccttcaactcatgcttcnagactaactgttactccggatatgtgcttttctacatcgagctcatctcgtgatgctgcccacacagccctcggtactgtactgcgcct

SEQ ID NO: 247474 - DNA, 442 bp, Glycine max
  unsure (1)..(442): unsure at all n locations
agctaacataagcatcatgaattcatgatactctagtcatggagtatgagatcatgagtaagaatgaggaatagaaatagaatggtaggattattatgtatatgacatatattgggaaggaaattattgtatttttggaacttttagntaattggggttattagaaaatctttaataaattaagtcatttgattgttcagtaatttagaatcaagttgaaatttgcacattcaaggattgctgcgctgtagtgctgtactaacatacattttaatttgaggttgaattaagtatcaatattnttttggcactntctgttctattccaatcttggtctactctgtcactcccctgttttcttcattttcttcgtttctccttaagatacgtattgttggtttctgttttcatttcaatctatatgtgtcaatgacaatacaaa

SEQ ID NO: 247475 - DNA, 279 bp, Glycine max
aaaaaaaaggtattacttacgtgtaacacgtattgattatccatctgtgctatacgtggggtgatcaattgtgattccattttagctactggtaactattatggtcgtcatgaattaattaatgatgcgagccattaatttggccatggaaaaagactctgccacgtagttctttagggatcttagtaacctcgagttttgttttacaaggagtaacctcgagttttaaaataacaatcaacacaatttcaactacaaacattactttcattttataaa

SEQ ID NO: 247476 - DNA, 347 bp, Glycine max
  unsure (1)..(347): unsure at all n locations
agcttgtataactcttaaagaanaagagtccatgttgtgtcttgagattgagacaagtgctagggaaagagatactcttctcaagaactttcaggatttggcaaagaaactgaaagatctttaaaaggatttgaagaagctgaatgaacttcatgattataaaaaagaagaaagatatgatctatagagtgtagaagcaagcttcatgatgagtcaagattgattcaaagagttttgatgataacaaagatgatgacaaaaagctcaaaagtcaagaacacttcatgataacaaagatgatgatctcaagaatcaaagaatgagtttaagattgaatcaagtacact

SEQ ID NO: 247477 - DNA, 221 bp, Glycine max
gaaaataacaatttagtgcccaacttgctccacaaagtcctcccaaaatggcttaagaacttagaagccctatcactaacaatgctccttggcaaaccatggagtctcacaatctccttgaaaaacaaatcagccacatgggaagcatcatcaacttttttacatggaataaaatgagccattttagaaaacctatcaacaaccacaaaaatggaatctct

SEQ ID NO: 247478 - DNA, 398 bp, Glycine max
  unsure (1)..(398): unsure at all n locations
agctntcaacatcanggttggngcagcanggacatgaangtatccattctattccaattctctccttttgtctttttattagtattttttttaaattgaactaacattctatgctcttaagtttggcttcttttcatacttgtatataaatgtaaggtgtccctttcatacccccttttgtgttgcttggacatgcttgtgagttttttggtttccttttctctttttgataatttgattggacatgcttgtgagttttttgttttccttttctctntatgataattagattgatgtgtgagcaatgatggttaggaggggagaagaagtgtctgaattctgagctatggcatgcatgcacgggccccttggtgtccctaccaactgcacggactcat

SEQ ID NO: 247479 - DNA, 470 bp, Glycine max
  unsure (1)..(470): unsure at all n locations
tacccatcacatgtggtactaggtggcggtcgggcgatggtgcacaacaagttttccacatccacaatgcgcgcataaacccaccatcccctgttgcccacctccatctaagctcacgtactcccatgtagcccatatcctcatttctctcaacaccgggtccccatcaatcctctcaagcttccacaacatccaagcaaaacaacattcaaactgcacaagctatcacagccaagcaaaacagagcataggcagaaaactttgccaaaacaccaaccaaatcacagcttttctcacttaaagaccccagtaacaattccttcgttctggttcattaaccggtggatcgactcgaannatttactggaagtctctaatacttaagcctacattntgaccgtggggatctactagcaagcatccagaactcattctgcatttactctttcacagccaaccacacacaagca

SEQ ID NO: 247480 - DNA, 404 bp, Glycine max
  unsure (1)..(404): unsure at all n locations
agctnttcgcatagcttactgtaagatctgggtacctaccatggaagaggtctccacagaggccattgcctccctcgccaaatgttatgaccagcctttgaggtgcttcacctttggggacttccagttatcacccacggtggaagagtttgaagaaatcctgggatgccctctgggaggaaggaaaccatacctcctctcgagattctatccctctttagctagaatttctaagatagtccaaatctcgacgcaagaattataccgcggaaagtaagttgaaaatggggtggttggagtaccaaggaaatatttataagcaaaagcaagagtcttggcaggtaaaggcgaatgggccccgttcatggacatcctagcacttttgatcttcggggggggggggg

SEQ ID NO: 247481 - DNA, 487 bp, Glycine max
  unsure (1)..(487): unsure at all n locations
ctgagctacgggtgagattaacaatccatctgtctgcctcctcatgattcaaatttgacttctcagcaagcactctgaaaaaattcgaagttctggttgttactacaaatccccaggtcgtcatttaggtgtgttacatggaaagtagaccacaggttattaacaagagatgctatttatcatatacagacagagaatctgtcacttaccaaaaaaaacttatattgataaacactcatcagcagtcatgtgagagctttcgaggccacaaaataaaaggaacaacttcttattgtgtgccttaggtttcgacagacagactcactgatctatgacacagaggctacatcgtgttgttcacaagtgcaacattgtagcatatgcttaagattataatagctacagcgacatcgtctcatattatacatgtgcatactacatgtcagtccgtggcgtattacacactatgtacttatatcggcgcccn

SEQ ID NO: 247482 - DNA, 281 bp, Glycine max
  unsure (1)..(281): unsure at all n locations
agcttacagttntagtaaaaccgtggacactcatccactcaaggttatggtaggcaatgatatagtaattgcatgccaccagatttgtccacgtacttcgctacaaattcaaggccaatcatttgatgttgacctgcacgtgcttcccattagtggtgctgatatagttctcgacatccaatggttgaaacaattgggacccgtgaccaccaattacgacaccctcaccatgtagttcgagatgcatgggaacctcatctagtttaaagctgatgcaccca

SEQ ID NO: 247483 - DNA, 398 bp, Glycine max
  unsure (1)..(398): unsure at all n locations
tctagtatctctgctagggtttccaagcattagagagaagaagtaggaattggagcctcaatttcattgtctctgtgagaggagcatttgtttctctaaagatattattttgcaaatctcaacggtcgaaatgtgcaaaaatgagttccaaacgtggtgtcaaagtttcaagacgatccaacggttaacaagtccaagaatgtagttttactaagacaaatttggatgtatgcgacaaaaagaaagggttttgggagaagaaaaagggagaacgaatttgggagcaaggaatagtgtaaagacgtatcataattgtaaaaaatgacctaatatgtctctatttatagcgatggtactctgagcctatnnattactctatnnttattttntttatttta

SEQ ID NO: 247484 - DNA, 283 bp, Glycine max
agcttcctctgccgtaaaaaagatattatcggccagtgtacgtaaaaaaattgcgcaatgtccgctgaaaaatatccgtcggggctatttaactaccgatgtcggctattgttttttctattccacccctgaattatatttggatgatgcctattaagaaatgttcggtcggggtcatccggtcatgcttctttttgaggcctcgaactgtcgtctttcctagccgggcgacgtcggctagcatttttttcgatcaatatctgagcgaatcatgttttttttt

SEQ ID NO: 247485 - DNA, 374 bp, Glycine max
  unsure (1)..(374): unsure at all n locations
tgccgccacggagttntccgactatgctcttgtgtggtggaacaagctacaaaaggagagagcaagatatgaagagccaatggttgatacatggacggagatgaaaaagatcatgaggaagcggtatgttgcggctagttactcaagggacttgaaattcaagctccaaaaactaacccaaggcaacaagggggttgaggagtatttcaaggaaatggatgtgctcatgattcaagcaaatattgaagaagatgaggaggtaactatggctcgatttcttaatggtttgactaatgatatccgtgaatattgtgagctgcangagtttgttgaaatggatgaattgcttcacaaagcaatccaagtggagcaaa

SEQ ID NO: 247486 - DNA, 303 bp, Glycine max
acaaagaatgaagaacgcattcgacaagattgtgtgtttgcgcaacttccatgaaagggaccttgtgctaaaaaaggtgtcccacgctgttaaagataatcacaggaagtgggccccaaactacgatggacctttcgtcatgaaaaaggctttttccggaggggccctgctgcttaccaacatggatggcgaggagctacctttacccataaattctgatgttgtcaagcgatactacgcttagaatctggggcaattcaaggatatcgctgcatgtttttttatttttatgtgttcttcttg

SEQ ID NO: 247487 - DNA, 413 bp, Glycine max
  unsure (1)..(413): unsure at all n locations
agctntgaagaactgggacatgattctctgttcgttatcattcaaattcttttatatattcttataaagtttgaaacactctcaaaacaccttgcatatcttgagagaaaagactatgaacttagatttcatattcgtttgtaagatgattaagagttagtcactcaacaaacaaatctcaaaaaaaatttatttgattaaagctagcactgacttggtaaggcaaagaatcttgggttgtctcaagctcggtgtaaagcttgagttgtagagttggaagtgacataatactagctattttgtgaaattagtggaacttgattagtagccaagaactagatgtaatctcaatgatagagacacgccaataataaatctctatgtcatatacacttctatggttatcttctctt

SEQ ID NO: 247488 - DNA, 445 bp, Glycine max
  unsure (1)..(445): unsure at all n locations
tgttaggttgagttgatgaagaaagctctatataaagggtactgaagtacgagtgaggttgatgcttaatacatcatatggttgtgagtaaaaaaaaaaatgggaaagtggtgcaaaaagaagttggataaaagaagatgtgttttgtttaaatatatttttgttttggttgggttaaagtaaaagtgtcttgggttccattggataattgtgaataatgggactagggataatattatggttgatgaggtactggttcaaggtttgnggtgggaattgtattgcgcttgatatttgcatacaattcacatcattgaagaatcttattttggcgaataattgaaatcaagcatttcatgcctttattgtcaacaagttggactgctgtatatttcatcattccatgctccattacttgtangtatcagaatgaaatattacatac

SEQ ID NO: 247489 - DNA, 372 bp, Glycine max
  unsure (1)..(372): unsure at all n locations
agcttatacggtctaggatgtggntntgtgactaaattcaatntagacacaagtcttgcacttgccacattggtacaactccctccatcaatgatcatcatgcaaactttgccattgatcaaacatctagtgtggaaaatgttttctccatgaatttcctccattgacttcaattgatggccaagtaaccgcctaatcatcaacaattctccctccggtgttttctccacttcctcctcatcatcctcactctcttctcccttttcaacttcggactcactaatgtactctccgtctataagaatcatgactttcttgttagggcactcatatgcataattgtccaagccttggcactgaaagcacttcaca

SEQ ID NO: 247490 - DNA, 121 bp, Glycine max
atgtcgttcagacataatcaatgcgaaaatcaattcatcatacctttggggcaatattgtcatgtgttaaagctcacaagaaatatgtgtctaccaaatggtcccaacaatgatagtgaaa

SEQ ID NO: 247491 - DNA, 335 bp, Glycine max
  unsure (1)..(335): unsure at all n locations
agcttctacttatgtggcagggcgggcttccttcaccttcttgtctccaacgcgaactttgaccattgttcttccttcccacgatgcttcttttcatgtccgcctgagtgggcttatagcctanaccatacttnccacgatttccttgggtatttatcaggctagttatgccgccgttgttttttcctaaacccatcccgggttcataaccgttccccaacataactcgggccatcattaccgctgcatcggacagacaaggctgcccaaagagggagtccacggaggaaatgctgaccacctcanaagactgganagcagtttctaacgattct

SEQ ID NO: 247492 - DNA, 302 bp, Glycine max
  unsure (1)..(302): unsure at all n locations
ntgatgactagaagtagaatggaaatccaaggagatgatagtgaagctagaaagaagatggaggaacataaacaacagctggcacctaagccaacacttgaacctatttctggatttgtagaacttgaagagattaatgaggagactgaagatgacaaggaggagaagacaccaataaaagtggaagaaaaagaacgaataatataagaagaaaaagataaagaanaaagtccaaaaatgaataacaaaaagagaaagttgttgatgatgcgctgaggagaggcaagagtgaagcanacact

SEQ ID NO: 247493 - DNA, 341 bp, Glycine max
  unsure (1)..(341): unsure at all n locations
cgaacacaagttcaagaaacacaacaacacacagggagtgagttatcacattcctagctaatagagaaacaagacaattaaatatacatattatgtacatgagataccacttgcttaaacatagctcacgtaatttcaccactttgtcattcaaaattcacttttcaatcatcaatcagattacacaagaatcccacactccgatcaagatataataacacatcaatttcataataaacaattagcaagcgtatgcaacaattatgctaagactcaatcttatattgcaatgtggtaccatgtcagtgaaaaacctcgtcnggcacctangagtacatgac

SEQ ID NO: 247494 - DNA, 479 bp, Glycine max
  unsure (1)..(479): unsure at all n locations
ntnntattttagtagatgaagatgaatntgtggccacctcatggactcctctaaggataataccataatttcttgcactgaattgttgggagttggaagccatcttctcaatcaaattcctagcctcagcaggggtcatatcaccaagagctccaccactggcagcattaatcatactcctctccatgttactaagttgcctgatgcctagtactcatgcaagctctctccactaagttgcctgatgcctgaaatgtcttttctgatggcagtggtcctagatgcagggaagaatttctccgagaacaccctcttaaggtcatcctagctgaaaatggacctgngagcaaggtagtacaaccaatcttttgccactccctctagagaatgaggaaaagcctttagaaatatatgatcttnctagacatcanggggcttcatggtggaacaaacaatatggaactccttaagaaatctat

SEQ ID NO: 247495 - DNA, 574 bp, Glycine max
  unsure (1)..(574): unsure at all n locations
cgccccctgtggggnattgaaactatctagtaccngccgatcctctgcagtcgaccctgcaggcattgcangcctntnggcattgaccaggtcattaggttggattattaatcagatttggtcagaagtcagagtttctttttaacttggtcactttcagaactggttgttccatttgtgggggtattccataaatacaagaaacttcctgccagcaatttattttgaaagcaaaaccccacaaaaacttagattaataggtagggaaaaaaattanaaggaaaaccactgtggnntagtatctctataaatcatctttcatccttcagtatgattnagtgagtgaagcactattttagtcctcacaattgtagtgtaatgtcattntagttcctaaaattattaaaatagttcctaatattgtgaagtgttaatcaaagtactctttttgctactctcaattaattaacgatgtaagagacacttagtgacatgttaagtgtcatattggcttctatgtgtcacacactaanggcctgtgttgcttttgcgtggtcgtttgccaaagcttccn

SEQ ID NO: 247496 - DNA, 359 bp, Glycine max
  unsure (1)..(359): unsure at all n locations
cctccatcagcatgtgacgcaggtccatngntatatgtatgagtcggtctctctaagaagaagaattggtcaggacagtcaacaattgtgtgaatgattcaatggatggatccacctctttggggaagagtcagtcgcactgtccaaaatataatgaaattttatttctattaaatgtttcttaatttatgtgtattaatccttaacaactaaccttggctccttaaaatgagaagaatgcacttttaaaaaattaagttcaatagtaatcattagttaaaaacaacaactaatcacactctacctagttaattttatgtcttgtaaatatgtatctaaatttattatattttctaata

SEQ ID NO: 247497 - DNA, 279 bp, Glycine max
  unsure (1)..(279): unsure at all n locations
gctttcgaaacgtttccgtgaggaatttcgcgaaagtttcgaccgttcttcgacgttcttcattcgntcttcatcgntcttcgatcttcaacgggtaagttcctcgaaccaagcttttcgattcattctatgtacccgtggtggtccacattgtgtttcgtgtatttttattctcgtttcatttactttntacacccccttttgacgtgcttaagccattntatttaagtcatttctcgcttaacctaaaaataaaataaatctccaccgatcgtttga

SEQ ID NO: 247498 - DNA, 401 bp, Glycine max
  unsure (1)..(401): unsure at all n locations
ctaagctattcttcaagntaaaacttctaacgacatccatgagttaaaacatcagaatgtgcacatctcatacagttnaggaaacaaaaaanaaagaaaaagattgtcaataacaattcagaatatgcacaaaaaaagaagtttctattagtaccttagaaaccagaaatgcacacaaattgggagaagggtaacaattgtgaatattgactatgggataaacaaaatagagaagtaaaaagcaaattagagaggtcacaatgcactactattanacactcatctcaaactaagaatcaagcacaaaacaatacccaaaactttaaacattntaatcaagcaaattacagaggtcacaaactcataatgcactgtcaccatatatattaagttactatcac

SEQ ID NO: 247499 - DNA, 447 bp, Glycine max
  unsure (1)..(447): unsure at all n locations
agctgggtatttttatgtgtttntgatatttgtacgcgcagattatgattatgacattcatatagtttttaagtatagtatcttaaaagaaaagtggcaagaaagtagagctcatttcacctttgcctaaacctccagaggagtaaaaagaagaagaaataaccgcagcaagaggagaaaaaggaggaggtaaaccacaacatttaacatcggtgcttacgtcaccaacgatgttaaacaacaacatttaacatcggtgcttacgtcaccaacgatgttaaaatacattttttacatcgttcacgaatacaacaccaacttagaaagtataatttctacatcggtggtcacgataacaccgatgtagaaaacatggtattcctacaacggtcgatggagcaacgatgtcaaaacttttaactttcaacaacattatattcaaaaaac

SEQ ID NO: 247500 - DNA, 247 bp, Glycine max
  unsure (1)..(247): unsure at all n locations
tgtgatgcggctgggaggggaatatgagcagtcttaatgcaaaataagcaacccattgcttattttagcaaagccttatctgacaataatttagcaaaatctgtctatgagaaggaacttatggcattggtccttttcattcaacattggaggcactactcgttaggaaaggaatttgtggtgtatacagatcacanaagcttaaaacactttctgcagcagaggatctcctctccggatcaacaat

SEQ ID NO: 247501 - DNA, 420 bp, Glycine max
agcttgagggtaaactagatgccttggttaacctggtaacccagctggccttgaatcagaaatttgtacccgtcgcaagaatctatggtttatgctcctctaccgaccaccatacagacctttgcccttctgtgctgcaatctggagcaattgaatagcctgaagcttatgctgcaaacatctacaatagacctcctcaacctcaacagcaaaatcaaccacaacagaacaattatgacctctccaacaataggtacaatcccgggtggaggaatcatcccaaccttagatggtcaagtccttcacaatagcagtaacaacaacaaccttattttcaaaatgctgctggcccaagcagaccataccttcctccaccaatccagcaacaacaacaatagcagcaacaaccctagaaacagc

SEQ ID NO: 247502 - DNA, 379 bp, Glycine max
  unsure (1)..(379): unsure at all n locations
agcttaatggatctgtaganaatgatactgcgccaaaaccgtttgatggcaaagatttccatgatcgtgtcaaggatatcataactatctttgggaagacataaaaaaaagcaccagtgagacacacatttggaagaaaaggtccattttctntgagcttccttactggtctgatcttgacattagacattgtatagacgtgatgcatgtggagaaaaatgtttgtgatggtttaattggcacccttcttaacattaaaggcaagacaaaggatggtttgaagtgtcgtcaagacttagttgacatggatatacgagagcagttgcatccaataccaaaaggttcgcgaacataccctaccccagcatgtcacacaatg

SEQ ID NO: 247503 - DNA, 357 bp, Glycine max
gcttgctttcaccgaacctttactatctctttccacctcgatcaatacaactcgacatgacagaaaccttcccatgggcgcattaagtgcaacattgatgcagcacttttccagcaacaactatgtttcggaattggtctttgtttgaaaaatcacaatggctcatttctccaagctcaaaacatggcaacatcgaactccaaacccgattgaggcaaaagcatcgggtctaatccaatctctgacttcgttgaaggatctaaattaccagaacattgattttgagcttgacaacaaggtggtggtcgatggcttcgacaatcttaaccatggtctctctgattcaatctaattttg

SEQ ID NO: 247504 - DNA, 372 bp, Glycine max
  unsure (1)..(372): unsure at all n locations
attccttttatgaatgatgctctcctacaacctaagacaaggtagaaggagataaactgtacaagctcaaggttcaataaaacaatcatactttcagctcaaaatgggtgcaagggataaatcaatcatgcacaaagtaagctctttagctaagtggctatcttcaatcaaaacatggccttcatcatcttcaatatcacacattcattctatactcggagattcatgcaaaaatcattactcaatgttagtcattctctcacaattaaagatcacactctcactgngttacgactaatgcgttccttacaatcaacctgacanaccaactaacattttcagtcatgatcctaattcccatgtccttctctt

SEQ ID NO: 247505 - DNA, 279 bp, Glycine max
  unsure (1)..(279): unsure at all n locations
accatantcccacagtgagccagcatgtcatttcattcacatcaaaacccatgttcaatcccttatcagcaacattcaaaatattctcttccacataatggttccacacccaattcaccaaaggcacatgattatgctccccatcctggtaagtcttccttccacatgctatcttcaacacaacaaccccaaaaccgtacatgtcagattccttgctaaccctttctttctttacatattccggggccaggtacccatatggtccctccagctttgtct

SEQ ID NO: 247506 - DNA, 379 bp, Glycine max
  unsure (1)..(379): unsure at all n locations
tctntgaagctgcttggataggttgagtcnttacaaattttcagtcatccaactcgctcagcgtgacacccgcgctaagtgagagacagcctacgcgctgagcgagtaatactctcgctaagcgcaccaacccttcatccagtggcagatggtgcgtcgctaagcgagtgcatgcgctaatcccaaaaccttctcgggttgtgcctcgctaagcgcaccagcgcgctaagcacaaaaccttctatgtctgagctnttatgttaattgggctaagcgagatcatctcgctaagcccaaatgtctctgtgtaatggcaattgcactaagcgagaccacgtcgctaagcgcttcaccaccacttgatncacactcacttaat

SEQ ID NO: 247507 - DNA, 376 bp, Glycine max
  unsure (1)..(376): unsure at all n locations
agctggacactctcagctgcacttcaccagaataataagaaataatatcagaaccaagatattcctgcattatgaatagcaaaactttggcatcaaagtaaatttttctagcaagaaaaatatgtttgcccagaaaaatgacaattgtcgtaccttttcagaaacaaagtaatgtaccattggaactacttcaccatagagataaactatgcagcagtaatcattacagcatctctatttgttaacatcttagtcctctgcctcatctgaaaatggataggcaagtaagacatctagtattataacaaagatgattacacagaagatgcttccctttccagaacgcatcggatatgtgcactacnttgtattctca

SEQ ID NO: 247508 - DNA, 387 bp, Glycine max
  unsure (1)..(387): unsure at all n locations
agtcgtgacgcatatgaacaaaacacaaatatacactgactggatttcaagtcaaccggacaccttatgttttatctaatgtcagcagtgtgctatggttttgaaatgacagcaacatatacatttcataccaatttccttcttgtgttaacaaaggaacacaggatatatcaaaatctaggattaactttctctccaatcaacattctctccaccttcctccagcctctgtctctctctctctatatatattnnttgngatttttccatcattntcttttttctttccattatattttagcttctgatcttaantttgtactagagaggcaagagaggatccgatttncaacatatcatctttcatacagcacgagcataaatgta

SEQ ID NO: 247509 - DNA, 346 bp, Glycine max
  unsure (1)..(346): unsure at all n locations
agctgtgtgtaatcgattacactaatttggttatcgattaccagtgactgtttctgataaatcaaaagatgtaactctccaaaaaggtttttgactttttcaaattggttttaagtttttctaaaaatttataactcttctaaatggtcctcttgaccacacatgaagagtctatgaaagctaggctgtgatctgctcttcaagattttactttttcaatcaatcctttactagccttgaaatctctttgaacttcttcttcttcttctttgtaccaaatgctgtctgaagttatgcggttgtctaaaccttgaaaacttgngctattcatcttttcattctcttc

SEQ ID NO: 247510 - DNA, 393 bp, Glycine max
  unsure (1)..(393): unsure at all n locations
aggcctgtctcgccacactatgggcgagtcccacgtggccctatctcgccatcactgtgggcgagtcccacgtagcttgtgtgtcgccatttgcattggcgacactctcctctctccctcctacgtggcttatatcgccactggtattggcggcactctcctctctccacctttgtcgccaatgggtatggcgggttcagccttgccgccaatggcaatggaggcttccacccaataacagaccccctccgtcatttcttttaaaataggccccaatccgtaaatagtttttaaaataagcccncttaggtaaatctgcctcatttagtgtgtaatggaattggtggaagttatacatgttggacaaggcatggtgagacaagagatgaattc

SEQ ID NO: 247511 - DNA, 307 bp, Glycine max
agcttagaggtcaccagtttgcgagaaatggttcagttgatgggtcagctccaacgtcttcttgcagacctatgggaagatttgggacctatctatggtagaagtctccacggaagcaattacatcccttactcagtattatgatcagcccttaaggtgcttcacgtttgggaacttccagctagtaccgattgtggaagaatttgaagagatcttgggatgtctgctgggaggaagaaagccatatctcttttcagggttctatttctccacgacaagagtagccaaggtagttaaaatctcggta

SEQ ID NO: 247512 - DNA, 221 bp, Glycine max
  unsure (1)..(221): unsure at all n locations
tgtctcagcgtttatgcgagatggagaccaacatgctagctatcatcgccaagtaccaagaagagttaggtctagccatggcccacgagcatagaatcgcggacgagtatgctcaagtatacgcggaaaaagaggctagaggaagggtgatcgactctttacaccaagaggcaaccatgtggatggatcggtttgctcttaccttanacgggagtcaagaa

SEQ ID NO: 247513 - DNA, 295 bp, Glycine max
  unsure (1)..(295): unsure at all n locations
ntgaactnggtgtaagctctgtgatctgttcgcgatagaaatataagagaatgctctgaagcaaaactgctgagaaaaattatgatatgaatctataacttcgtttgatatagatngaaattggacgagtgatcatcgtttttataggagctatagtccactaggggtcttcacatgatttcgagggtgatgctatgtgcacccaacattntaagtgaatgggcgaaaatgccattcactcaatgtgatccgtatgagccatacagatcaagttcgtccgtacaaatcatacgta

SEQ ID NO: 247514 - DNA, 297 bp, Glycine max
  unsure (1)..(297): unsure at all n locations
aatgcttcttttttcacttgtgaagatgttcaaaagttggctatgaagatggttcaaactgagaaacatttggtatttccattggtttataaacttattgagctagctttgatattgccggtgtcgacagcatcccgtgaaagagctttttcagcaatgaagattatcaagtctaaattgcgcaataagatcaacgatgtgtggttcaatgacttgatggtatgttacaccgagcgggagatattcaagtcacttgatgatattgatattattcgaacatttaccgcanagaagtct

SEQ ID NO: 247515 - DNA, 379 bp, Glycine max
  unsure (1)..(379): unsure at all n locations
gtcttcatgttgctcccnctactctaacagtttgttcctttttggttntctcanttggctttgtgttccttnttttcaaatgatgtttcatttggagtttatatttgggttctcaaaattgtttttttttactttnttcgttactgatgttgtgtataaacaaggtttgtgaaaataaaaaaaaaatgatttttatgtttacctgtaggatttgtggtgaattcactcttattttgcaccataatggtaaattgatacaaaatgcaaatggggcactagagtatgttagtggtgaattntgtatttgggaagatattgaaacagatctggttaatgtgtggacaacccacaaattgtgcaaagcttgccgcaactatgt

SEQ ID NO: 247516 - DNA, 162 bp, Glycine max
agctaaagacatacaagttctaacgattctattatgtggcccttaatctatcatatgtgacataccgagagccatgaattttcgggcgagtaggttgcatcgcttggcttgctacatcgggaagtcttgactcccgtcagaaacaacgatcatcaatgtgct

SEQ ID NO: 247517 - DNA, 295 bp, Glycine max
gacatcgacgatgaagtactcaatgaatctgacgcctgttaacataaagaaattgataatccacccagtgatcactgtgcaacataatgtgttcaatcatcagtacccagttcatcttgatacatgatactagacctgagaaactgtccatcatcatttgttacctgagcatgattgcttgatctcctagtgagaatgtgcgttatgaggtgatccaacatgttgtcttctgcagttagtgcaccaactactgagcaatgtctcaattcctagctgggtcaagaagcatccccta

SEQ ID NO: 247518 - DNA, 371 bp, Glycine max
  unsure (1)..(371): unsure at all n locations
agcttcttctggatctcgtcgccgcgctccagtccgtcgtcgtcgcggaagacgcggangccgcggcggtggagagcgtggtaaaggctcatggtgaaagtgtcccgcgtgtcggtgcccctgaagctcaggaacacgtcccaacgaagcctgaaagaggatagagtgatgtcactttccggcatcattggagaagggaacacaataacgaagaattaaaccctgtggttgaagtaaagtgaagtttggtgacttgacttcgttggtgggcaatgaaggacaaaggtggggcttcagttttgcacttgtgggtcatgcatgcacatgtatgccttatacaccttcatacattgatctaaacaagtattgac

SEQ ID NO: 247519 - DNA, 345 bp, Glycine max
agattcaaataataaacccaacccataatcatcatataacaagaaaaaaaaaaaaggagtaagctttccttacctccacaaaacaaggatctaactttgagaaggagaaagtgaaaaggagaagactttggatccaatattatggctttcctccaccctaacagcaacacccaaaccccaaaaacaagtagaatcaacatcaaaacctcatatgagcacttttatgagctcccaaagatgctcatgggaggaaaatgaaaatggaagatgagaggagaaaaagaagagtttcttaccattcaactatcacacaacttgaaagaaactcattcacatggtcccttg

SEQ ID NO: 247520 - DNA, 425 bp, Glycine max
agcttctggtgggacatcttgacttgctttccaatctgacattcaccacagattctgccttcttctattttcagattgggaatgcctctaacaacacctttgtcaatgattttcttcatgcctcttaagtgcagatgtccaaatctttgatgccatattctgacttcatcttctttggaggatagacatgtggaggagtaactggtttcttgaggtgtccatatggtagcagtgtcctttgatctgctgcccttcattagaacttcactcttctcatttgtcaccaagcattctgactttgtgaagtttacattgaatccttcatcacacagctgactgatgctgatcaagtttgcagtcagtcccttcaccagcagtactttgtccagactaggaagtccatcatgagctagctttcccattcc

SEQ ID NO: 247521 - DNA, 425 bp, Glycine max
  unsure (1)..(425): unsure at all n locations
gcttcaagctaagtctttgaagtagagaagagaagatgatctcaagctccatcgaagagatttcccccaatgaacaacaccatcacaccacacgcatggaatcaaaaccaaaatcctaacttaaggggaattctacaacaaaacccaccatgggttgaaccaaagggaagaaaaagaanaggagtgctcaccttccatgggagctctaccaagctcaaaaggagaaagaaatcatttagccatgaggagctcaaaccataatttacaaaggagtccctaagaagaagaagatggggaggaggagatagacaaaagctcgatagggagagaagaaaagagaaaatgaggaacagaaataaattactctttatatcttattgaaccacatctattcatgcttaagtgtcatctagagacccactata

SEQ ID NO: 247522 - DNA, 402 bp, Glycine max
  unsure (1)..(402): unsure at all n locations
actatctgatattagctcctatagaagatagatacgaagactcctttatcttaccactacaaggctagatataacttttgcactgaatcaacttagtcaattcctatctgctcagaatgtcatcaagcagctgctcacagagtacttcgctatatcaaaggctcacttgcatgtggccttttctacccagcatcaaacgctcacaagctcacagcctacaatgactctaacttggccagttgcattgattttagaaaatccattactggatattgnttatacattggtcttttatcttaccactacaaggctagatataacttgtgcactgaatcaacttagtcaattcctatctgctcagatngtcatcaagcagtttctcacagagtacttcgctatatc

SEQ ID NO: 247523 - DNA, 414 bp, Glycine max
  unsure (1)..(414): unsure at all n locations
gctcctaacctacaggtggttgtcatcatcaaaaagggggagaatgtaaatcatgaagactntgatgatatcaagaagagtttgcttgagaaagggggaaatgtaaatcatgcaagctttgatggtgtcgagaagaaatcacatgtttgtcatcatcaaaaagggggagaatgttaatgtatgtatacatgattntgatgatgtcaaagaagaatctaacaaggctgcttcaaatgataagtatttgcttcaagaataattcaagattgcttcaacaaacaaagccttgtttcaagattcactaaagaccaagccttgccttaaaacanagtgctttcaagacatgcaaagctctggtaatcgattaccaggaagtgtaatcgattaccagaagacagggttgagaaatagctg

SEQ ID NO: 247524 - DNA, 403 bp, Glycine max
  unsure (1)..(403): unsure at all n locations
gctttaggggganaatgctctttagtgtacgtntgttccgccctcatttttcacgtcaaaatttggaagacgacgcagaagcaaggcatttgttgattccatagatatccaaaatgtatgatacgttaccaaatatgtctttcattgtttggaactctataaataagaatggaaataagggaagaagagattgttgtggatcgcatctgaaaaagattctatcttttcttggaaacacaagggaggatgaagtgtatgtatcgattgaaagacaaaaaatactcttaattatntcataatttttcatttaggatatttatgcaattcttacaaacattntttttcactctatacaactaagatgaaagaaagattnttagcctactangaaaaccctcgagta

SEQ ID NO: 247525 - DNA, 422 bp, Glycine max
  unsure (1)..(422): unsure at all n locations
agcttctagatacaatatgtcagaatgcaatgctacagaaacatattgtacttcgttaagntcaactagacaaggcattttatatattaagaactaactagtcaaattgttccaaaaaatgaagtggatgtagaaaagaatgcatcaataactttaagttctacgagctataccttcccaagtaaattggagtgccaaggaacatttgggacagaatgacagacaacccacgttgaagtggatagtaaagggcaaccaaagttggccccaaatcttattgctccatatatggagtcatagttanggcagatgtatactccctgaccaataggaatntgctttgtgaaatctaatgttataatcatcaaatcacccgttgaagatgataataaaaatgtgtagactcaaatagatacttcatc

SEQ ID NO: 247526 - DNA, 299 bp, Glycine max
ttattcacatttataattagacatttactggatgtccatggcttcgttgaaatatgtttaggatataggtatacatgttttccatgtaaatcaatataagtatataaattttggatttggtatatatgtatactatatatttatccaatgatgtgtttgatattattggtatctaattatatatttagccacacaaaaaaaataccaaaaggctgtcattgggtggagaattccatccacttgctgtctcattcggcataatatgctatggcccccatggagtctactatagctgaatc

SEQ ID NO: 247527 - DNA, 363 bp, Glycine max
gtaggattatggggtacccatcacatgtggtactaggtggtggtcgggcgatggtgcacaacaagttttccacatccacaatgcgcgcataaacccaccatcccctgtagcccacctccaactgagctcacgtactcccacgtagcccatatcctcgtttctctcaacaccgggtccccatcaatcctcccaagcttccccaacatcaaagtaatgcaacattcaaacagcacaaactatcacagccaagaaaacagagcaaaggcagaaaactctgccaaaacaccaaccaaaatcacagcttttctcacttaaagaacccagtaaacaattccttccgtccaattcgttaaccggtggatc

SEQ ID NO: 247528 - DNA, 328 bp, Glycine max
agcttgtacatcttaactaattatggaatcctcttcctacgtacctagctaggaagctagagcaagtgaaaaaaaatattgacgatgagagacaagccatgccatcaatttgtcttctagaaaagacagtatcccaaaggcgacgaaatgaacataggaaaacatggtcttgtactcttgttgcacagaagtgaacgacacagaagagaagtctggcatcatggaaacttgcatacattgaacgctcgcattcatattatagaagagaaaaaagaatagtattattgcatgcgaacttatatacattattatagggttcatgaagttt

SEQ ID NO: 247529 - DNA, 436 bp, Glycine max
  unsure (1)..(436): unsure at all n locations
agtaccacgattccatcaactatgantattttaccaaaaagtattcatggaattcaaagctcatgcatcaaactgaagaaacagaaatgaggaattccagcaacacactctctggcactcttctattggttgaaatttatgtgaatcccaacagtttatgaataggactaaccaaatggagaatgggaacctacatatttagtggaacccatgtgaatttcacccaataggatagagtgttgaaaagagtgttagagaatatgctactaacattcctctacacgaattaagcatacaattgtttccaacaaagttttgtcaggacccacttcgactggaaaatcaatgctttgggatttaaaagtagaagtaaatcatgaggacaagagattactaaattaaagctagacttaacacaacatggatcttacatatg

SEQ ID NO: 247530 - DNA, 374 bp, Glycine max
  unsure (1)..(374): unsure at all n locations
tgtcatcgtgagacatcagaggctagtattntaataaatgtgggtaagaaaaattcaccaaattgatagagaaaaatctaaaatcatacatcttatgcaaataatgcatgctagcccccaacattattgcattttgattccatctttagacattcaaattgttgtttatttttcctgttatcttttcctttgccttagtctaaatttcaaacttacaattcggtatctctttcttcttttgtttctcctcatttcttaataattggatttgcatcacttaagtacaaccaaagtccctctggantaattgttgaacttcaatttaatctttactacttgtgataaaattaggacacttgtcaatctattaacaa

SEQ ID NO: 247531 - DNA, 326 bp, Glycine max
agcttggatttccttttagtagggaatctattctacctaagatggagcataacccagtcaccctcattaagaattagctctttccttcctctatagcctttatttgaatacacctttgtttggttcttaaccctctcatgcaacttctttacaaactctgacctagattccccttctttatgtataaaagaagtgtctagtggaaggggaatgaggtctaatggtgttaggggattgaacccatagacaacctcaaaaggggattgcttggtggttctatgaacccccatgttgtatgcaaattctacataaggaagatactcatt

SEQ ID NO: 247532 - DNA, 359 bp, Glycine max
  unsure (1)..(359): unsure at all n locations
tcatgatggtgccaaaagagtcatcaagaatgtaaagcttgtactagaattgaagagaaatttgatttctcttagtgagtttaacaaacatggctatgtgttcaaaggggagaatgaagttatgaaagttctaaaaggctcatgatattcatgaaaggggtgcaaaagaatggcatgtattcacttattggagaagtggtaatgggatcagctgctacaacttctatcaaaaggttttcaaagactgaactatggcacagaagattgagacatgtaagtaggaggggctgattaaactgggaaaacataacctgctntgtggagataaagtggagaaacttgacttttgtgaacattgt

SEQ ID NO: 247533 - DNA, 326 bp, Glycine max
agcttccttaagaagattccgaaagaagctagagcttagctacacatacctctctaattgctaagctcacctccttgagatgaaaagctagatcttagctacacaccccctataatagctaagctcacccgcatgacaaagaaacatgataatacaaaaaaagagtccttactacaaagactactcaaaatgccccggaatacaaggctaaaaccctatactactagaatggccaaaatacaaggcccaaacgagagaaaaacctattctaatatttacaaagataagtgggcccatacttagcccatgggctcaaaatataccct

SEQ ID NO: 247534 - DNA, 236 bp, Glycine max
atagaaatataagagaaagttttgaagccaaactgctgtgaaaaattatgatctgaatttatcacttgcttgagtaagactgaaattggaggagtcatcatcgcttttattggcgctttagtcaactgttggtcttcacaggatttccagggtgatgctacgtgcaccccacattttaagtgaatgggcgaccatgcccttcactcaagttgatccgtatgagccataccgatcaa

SEQ ID NO: 247535 - DNA, 337 bp, Glycine max
  unsure (1)..(337): unsure at all n locations
agcttncttaagaagattcctaaagaagctagagcttagctacacatacctctctaattgctaagctcacctccttgagatgaaaagctagatcttagctacacaccccctataatagctaagctcacccccatgacaaaaaaacatgaaaatacaaaaaaaaagtccttactacaaagactactcaaaatgccccgaaatacaaggctaaaaccctatactactagaatggccaaaatacaaggcccaaacgaagganaaacctattctaatatttacaaagataagtgggcccatacttagcccatgggctcaaaatataccctaaggctcatga

SEQ ID NO: 247536 - DNA, 414 bp, Glycine max
  unsure (1)..(414): unsure at all n locations
ctattacgtgacctatgatactcagcttgaacttgttgaagttctttgttntgttcgcaatagaaatataagagaatgttttgaagcaaaactgctgtgaaaaattatgatatgaatntataacttgtttgataaagattgaaattggaggagtaatcatcgtttttattgaggctttagtcaactgttggtcttcacaggatttcgagggtgatgctaggtgcacccaacattttaagtgaatgggcgaaaatgccattcactcaagttgatccgtatgagccatacggatcaagttcgtccgtacaaatcatacgtatcaactngatttgtatntgaattgtatgtttaaattatacttacggatcaagttcatttgtcaaaccatacgaatcaaccacgacttcgcgtacc

SEQ ID NO: 247537 - DNA, 163 bp, Glycine max
aagtatcgaaaaattgcttaagtgaagtgaacagcagttacattcacacttaccagaattcggaaacttcgtctctgcattctctctatccaaaaatttgcacattttgcatttgtgctttctttttgcattatcaacttcgaagcaacaaccatacaccata

SEQ ID NO: 247538 - DNA, 307 bp, Glycine max
  unsure (1)..(307): unsure at all n locations
gtgtggaaaggtgagacttcctacttttattcgttgaccacagagtggtacctggagatatgtcgcggnggttaggagaccttggggacgtcaggtggggtgctattgcccaaaaccaagcttgaccaatcccgacccaacccgggcatagtcagtcagtgagaacctgtgatgtacctaaacaggcgagcttctggcagtcaacccgataaagaacaaagaccacaaagcaaagaggcttgtgtggtggctggccagctgtgaatcttgagtgatatctgtgatatggcctctggtaatcgattac

SEQ ID NO: 247539 - DNA, 389 bp, Glycine max
  unsure (1)..(389): unsure at all n locations
ttttcttgcattggtttgtttggtggtttctttgcaatatttgtgagatgagttatgtgtgaacccatgatcaaaatgcttggattggtggctgtaatggatggctctaggcccatccttgattcttttatgaatttgcatgtcatattgttccttatctctcatttatacatgttttaacatgcgcacactaactgttttatgaaatgtcacaatggttattccatgtgttgttttgaagtttgaataagtaatgagctntacgcatgtccagccatcattntagatgcatgatcaacttaggttaatagattaaatgtcaagagcatgaactaagcttggaatntcagacattgctttagatgcaaatacatgagtcacatgaatgc

SEQ ID NO: 247540 - DNA, 493 bp, Glycine max
  unsure (1)..(493): unsure at all n locations
gtctatggaagctggatcttagagcctcaatcaagtccttcaatggtgattctcatccatggagtagcagtggaagaataatgagaagaggtgaaacgatgtgccatccactagagaataagccattgcaagagaagcttcaccacccagagagtgccttggataaaaaacttagagaggaagctctcaatggaggaagagaatgagagatacacatagagagaggcgttcgaatttaacgacgatatggagagaagtagaacttgaagtgtgtctcatagcttctcattcatcaaagttatgacaagtcgtacacatgtttctacttatagcctacgtcactaacttaatgagattcactttgtgtttaattttatcttatgtaaatcgtaaaggaatattccaagaatatgccccaggcatcttaacatattccccttagatgacaccaacatgggaggtgtgactctagcacatgggaagctccttgaan

SEQ ID NO: 247541 - DNA, 412 bp, Glycine max
agcttctacattcaatttcgagcttttcgatatattacgggactcaatcggacatcccgagtaaaagttattgtagtttgaatatgctcacggcttcggtattccatttcgagcgtctcgatatattacgggactcaatcggacatccgagtaaaaagttattgttggttgaatttgctcagagcttctgtattccatttcgagcatgtcgatatattacgggactcaatcagacatccgagtaaaaagttattgtcgttgcaatttgctcagggcttctgtattccatttcgagcgtctcgatgtattacgggactcaatcagacatccgagtaaaaagttattgtcgtgtgaatctgctcagagcttctacattcaatttcgagcttttcgatatattacgggactcaat

SEQ ID NO: 247542 - DNA, 480 bp, Glycine max
  unsure (1)..(480): unsure at all n locations
ctaagcttgagaaaattcaacgacaataactntntactcggatgtcttattgagtcccgtaatatatcgagtcgctcgaaattgaataccgaagcgctgagcaaattcaaacgacaataactntttactcggatgtctgattgagtcccgtaatatatcgaaaagctcgaaattgaatgttgaagctctgagcaaattcaaacgacaataactttttactcggatgtctgattgagtcccgtaatatatcgagacgctcgaatgtgaatgtcgaagctctgagcaaattcaaacaacaataactttttactcggatgtctgattgagtcccgtaatatatcgagatgctcgaaatggaatagcgaagctctgagcaaattcaaacgacaataacattttactcggatgtctgattgagtcccgtaatatatcganaagctcgaaaatgaatgttgaagctctgagcaaattcaaacgaca

SEQ ID NO: 247543 - DNA, 430 bp, Glycine max
  unsure (1)..(430): unsure at all n locations
agcttatgaatgtgtcaaacaattacaatnttatacaaaaactctacgtttagcatataacaagattaagttcagcataattcaagcaacataagattataagctaaacatattaaaaatggtcaatcccatgcaaaagtgctaataatagtagtaggagactaagagttagcaaagcatgctttctggatctatggcaaaaataaagaatatactagcattaagcttttagtataacagttgtttatatagttagttcagaaattgacatagcatttgccagggattcaaccattttaactccagaacctctagttgattatcctgccccatatgaaattcctcctactgattcagctgaaccaccttcactagataatagcccttctgatggcttagctgaatacattgagttatattcaacgctatt

SEQ ID NO: 247544 - DNA, 122 bp, Glycine max
atatatatatatatatatatatatatatatatatatactctatataatattcacattcaatatatataagtcactattatcataagaaggtttataataaaaataatatggtatgaacaaga

SEQ ID NO: 247545 - DNA, 342 bp, Glycine max; identical to SEQ ID NO: 247454
  unsure (1)..(342): unsure at all n locations

SEQ ID NO: 247546 - DNA, 434 bp, Glycine max
  unsure (1)..(434): unsure at all n locations
ctcagcttagagaagtattgcttaaaacatatttatgtctgatcgtattgtccttatataaagaagaaataatggacactaatttgcttacatatttacccaagatcattcagaaagtgaaaaataagtcatctatgtaaaattcaaaactgatctttactcttgttttggcccctgcaacctcccctaaaaaaaatacacaagcacttatatctgcatggaaaaccggtgagacgatgccattcatatatgacacggtaacgcattaatgtttaccatccagctntaaaaatggaaccacttaatgccncaatcgattggtttgaactgtaattatggcaatttaaacttatgactcgcttggtaaaanaaagtgattatattccttgatgtggcaagtgtgggacttgattaaattgcagattatctaacac

SEQ ID NO: 247547 - DNA, 323 bp, Glycine max
  unsure (1)..(323): unsure at all n locations
agcttatgcacggaaaatgtaattatgaaatttagatgcncgaagaaacaccattntctagttaaccatgcattangtaccatgttcaattattttgttttggttggtgtgtgttttttttttttttagaaatgggtttatgatcccaacatggttggctcatggtgcctaacacatgcaactaagaaggtagtgtgaagtttcacacttccccttttgtgttttttttttttgtagaggaaaacaaatggtatgaaattttgcatatcaaaaagtttgttgaacgcatatgcatgatgatgccatgactcatgcaaaatgtg

SEQ ID NO: 247548 - DNA, 398 bp, Glycine max
  unsure (1)..(398): unsure at all n locations
ctataatagggggagaagtgaagtagaaaagggttcagccccttaggcacctctctctctttcgaatatgcttaggaaaattgtttccgtgaagaaaatcaaggtgaagcgcttccgtaacgtttccgaaatgtttccgtgagtgatttcgcgaaggttcttgaccgttcttcgacgttcttcattcgttcttcatcgntcttcagtcttcaacgggtaagtacctcaaaccaagggtttcaattcattctatgtacccgtggtggttcacatttggtttcatgtatctntattctcgnttcatttacgttttatacccccctttgacgtgcttaagccattttatttaagtcatttctcgcttaccctaaaattaaataatttccacgatcgtttga

SEQ ID NO: 247549 - DNA, 272 bp, Glycine max
gaaacacttgggctggcagaatcctccacctttgggcgtattctttaaaagatccgtgccctctttttgcatatgttctataagtgcatcctatctgaagacattatactgacacttgctaacgaaggcaaccattatgtccttccaagaatggactcgggaaggttccaagttagtgtaccaggtaacagctaccgcagtaagactttcttggaaggaatgtatcagcaattcctcatcttttgcgtatgcccccatctttccgacataca

SEQ ID NO: 247550 - DNA, 430 bp, Glycine max
  unsure (1)..(430): unsure at all n locations
tcacgaagaccataatgcaaccaggactgaggaggctaacactacatggagagaaagaactccctctatcacacaaccaaccccaagagcaacaaatgccaaaaatcgactttatccctttattgatggtattatggaagcacaactcccgcccgaatggaagacgttgaccatagatctttacgatggactcttggacccagatgaacacgtggaagcatttgttacacagaatgaattgttaagaatgatgacataatcatgtgttaagtgtttcctaaaacgttgaaagatgctacacttcactggtatactcgattgccgagaaactncattgactcatttgtgatgcttatcgcatattttggagctcaatacatgataagcagaccacaccatttgatagttgtggcattcgccaacatcaagc

SEQ ID NO: 247551 - DNA, 399 bp, Glycine max
  unsure (1)..(399): unsure at all n locations
agcttcactaatatatatttagctagntatatatggttntggaaaatctggtattgtagattcaacaattatgaaggtattgtagattcaacaattatgaagtctaagagcctaaaagttacacaaaaataattgagatataagtcatgagataatggattttgttataattaaacatgaagaaagcatagtaagaaatacatgcaaatatcaataattgctccgtaaattcaataaaatgcatatacatagaaatttaatgggttttatacactatactcattcattcaaaactaatttttttatcacaacaaatttcaataagactattccactatgagggttagcacatgtccttcaatatatttctctttgtgagatttcttatctaagcttaat

SEQ ID NO: 247552 - DNA, 410 bp, Glycine max
  unsure (1)..(410): unsure at all n locations
ntntatggagtcaacaaacgagcgagacattactctgaaatataanacaatcttcttttcggacctcgagaatatttttaccctgcatataaatgagaatcaattactttttctcaacaaatttcctttgagaatttcattccaatctccaatgtcaaatacattactcatcttcctcaaagatagatatttctacatctcttgttgtaacctgctaacaaagaggtttagttaaaagagaaagttttattactcattcatgttgagacaccaaagttgaataagccattagtccatgacaaaaatcaatcaagcttacctttgtttctgatccagtatctttttaagagcctttacctccactttatcaaatctagagaannatccaattcaatggttaacaatatcac

SEQ ID NO: 247553 - DNA, 230 bp, Glycine max
agcttcttgcttcttgtataacagctttgctctcttctttgggattcttcatggtatttgctccaaaagtggtggatgacttcttaactaactacttggccacttgacccacctggatttcaaggtttttcaaggctgattcaagactcttatgggtggacatggccacttgcataaactgggctattgtctcctccagtttggcggtcctctgaaaatatttggccctt

SEQ ID NO: 247554 - DNA, 349 bp, Glycine max
  unsure (1)..(349): unsure at all n locations
tctaaggaggtgagcttagttattagaggggtgtgtgtagctaagctctatcttctcacagaagtnttctcaaagaagcttctcaaagaagctacctagtctatatatagaaacatgtgtaacacttgttgccactctgatgaatgagagtcttgtgagacacaactcaaagttcaacttctctcccttgttcttccttcaatgtcgtgctccccctctctctttctctccctctgtcttttcctccattgaagcatgctcttcaagcttcttatccaaagctcatcttggtggtgaagctccttcttccatgacttattccttaatcgatggcgcctcctctcacctc

SEQ ID NO: 247555 - DNA, 384 bp, Glycine max
  unsure (1)..(384): unsure at all n locations
agcttgtccatttaataggctnttgaagtttgtcatttcaatttctcactaagtaaaatggatcattnttaaggtccaacgccttanaatgatcaccacttaagtaaaaaagaatcacttgataagaaagaactacgtaggtctgatttcctcatcgcaaattgaggaatacgtaggagcaaagggaaacacccttgtcgaccacaaaaaaagaaaaaaatataaagggtataaaggatataaggacataaaagggaacgtaaaaatcaaagtcatgtttgcacattcgattaaaggctgccgtcccttgggacggacgtgtggggtgctaataccttccccgtgcgtaaataccaactccgaacctttcacttaaaagttcgt

SEQ ID NO: 247556 - DNA, 399 bp, Glycine max
  unsure (1)..(399): unsure at all n locations
tagcgcacagttgcgcttagcctaagtctacaattntagaatgagtagaggactcgagcttagtgcagcatgctggcgcttagctcagccttagagaaagacacttatgcttagcgcacaggcgcacatagccttattacaaaggtaaagaaacaaaacctaagtggcgcttaactcagcaagctgagcttagcgcctgaactactctgagtatcttagtatactattgacgcttagagcacaagcgcgcttagcgtctgcatcgttttggttcaacaactaagatgaacgcgcttagcacgacatggtccgcttagcgcgatcatcagaaatcctaataaatntaacagttgctctgctacgcttatgcgcgtcatcacaattnctagaaatacacac

SEQ ID NO: 247557 - DNA, 384 bp, Glycine max
  unsure (1)..(384): unsure at all n locations
agctntggagtggaaatatttgaaaatagtgtctagcgtgtaaatagaatagaatagaatattttcatgtctagttctacttttctttattatatattttttgtgaaactaaaagatgctctcttttattttatgccctgttttgtttatacacaaaatataaaatatattttttgcgttatactctgtcttattttaacacgttaatcaaatgcaatcttaaaaccactaaccaaagattatctaaaagcaaatgaaatgggagagaaaatggaataaaaaattgaaggaatctacatatatattgttaagtcatcgaagtctcacatgatggaatcttgaagaanagagcggctaatatctatctatctctctctctctctc

SEQ ID NO: 247558 - DNA, 296 bp, Glycine max
  unsure (1)..(296): unsure at all n locations
cttgaactggntatttatcaagggatnnggtggttggtttattctaacagcactgcttaaagntactttactttcattaggcagtggggaagcacctctattggacattatagcgtacgccgggtacacttttcctggcttgtgtttggctggttctggaagaataatatggagttactcctactactttctgatgctgtggacctgcttatgtatggcagtgtacttggttaaacaatgaagagagtcctttttgcagaagttaggagttatgattcaagcanacaccactatct

SEQ ID NO: 247559 - DNA, 209 bp, Glycine max
  unsure (1)..(209): unsure at all n locations
agcttaaaaaatgcctttttagtgacccttaattgttcaatgcaatcactttctgttcccttgtatagacgattgaggaagctatgcctttctaattccaaatttcaaacaagttccttagcaaagtacttgccatgataccaagtcattgcacccaaaagcataatggcnatactaacaataatgaaaaatgcttgttcaagttcttc

SEQ ID NO: 247560 - DNA, 322 bp, Glycine max
gaccatagaaactcagctgtagctaaaaaaatgttgtgaaaatacaaactatcttgaatttatggattaccgtgtctaattattcattaaattatgatgattatatccattatgtgaaaaaatatgtgatatgtaattaatggatattagttcttgtctgatcttacaagttttccaatgatgggtagggtctcactcgatgtccagaccgaagatctctgctctcgtatggcgtcttaaaattgctggctcattagataatcttcattattcctcacaacattgtgtgaaaacgctatccacacacagagagtctctttct

SEQ ID NO: 247561 - DNA, 466 bp, Glycine max
agcttatggatcagtattacttcacgatttctatgttgtctatcttacgaatgagcactagtgagattatagaaggaagcattggataatcattgtcgaggttccactaatataaggaagatcttgttgtttaaatagatttgaagaaattcatggttaatatttcaaggttaactatgtcattgattaatttcctagagtcatggagcaaatctttgataacattacacttctttctaatgatagtggatatgtgaaaaaatatggtatttctattgcaaaactttcaccaatctttatatgtgtgccctttgatatcaaaaaatgtcttcctggtatatgaagtgattcatcttgattattttgcgaagataatgtcaatattaacaaaatgcttgctagataaattacaaataaggttaagaaagcagcatgatctcactcctttaatattccatgataaaat

SEQ ID NO: 247562 - DNA, 457 bp, Glycine max
  unsure (1)..(457): unsure at all n locations
gcttgtagctaaagactaagttagtgagctttggttattctgtcttacggntactgatggagttgctggagtggatgatgaagggatgtcctttgttctagctctttttctcgatgtcatctgtaactaaaaagatctcaaaattccttagaccaaaattgttcaagttaaacaacaaacatagaggttgtaattaataatacgcgcttagcaggatataacttgctcagtatgccctgagaaacataacatattggctgagctggagccaagctcgcttagccttaatagttggcgtgatgaaatgcacttagttcaggtgaactcggcttagcgcgaggctttcaacacaaaattttctaagttattctggcttagcgattcagcctcgcttagccacaaggatttcaacaggaggatgagtgttcatcctcacaagatgaactcgcttagcatg

SEQ ID NO: 247563 - DNA, 453 bp, Glycine max
  unsure (1)..(453): unsure at all n locations
agcttagtacttggaactcagacattcgatcgactagcctgtctatgctaggaaaaaggtatgcatccttagggcacgccctgtaaagatcagtgtagtcgatgcacattcgccatttttgttggcctttttgatcatgatgaagttagcgagccaagtggaatacctaacttctttgatgaagttggcttggaggagcatgtctacttcttctctgactgttttgtgtcattcttctctcatcttactcttcttctatgatatcggtttggcttgggaacaaatagtgagcttatggcagataatgctggggtagattcccgacatgtcaaatggctgtcaagcgaataggtccgtgttcttgtgtangacatcaatgattcgtctatgcttatggctggtgaagtccctgttgagctgcgtacactacccgggctggggttcgagctgtag

SEQ ID NO: 247564 - DNA, 449 bp, Glycine max
  unsure (1)..(449): unsure at all n locations
ntccctataaaagccattggaatgcanttttgaaaagcctggcatgaaatgaaaatttagagaaacttagcaaaaatattgttgattattaacagcttataagctggtacctattcaaataaagtgaaacgacatatttattactttttgttataaaaaaaatcaaaactccacaattatcaactccaacgtttgcaatttcactggcaggaagtgagcatgaattattctttgaaacgaaaaagctgcaaaacattgagatgggaatattcgttacctgtttgttgcaaattggtggatgaatgagtgttgtctctcttgccatctttttccatctcttctctttctcttacgatttttcaaaagaaagagaactgaacccgtacaggtaagtagcatttgtttttctaccgaagatcttaggacctttaaagcccaatactattggg

SEQ ID NO: 247565 - DNA, 470 bp, Glycine max
  unsure (1)..(470): unsure at all n locations
agctngttcgaagatcctcaagacttcataagatgggcctatctttcggaaaagaccttcaagaagtatttgaaaatttctcttgatgaaaactatgacttgcatccttttgagttcaaccattcccacttctgcaccatggggtttgttacctggtgggaaaaatattattcgacccgttcgattggagacactactgccatgatctccaggcttgagagtggctttgcgcaaccaacggtcgagaatattcgctcaagccttcaagctcgaggtataaatttacttttgactttttaaattgatatgtatttttgccttttctaatattattactttcaggcaaagcacccatgacgaagaggagtgctgaaacgtctcgagctgacgtgagacccaagaaacccactgnggtgaaaatccaggaaggaaaacaagaggagaaggtaactcttccgcacttatctctt

SEQ ID NO: 247566 - DNA, 454 bp, Glycine max
  unsure (1)..(454): unsure at all n locations
tacaggttaataaatgatcgcactaaaagttgttaaaaccgcataaataaactagattttatagccagaccggtgcactcaagtaagaaagaaaaaaaaattaatgttttactacttgttaaaataatgatataatattgtattaaatattaattctttttatttcaataatattatttataaattggtttgtacatcaagcttaatagacttttgtgaaaacctcgatccaatctaacccacttgactaaaaaacattataaaaatgtttaacgtgatttgttaaataaatcaaactttaaatgtagctaaaccacagcttagcttatttggactgttaatgtttatgcttcataccttattcataaatgttccaatttgcaaaaatatagagaagaaaaatgttaccaaaaattgttagtatgagtggtgtgaatntagggatgaaaatgag

SEQ ID NO: 247567 - DNA, 452 bp, Glycine max
agcttaagagatttgaaagaaataagttgtatcttattttaattagctctcaacttcaaaattacaagcttaagagatttgaattcctcgactactggattggattagatataaatagtgttgatgatagaatacaaaaaggtaattatttgaaaatattgaaatttgtgaattgtagcgtatgtaagagagaaatgaggtgacagaggcagcatgaatgaattgtcgcgaagcagagtatgagtatgagaggaaggttccgcggaggaaatgagaatgatgaaaaagtggtgaagtgtgtacagagcgttagagtgatagtgatggggattgcagagaactcacagggtttggttcttgctgtggcatcgggtgtgttcataggagcaagcttcgtcctcaaaaagaaaggtcttaagcaggctgctacccacggcactcgcgcatgagtt

SEQ ID NO: 247568 - DNA, 457 bp, Glycine max
  unsure (1)..(457): unsure at all n locations
aactcaagcttcttgcacatatntgcagcagtagacaatgccacccgctgaatcatgattgtgtcaatataggcttgccaatcaagggtggcaaatgcaaaatgaatcatcaccctttgatattaggatttcattgatgagttacctgaactcctgtcgagaagaagtccaagtaagaaagaacagccatcagagctccagctcgaagacaggcagttgggtgctcctgagaaatcttctttagtgcttgaagagactgctcacatcaacaatcacatctatcagaattcaaagtaagacaaaattctaaaaagaattccagatacataataactaaaggcataaaagagattgagtgagaaaataacctgctcagccaagtccatatactctatggtaagcagcctcgcacagaagatagagactgcaccataatgcacaacagcagcacaggatg

SEQ ID NO: 247569 - DNA, 468 bp, Glycine max
  unsure (1)..(468): unsure at all n locations
tcaagcttgtgcggtattcttcgactcgtctttgtttttaattcttttccgcttcttccatataaattataaattactattattatattttacgaattttataaattataaaaatttaagaaaaaaaaaaagaaaaaaaaaaacaccgcttactactagtctgtgactattctaaacgtattttgggttaaattaaatggtgtcatgtaaatgtaagtttatacagacgctgcacgaggaccgttagatgtaaatcagaaatggatatgtgaatgccacgtgtggttgtcgaggatatgcgacaacaatagcagcctacgtcagaggacgctgcacgcttcgattggtaggagatccgatatcccgaggtggtccagatctcgccctttatatntgattggacttcgacagcaaagtatgaacaatttgtttcttataagaaanaaaagagaaattagtaaaaagaat

SEQ ID NO: 247570 - DNA, 452 bp, Glycine max
  unsure (1)..(452): unsure at all n locations
aagcttgttcaagaagaaggaatgccttgtacatcnggatattctattaccacttttagaaatagattgcattgcatataaaaacacttaagaaactctctagaagtcaaaataatcggttactagatatcataattgattatggctgcttcaaaagagttttatttgctctattgattgagattatcaattaccacgattctagaaatgcaggacaaagggtatttgattgaattaattgattacaaggtttgataatcaattattaagattttattagttaaatctataaataccctctcttgttctttctctcatttgactctttttacgatcttatcgtctagaattacattcaagagtcaggataggagatntttctacattacccatgagacacaatgattgaagctagaagagtttcaatcttcactattaggtgtattctatcc

SEQ ID NO: 247571 - DNA, 461 bp, Glycine max
  unsure (1)..(461): unsure at all n locations
agctnttgagtgaatcaatgtgacttttcacatttatttttgaattntaacgttcaaggacactggtaatcgattaccaaaacattgtaatcgattactgccttttgaaaatatttggaacgttgtaaattcagtttgaaaactttttcaaactcattttactactggtaatcgattacaacaatatggtaatcgattaccagagagtaaaaactctttggtaaaggttttgtcaaaaactcatgtgctattcaaagttttgaaaaaactttctaatacttatcttgattgagtcttttcttcattcttgaatcttgagtcttgaatcttgatccttgattgtagactttcttcttgagtcttgaattcttcttgattcttgaactcttgacttgttcttgattcacttgagttgttctttgatctttgagctctntgttcatcacctttgtcatcatctt

SEQ ID NO: 247572 - DNA, 449 bp, Glycine max
  unsure (1)..(449): unsure at all n locations
actataaaactaagctgtaaatggctagacatgatacacgtcnggtttggttggttcaagataaaagggatgccccacattatttccatgacacaaatgcaaaaatgatgatttggaaattttatgcaaaactggtcatgcatgcacctatgtggacactcaaatgtcaaatttttatggtcatgtgatgctagggctcaggattcatttcctctattttaatcaacccaatgtttccaaaatatgttcttttatcaatttgtacattcatccgagtccatttcnggcgtccggggaaaacttcacagcattcacccttcaggtgtatacacatcttttcaaaaactagttatgatcagtgaatttttttcaaagaaaagttggaagtcatctcttttcaaaagcatgttggtttttcagcttgacaacttattttccttttttctctt

SEQ ID NO: 247573 - DNA, 258 bp, Glycine max
caaaattatgtgtgcgcgcgactcaaaactaatagtcattatatctcacttcatgttattacttattatcatttgcttcgggcgactcaaaataaactcaaataatgtcagttaagaattaaatctcttgtatactattattcattgtttttgagctggctatattaatttgtgttgaactcatactatcttttttttttttttaaatcactcaagatggaatggagttttgactggatatgaaggccacaaaatccc

SEQ ID NO: 247574 - DNA, 440 bp, Glycine max
  unsure (1)..(440): unsure at all n locations
tgatgattattgcagtctcacattcacatatttgctctaactccactatggaaaaatttagagaacctaacttgcacctaattattctggggatgcaacttaattgagttgtgcttcctactattcttagctcaattagaggtccttcaaaatgtgtctgataaaatatcaaattacactaaaattgttagccatgggcacagtaaaaaaaaaagtggctacaaaagttatcaagaaacattacaatttacaacccacttagaagtctactcttcaagtttaagcatttctattgactattttattttggcaagcaattaaatagtgaatcacataaatcaaaagtcacaattttccgaatttgaactagttccttttacttttcctttgtatttntgtgtgtcaaattattctgtgacacacatttcaactgtttatct

SEQ ID NO: 247575 - DNA, 215 bp, Glycine max
  unsure (1)..(215): unsure at all n locations
agctagagatgaggaagtgtcgaagggtgaaactttctgctnttatagangaccacagagtggtacctggatatatgtggcgggggtcatgagaccttgnggacgtaatgtggggtgctattgtccagaaccaagcttgaccaatcccgacccaacccaggcatattcagccagtgagaacctgagacgtacctaaacatgctaactcctgacag

SEQ ID NO: 247576 - DNA, 435 bp, Glycine max
  unsure (1)..(435): unsure at all n locations
ntgtgaagctcctgtnttagctntacccgattntactcaaccatttgaagttgaatgtgatgctagtggagttggcattggggctgttttgatacaaaacaaaaggcctatagcttatttctcggagaaattgggaggagccagattgaactattgcacctatgacaaagagttctatgccattgtgagagctcttgatcattggaatcattatttgcgttctaatcactttatattgcattcagatcatgagtcattgaagtatatcaatgggcagcagaagttgagtccaaggcatgctaaatgggttgaatttcttcaatcttttaatttctcttcaaaatacaaggatggtaagagtaatgtggtggctgatgcactttcaaggaggtatgctntaatttcaattcttgaaactcgtttacttggttttga

SEQ ID NO: 247577 - DNA, 421 bp, Glycine max
agctatatctgagacactaagtaagttgccaactcaattgcatgctagtcaacctttacctttatctgttttgcaggttacaggttgcacactttgtggtggagctcatgggtcaggcttgtgtattcccattgaagaaacatctcatgaagttaattacataggaaaccaacctagacaaaattttaatgcaggtgcattttcctggattgcaacatggccaaccttaccagcaacataatcaatggagaactcaccctggtaatcagttcaataatgaccagggtgggccacctaacaagccccaacaacaagggcctagcttatatgtgagaacatcaaagctggaagaaactcttgctcagtttatgcaggtgtcattgactaatcataagagcacagagtcagccataaaaaatct

SEQ ID NO: 247578 - DNA, 445 bp, Glycine max
  unsure (1)..(445): unsure at all n locations
tgtcanaaacaaacatactaaaaggataaaacttaacaattaaagcatgatccattatcatcacatatatgagataccatgtaaaaatcatagataaagcaagtcctagaattctcataatagaacagctaataataataatcaattcattaaccatttcataaaagctcaatcatcacacactatcatcttcatcagtccatcaatcatcaaataacacaatatttctatgactcaacaagtaacatatcattttcaagtcgcaattatcaatgtacatgtctatctatcacaattaacccaaacacatcccttaacatagcacaattaacccatcttcatcggtccattcctgttagtcaccaccgataacctttagcactaggttgagggcccaccaagcaccctcaacttatgtgtctactcacatgcaatgtcattcatc

SEQ ID NO: 247579 - DNA, 350 bp, Glycine max
tcgattaccagaacgaaagaatgacaaacagctgctgactagggtttagaattggaacgttgaacatgtaatcgattaccatatgcatgtaattgattatcagcgactgcactttggaaattcagattcccagtcctacatgaaattctgatatccagtggacagatgtcgtacacgatgtgacgacatcacgcttcagaacatgcagtttatatgtgtccgtatgagacagattacacaagtaaataacacatgagaatcgttacccagctctggcagcctcacctacatctggtggctaccaaccgggaggaaaccactctaatagtgtagacaacgtcaacagccct

SEQ ID NO: 247580 - DNA, 456 bp, Glycine max
agcttgccgataatttctaactatttcttaccttatactcattcaatttacaacttagctacagtaataaagagaaatcatccccgtccaaatgtcgtcgtatccttaaacaaattatgaattaatccaaccaaaatattacgaaatatcaaattattcgcaactaaagacaaaaacatgaatacttcaatataactttcaggattcccgaaatcctgccgtctcaagccaatattgtgcagtgtaacacacgccatcatttcaaaaagtacaagaacgacgaagcgtgtgtgttcgcgatcattactgatgtaccaaaacaccaaagaaacacagaaactagttttttgctttacaaaaagtgaataacacgtccattggtctgaagaataaaacacgcttgaaatagcaaacacagcgcaagattagctttaacatagacaacatcacacaaat

SEQ ID NO: 247581 - DNA, 371 bp, Glycine max
  unsure (1)..(371): unsure at all n locations
tatataaaaagaaaaacataattgatatgagagacccattaaaaataacaaattagattatttgatgaaaaatagtcaataaaattagtaaatattctgtaattataacatatgataaaaataaaaataaaaacctcatcattattttatattgaaaagagtattgtattaaaaatattaaaaaaattaagaccaaaataaacagtaacttaaattatatttgcttcggtctgatttgtgattgtcccatttttaaatcctataatgaaatttaagtttggaaaaggactgggagtcattatcacttttcaaaggaaaaaaaaacaaatttcttgtctagacagtanggcgtatctctttctctcgtctta

SEQ ID NO: 247582 - DNA, 468 bp, Glycine max
  unsure (1)..(468): unsure at all n locations
agcttgcctcanaataaaggatttcaaagtcatgcaatgctctagtaatcgattaccaggaagtgtaatcgattaccagaaggaaagaatgaaaaagagctgttgaaaagggttttgaatttgaattttgaacatgtaatcgattaccatatgtttgtaatcgattaccagcaacggaactttggaaattcaaattcaaaagtcataactgaaattctgataccaggggacagatgtcgtacaggatgtcacgacatcacgcttcagaacatgcagtttatatgtgtccgtatgaacagattaaacaagtaaataacacaagagaattgttaacccagttcggtgcaacctcacctacatctgggggctaccaagccagggaggaaatccactctcaatagtgttagttcaaggtctaacagcccctgtttacaaccttctcacctaaccactacccgtgcgatctct

SEQ ID NO: 247583 - DNA, 377 bp, Glycine max
  unsure (1)..(377): unsure at all n locations
gcacacacgtttctatattatgttgacctatnacattcatgttattgcatgaacaatatccatgctaaaattgttgttaaaaaaatattaagacatgaattggagaaaataattgatagaattcatacatgctctaaaattcacgataaacattaaaaaagataactataaaacaaactaattttaaaaaagataacaatgattctagaaactggttaaaacactttctaagcgattttgaaaaaactgctcaaatcttaattttttaacattgaaaataaaaatcatctgagtggttttaaaaatcatgagaaatgaatttagacattaaactcatggaaagcacttttcaaacacgattaaaaaatgcaatcatc

SEQ ID NO: 247584 - DNA, 445 bp, Glycine max
  unsure (1)..(445): unsure at all n locations
agctngagatgaggaagtgtagaagggtgaaactttctgcttttactcgttgaccacagagtggtacctggagatatgtcgcggnggtcaggagaccttggggacgtcaggtggggtgctattgcccaaaaccaagcttgaccaatcccgacccaacccgggcatagtcagtcagtgagaacctgtgatgtacctaaacaggcgagctcctggcagtcaacagataaaaggaacaaagaccacaaagcaaggaggcttgtggtggctggccagctgtgaactttgattgatatgtgggttatggcctctggtaatcgattaccaagggtgggtaatcgattacaaggcttaaaaatgaagacaggagactaagatggtgtctggtgatcgattaccaaggggtgtaatcgattaccaggcttgaaaacgaggtcaggaagctatg

SEQ ID NO: 247585 - DNA, 441 bp, Glycine max
  unsure (1)..(441): unsure at all n locations
atccatgtattacattccatantaaacgtctcattcatttgcaaataattgctggttgaattgtacataacgaaagtggatcaattcgtatactgaatatcattgcaaataattcataaactgaatgtcattgaaattctaatacatacttgactaattaactngtgcgaaaactcatgtaacattcgtcagttgctagctaacatgattgtgcatggcttgcttatgaatcataactatcacttggtgatatgacttgagatagcttctatgatttaattatacactcagcttccttgacaactaacgaggcatttgccgtcacagcttttaacaagaaggccatacgagtattaatatatcatatgcgtatctttcacctacgaatcaaagacattagtcttgcctcttctacggagtttgcggcttgatacacgatgc

SEQ ID NO: 247586 - DNA, 419 bp, Glycine max
  unsure (1)..(419): unsure at all n locations
agcnnttgaaattatttgtaaaatgagtgttattttttccaaaaataaaattagtcagaagaagctttcacatgtttttcctgttntcatcttattcaacatctgccttaatttcacactctatttatgccttgctcaatcctccacaccacagctcagcaacattgtgtacttacattctgaaaactgataatcaattttgaaaatagaaatcaaacacactcatataatttttttatttttctatatccaacgcagaaagcgatggaagccattgatggagtgggaaaaagtgaagaatgagagttaaatatatagcctcatgttcgtaaatcataactatttctactagatagttcatatgaggagcgtgtatatataactattattatatgtagacaactcactgcatgaaattc

SEQ ID NO: 247587 - DNA, 454 bp, Glycine max
agctgttaaaagatattacactccaataaaatttggactaagctttttaaattatcgtttgaagctaaaaaaaaatatagtttgtactcttacgtctttttaattaaagcttacgtataagtgcaagcaaacactatattagtaaaagcttataaactttcaaatagtaaaagttcatataattcacgtgtgcatatatatactgataaaaaaatattaactatacataacagaacttaataaattataactctatcttgaaaaactattaaatatttttttcaatgtttcctatacaaaattggcaatttctatctttagtttcctatacaaaatccaaacgataatatactacctgcttctcatatatttcaatgtttaatgttattgcacaaagattaaacaacatttaataaaattaaaattggtatacttagattaaaataccctcatt

SEQ ID NO: 247588 - DNA, 465 bp, Glycine max
  unsure (1)..(465): unsure at all n locations
agcttaaggcctgctatcatattcaaatcaaattattgtttcaaaagttgttcttttatcaagtccatgcaaaaatatctgagttcatttggtttttgggaaagtccttcattgtttttcattctcaaatgttttcaaaagaaatccttttgttgtcttctgatccaaaaataagtttcaaaaatactagttgttgattttttccaaaggatgttacattcaagaaaaaaaaaatttaagtcccaaaaagagttataatctataactatactaatagaatataaaagcacgcacaaattagtcaaaataaactcgtgtaagtttttcaaaaaattcaaaacaagttcaaatcatggttgaagagctcaatctccttgacgatcatggttgaggagctcagtctcatccaatgaaataatcaacaggatctgtcatgtcttcatcctcctncttgaaaatatgtat

SEQ ID NO: 247589 - DNA, 458 bp, Glycine max
agcttcatgcttatgtatgtatttcaaaacttcattactattgttcaagacatacaagtgagctcgtaacaaatcttctacacttggagtgatcacatgcagtcctcttaaacccttaccacccactctgtcatcatgccgagactcaggaaggccaacaggtttagccttctcattatattctgaacaaaattcaatggcttcttctgcaatgtacctctcaacaatagatgctcctagacaataaagattctttgtatacccttttaagatcttcatgtatcgctcaaccgggtacatccaccgtagataaaccgaaccacaacatttgatttctctgactagatgcacaatcaagtgaatcatgatgtctaagaaagcaggggaaaatacatctgcaactggcacagtataattgcggccttattttccaactgatcaaacttgacaggatcaat

SEQ ID NO: 247590 - DNA, 455 bp, Glycine max
  unsure (1)..(455): unsure at all n locations
agcttangaacccaaacttgtagcttcaatgcatggaaacatattcatggctaagaacccacattttggttttagaattacaatagcatgaaaattaagacttgcttgtgagagttttgctggaatttgggctgccccatgtttgatactttgcatagaggtagcatggaaaacaccttgcaatagtgtgtatatatgggtaaatataaggggcatgaaattcctagcagagtgtgaatgattatcttcctaaatgagtatatgatagcgtggaattcccttttgaatgcaagtgtgtgcatgatataattagctctccaatatgcatataaataaatgtgagtgaaacaataaaaatttgtatgatatatatttcaagtgtgtgtaggtagattcgtatagcaaatgtttaagacataacttagtgtaaatcttgacgcaatgccttgagcgtg

SEQ ID NO: 247591 - DNA, 459 bp, Glycine max
  unsure (1)..(459): unsure at all n locations
ctaagcttaacatcagactacttcaggtgctggaactacttcacatggacttgatggggcctatgcaagttgaaagccttggaggaaagaggtatgcctatgttgttgtggatgatttctccagatttacctgngtcaactttatcagagagaaatcagacacctttgaagtattcaaggagttgagtctaagacttcaaagagaaaaagactgtgtcatcaagagaatcangagtgaccataggagagagtttgaaaacagcaggtttactgaattctgcacatctgaaggcatcactcatgagttctctgcagccattacaccacaacagaatggcatagttgagaggaaaaacaggaccttgcaagaggctgctagggtcatgcttcatgccaaagaacttccctataatctctgggctgaagccatgaacacagcatgctacatccacaacagag

SEQ ID NO: 247592 - DNA, 461 bp, Glycine max
  unsure (1)..(461): unsure at all n locations
agcttcatacaattaatatagaacctatatcctattgtcacatcctatcagaacgttgtgttcccgtgtcctctagcatgaggttcttcatagtcatccacctattcatctgcttccccgaacacaagttcaagaaacacaacaacacacagggagtgagttatcacattcctagctcatagagaaacaagacaattaaatatacatattatgtacatgagataccacttgcttaaacatagctcacgtaatttcaccactttgtcattcaaaattcacttttcaatcatcaatcagattacacaagaatcccacactccgatcaagatataataacacatcaatttcataataaacaattagcaagcgtatgcaacaattatgctaagactcaatcttatatgcaatgtggtaccatgtcagtgaaaaacctcgtctggcacctangagtacatgacaag

SEQ ID NO: 247593 - DNA, 431 bp, Glycine max
  unsure (1)..(431): unsure at all n locations
aaactaagcttttattttataaatgaaataatttgggccatccatggactcctctaagataataccataatttcttgcactgaattgttgggagttggaagccatcttctcaatcaaattcctagcctcagcaggggtcatatcaccaagagctccaccactggcagcattaatcatactcctctccatgttactaagttgcctgatgcctagtactcatgcaagctctctccactaagttgcctgatgcctgaaatgtcttttctgatggcagtggtcctagatgcagggaagaatttctccgagaacaccctcttaaggtcatcctagctgaaaatggacctgngagcaaggtagtacaaccaatcttttgccactccctctagagaatgaggaaaagcctttagaaatatatgatcttcctagacatc

SEQ ID NO: 247594 - DNA, 414 bp, Glycine max
agcttgtgtcatacttcactgtgacaatcaaagtgtcattcacttggcaaatcaccaaatttaccatgagaggacaaatcatgtagatgtgaaactacacttcatcagagatgtgattgaatctgagaaggtgaaggtggagaaggtttcaacagaagaaaacctggttgacatgttcacaaagtccctatctagtgtcaagttcaagcactgcctggacttgatcaattttgaagatgcctaaggaagtctaatagaagtgcagccctgaatacaaagatatacacttgctggtttggaatcaaggtggagatttatggtgtgtgactcacaattacaaaaggcacaagtgtgaaggtttcaagtggtgctgtcataactaacttcagttattgaatctagttgtcataactg

SEQ ID NO: 247595 - DNA, 451 bp, Glycine max
ctgttaaaacttatttgatgttggacgatcttcttcataaggctttctttgatggagactatgtttaatttttatttttgtcttcacgtagaagacaccaacttggtaaccataacccgtgcctccacaatgtcaacccaatttgcttttcaggagtaggaggtgccaacccaattttcttcttctacaactcctacatgtaggataatagtgaattcaaatgaagaactactattaccttatggtaatgagaagtgcttatgacacttgcatgactgttgtgaaatctttttataagggaccaatccaatataaatattactcctaatatttatacatctgtgcttacttaatatctcatatttatgacttttgtgatatgtatgcagtctactcatataatagccttaatgcattattgtcatccaagttaacaataatacttgattat

SEQ ID NO: 247596 - DNA, 337 bp, Glycine max
  unsure (1)..(337): unsure at all n locations
tattgaaagaatgaattaattgagaatgcacaacaaagccttgcttttatagactcttcatgtctggtcaagaagaccatttagaagagttataacttttcgaaaaacttaaaaccaatttgaaaaagtcaaaacctttttgaagagctacatcttttgatttattcagaaacagtcactggtaatcgattaccaaatctgtgtaatcgattacacaaggcttttatgtgaaaggatgtgactcttcacatttgaatttgaatttcaacgttcaaagacactggtaatcgattaccaaaacattggtatcgattacaactntatgaaattaatccga

SEQ ID NO: 247597 - DNA, 444 bp, Glycine max
ttacactgaggcaatgaggggcatcgtgcaagagcctcaagtgtacataagggcagatcaaaagtcctcacccgtcgatgtttttaaacaaaaaaaaggggggacaaaccctggaatttcaaatagattgattaaacgtcaaacggctccattgctgtcactccaaaatggtcaagtgactaaatcaaacagaacatacactctgagggagttctcggagagatttgcaaaagataggataaggttgcatgaattatcacctttttcaaaaggacagtcaatctgtgttttccaaaaagattaaatcaaaatcaaaatcacaaaatagggaaagaatgtcatgaacattgtacaactttccattgcattgcattgtttcatatgaggtcagcgttaccaagtttcacaataaaggttgcatgcgtctgcatccctaaaaatcgt

SEQ ID NO: 247598 - DNA, 275 bp, Glycine max
agcttcagaattcaatttctagcgtcttttagtattctggactcaatcagacatccgagcagaacgttattgtcgtttggattagttcagagcttcagaattcaatttcgatcgtctcgatatattaccggtctcaatcacacatctgaggaaaaaagtcattgtcggttgaatatgctgagagctgcgacattcaattctgggcgctcgatgtattacgggactctatcagacctccgagtaaaaagctattgttgcttgactaaactgagagc

SEQ ID NO: 247599 - DNA, 324 bp, Glycine max
  unsure (1)..(324): unsure at all n locations
ctaagctctcagcanattcaaacgacaataactttntactcggatgtctgattaagttccgtaatacatcgagacgctcgaaattgaatgttgaagctctcagcaaattcaaacgacaataactttttactctgatgtctgattgagtcccgtaatatatcgagacgctcgaaattgaatgttgaagctctcagcaaattcaaacgacaataactttttactccgatgtctgattaagtcccgtaatacattgagacgctcgaaattgaatgttggagctcttagcctattcaaacgacaattactttttactccgatgtctga

SEQ ID NO: 247600 - DNA, 483 bp, Glycine max
  unsure (1)..(483): unsure at all n locations
atactctacacgtcacctgcacgcacgcaagcttgcattcggaattgcgaaagcctttctctatcattaggattagtacctgacatctcagacaaacaaatcanacgtaacaagacaattatagctgctgtgtgaatacctcacccactcaagtgtatcacacaattatggcttttctctaatgaaacactcttgacttttaccactctaattccccttgagttcttaggcaattgaggagattatggccacaacaaagaacaatataccaatatgtgtaaagtaaggctagacaaggaaaaggctaaccaatacaaaggctaacaatgtttttaggcacaaatgaaggacatataattcagaatgtatgaattcaagtaacaatccttgatgcaaccaatatatgaccttacagagttttcgtttttaagttcttcaagcatgaaccattcagcccaatttgtttcttttaattatgcttat

SEQ ID NO: 247601 - DNA, 447 bp, Glycine max
tgtacgattatggggtacccatcacatgtggtactaggtggcggtcgggcgatggtgcacaacaagttgtccacatacacaaattgtgcataaacccaccatcccctattgcccacctccaactgagctcacgtactcccacgtggcccatatcctcggttctctcaacaccgggtccccatcaatcctctcaagcttccccaacatccaagtaaaacaacattcaaacaacacatactatcacagccgagaaaacagagcaaaggcagaaaactctgccaaaacaccaaccaaaatcacagcttttctcacttaaagaccccagtaacaattcctttgttccaattcgttaaccgctggatcgactccaaaatattactggaagtctctagtacataagcctacatttagaccgttgggatctactagcaaacatacagaactcat

SEQ ID NO: 247602 - DNA, 430 bp, Glycine max
  unsure (1)..(430): unsure at all n locations
agcttncatcaagtggtaatcatagcacaatagcttcaagtacgtgctccttaaacctccattaatttttctgctttaccttctcttccattgatgtttcttcattttttctccatgtatctcctcacatgtcttgtgctaaatgttgataacatgattctttagagtttccaccaattaaacttgctatagatgctagatttgactgtctatggttcaaatttcttgctcttgttcttgaaccatgaattgtgttgagtttacgttcctttgagttttgtcttgttattttttgtggctgaaacctaaaccatagaattcttacaaaaatattaaagtcgaagaacacctcacaaatctagagtgacttgttcacctattgtcgttntgtcatagaagtcatgtctagtcatgaaacttgtcacataag

SEQ ID NO: 247603 - DNA, 108 bp, Glycine max
  unsure (1)..(108): unsure at all n locations
actgaatgcattgnttaacttggtaacccanctgtccttgaatcagaaatctgtacctgtggcaagggtttgtggtttgtgctcctttgctgaccaccatacaaacct

SEQ ID NO: 247604 - DNA, 330 bp, Glycine max
cacgaggcggagggtgagccatattttcagaatgttcaaaatcacaatgttcaaaattataatgctcaaaatcaggatgctcaaaattacccaccacagaatgctcagactcaccaataacagaatgctcaagatgctcaaaaggtacaaaatgttcagggtaatcaagatgcacactatgccttactaatctatgaaatgtcctatctattataggatcaaagggttcgacgtcacttgcggtgcctctagtcatgcactatatgcagtagttcatgtgtttctcagacagggcaaaataggtgggttaaaactacaactatactcaaa

SEQ ID NO: 247605 - DNA, 193 bp, Glycine max
  unsure (1)..(193): unsure at all n locations
atgccttaacaggcccaaacaatggnnngaaagactgcaatctactctnctncaatgnggctggggggcaaacaagtgtgatccctctcttttcatttacaagacttgctctcacactacttatctcttagtctatgtagatgataacatcaataatggcagttcttcatagtgaatcaacaacctaccactc

SEQ ID NO: 247606 - DNA, 456 bp, Glycine max
  unsure (1)..(456): unsure at all n locations
agccttggagtntccaagtgccaattcgtcttcttctttattccagtcttcttctggcttcaatccatcagtgggctttccttctgtgtccagcatcttgggatgttcccagcctttgatgacagctttccaggttctgctatccagtgatttgaggaaggccaccatccttgctttccagtattcatagttggttccatccagaattggtggtctgttcactggtcctccttctttctccatgttcatcagaatttatctccctaggtctcactcagtgatttcgagtgcctgctctgataccaattgaaattctgataccaatgccagatgtcgtacaggatgtcacgacatcacgcttcagaacatgcagattatctctgagtgtatgaacagattaaacaagtaaataacacaagagaattgtaacccagttcggccaacctccctacatct

SEQ ID NO: 247607 - DNA, 444 bp, Glycine max
  unsure (1)..(444): unsure at all n locations
tatgcaagacananaccaacatgttagctattatcgccaagtaccaagaagagttgggtctagccacggcccacgagcatagaatcgcggatgagtatgcccaagtatatgcggaaaaagaggctagaggaagggtgatcgactctntacaccaagaggcaaccatgtggatggatcggtttgctcttaccttgaacgggagtcaagaacttccccgattgttggccaaggccaaggcgatggcagacacctactccgcccccgaagagattcatgggcttctcggctattggcagcatatgatagacttaatggcccacataattagaaatcggtaggaaacttgtatggtctctcagaccttgactagatatgatttctttctttgaaatgaaatgagttggtcccaggtttctacttcaaaaagcttgtgcaaatcaaatc

SEQ ID NO: 247608 - DNA, 438 bp, Glycine max
agctttgagccaattcaaacgacaataacgtttttctcttatgtctgattgagtcccgtcatatatcgagacgctcgaaattgaatattgaagctctgagccaattcaaacgacaataactttttactcggatgtctaattgagtcccgtaatataacgagacgctcgaaattgaatgttgaagctctgagctaatacaaacgacaataactgttttctcggatgtctggttgagtcccgtaacatatcgagaccctcgaaattgaatgttgaatctctgagccaattcaaacgacaataaatctttactcagatgtttgattgagtgtcgtaacatatcgagacgctcgaaattgaatgttgaagctctaagccaattcaaacgacaatcaacttctactcggatgtctgattgagtcccgtaatatatcgagacgc

SEQ ID NO: 247609 - DNA, 455 bp, Glycine max
  unsure (1)..(455): unsure at all n locations
cactagagaggacgtaagcttgtatcaaattcaaacgacaataacgttntactcggatgtttgattgcgtctcgtaatatatcgagacgctcgaaattgaaaacggatgctcgtagcaaatgcaaaccgcaataacttttaactcggatgtatgattgagtaccataatagatcgagacgctcgaaattgaaaaaagaagttctgagcaaattcaaacgactataactttttactcggatgtctgattgagtcccgtaatatatcgaggagctcgaaattgagaacagaagctctgagcataatcaaaccaaaataactttatattcggatttgcgattgagtcccgtaatatatgaagacgctccaaattgaaaacagaagctctgaacacattcaaacgacaatgactctttactcggatgtccgattgagtcccgtaatatatcgagacgca

SEQ ID NO: 247610 - DNA, 477 bp, Glycine max
agcttccattcactttgcatgtagttcggatgatataatgtcatccaaagattagattcacaaagagacataaatgcaacaaaattgtgagagaacatacagttcagaaaagaaaattcaacacctagagaattttaattaacaaaacatacagtacactgcatcaacataactcgaaagcaattaaaaagcttatcatcaagccaaggaacttgcactcgtgctcaaaaaagaattagaaaattcccccactaagatagtatatttaaaatcctagatatatattaacaagacatttagaaataaacccaattacaccaaattaatttcaataaacccacaccatgtactcacccattagttggattactagttgtggtcaacttcacaggatgcaaagggtgtgccactgaaacccgaaatctgtaatttcaacaaacccaattacacaaaaccacgatctttcacaaaccagca

SEQ ID NO: 247611 - DNA, 437 bp, Glycine max
  unsure (1)..(437): unsure at all n locations
aagctngcctcanagaggtccaggaaggacaaggcggccgaaggaactatttccgccccggattactacagtcaccgctttaggagcgttgtacaccagcagcgcttcgaagccatcaagggatggtcgtttctccgagagcgacgtgtccagctcatggacgacgagtatactgatttccaggaggaaatatggcgccggcggtgggcaccactggttactcccatggccaagtttgatccagaaatagtccttgagttttatgccaatgcttggccaacagaggagggcgtgcgtgacatgagatcctgtgttaggggtcagtggatcccgttcgatgccgacgctatcagccagctcctgtgatatccaatggtattggaagagggccaggaatgcgagtatggccagatgaggaaccggtctgatgggtttga

SEQ ID NO: 247612 - DNA, 463 bp, Glycine max
  unsure (1)..(463): unsure at all n locations
agctnggtgatgcgtgtatccattcctgcaaatttagcatttattgcatcaagaatgttgtgcataagagatgaagaatcatctctctgaggaggtggtgatggagagcggtcttctagggcctgtgcgggatccttctttacccaagaaccacccctctttttgcggtatccaaacgaggagaccacatttgcaccgataaagaaagatctcttgactttaacaaagggctcaaagtcaagagggacattaaaatgatgcagaaacaaggtgatcagatggggatatggaagtggagcatttgatcgcaatgccttatgcatgcgatatctaacaagatgggcctattcgatttgacgatcagttaagaaaacccatataattatcaaatcttnctcagaaacctgtgcaaggttggatgatctangaagtaggatgcacacaatcatgtagtgcatgatgc

SEQ ID NO: 247613 - DNA, 441 bp, Glycine max
  unsure (1)..(441): unsure at all n locations
tgaagtgaggaagtgtggaagggtgagacttcctacttttattcgttgaccacagagtggtacctggagatatgttgcgggggtcaggagaccttggggacgttaggtggggtgctattgcccaaaaccaagcttgaccaatccccacccaacctgngcatagtcagtcagtgagaacctatgatgtacctaaacatgcgagctcctggcagtcaaccgataaaagaacaaagaccacaaagcaaggaggcttgtgtggtggctgaccagctatggatcttgagtgatatttggtatatggcctctggtaatcgattaccaagggggggtaatcgattacaaggcttaaaaatgaagacaggaagtaaagatggcctctggtaatcgattaccaagggtgtgtaatcnnataccangcctaaaaatgggatcaggaagttg

SEQ ID NO: 247614 - DNA, 475 bp, Glycine max
  unsure (1)..(475): unsure at all n locations
agctntctccactaagttgcctgatgcctgatatgtcttttctaatggtagtggtcctagatgcaaggaagaatttctccaagaacaccctcttaaggtcatcccaactgaaaatggacctgcgagcactgtagtatatccaatcttttgccactccctccagagaataaggaaaagcctttataaagatatgatcttcttggacatcagggggctatatggtggaacaaacaatatggaactccttacgatgcttatgatgatcttcacctacaagaccatgaaacttgggcagcaaatgtattagtccagtcttgagagcatatggaacaccctcatcaagatattgaatgcacaagctttcgtaagtgaaatcacgtgcatacatctccctatgagtacttatatgaggtggaagttgagccgtgctcttagtataaaaattagtagtggaatgttcaacatcagaatattc

SEQ ID NO: 247615 - DNA, 456 bp, Glycine max
cttgatggtgtcgagaagaaatcacatgtttgtcatcatcaaaaagggggagaatgtgaatgtatgtatacatgattttgatgatgccaaagaaaaatcaaacaaggttgcttcaaatgataagcatttgcttcaagaataattcaagagtgcttcaacaaacaaagccttgtttcaagattcactaaagaccaagccttgccttaaaacaaagtgctttcaagacatgcaaggctctggtaatcaattaccaggaagtgtaatcgattaccagaagacagggttgagaaatagctgttgaaaaaggttttgaatttgaattttcaacatgtaatcgattaccatatgtctgtaatcgattaccagcaacgaaactttggaaattcaaattcaaaagtcataacccttcaaattataactgtgtaatcgattacacaaacattgtaatcgattacc

SEQ ID NO: 247616 - DNA, 440 bp, Glycine max
  unsure (1)..(440): unsure at all n locations
agcttcggaagaaagtgatgaggtacattcccttttgcagagcttgaaagagcccgggtagtcgaagagaagttcaagtccctagccatcaaagtttgaaaagagtatgatgaactaagggacgtcaatatggccaccgctgaagccttggaacgagaaaccaagaaggcctaaaaggaagaacacgaccaaagcaaagttttgaggggctntatagggcagcaatagtgagctcaagctccgaagaggtgaaaggaatcatcacgggtcaaaggcatgatcttgaaggacgagctaaaggcttgccttaggtcgaaaataaatttgtcccaacagttaagcgagactgaagggaatatgtgggtgcaaagagaagctaaatctagcggcgactcacgagcaaaggctagaggatgagtacgccaagatatcagcagaaa

SEQ ID NO: 247617 - DNA, 447 bp, Glycine max
  unsure (1)..(447): unsure at all n locations
tcgtcctcaaatccctcttgttggactaggcccgatttatacaaccctcttagggttatactaacataaatttagtttcatccgcagatccctcatttaagactacactcagctcaagtagcttatgaaagtttagcctaatttagcctaagcttcgtccgcagatccctcaattaagactaggcctaaactaaacggcattattgtaacaacataattaaaaccaaaaattaatccgcgtatccctcatttaagactaagtttcgatcctgtttcagtcaagttctaaggcaacagtacatttcccaatgctaaagtcacctaattgtgcacacaattgggtgatcaaaccaaaagcttacaaccattaagcattgaatgaagcattcaacacagaanacacaatcaattagatataacgtatttacatcagttgttcattagaaa

SEQ ID NO: 247618 - DNA, 366 bp, Glycine max
  unsure (1)..(366): unsure at all n locations
agcttctngacttgaacttccacttcatttctattctcactcccattcaccaactcgaccgcaacagcttctgcattgacgacactaacgaagccttggctgttaacttcatgctccagttgtataacctcctcgacgagcctcccaccgatgttgacactgcgctcacgttggccaagtctttgaaccccaaaattgtcacccttggcgagtacgaagcaagcgtcacacgtttcggctttgtcaaccgcttcaagactgcgtttaagtacttctctgctgtgtttgagtctctggagcctaatttggccgcggactcgccggagaggtttcatgtggagagtcttcttctcgggcggcgaatcg

SEQ ID NO: 247619 - DNA, 437 bp, Glycine max
  unsure (1)..(437): unsure at all n locations
tnggattttgtttggggtgttccaaacttaatttanggactatacttaattttgtgatatgtttgattactgtagaaaaaaggttcatttgattatatttatccaagaattttggactgtttcaaactcaattttgtgacattttgattattctaaaaagtaccttcacttggtcatatttatccaaaaaattaattatagattagtgaattgtttttcatgtaaatttaatgtttaccacattaacggttgaatgattttaaaaattgatcattaagtgattattatcgagtattctcatctatanaaatgaattaggcttatgattaacattatcaagatagactttcttttattgatattaacaatatanacatatcaaataagttgattatccaacgagacttganttttttatcagtaaatattaattatta

SEQ ID NO: 247620 - DNA, 293 bp, Glycine max
cttttgatttagataatataccgctgcatgcacagggtggaggactaggcaattccatcttttatcaatgacagcacagatgttcttattcttcccttcattgttattgaaagctctttgaatcgcttgttcgagcccatccattgctacataaatgagacccattgcccgcttttattcattattcaccaaccttaacacacttaccagaagctccatagcctttacacgcatacaccacatcatttccaatatgacggcataagaacaccacctgttgcttggattacctt

SEQ ID NO: 247621 - DNA, 418 bp, Glycine max
tataacactgccaaggtgatgagaataatcctcacattttccttttcttttattacatgaccaatcaactttagacataaaatgttactaacactagttaatataatttacataatttcaaattaggtcaacactcagacaactataatggtcaagaaggacaatgaagacgaagaatatacattgagatagtaatggaggcaagagccatttgtgcaaatgacaaatggactaattaggggcatcattgacctgaattgctccaaaactcttgaatcaaaaggttgtcacaaatgatactagtgcttacttatggtacatcaccaagtaatattctatgcatcatgtgctttctaattaattcaaattttgtatcgtggcgcatcaattggcatacctactaactttcatgagaaaa

SEQ ID NO: 247622 - DNA, 413 bp, Glycine max
  unsure (1)..(413): unsure at all n locations
agcttccatcaagtggtaatcagagcactttattcttcaagtaggtgctccttaaacctccattaataattttgctttaccttctcttccattgntgtttcttcattatttctccatgtatctcctcacatgtcttgtgctaaatgttgctaacatgattctttagagtttccaccaattaaacttgctatagatgctagatttgattttctatggttcaaatttcttgttcttgttcttgaaccatgaattgtgttgagtttaagttcctttgagttatgtcttgttattttttgtggctgaaacctaaaccataaaattcttacacacatattaaagtagaagaaaacctcacaaatctagagtgacttgttcacctatcgtagttttgtcatacaagtcatgtctagtca

SEQ ID NO: 247623 - DNA, 410 bp, Glycine max
tgaaggaaaactgaatgcattggttaacttggtaacctagctgtccttgaatcagaaatctgtacctgttgcaagggtttgtggtttgtgctcctctgctgaccaccatacagacctttgcccttccatgcagcaacctagagcaatcgagcagcctgaagcttatgctgcaaatatttacaatagacctcctcaacctcagcacaaaaatcaaccacagcagaacaattatgacctctccagcaacaaatacaaccctggatggaggaatcaccctaacctcagatggtccagccctcagcaacaacaacagcagcctgctccttccttccaaaatgttgctggcccaagcagaccatacattcctccaccaatccaacaacagcaacaacctcagaaacaaccaacag

SEQ ID NO: 247624 - DNA, 451 bp, Glycine max
agctataaaatttgaattaaaatgttcaataactgctggtaatcaattaccatatatgtgtaatcgattacacagtgcaaattttgaattcaaattttaatagctgttgtaaatcatttttggccattggtaatcgattaccagagagtaaatctcttgaaaaagactttttaatttaaatttcttggccaaaccttttgctacttcaattggaattcccttcctatttaatatacccttcctaagactctagagactgtcttgatcatccatcttgaatatctttaatttctttgtcttgcataaatctttgagaagcatgtgatccatgtgatcctttggcatcatcaaaacattcagcttgatcctttgtctacaatctccccctttttgatgatgacaatctctgaaatcaagacaagctatatacaagatgatagcacgttcacac

SEQ ID NO: 247625 - DNA, 441 bp, Glycine max
  unsure (1)..(441): unsure at all n locations
gcttcttttggaccttgaacaagcaatcaactcctctntcagaactatgctatgtgctcgcgactggtccctttcttaccttcgcaacttaagttcactattactaccccatagagctccgcgaaatttgttccggccatactcttccttgcgagccctcttggtctctcgttcaagggctcttgcggtaattgcattctcttnccgtaacccggcacactccttccgaacgtgtgtagcagccaacttgaacttcttcttggcgagtcttgcctttcctaactcgcttttgagagcttggacttactccgcctcttctggtgcttcaaaattctcttcactgacgacttttaacttggcgagccaatctaaacctcgtatgcgaactttcagccattcgtgatacccaccaatgatgccattacgaatgcctctaagctc

SEQ ID NO: 247626 - DNA, 369 bp, Glycine max
  unsure (1)..(369): unsure at all n locations
ttgngttcgatggccccaatgacatctatcccccacatggaaaaaggccaaggggcggacataacattcagaggatgtggcggaacattgacattgtccgcgtatgcttgacatttatgacatttccttacatgggcgcagcaatcgctttccatagtgagccagtaataaccggccctaaggatcttcctggccatagcatgcccattggcatgtgtcccaaatgaacccccgtggatttcctcaatcatgcagtttgcctctttggcatctacgcatcgtatgagggtcatgttgtggtttcgtttatacaggatggtaccacttacaaagaaaccaatagccaatctccttaacgttcttttgtca

SEQ ID NO: 247627 - DNA, 453 bp, Glycine max
  unsure (1)..(453): unsure at all n locations
agctntagactggtcaagatgctcacanttttgtttaagttgaaagcaaaatctcaatatatcgaggaacaattttttgaatatttggaacaagagagggaagacaaaaagcaggaaacacattgaatactttctaaccaataataagccaaataggcatacatacaaccaaattatattgatttcaggaatacatccttttcaaatgaatccacaactatcatatatataaccctcccaaatcaagaatagaattgcagctccgccacatggacggctgaaaaaggccaacttgaatcatgaaaaggcatcaattgtagtaatcatttgaaattgttttttattctaaactcatttgtgaagcttctaacagctaacaatatgcttcattgagttaagcatagttgagttcttacaaatntacacatgcttcttggactgccctttctactc

SEQ ID NO: 247628 - DNA, 448 bp, Glycine max
ctcaagcttcctagtaaactattcttccatttcttattcattccctagtgttatgctatcagctttagtccaaacactgaaggagatttgttttaatgtacttatcgagaaattacataagtgggcccaacaccacgtcttaacccacaccctttgtataaaccttttctgaatatttaacagcaaggacttttccccagtacaccaatctctctttgtaaattgaaacatatctaccaatgtgttaacactcttcactagactcagccacatcttgaccactatgttagtgttttactagttgtcacttggatcaggccatgtaccaagcttactttttccaagaaccaattcatgtgttactcactgctccccagtcatcactgggctgcgtgatctgcttgtactataattgtccaatcaattcacatcatcaactccgatacca

SEQ ID NO: 247629 - DNA, 470 bp, Glycine max
agcttcagcctgaatccataaagactgtgagcctttgattattcgaaattggaacagtgacaacccgatacattgtgaggccattaaagaaaaatcaggtcaatacaacaggggaccctatatgaatttgaaacaaagtataaaatttaagcaaacatgtttgacatagacacaaaattggaagagacgctggttaagtacctaatcataccaccataaactacacccctctgtggatctttccagcatctgaaaaggtcttgaatgagttcttctcgatgaggctgagcacaaaccagtcctgcatactttgttacttcaggccagtcctgggaggctacaacctggattaccgtaatcagtatatatcaaacatagggcatcccttagttgtatatatgagtttggaaatgcttacagcagcaatggatggacaagaatcctctcctgattctggatgaagtacatcg

SEQ ID NO: 247630 - DNA, 394 bp, Glycine max
agagaggaaatatgtcagtttagagactacatataatcgattgaatgtggcaaataaatactagaagatttgaagacatgaagttcgatttcaagtgttcactatatcattatttgcataaaaaactctctttgtgaatgctcgccaagtgtagaaagtctgtataaaaactttgctcatatcaagagaaaacactacgtgtcgaattcgcttatgtcgttgtgagacgatcgagagtcagtcattgtgtaatcacaccaacaaatcgtgctatttttgatagactcagtcatggcttggcgagaaaaacaatattggttttaaccagcttgagttaatgagcccgacatggccgtgatgaatacttgtaacttgtacaagccactgatacttg

SEQ ID NO: 247631 - DNA, 438 bp, Glycine max
  unsure (1)..(438): unsure at all n locations
agctngcaccaacaattggtattgctgttgatcatcgctttaagaaccgttctttggaaagtctgcaagctaatgtgcagaggctgaaaacatacaaggccaaattggttgtgttcccaagacgggcacagaaggttaaggtaatacagatgttcaattatctgttttgattgtgtgggcattttcttaattctgatatcatcatttctggtgaaaggtaaaaaggaatgatgtttgtgtgaaatctgactgttgttttattgtaggctggtgattctactcccgaggagcttgcaaatgcaacgcaagtccagggttctttcttgcctattgtgagggagaagccaactgttgaacttgtaaaggttacagatgacatgaaggctnttaaagcttattacaagcttcgacttgaacgcacaaacaaacgccattatg

SEQ ID NO: 247632 - DNA, 458 bp, Glycine max
  unsure (1)..(458): unsure at all n locations
actcaagcttaacaaatctttctntgtgaggaatgacccatgtttggttaacatagtcaaaaaacattggccatggtgagcaatcaacttcaaacttcttaaggcagtcatcaaactattgctcaaaaggacaatccactaaactctcccaggcttccattacataatccaatgcatttttttgaccaacaagggttttacactttgccttcacatccttatcaatgtgaaactgacacaacaaattcatggacttagggaatacaactttcaccgcattcatcaatgctagatctctgtcggtgacaataactctagggagtgcatcacgtttaaggaaaagacgacgaaacctttctagagcccaaacatctntactcagatgttctccttccaaataggcaaaggcagcagagaatgccatccctgttggtgtcacaccaacaatatcaagtaac

SEQ ID NO: 247633 - DNA, 217 bp, Glycine max
gtctccatatactattgtacccaatcggacatgcgagcacaaagatattgtagcttgactgtacttatagcttttattatgaattacgagcgtatagatctactacgggacacaatctgacatccgagtaaaaagttattgacgatagattatgctcatagctcatgttctgaatattcagcgagtcgatatactagatgccaccatcggacattcg

SEQ ID NO: 247634 - DNA, 434 bp, Glycine max
  unsure (1)..(434): unsure at all n locations
gagcaaattctaacgataatagcttgttactcggatgtcctaattaattccgtaatatatcgagacactcaaaattgaaaccaaaagctctgagcaaattcaaatgacaataactttttactcagatgtctgattgtggccagtggtatatcgagacgctggaaattcagaatagaagctctgagcaaaatcaaacgacaataaatttttactgggatgtccgactgtgtcccatagtatatcaagacgctcaaaattcaaaacaaaagctctgagcaaattcaaacaacaataactttttactcggatgttcgattgtgtcccgtagtatatcgagacgctcgtaattgacaatagaagctctgagcaaattcgtacgataatagctatntactcggatgtccgaattaatcccgtaatatatcgagacactc

SEQ ID NO: 247635 - DNA, 472 bp, Glycine max
  unsure (1)..(472): unsure at all n locations
agcttatgagaagaaggtggattcaccattggatattgtggatcatctggcactggttcaacccgtgtaggtgtgggctcaggaggagcagcctcgttgggtctcaccaatgaaagttgagcttcaagccaagctacttgcttaagaaaatgctccataggtatgattggcctgttgtgagccaactctcacaggctgtgcatgataataaactgtcccctgaataagctttgtagcatanggactacggtttgtgagctttggacatccggtcctatggttgcttacggaggagctgtagtggatgatgaanggacatcatctgttctagcccttgttctcgatgccatctgtaactagaaagaactcacaattccttagacctgatttattcaagtaaaaaaaaaactgaaataaaaactgacattaacgatgggcgcttagcgggctacaactcactcagcgcgccctt

SEQ ID NO: 247636 - DNA, 414 bp, Glycine max
  unsure (1)..(414): unsure at all n locations
ntagccttaggttgtttcatgttgttgcttccattatctctaacaaaccttcccttacaaagatgttcgaacccggcaagtgcaccggatcgcataagtactataaaacggtaagaaccgagtatcgaactcttggggaacttgtgttacttggtaaagctatattcagtgaataagtgtctagtatgaaaagagatgtgtcaactatgcacaggtatgtacacaaactattaaaaggaaaatcacgtgagtaatgatgtgtaaagacaagtagacaacacgttggtcttcctattaggtgcctgatgttaaaaggatattctctacttaacaatactcatgtgttctatggtgtctcttgaaatgctaaaccccgattcctcatgatagtttagccctaatctaatcaagcat

SEQ ID NO: 247637 - DNA, 458 bp, Glycine max
  unsure (1)..(458): unsure at all n locations
agcttcagcagcctagattacgccagtttattttatttgcagctaaatattttagcagccatatatattgccgctagccgaaaggtatttttggtgttgcgatcattgagtctgcaaatttgggttcatcgtagtcttttaacatgcataaaatattgttttaaaaacgcaatattaattgttaatgaggtgattttgttcaagacagcgaagatcactgtagacaaaactctctctaactcttcaccacagtccaagtcacatactcacatacgatggcttcttcatatatttttatcctaatcccatttctcgtgttcttggaatacaacatcctttcttattatgattctatgtgaatatgcgggaccccactacttgcaagattgttgttaacacggatgtagtctttgcagacaatgaactacnaagtgaccactctagtgcataatagggat

SEQ ID NO: 247638 - DNA, 419 bp, Glycine max
  unsure (1)..(419): unsure at all n locations
atgtataagttctccattccacatcgactntgcgttttaagtactaaccatggacgaggctatgtaacatagggaggagctgctccagctgataagaatagggagaaggcttgtccgctgtatctcgaggagggatcaccgtatgtggatcgtctagagtggctctggccctaccccaccttggctcccggaagacacttaaagggtctgctagatgtgcaacaggcttgactctcatcttcttctagaaacacagacttcacgtgctactcaaaaaggacagcttcttgcttaattgcctccaccttaaagcaagtcttgctatcactagatctgttatcacctcagacaagttgaagacggctttctagtcctccacacttatctctaagtcgccagtttctatgcccacaacacat

SEQ ID NO: 247639 - DNA, 406 bp, Glycine max
  unsure (1)..(406): unsure at all n locations
agcttgtnccgccaactgaggccatggatatctttcatatcaatggcgatttgcaccggctgaggcctttatatacgtgctcagtgtttataaaacttaccattatagtgcttcgagtttcagtgcgttcttgagaagttttcaaaatcgtccaaatttgcctcgtttaaatttatcaatcttcaaagttttattcaagggttgaaagtcccaacacggcaactgttagcatcaaatattttgttgaattaattttttatagattagttctatatgttatatacctattcgctggtgttgaaactctgtttatgagtttaagtagattgatcaatattatgtatgttaaaaatctgtgtatgtaaatgaaaatcgtttctatcacaagtctctatgttaaaaattt

SEQ ID NO: 247640 - DNA, 447 bp, Glycine max
tatgtgaataattacataaaaagtaaagtcgaaatggttattactattaacctttttttagaaaatatttagaatgtgcttgttttacatattaaaagttgattccttaaaatgtaaataccggaatgatatattctcatgtttgttataagctttgaaaaattattcttggatattattgattctaaacaatattagtatttttgtgggaatagggagagttatttcctaaaataacattaacttcttttttatttaaattattttaaattttaaaagatgtttccaaaaatattaaatgcaattaaacacatttttaaatatatccaaaaataacatttttaattataatattcttaaaaatataacatgataccttaaaacaaacatcttgtaaaattttaataagatattaatagaattttttttttttgagaattaagttta

SEQ ID NO: 247641 - DNA, 465 bp, Glycine max
  unsure (1)..(465): unsure at all n locations
agctntcaactaaatntacaacattccaattgatttcaaaatgttgtaatcgattacaatgatttggtaatcgattaccagtgaaagtttctgaacaaatcaaaagatgtaactcttcaaatgattttttactttttcaaattggttttaagtttttctaaaagtcataactcttctaaatggttctcttaaccagacatgaagagtctataaaagcaagactttgttttgcattttacaattatccaatctataaaatcttgaacaacctttataacacaatcctttacaacttttgaatttctttgaacttcttcttcttctttgtgccaaaagctttccaagagttttctggttttctaaaccttgaaaacttgtgctattcattcttttcatctcttctccctttgccaaaaagaattcgccaaggactaaccgcctgaattctttntgtgtctctcttct

SEQ ID NO: 247642 - DNA, 445 bp, Glycine max
  unsure (1)..(445): unsure at all n locations
tgtgcaaatcaaatcactcctacatttcatctctagcatgcattttctttctttctttacccactcctcacgtttggttttttggggaaaaacaccataactaaacgcgccacaaggcatccctatcgcaccagatccaaatctagaacgatgggtgatcaagaggagacacaggaacagatgaaagccgacatgttggctctgaaagaacaaatggcctccatgatggaggccatgttaggtatgaggcagctcatggagaagaacgcggccaccgctaccgctgtcagttcggctgccgaagcagacccaactctcttggcaactgcgcaccatcctccctcaaacatagtaggacggtgaagggacacactggggcacgatggcagccctcacctgngatacaaccgagcggcttacccttatggattgtcgcccaactact

SEQ ID NO: 247643 - DNA, 470 bp, Glycine max
  unsure (1)..(470): unsure at all n locations
agcttctntgagaaaacttccttgagaagctagatcttatctacgcacacccctctaataactaagcttacctccttgagaagcttccttgaaaagattcctaaagaagctagagcttagctacacacacctctctaatagctaagctcacctccttgagatgagaagctagaacttagctacactccccctataatagctaagctcacccctatgacaaaatacatgaaaatacaaaaaaagtccctactacaaagactactcaaaatgcctcgaaatacaagggtaaaaccctatactactagaatggccaaaatacaaggcctaaatgaaggaaaaaacctattctaatatttacaaagataagcgggctcatacttagcctatgggctcaaaatataccctaaggctcatgagaaccctagggccttcccttggatctctgggccaatctacttggagtcttctat

SEQ ID NO: 247644 - DNA, 435 bp, Glycine max
  unsure (1)..(435): unsure at all n locations
tggctacaaaatttcattggttnttctaggattcaaaggcatatattctaatagagcataaatcctagacttatcccaatggtctttttaatacaattggcttgctcactagcttttcactttaatttgcttttgaccttgttacatcagcacacttttgttctttttcttttttaacaaacaacttgtgtgttgtgtgtgctgatgctttatctctttctttgcatcccaattagttccactccccccaaatttggggtaaatttgccttgaactatatgctctcctagaatctaaacaagatatctggagataattatttaagttcaaggttcaattttttgacaatatcattcagctctaaaagggtacaaggaatataattattattcaaggtaagctctttgatcaaaaggcttatgtatgtacaatcat

SEQ ID NO: 247645 - DNA, 430 bp, Glycine max
  unsure (1)..(430): unsure at all n locations
agcttggacgaataaggtgatgcatctatganacacattaactaacaagtatgaaaattgtaaatatatattggttttagggtttacacacgaatggataaaaataattgtttgtgttttacaaatgcagggttaagtttgcacattgggccttaaagagactactaccgaatagccttggagacctatgtagtgtttgagaagccatgaacaatatgatcactctacaacatattgaaattaaggcatcgtttgagacaactacacatgtggttgggcatgtttttaaagttaccttatacaagaaactatttggcatggtatcaaggtatgtgttaaaccagaatgttgctgagtgtgagcatgtcaattatgctagcattgatagttctcattatagatatataatgagaactactcacggtcttcc

SEQ ID NO: 247646 - DNA, 449 bp, Glycine max
cttaagttgcttggacaacaacttattttgcgccaacaaggcatcttgagatgaaagctctaataaactctttttggtaggaatatgaactctatcatgcaaaattgcatggtcactggcaaccatattttcaattaagtccatggcttcttcaagtgtcttcacggccataacccattaatgaagatgttcaactatataggctctgaaaaagctacagtgggagttttctgtagcaagctatagaatctttcttatgcctcactcaaagattcatcgagaaactgatggaatgaagaaattacaacttttccctctacaattttagactctgggagatatttttttagaaacttctcaacaacttcatcctaggtctttaaactgtttcccttgaatgaatgcaacgatctcttgtcctccccagataaagaaaatgaaaacaggct

SEQ ID NO: 247647 - DNA, 435 bp, Glycine max
  unsure (1)..(435): unsure at all n locations
agcttgtgcatacataaagaatatttctattgtctgattntatattgcaaaggctaatcttatacatgtactggtggctttagcctgccaataatacttattctcatgctatgcttagatcattctttatcgcatggaatcatacgagctattaagttatatgtactttcttctgtagcttatattatgtcgcctagactatgtttgcgaacagagaatatcaaagttacattcttactaagcaggagaaaaagttgactctttcaaaatcgtttgattatgctgattgacttggatcctctcattagcaaaataggctgtgaatgattgagtattattagtaaagtgacatcaatgtgaatgatatatgcatttatgacgatgaatgcatgcgagtatcttcttctcttacgaacaatgaagataatattaata

SEQ ID NO: 247648 - DNA, 344 bp, Glycine max
  unsure (1)..(344): unsure at all n locations
actatttttttaatcaatatatttntttaatcactttagcaagagaagtgtgcaaaattttccttggagattcttttaaaatgtcatgaaaataatgtttctaaatatcttatcaaagaaaataattatgtacaaaaagttctaaataacaaatgactatcttataaacttttatgatgtgtgtaacattataggtagaactattattcagttatagtcatccttacacgacttagaagtattactttttatttgaaaccacactactcaaaaaactacaatctccttctttgcttatttacaaatagctatcttttttagataacatgatacctcaatactta

SEQ ID NO: 247649 - DNA, 336 bp, Glycine max
  unsure (1)..(336): unsure at all n locations
agcttgtcagcctgattgagcccatgctggaatatctccttgagcttgaaactcatggagctcatcccctcgctcatctttctccccacttacacgcctccgattttcaggcgctctcccagcgcgctcactatctccatcaaattctcactcatattctcttccttccgacgcaaacacaaacaacgcgtaaggactcggtaaagtctttactctctgcctttctctttctgattacaaagatattctttctataacttatttagatacgcattgcattcactcttatctntttaaaagcacactatntactaccatgtataaaagactgatttc

SEQ ID NO: 247650 - DNA, 446 bp, Glycine max
actatgacactaagcttataattctacaagttaagctggcctacacattgtctattctaattgaatctaaattttgtgatggttttcattttgttcttaattacaaaaattaattcacatacttctacaacttaagtactcactccattgcatcatttgtatgcaccttctaatgttctgagtgttgtgatacttaactatttccaaactttaaatttcacgttctatggcatttgaaatcttaaaatatttataaattaattctctgtccataagattgggccaaactgctctgttttactgcaaatccattgatttgcccccttgagcatatgagattagacatcgtctagccttttgcttctgctgtaattctttaaaatcaaaattaaatgttaagaagccttatttgaaaatatatatatcttttaattatactatcttac

SEQ ID NO: 247651 - DNA, 447 bp, Glycine max
  unsure (1)..(447): unsure at all n locations
agcttcctcggggccatttcctgcgaaggcaaacatttggaaaattagttttaccaagaaatgctacccttaaaacaaaaatggcatacaacctcctccaataaatacaaacatcaatgtaaatttagagcaagcttatgcgcatacttctttacgagcgttcacttgcacaagacattcttataactaagaaaaatgcacccatatacaatcaaggcaccttggttacctagattatttatatgtacttccaaggtgtatttgttacctacatcacacgcatttcctttgctaaatttacatacatgcatactcaaagcaccttggctatcaaaaattgcatacgtgcacattctggtatttctaatacctatacatacacaaacttcatgatgaattntgactatctacacaataaggtgctacatttcatgctttntttcaagt

SEQ ID NO: 247652 - DNA, 446 bp, Glycine max
  unsure (1)..(446): unsure at all n locations
tcacanatccacaattccttaaaagtaggcctaactcacaaaatatactccccagtggagtcgccaactgtcgcaacgtgcccttcacgggcgagcgagggcggngctcacgggtgcgctttccaaaggaggaaaggtgtgcggagtcgccaccaatgtttatttgtggaaaacgtcggaaaaaccgaaggaaaccggtcaaaatgaaaattctaagtttgggagttatatttacgcttgaggaaggtattagcacctcttacgtttgtctcgaaggacaacagcctattttttagaattgtggaattgtgttatcttaactttatttctttttatttttttgaggtcgacaaaagcggngcttttgctcctacgtaccctccatcgaagagaaaatcagacctacntannntcttcttatgcgtgaatcaagtggttctctttac

SEQ ID NO: 247653 - DNA, 451 bp, Glycine max
  unsure (1)..(451): unsure at all n locations
agctntagactggtcaagatgctcacattnttgtttaagttgaaagcaaaatctcaatatatcgaggaacaattttttgaatatttggaacaagagagggaagacaaaaagcaggatacacattgaatactttctaaccaataataagccaaataggcatacatacaaccaaattatattgatttcaggaatacatccttttcanatgaatccacaactatcatatatataaccctcccaaatcaagaatagaattgcagctccgccacatggacggctganaaaggccaacttgaatcatgaaaaggcatcaattgtagtaatcatttgaaattgttttttattctaaactcatttgtgaagcttctaacagctaanaatatgcttcattgagttaagcatagttgagttcttacaaatttacacatgcttcttggactgccctttctac

SEQ ID NO: 247654 - DNA, 423 bp, Glycine max
tctagtaaactattcttccatttcttattcattccctagtgttatgctatcagctttagtccaaacacttaaggagatttgttttaatgtacttatcgagaaattacataagtgggcccaacaccacgtcttaacccacaccctttgtataaaccttttctgaatatttaacagcaaggacttttacccagtacaccaatctctctttgtgaattgaaacatatctaccaatgtgttaacactcttcactatactcagccacatcttgaccactatgctaacgttttactagatgtcacttggatcacgccatgtaccaagcttactttattcacgaaccaatgtcatgtgatactcactgctccccagtcatcaatgggctgcgtgatctgcttgtactataattgtccaatcaattcaaat

SEQ ID NO: 247655 - DNA, 471 bp, Glycine max
  unsure (1)..(471): unsure at all n locations
agcttagagnttgcagttccaaagtcaaggaggattgttaagatgtgattgttggaactgtctaacaaactatagtagattagatttttatgctattttttcgaaaaacaaaagtcatgttgactgataggataaaacagttttggtcctattttctaggcatgatctattggtgatgttatctctcagttagcagttactttcttttctatgtttataaatatgttgcttcatatctgaataaaacaagcctttgcagtctcaattcctttacgctctctttcattctttaacacttgtgtctgctgttactaacaaaaaacatcaaagatatctaatcgtgtcctaattttgttacattgattctaatgtctcgtcttctttctctctatggatgaagtgatagaaccgtagaatgttacctgttaccaccttatgctcatgtgtgacaatccttcacattcacgcata

SEQ ID NO: 247656 - DNA, 450 bp, Glycine max
tttgtggggtaatcgacaccccatagaattggcagagacccgtgattaaggccgaaaaccccagtgctttgttggacttttccaggtccaatgggtgtcttggaggttcgatccttgcaaattggtaaatggcgtccgagattagctgggccacattaatactaacctgagttaagatggcgtagaccagttggcacttcgacaggggaagatcaaaattatgatcaccagggaggatgttgttgaggagcagcgtcatccagatctgtgtcagggtggtcatgctagtatgcatgatccacacccgtctctccatgtcacacgttgggcgaagtcctacctcggaacacatagtagctggccgatggcctcgtcatcaaacctcgaagcctggctccttcttttgctaaactttgcaacgttacccttctttaggaccaacggatgccc

SEQ ID NO: 247657 - DNA, 424 bp, Glycine max
  unsure (1)..(424): unsure at all n locations
agcttccatttntcaattggagcgtctcgatgtattactttactcaatcggacatcctttgataatgttattgtcgtttgaatttgctacgagcttccgttttcaatttggagcatctagatatatttcgggacacaaccagacatcctggtataaagacattgtcgtttcaatttgctcagagcttcgattctaaattttgagcgtgtcgatatattacgggactctatcggacatccgagtaaaaagttattgtcgtttgaatgttctgcgagcttccgttttcaatttggagcgtctcgatatatgacaggactcaaccggacattcgtgtataaagaaattgtcatttcaatttgctcagagcttctagtctcaatcttgggcgcctcgatatattacccgattcaatcagacatctgag

SEQ ID NO: 247658 - DNA, 318 bp, Glycine max
  unsure (1)..(318): unsure at all n locations
tctagtctncaatttgaacgtctcgatatattacccgattcaatcggacatccaagtaaaaagttattgtcgtttgaatttactatgagcttcgattttcaatttggagcgtctcgatatattacaggactcaaccggacatccgtgtataaagttattgtcaattcaattttctcagagcttcggatctaaattttgagcgtctcgatatgttacgggactcaatcggacatccgagtataaagttattgtcatttgaatttgctcagagcttctagtctcaattttgagcgtctcgatatattacacgactcaatc

SEQ ID NO: 247659 - DNA, 486 bp, Glycine max
  unsure (1)..(486): unsure at all n locations
ttaagtcacctgcggcatgcaagcttgtaggattatggngtacccatcacatgtggtactatgtggcggtcgggcaatggtgcacaacaagttttccacatccacaaatcgcgcataaacccaccatcccctgttgcccacctccaactgagctcacgtactcccacgtagcccatatcctcgtttctctcaacaccgggtccccatcaatcctcccaatctttccccaacatccaagtaactcaacattcaaacaacacaaaccatcacagccaagaaaacagggcaaaggcagaaaattctgcccaaaacaccaaccaaaatcacagcttttctcacttaaaggccccagtaacaattccttcgttccaattctttaaccgttggatcgactccaaacttttactggaagtctctagtacataagcctacattntgaccgttgggatctactagcaaacatgcagaactcattctacattactc

SEQ ID NO: 247660 - DNA, 453 bp, Glycine max
  unsure (1)..(453): unsure at all n locations
tatgcacagaanatgtaattatgaaattgagatgcccgaagaaacaccatttcctagttaacaatgcattaggtaccatgttcaattattttgtttttaagtgaaacgggtttatgatcccaacacggttggctcgtggtgcctaacacatgaaactaagaatgtagtgtgaagtttcacgcttccccctttttgtttttgttttgtagaggaaaacgcaaggatgagcaaacatgaaaacaaatggtatgcaattttgcagatcaaaaagtttgttgaacgcatatgcatgatgatgccatgactcatgcaaaatgtgaggctggaatatgataacggacaaatgcaggatatgtccattatgatgttatgaagagatgcttatgcgatgcatgatatgaatgcattntacggacacgagagcccggaaaattatctcttcttacttgcgca

SEQ ID NO: 247661 - DNA, 407 bp, Glycine max
atgcatgtgaattaggaagcatcaacaagaatcaagcctaggctattgtgcacgcgatcaatggggcacaacacaccaaaagattatgatgatggatggctcacattctcacaagggtcaacttatcactttcaaattgagctctcgaaattatcatgacatgtagaggacaaacaatgatttcaaatcacaatatgtcaagagacttttattttcagaacaattacccatttcttgaacatatgctataattcatagaaaaatatgatagttggacatgcacacataattgacctagtatatttaactagaaacccaacactactaacaaatttaacacaaactaaactaacaaaactagctagaccaataacaaagaacacctcgctccatacttaaacaacaca

SEQ ID NO: 247662 - DNA, 428 bp, Glycine max
tcatgtgaatcaacttgatccgtatgaagcacgtgtatcaacattttcttcttgcggatcaacgtgatccgcaagttcaacacaacataaacacaacctacggatcatctgccctatttgcggatcacctagaacacaacataaacacaacctacggatcatctaccctatttgcagatcacctaggtcctaacttgtctctactgcggatgacctaaatacttaagcaatcaccaatggaagcaataacaaacaacaaaagtcacatagaccttacctcgatgaagaacaaaagagcaacacctcgcgggagaatggaagaagaagcgcacttgaaggagggagatgcaacagcttgcacggaagaagaacaaccaccttgcgttggagaagcaaaggggctcgcagaagaatgaggaaggaggaag

SEQ ID NO: 247663 - DNA, 344 bp, Glycine max
agcttacacctgcacatgttgaaccaatgccagttgatccacattctctagtggcagatccatcttctcccaaacttgaagtagctcccccatcttcacctattattatcatctctgaagactctacagagtcagcatctggagaagctgttgctctctctgattcccctgttttccatctgatagatgaggaggatgctcagactcacgatacacaggatctgtctcacggattttaaattcctgatgattttgctttttggataatgattataactatattagcttcagtacattgcgtgtagaaaatttgggttccgtgtataaatatatacctatatttc

SEQ ID NO: 247664 - DNA, 443 bp, Glycine max
  unsure (1)..(443): unsure at all n locations
ntcatttagttagtgacctaggctataaatagaaacatgtgtaacacttgttgtaactttgatgaatgtgaaacttgtgagacacacttcaaaattcaacttctctcccttttttctccttcaatttcattccccccacccttcctcccctctttatatcattcttttcctccattgaagcttcctttctaagtttcttatccaaggcactctcttggtggtgaagctcctccttccatggcttattccctaatgtatggctcctcctctcacctcttctcctttatctttcgttgcatctccatggttgaaaatcaccattgaaggacgtcattgaagctcaaagttccagtcacctggaatatttgatatcacgagatctagaagatgaattaatttccattntacctttaggtgcaacaaataaatttttggacatagct

SEQ ID NO: 247665 - DNA, 463 bp, Glycine max
  unsure (1)..(463): unsure at all n locations
aaanaanaagatgtcacatgaatttgtgattaacaaattaataattaatatttatcgataaaaaagttacaaaattaaaaatcccaattagaaggaacacaagaaaaaaaacaaattaagaaagcatgcagaaagatatatactaataaacacttttattatttaaaaaaagcatggatgaagaatttaagtggttgtgaactcaaaaagaaagtacctcaaagctataattacaaagaatgtgatagcattgttaatttatgtggtggcatggagtctatctccaatttagagggaataggccagagtgacctatgcagtttcataaaatcttatcttataatatatatatatatatatatatatatatatatatatatatatatatatatatatatatatatatatatatatgaagacacacgactatgattgacatggagatgtgcgacatacaccatct

SEQ ID NO: 247666 - DNA, 436 bp, Glycine max
  unsure (1)..(436): unsure at all n locations
tcctcggngccattcctgcgaaggcaaacatttggaaagttagtttacaagaaatataacaatcattacaaacaagggccaaactacacttctcatggcacgagtgtcaacatgcactttataaaataatcatattggggtcgtgctattttatgacacatacgtatttgcacacataaaaattttgtgtgaagcattttacgacacctatccatgtacatattttttgacaaaccttttcatgctacatcctatatatatacacacatttttttggaaggcttcttttgttacctactcacaaatacacatattttgaaaaacacttttacgctacccatccaacactttgtaaggcacttcatgctatatatattcatattatgcaaggcattttcatgctattcatattttgcaaggcattctattcaacatt

SEQ ID NO: 247667 - DNA, 433 bp, Glycine max
ctgcagcttagcaattagcaacatgttagaccttttatttatagcaattatcatactaactcatttacaaaaatcaagcagtcacagaaaataaacttgttttcaagtcataataatattctaaaccggtaacttcttgatagttctgatgtagtttttcatccaatcataaatccttgtaatacacatcagtgaagcatatactcaacaatacttcagctgcttacactatacgtcaatagaccagaactatgattcttattatattgaagaccacagatacacttattacttaagttaataaagaatacaaacctttgttagttcctgttatgttccattgtgaaaatggacctaagttgctctcctctgttcttgtcaatagcccctgagagaagtgacatatcaatgacatgcaaataagtgagttctc

SEQ ID NO: 247668 - DNA, 459 bp, Glycine max
  unsure (1)..(459): unsure at all n locations
aactaaaactaaacttaagataaagatggcctcagcaaactccttatttctcaaaaggaattctatcaatagacctccaatctttaatggagagggttaccattactggaaaacccgaatgcaaatttttattgaggcaatagacctaaatatttgggaagccatagaaatagggccttatatacccaccacagtagaaagaattacaatagatggcagttcatcaagtgaaagtataactatagaaaaacctacagatagatggtctgaagaggatagaaaacgagtacaatacaatttaaaagccaaaaacataataacatctgccctgcgaatgaatgaatatttcanggtttcaaattgtaagagtgctaacgaaatgtgggacactcttcgattacacatgaaggaactacagatgttaaaagatctaggataaatgcactaactcatgagtat

SEQ ID NO: 247669 - DNA, 120 bp, Glycine max
catctgcgccatataactcccgtatgatgatctctgaatactctatgcagccaagacatggatacgcgtgagctctctgagatagcgatggatgccggccgatacatgatgctgatgctc

SEQ ID NO: 247670 - DNA, 515 bp, Glycine max
  unsure (1)..(515): unsure at all n locations
tttaagcccccccnncccggacacgtaattactcagntgacncnatgganaacgngacacctnnaacatctattcttgtcgccaccgaatctatatatatatcttgtgtttacatctagcaactaggagggatgggaagatagggagagccactgtgagaattaacttctgtcactattttatccttaggaagcggtccgcgcaccgttcctaccctctgtatatgaaacttttgctccatagaagctccctttgtaagaatgtggttcaaggcactctcttggtggtgaagctcctccttccatggcttattccctaaagtatggctactcacctcatctctaatcctttataggtcagagcatctatatggttgataatgaccatcgaatgacgtcattgaagctgaatgatgcagtctcctgcaatatttgatatgacgagatctagaacatgaatcgatttccatattagctgtatgtgcaacaaatgcattcttggacatagctccaacn

SEQ ID NO: 247671 - DNA, 460 bp, Glycine max
  unsure (1)..(460): unsure at all n locations
agcttgaagggacaaccacattttctatttctttgtatcttctaacaaattctatcttgctacacttatacttactgctcatttcacagccaattaacacaaatgaacttcttcctttactactaatatgtgtgtcatacctcataatgattgccaccaatccgttttcataggtaaccgatcgagcccactgtgaaacatcatctcgggtaccaaagacctacaacgtaacccggacatattaattattatacaaaacatacattcaaccaaataactcacactaatgaacatcattacctgagaagtattagaagcatctaaacaatcaacatgtgatggttcattcacaccacattcttgatcattatcataatccatatcaacttcttgagacatcgtattgtcatacgtccattgatcttcatgcattttaatgacaaataaatanattacacat

SEQ ID NO: 247672 - DNA, 391 bp, Glycine max
  unsure (1)..(391): unsure at all n locations
cttttgagtnttctagtttccaaactttgttctttcacagaaaacaaaagtgtgttattcatctttttcattgccttctccctttgccaaaaacaattcgccaaggactaaccgcctgaattcttttgtgtctgccttctcccttgtcaaagaattcaaaacgacacagtctgagaattcttttgattcttccctttcccataaacaaaagatctcaaaggactaaccgcctgagatatcttttgtttccccttcacaaagtttcaaaggactaatcgcctgagaactttgtcttaacacattggagggtacatcctttgtggtacaagtagacggtagatctacttggattgatgtaactgagaacaagagaggatacatctcttgtgga

SEQ ID NO: 247673 - DNA, 428 bp, Glycine max
  unsure (1)..(428): unsure at all n locations
agcttgtagggttaaagtctcacgattgtcacgtgctcatgcaacaattgttagtcgtggctatacgagacatcttgccaaacaaagtcaggttaacgataactcgcctgtgctttttcttccatgctatatgtagcaaagtcattgatccagtaatgtttgatgagttggaaaatgaggccgcaattatactgtgccaattggagatgtattttccccctgctttctttgacatcatgattcacttgattgtgcatctggtcagagaaatcaaatgttgtggtcctgtttatctacggtggatgtacccggttgagcgatacatgaagatcttaagagggtatacaaagaatctatatcatccagaagcatctattgttgagaggtacattgcagaagaagccattgaatntttgttcagaatactt

SEQ ID NO: 247674 - DNA, 475 bp, Glycine max
  unsure (1)..(475): unsure at all n locations
cacacttaaaactaagcttgtaggatatgggtacccatcacacgtggtactaggtggcgtgtcgggcgatggtgcacaacaagtttttccacatccacaaatcgcgcataaacccaccatcccctgttgcccacctccaactgagctcacatactcccacatagcccatatcctcgtttctctcaacaccgggtccccatcaatcctctcaagcttccccaacatccaagtaaaacaacattcaaacagcacaaactatcacagccaagaaaacagagcaaaggcagaaaactctgccaaaacaccaactaaaatcacagcttttctcacttaaaaaccccagtaacaattcctttgttccaattcgttaactgttggatcgactccaaaattntactggaagtctccagtacataagcctacantttgaccgttgggatctactagcaaacatccagaactcattntgcactgg

SEQ ID NO: 247675 - DNA, 117 bp, Glycine max
  unsure (1)..(117): unsure at all n locations
agctgtaagtttagtggcaggccactacatttcatatttatattntatctatttataccttaattggaaaccaaattattttaaattaattttttttttaaattacattctaaggtg

SEQ ID NO: 247676 - DNA, 457 bp, Glycine max
tcatgatgaatcaacaatgattcaaaggtgttttgatgataacaatgatgacaacaaaagatgatgacaaaagtgatgaacaaaaagctcaagtgaatcaaagaacatccatctcaagtgaatcaaagaacatccatctcaagagaatcaagagcaagtcaagagttcaagaatcaagaagaaagcctacaaacaagaatcaagatcaagattcaagactcaagattcaagaatgaagaaaagactcaatcaagataagtattaaaaagttttttttcaaaactttgaatagcacatgagtttttgacaaaacctttaccaaagagtttttactctctggtaatcgattaccatattgttgtaatcgattaccagtagcaatataagtttgaaaatgttttcaaactaaatctacaacgttccaaatattttcaaaaggttgtaatcgattacaatg

SEQ ID NO: 247677 - DNA, 475 bp, Glycine max
  unsure (1)..(475): unsure at all n locations
agctctattaattttagaattggtaattcactgtttattatttttacttttattnttatcaagcagatgcacgaaccgtgggattgattacacttttttttttttgcaaatgcaacattaatttttttttacaaaaattataaccacataattatgttcaaacataattgattatgcactttgaatttattttttaaaaaataactcaacatgatgaattatcacaaaaaggtaacgtgcatcatatttgtaaaaaaaataaaaaaactgaatcgactatgattaccgcataattaattatggtaacaaaaaaaacatctttttgtccgtcaattttatttttaagattgggataaaattataaattcataattgattattttttttttattactcatctaactagtttaatttaaaattttaatctcttttcacctctcttctatctatactaaactccacttttatctctctt

SEQ ID NO: 247678 - DNA, 436 bp, Glycine max
  unsure (1)..(436): unsure at all n locations
tgaggaatcttaaggaaccactaaagatgtcactattgttgttggaatacacacgtgagcccgcttagaggtaaagaatgagtttattgcaattggggttagagtgaacatgtgtaaggatccttagagaatcaaattgggattaattttcgggtgttttatgcgttttaattttgcttgtgcaactataactatgaatttctcttgtttgacaggtcaattgatgtcctgatgtgaatcaaatggtttaattgagtgtttggctttgaatgttagaaacctanaaattcaaaaattcttgattcttgcatgttttctcaaaattgattgaggggttttgttccccttgatgtgatcacatgttttgtgctattcatttttgaatttgggtgttttttgaggtcggaattatgcctcatttgcttcaagaaacgga

SEQ ID NO: 247679 - DNA, 422 bp, Glycine max
  unsure (1)..(422): unsure at all n locations
agcttattaataatagagatatcaatacttataacagatgcaacaatagctaaaacaaagggacattaaagatagaacccaaagacatgaaaacaaaacccaaaaaaaagtgacattgaagacaattaataattccaacaaggaaagaaacaatcaattaagtaaaaaatctaagaagaacccattaccgaatgaattttgtcatgattcttaataattaatgattaaaacaagaaaaaagtaaaaacccattcaagaaattgataagatagaaagaaaatataaccattggatgtatcttttaaatgaagggttgagataattttttcttttttctttctttcccaatttaaccctgcctatttctctctttgtggntcttggcaccacgttcaacaccatacatccttcataagaataga

SEQ ID NO: 247680 - DNA, 455 bp, Glycine max
tctagacaaaggctatcctcttctgaaacttccagatgacatttaccctctgctaaagctgaaaatggcgacgaggaatgacgagaagcagatcccatacgagagtgtttgatgctgatgtttcaaaagaaaagaaaaagcctaaagaaggtgataatgttgttgaagaagctccctcagatataccatctctaatagagttgaagtggatctaatatgaactaatgattcggtaattgattccctacttgttgtctaattttgcttgttcaatccgctgcttgtgacatcctctaccccacacatatatgtactaataataaaagaaataggaatgaggaattaattaaatgttttaaaacacatttaaataaaaacatttcaaaagagtaaaagattcacattcacttttctaatatcataatagaacttgtccaaataaataacaaaattat

SEQ ID NO: 247681 - DNA, 435 bp, Glycine max
  unsure (1)..(435): unsure at all n locations
agcnttgaggatntggtctttgccagtgaaatgatcgatgtgggtctgaaaaaaaagggcaaatttgatcatcatactaggatgactgaganaactgnggcaaataaagagggtgagaaagagggagaaacccatgctatgactgccattcctatacggccaagtttcccaccaacccaacaatgtcattactcagccaataacaaaccttctccttacccaccacccagttatccacaaaggccatccctaaatctaccacaaagtctgtctaccgcacttccaatgacgaacaccacctttagcacaaaccaaaaacaccaaccaagaagtgaatnttgcagcgagaaagcctgtagaattcaccccaattccagtgtcctatgctgacttgctcccatatctacttgataattcaatggtagccataaccct

SEQ ID NO: 247682 - DNA, 449 bp, Glycine max
  unsure (1)..(449): unsure at all n locations
tgtaggattatggggtacccatcacatgtggtactatgtggcggtcgggcgatggtgcacaacaagttttccacgtccacaaatcgcgcataaacccaccatcccctgttgcccacctccaactgagctcacgtactcccacgtagcccatatcctcgtttctctcaacaccgggtccccatcaatcctcccaagctttcccaacatccaagtaatacaacattcaaacagcacaaattatcacagccaagcaaaacagggcaaaggcagaaaactctgcccaaaacaccaaccaaaatcacagcttttctcacttaaagaccccagtaacaattccttcgttccaattcgttaaccgttggatcgactcgaaaattntactggaagtctatagtacttaagcctacattgtgaccgttgggatctactagcaaaaatccagaactcat

SEQ ID NO: 247683 - DNA, 462 bp, Glycine max
  unsure (1)..(462): unsure at all n locations
agcttcaagaattatggcctcatcaaactacttgtttctctagggagattctataaatagacctcccatctttaatggagtgggttaccactactggaaaacccgcatgcaaatctttatagaggcaatagatttaaatatttgggaagccatagaacaaggaccttatgttccctctataatggccggaagtgcaacaatagataaacctagagcagattggactgaggaagacagaagattagtacaatataatttacaggccaaaaatattattatatctgccctatgaatagatgaatactctacggtttcatattgtcaaagtgataaggatatgtgggatacactacaagtaacacatgaaggcacgacagatgttaaaagatctangataaacactttaactcgtgaatatgaactntctangatgaatgtanatgaaagtatacaagacatgca

SEQ ID NO: 247684 - DNA, 445 bp, Glycine max
  unsure (1)..(445): unsure at all n locations
ntcctactcggngatattntctggcttcaccttggactcaccgtatgaggttgtcgggttgacaagctcgtggttgaacctttgtattatatcttctggttgcttgaaatttaaaagcttcttttctaatctttatcatttctcagacttctttagtgggttcaagttccacccttatattttcttcattttgttgttgctagaacagtagtctttttgtcgatcgttccccgacttcaacggggatcatggcatcagtgtcatatatgacctggtaaggagtttcattggtggttgtctaaggtgtacagtggtgtgccgagagtatgctgtagaattcttctttccatggacccttagacttatcaagtcgagttcacagggccctaaggatgactgtgttanctgcctctgcctatttgttagtctaaggatgttcgataga

SEQ ID NO: 247685 - DNA, 440 bp, Glycine max
  unsure (1)..(440): unsure at all n locations
agctnggaagctaaatcaaaatattagtttcatctctgaatgaggtgattgtccaattactatctcattctttaggacttgaacagttaaacatgagttactcaattgactctgatttaataaaaggaagctatttagacaaaataatgcttaggcaatgatttgattaatgatatagtaggtaaatgatgccttgtagatatctcaatttaattttgaaccactccttggaatgtaattataatttcatcaggtagataaatgtgagaaaatgcattacacaatgacaaaggaaatttttaacatggcttaaaggaaaaagaagacaaatttagagaagaaaaggtaataaactctaaacgcttaaagttattgggaaacatatcattaagagaatgcttggtatgcaaaaaatggtcaatgcagttgactgtgcacca

SEQ ID NO: 247686 - DNA, 434 bp, Glycine max
  unsure (1)..(434): unsure at all n locations
ttgngtggagtgacaaaagcttcactgaattgcttgtcatgttgaagaagatgcttcttgaaaataatatgttgctgaaaaatcactacgaggcaaagaatatcgtatgtcctatgggcatggagtaccagaaaatacatgcatgccctaatgattgcatattgtacagaaatcagttttccgacatgcacaaatgccccaaatgtggtgtatcacggtacaaagtaaatgatgatcaaggtagtcaacatgcaaccacaaccaatgatcgtccaacaaaggtgtgctggtatctttcaataattccaaggtttaagtgattgtttgctaatgaacatgatgccaaaaatcttacatggcatgttgatggcaaagaaagtgatggattgctccgacatctggctgattcaccccaatggaagaccattgatcga

SEQ ID NO: 247687 - DNA, 343 bp, Glycine max
agcttaaacattcactgtcgagcctcactcatattttctggactcaattaaatatccgagacagaagttattgtcgtttgaataggctcagagcttcaacattcagtttcgagcgtctcgatgtgtgaccggactctgtccgacatccgattccaaagctattgtcgctccaatcggctcagaggttcaacattcaatttcgagcgtctcgctatattacgggactcagtcagacatccgagtaaagaggaattgtcgtctgaattggctcagagcttcaacattcaatttcgagcgtctcgctatatgacgggactaaatcagacatgcgagtaaatactga

SEQ ID NO: 247688 - DNA, 445 bp, Glycine max
  unsure (1)..(445): unsure at all n locations
ttgagccaattcaaacgacaataactttntactcggatgtctgattgagtcccgtaatataacgagaccctcgaaattgaatgttgaatctctgaccaaattcaaacgacaatagctttttactgggatgtctgattgagtcccataacatatcgagacgctcgaaattgaatgttgaacctctgagccaattcaaacgacaataacgttttactcggatatctgattgagtcccgtaatatatcgagacgctcgaaattgaatgttgaacctctgagcaaattcaaacgacaataactntttactcggatgtctgattgagtcccgtaatatatcgagacgctcgaaagtgaatgttgaagctctgagccaattcaaacgacaataactttttactcggatgtctgattgagtcccgtaatatatcgagacgctcgaaattgaa

SEQ ID NO: 247689 - DNA, 452 bp, Glycine max
  unsure (1)..(452): unsure at all n locations
agcttatgcttaaacctatttntttttataattttgttctcaacttgtttggcatatttggaccactagtaaatagtaaatagtagtagtagtatatacggtgattgaaactatgaaagtagctccccaagtggtgtggggtgggggacaacgagaactagcgtggaagtttcggtttaatattttattttaatattaagttttatcaatttaactattaaattaaaaattctaacaaagtgaaggaagatagatatgagctggagcaagggtttgataagaaatatatagcttcttgtttattatcatatttttttagaaagaccatgaagaacatattcttttttatcaagttaaaatttattgaagaagataaaattctatgggttcacattatatctatttcttctcacctcaagataagtgtaacatttgataacaaaaaatttatc

SEQ ID NO: 247690 - DNA, 414 bp, Glycine max
tgaagatcggtctgaaattgcacacgatggtcaatgtctcagcatatctgttatacagttgtggattctgtaagtcaatttagattattgttaattacctaatttattgttttaccttcatgcataatttactttgtgttaacaacaataggcatatgaatgagacaagtatgcgagccgaaaatattgatgtgtatggattcctcgagccacagtctatccagagatctggccaatcacaatttgaatcagaaaattacattaagaactggatgcaaaattcaaaacgggatgtgtacctaggagcctacctgaatgggtaacttaaactcaacaaatgaatttaaataatgtatactagtataataacctatattggtctccactgcagtgcacattggcaaatggtcgtca

SEQ ID NO: 247691 - DNA, 459 bp, Glycine max
  unsure (1)..(459): unsure at all n locations
agctnggtatccatgaggattcatataacaaggtaaagattgttgaattgctcaagtactactccaccaagagtggtgataagatgaggaaggtcagagtgaaatctactacatcacaggtgaaagcaagaaggtcattaagaactctccattcttggagaagttgaagaagaatggtgtactgtccaagacccacaaaatttatgtgacatcctacttggcccttacaaacacatgtcaaccttccacgtcagccctgctacaggagcacagacgcctgactcttagtagtcgggctccccaacaaataggttatctcaaacctaactaatattcaaatatatttgaatatcttatctattggcaggtattaaattatctataacatcatattatctacaaggtataaatgtatgattatcttctacctttgtctataatccaaatgtntatctctaa

SEQ ID NO: 247692 - DNA, 414 bp, Glycine max
  unsure (1)..(414): unsure at all n locations
agctttgtgtttggtctcacagttaagtgtatatcaggaactgggatttgacttatatatatgaaaaagctagaggttggcctgagggtatgagtccaaggaagagacatagaaagaataaattatcaatttagttcctcaagatttactctaactntactccttagaattaatgaaactcttaaaaaaatatctgcaattgtaaattattactcactntaatctaaaattacatatgacatatagacttaatgatgtattaacatatacttttagaaactaaatggtaataaatgattgaatttagagaaacgaattatagtttcagagagttctatttctttaatttcgtcgaattcaacgattaaagtgtagtgaattataatattgttaacgattaaattgatcatctac

SEQ ID NO: 247693 - DNA, 429 bp, Glycine max
  unsure (1)..(429): unsure at all n locations
agctntaaggtagatattgggcttatggttctttttctagcccacttatctttgtacatattagattagggtttcattatttttggaccttgtatttaaggctccatagtgtagggagggtatcctagtaatgtaggatttttcatcccttgtatattagggcacctagactagtttttgtattaggggtagttttctaatttcacatgcattaagtgcactatttgatgtgtgtgtgttgggagagaaatttaattgaattgggagaagcccaatccaactaaatattggaacttcctaaggnggaggtgagtatttgcttgttacaccccattgccacatcatatagtcacactctgtgcatgtccttcatgttntacatgcctcatgacacctaagcaaaactagcagagaatcttggacttgatc

SEQ ID NO: 247694 - DNA, 385 bp, Glycine max
tctcaaggaagctacctaggctataaatagaagcatgtgtaacacttgttgtaagcttctcaagaaagcttctcaaggaagctacctaggatatcaaggaagtttctcaagaaagcttctcaaggactaagttcttcaaagttcaacttctcttcctcttttctttcttcaatttcgtgctcccccctttttctttctctctctctttattttcctccattgaagcaccctctccaaacttcttatccaaggcactctcttagtggcgaagctccttcttccatggcttattccctagtggatggcgcctcctctcaccttgtctcctttgtcttccactacatctgcatggtggaaaatcaccattgaaggatcttattgaagc

SEQ ID NO: 247695 - DNA, 466 bp, Glycine max
  unsure (1)..(466): unsure at all n locations
agctataaatntatggtataagccataacaccatatattattacaaaggtaagaaaaagtcaaataaaacaatcaaactttcccaaagatggcactctttctacagctactccaagatgctatagaataaagtcaaagagattagcacaaaataggacaaatgaataaaatgataagttaacataaactcattgtcataatcttttatttatttttataattattacataactcccttgcttctaattccacttccaaacatatcctagatatttttttatttataaaacatnttttcataataattaatggatttaatcaacaaataactaacaatagaatntaataatttagttatgaaaaaaatatcaggagtacataatatttgccgttcntatttgagaaggacacaatatttagccagaactttaagacacacaatgattaaccattgagtaaacacata

SEQ ID NO: 247696 - DNA, 450 bp, Glycine max
  unsure (1)..(450): unsure at all n locations
tgtaaagttctatgataatgccttcgtacatcattacaaagttttgccacttaaaacattgtgcatggcagttgtgagtctttttgcctaagcaagaatgtgcttagagagtttttttggtactggaaggaaagcttttgttgtttttcttacccataaggtttaccaaaaatctttattttgttattgctgaagttattgttttagttgcttttgatttgtagaacaaggtccggcaaccatatacttttagttttggcctaaattatacaggaggacacgcaaatagtttttaattgttcttccttgagttatatggtttactgatcaaaggctaacaaatatattntatgcctttcggccatatattatgatatacgtaacaacctaatctagctatttagaaaatgcggaatttcggatgtttgaagagccaactggtactattct

SEQ ID NO: 247697 - DNA, 168 bp, Glycine max
gagcttcaacaaaacaattactactgtgaccaatatatgttccctttactcgcgagattcaagagacaaactagaggtctatatagcgcaacgttgaggcgcaaatagcactacctgtaacatctgatcctctatgggagagaccctatatagcgcaaatatcaacta

SEQ ID NO: 247698 - DNA, 452 bp, Glycine max
actaagcttatggaaactttccaaagtcatctatctataactattccatacaagtacgcttaaatatgaagtttgtaagtgatggatgactgaaaaatacatcttatttatattgataatactaattaattcttttaggtcatgcttagatgtacataccatgcccaaacaacatctaaatctctatcattttggtgtgattcgattgagtattacattgctgttgatatctacttaattcttattttcatttatctaaaattaaagattatgtttttgaagcaatgcaatatttgtgtttgatatttctttatattctaagatgatatattatcggtagcaaccatacacatattattgctcttacttcatcttagtttaaaagaatttgcacaataaataataaaaatatttgttcgttactctcttagtaaactctaaaatataaaaat

SEQ ID NO: 247699 - DNA, 465 bp, Glycine max
  unsure (1)..(465): unsure at all n locations
agctatatcttaagtgatgaactggtcatcaatatctcaagcaagtctcaaaccttttcatgttggtcgacagaaccatgtatcccaaccaacattttggtcttaatgaacatcatattgagccggttggattgctctcactgctcatatagcgtaacatcagctgagctactttcattagtgattgcaggtggtttgtctttccttatagcatagtctatgtccatccaccctagttgttgaagaattctctcattccatatcttatagttatatcttttgagttcggaagtatcactttgaatataaaaaaactaacagtttgaggaactacaaaaatccaaaggcttatgtcaaaatttgaggcatattaatcttaattgtatgttttgccaatgtaaacataccagaaaattgaatcttgtgacatanaaattacctgtgggctaaatttttaattcaata

SEQ ID NO: 247700 - DNA, 438 bp, Glycine max
  unsure (1)..(438): unsure at all n locations
ntacatggagctatatcatgtggtatcaagagcattttcatctatgtgatgttcttttgattcctctatctttttgtttggtcaattcactttaattccttgttcttcatcttcttctccatgtatctcctcaattttcttgtagtttggtgttgtttagtgtagatcaaaaaaaataaaccgattaaatcttagatctacacttgctcttgcatttctatggttcaaattttatagataaactcttgaatcatgtttttgtgttgattttaggttctatcattttttagtcataatattcttgttttgaacctttagatctcaattttcttgcaaaatattgattagaaaagaaaacaaaaaaatccaagtgtaaatcacttcattcatgttgtcttagagtcatgtctagtcataataattgtcacattatgttct

SEQ ID NO: 247701 - DNA, 461 bp, Glycine max
agctctagccttccatggcaagttatcaccttgtattttttatatgaggttttggaagcaaaattcagattacatagtagtggggatgtctcctccacctctaagaacctaacaatcactctaaaacctagaatcctcttgaaagctaacgtttttggagctccctttccctgttacgtctcactacctgatatgctctcaagcatatgataaaaaaaaactactctttttttgccaacttcaacttttaagggctttctgacctcgaaggttcgattagcaccattttcgcactaagcacgagttagtgaaaatctgttgagcgagctgggcgcacttaccacgagagaagacaaacgactccctgagcgagctgatgagtcgctgagcacgtagatgcttggtagattctcccaactccctaagcgggctgagtgtctcacttagcgaatgattctcgc

SEQ ID NO: 247702 - DNA, 467 bp, Glycine max
  unsure (1)..(467): unsure at all n locations
agaaactcgagcttatatgacaatggtggataactcccaccttggaagctctgattatgtgatagtgctaaaatgaaggcctggtattgagattcatcaattattcttaggagtttcatttctattcaccatcaatgtaaaattttttgtattatcaatcaataaaaaatcatattagataattatcagaaaaatcaataaacttattatatatgacataatagtttaagattgataacaatgtaaaagtcaataaatactatgagtttctcaatgtttttagtcacaacttggcacttcccatggcaggtcacaaagctcatggatagggtggaaaaaacattcactaagcacttctacaactcanatcgtaataaagccatgagcatcttaagaccaaaagcaaaaagagaaagacatagagttacattttccacgggtaagcaccaagatattcatgtatatat

SEQ ID NO: 247703 - DNA, 474 bp, Glycine max
  unsure (1)..(474): unsure at all n locations
agctctgcctattaagcctattggttcttctttcttatcttcttttaattctaatattagccttaatcttcaccaattactgcatgtccttgctatttctaaaaatctgtcaagtgtcagtcaatttgctaaagacatttcagtctttttttgaattccatccaaatgtctgtttggtgaaatctcagggatccaatgagatacttctcanaggacgtctcagttctgatggtttatacacgtttcccagcttgctgtcaagtccttcttccaaagtcaagacaaactctcttagaactagttctattataccacatgctattgtaaactctgcatctgtacactctattacagcaaacacttggcactctaggtttgggcatcctagtgctgctgttcaaaaacttgtaatgcaactctgtaagataccttctatcaataaaagtgagcttgatttctgttggtcatgttgtc

SEQ ID NO: 247704 - DNA, 390 bp, Glycine max
  unsure (1)..(390): unsure at all n locations
actaactgacagtttttatggctctacagcagttgcagggatgctatttactgaattcctatgcaggtggttatactctgtcgaagtagattattcattaatcagaaaatctgttcctgcaggattcactgtattctgatatattttgatgacttcgttctactggaaatgatcttactgagattgagtccctaaacacaaactttacggcaattancatcagagatctngcaagttaaaaaatatttttggttttgaagtgccgatctgtaagggatacttataccaaacttcaatacacccatggcagatgcttaactgccaagaactggtctctttactgatgcatagctatagaactataatgatggagactttgttctactacac

SEQ ID NO: 247705 - DNA, 463 bp, Glycine max
agctatactattacaaaccaagcttagtgtgtgtttcacataagcctaaatgcctaaaaaataagcataaaccttaataaaaatcatttttcataaaatataacctaattgaaaatttttaaaattcaaaaatattctcaacgcttcacgcgaatcaagttgatccgcaagtttcacgcaataagagcacggatcaagttgacccacaataagagcacggatcaagttgatccgtattaatcctgcggatcaacttggttcgcgtgaagcttgcggtagaacttcattcgcattctacctgcggatcatctcacactaatgcggaccatctacattcacactatgcatacgcggatcaaccacacacatacagcatcaatggaaacgcaaatgacaagggagtggcttaccttgacaatgccgcgagctaaagaagaagaacacgaacacagcacgggacgcg

SEQ ID NO: 247706 - DNA, 443 bp, Glycine max
  unsure (1)..(443): unsure at all n locations
tcaatagttggtgcatttcagtattattgcctcttatataagaatggtatgcatatcttgcattgtatacttgctttattgttgtagaattattggcattgtgctccttcaatgttagaagaatacttttttggtttggccattgactttgtcatatcaccaataataatcttctcatctttagttagtcgaccaacatatggatgtccaactaatgactcagccaatgcatgattatgactccaacatattaacttcaccatccatccttcacctttcaccactagtttcgctcgcagcttaaagggacacccacattttctattgccagtaaccattcgtattagatctttcttatgtgtcctatattttccactcctttcacaaccaattaaaacatatgaggtccttcctctatttcatgtatntgtgtctgacctcat

SEQ ID NO: 247707 - DNA, 460 bp, Glycine max
  unsure (1)..(460): unsure at all n locations
agcttangcacaagtatctttctcttgtttgtttacccactgaagcctccaagtactccactttggccctccccaattggttcacaacatcatctgaagtgtacacccttaactgcaagaaacatcatgtgtgttacattcaccaaataaaaactcttcatcaacttgttctgttaaaggatatataaggttagtggttacgaaacgaggatatataacgctagtacagtggttaggaaagaatctaggaagaaggaaagacaaagatgtcatgatttgaatcttgcaatagattaatatttatcgataaaaaaatataaaaaattaaatctgtcctacaaagtgtaatacagtgataaattggtctttgaagataacaaatataaatctaattgtggagaacaagtgcaacacattagtcctaaattatattcgtgacatcatttatcatttagctata

SEQ ID NO: 247708 - DNA, 442 bp, Glycine max
tgtccaccgtagcctttgccaatattgcattataaattattgatgtgaaactttaattatgatggaacaacaatgctaaaaatacttaagtttaagtaactgcacataaggtttgtccttctaagaatagttggagagtctgatattcttattaaaattgaaattggttttgcaattgcatgcaggcctgtatcaggggcttccatgaaccctgcaagaagtattggtccggcacttatcaaacatgtttaccaagggttatggatatacgtagttggtccaattgttggatccatagctggagcacttgcctataattttcttagatccccatacaagccaccatcagaataaaccacatggctggctttcttgaagagcagtgaataaaccacatgctgtctaataatgtacccagtgccaaaaaactcctcgctatatg

SEQ ID NO: 247709 - DNA, 390 bp, Glycine max
  unsure (1)..(390): unsure at all n locations
agctngagatgaggaagtgttgaagggtgaaactttctgctnttattgntgaccacagagtggtacctggagatatgttgcgggggtcaggagaccttggggacgtcaggtggggtgctattgcccaaaaccaagcttgaccaatcccgacccaacccgggcatagtcggtcagtgagaacctgtgatgtacctaaacaggcgagctcctggcagtcaacagataaaaggaacaaagaccacaaagcaaggaggcttgtggtggctggccagctgtgaattttgtgtgatatgtggattatggcctctggtaatcgattaccaagggtgggtaatcgattacaaggcttacaagtgaagacaggaggctaagatggtctctggtaatcga

SEQ ID NO: 247710 - DNA, 437 bp, Glycine max
  unsure (1)..(437): unsure at all n locations
tgtgaagctcctgttntagctttacccgattntactcaaccatttgaagttgaatgtgatgctagtggagttggcattggggctgttttgatacaaaacaaaaggcctatagcttatttctcggagaaattgggaggagccagattgaactattgcacctatgacaaagagttctatgccattgtgagagctcttgatcattggaatcattatttgcgttctaatcactttatattgcattcagatcatgagtcattgaagtatatcaatgggcagcagaagttgagtccaaggcatgctaaatgggttgaatttcttcaatcttttaatttctcttcaaaatacaaggatggtaagagtaatgtggtggctgatgcactttcaaggaggtatgctttaatttcaattcttgaaactcgtttacttggttttgagac

SEQ ID NO: 247711 - DNA, 461 bp, Glycine max
  unsure (1)..(461): unsure at all n locations
agcttatgcacggaanatgtaattatganattgttatgcccgaagaaacaccattttctagttaaccatgcattaggtaccatgttcaattattttgttttgatgttgtgtgttttttttttttttagaaatgggtttatgatcccaacatggttggctcatggtgcctaacacatgcaactaagaaggtagtgtgaagtttcacacttccccttttgtgttttttttttttgtagaggaaaacaaatggtatgaaattttgcatatcaaaaagtttgttgaacgcatatgcatgatgatgccatgactcatgcaaaatgtgaggctggaatatgataacggacaaatggaggaacgatatgttcattatgatgccatgaagagatgcttatgcatgctagagatacaatgcgggagtgatttgattcgcacttgatttttggagttaaacatgggataac

SEQ ID NO: 247712 - DNA, 426 bp, Glycine max
  unsure (1)..(426): unsure at all n locations
ttctccccaattntctataaatagggggagaagtgaagtagataagggttcagccccttaggcacctctctctctttcgaatttgcttaggaaaattgtttccgtgaagaaaatcaaggtgaagcgcttccgtaacgtttccgaaatgtttccgtgagtgatttcgcgaaggtttttgaccgttcttcgacgttcttcattcgttcttcatcgttcttcagtcttcaacgggtaagtacctcaaaccaaggttttcaattcattctatgtacccgtggtggttcacatttggtttcatgtatttttattctcgtttcatttacgttttatacccccttttgacgtgcttaagccattttatttaagtcatttctcgcttaacctaaaaataaaataaatttccaccgatcgtttgaattgtattat

SEQ ID NO: 247713 - DNA, 456 bp, Glycine max
  unsure (1)..(456): unsure at all n locations
agcttatatatatgtnttattaatatacttattttaatctgaacgtctttataattctgattgtatttatgtgctctcaatatattgatatattataaagttgaaaattatattcatccaatatgattttatgacttaacatgttaagaaagctaactagtaatattttttaatcacatatcacattctaatttgcataaaagagagacataaaatataataacacactttaatttatttataagaataatatagaataatataaaaaatattatgaaatcataacttttttgtaaacgaaaattagactctctttagttgtaggtccaatatcattgcacctttaaacgacgtttaagacctgaataganacatataatacatcgacctgatcaacatatgtgaattgctctaacttaatgatcacagtgttatagcaagtatcatcttcattct

SEQ ID NO: 247714 - DNA, 148 bp, Glycine max
ttacagtcaccacatgttttaatttcaaatctaaatgtaacgagtacgtatatatttttccacgcatatcatacttaattatgtttttaacatattagatttttttcactcttgaaagaaaaaaaccacaatgttaaatttccaacat

SEQ ID NO: 247715 - DNA, 394 bp, Glycine max
  unsure (1)..(394): unsure at all n locations
agcttgagatgaggaagaggtgtatggtgaaatcttctgctnttattgctgaccacagagtggtacctggagatatgtcgtgggggtcacgagaccttgtggacgtcaggtggtgtgctattgcccaaaaccaagcttgaccaatcccgacccaacccgggcatagtcggtaagtgagaacctgtgatgtacctaaacaggcgagctcctggcagtcaacagatagaaggaacaaagaccacaaagcanggaggcttgtggtggctggccagctgtgaattttgtgtgatatatgggttgtggcctctggtaatcgattaccaagggtgggtaatcgattacaatgcttataaatgaagacaggaggctaagatggtctctggtaatccattac

SEQ ID NO: 247716 - DNA, 419 bp, Glycine max
gagccaaaatcctgactcaccataaaccttgactttgtgtgagaatgtcgatccttaccctcggaagcgaaaaagaagagaaggaaaatttccaatcaaaggaaaaaaggaaagaaggaagatttccaatcaaagagaaaggaaaaaaaggaacgaaggaagatttccaatctcagagaaagcacaaaaagaaaagaaggaaaattcccaatcaaacagtgcgataaagctaaaagaaaagaaagaaaattcccaatcaaagaatgggagaaagttaaaaaggaagacaaagaacgaaagaaagctcctgatcacggatcgaatgaaaacagaagaaatgtgcatagaggtgcttggaccggacaatatctgaacaatacagaattgtgaccaaatgaacatcaagaacgaaaggaaac

SEQ ID NO: 247717 - DNA, 464 bp, Glycine max
  unsure (1)..(464): unsure at all n locations
agcttgctnggagcttcaatggagaatgaagaataagataatggcaacgtgagggagagagagagctgtctgaaaaagtgtggggctgagtgaagagagagaaaagctttttggttttaaataaaagggttttctctttttctattattttatttaagcaatgccacatgtctccatttgagtggagcaaaaagggcccactttccctttttgactgtgacccatactcagtcacaaaagtgaggaaaatctgacctttgaaacgctaaaatcctgcctcggtttgcgtgctgtttctctggttccagttcctcgtgtttctctgcgtctgtcagggccagttttcgaaagtacgcaatatatatatatcaaaacgctcagaataaaaccccgagcgtggttcagaggttggtttcgttaaattctaagtcgcacgcaaaacgatgattttaaactaattaatt

SEQ ID NO: 247718 - DNA, 456 bp, Glycine max
  unsure (1)..(456): unsure at all n locations
agctnttcgattcattctatgtacccgtagtggtccacattgtgtttcgtgcatttttattttcgttttgtttactttttatacccgcgtgttgacgtgcttaagtcattttacttaagtcatttctcgcttaacttaaaaataaaataaatttccaccgaacgtttgaattgtattatccgttaacttcggttaaaatgaattccgaccgtttggtcgtgccgtaaccacgttggaaatcaaaaagaggtaaaaaaataatataataataaaaaaaacatcttttagtaaaataaagcggaaaatcaatcggacattttctctttgggatttctcattcttaatcgaattgattaataactaaagtgaaactaaggctaaaatcaactcgcctagtcaagctcgtccataaaaaatacgtttttgaagtttgtcatttcaatttctcactaagta

SEQ ID NO: 247719 - DNA, 147 bp, Glycine max
agcttccacagaaacacataactcccatccactatatccttccttatttcctccatcacaaacttgtcagcagtgttggctgaataaataccactcgaatgttgcttccaaatccaagaatctgctccatgttgttgaactgatatc

SEQ ID NO: 247720 - DNA, 454 bp, Glycine max
agaaactgaagcttgaaccataacccggtgagagtgtgatcttaaattgtgagtgaatgactatcattgagtaacattcttgtatcagtctctgaatttttgaatgaaatgcataaatttgaaagtgatgaaggccattattctatttgtaaactacttgaccagaaagcttacctgtaattataattgtatcctttgcaccctttgtgagctgaattaaattttcaaattgaaccctgaacttaaaatgaatatctccaactaccctgtttaaattctaggagggcatatggttcaaggcaattggccccaaatttgggggagttagttgggacgtgaagtgaaaaggcaagacatttcagcacacacaacatataagttatgttaaaaaaagagagagagagaagttaaatacaaacaaagagagtgtgtgttgttgtaatagggtcaaatg

SEQ ID NO: 247721 - DNA, 441 bp, Glycine max
  unsure (1)..(441): unsure at all n locations
agctngngaaagatctaacagatttggcctaatgttcatgagaatgactgctacaaacaatattaagacaaatctccctctgattgaaagtgctaaagagtttatggggttagtgggagagcgctctcaaacaactgacaagtctcttgctaggacattagtgagtacactgaccaccatgaagtttgatggttcacgcactacgtatgaacatgtcattgagatgacaaatattacagcaaaacttaagaccttgagaatgactgtgaataagaacttccttattcagtttagttttacctcattatcgtctaagtatggctcattccaaatgagctataatactatgaaagataaatgaaatgtgcatgaattgcattgtaagttagttcacgaagaaatgaggcttaagaatcaaggaagtcacttagtccattatgt

SEQ ID NO: 247722 - DNA, 429 bp, Glycine max
gtcactcacagtctttagaattgggagccaatccagtccttgtgttcggactctcagccacttatgatagccgccgatgatcccattactgcttcccctaagctctctgtcctttcttcacgccgcatcccatgccttgcgaactccttggagtaccctcgcgttgtggtcactgaaacctcgtgcgatgaaaggcgtgatgctttcgtctgatggcactcctctcatgggacatccttcgcatgaagatagaatcctgattcttccttccttctagcgagggaaccatttaacagacgcccctccatgctagccaagagttggtgcacaacaaacaattcttgcgccgctcttttcacatccccggtcgaacgtgtcatacatggccaaaatggcgacgaccaggctttccttgccatgatgaaagac

SEQ ID NO: 247723 - DNA, 472 bp, Glycine max
  unsure (1)..(472): unsure at all n locations
agcttctaataaatacttatagatgaagaatattaaatatcaaattaatgaatcaaatgtgattagaagtgtatatatatgtataccatgttctttgagcccagttgccaagttgttagtctttctcccaagcctgttcatcccggtaagaactgaatttactctacctgaaaaatcaagacattaattcagtatttcagtgttgtgaatataaacatacctttattgaatacctgatgaacaattatcttttctctcgttttctaattaaacaattgatcaaattattttctaataaacgatatatatatctcttaccttgctctgagcttgtggtagatgtgttgtattgggtggcaggatctggcaggtacctctttgatttctcacccacgtatgctgctgaggtgaatggaaatccaattagaagttcttgaagaaaggatgccatcatatctaaactntcaagtac

SEQ ID NO: 247724 - DNA, 429 bp, Glycine max
gcgtcacgtttaaaaccgagctcgatggtggtgcgagcctttgatggtactcggtgggaagtgatgggggaaatcgacattcccattcagataggcccccacacttgcaatgtggtgtttcaagtaatggacataaatcccgcctatagctgtctcttggggagaccttggattcatgcgctgggagtggtcccttcaacgcttcacctgaaattgaagttcgcagtgggtggacttttggtgatagtatcgggtgaagaggatatgttggtgagctgcccctcctccaccccatatgtagaaacggcggaagaatcattggaaacggctttccaatccttcgaggtggtgagctgcgcctctgtggaaccaagtccgttgctaccttctctctccaacgcggccataatggtgacacgtgttatgctc

SEQ ID NO: 247725 - DNA, 393 bp, Glycine max
agcttgtttggattcacagattgcaaattccatcacagcttcatctgctcctctaatgacttgaaatctggtgtgtctaaaccaaaatttgttcttctgctccattgattctcaacgacacttcaactttgatgttagtggtgctgattcaagctctgggatgacagacatgtgggatattaactatttaactcacaacaagtgatagaaagtatcccaattgatgattcaacacttgatgaaaaagacagataatataaataagaatatggatgcatcgggcttcatctgcttctgcacatattgtgttatgtttagttcccacgggtccaattattgaataaattgattattaactggtgctcattcactaatcaccaggtttcattcttt

SEQ ID NO: 247726 - DNA, 441 bp, Glycine max
tgcatgatttacattctctccctttctcaagcaaattctttttgacatcatcaaaatcttcatgatttacattctccccatttttaatgatgacaaccacctgtaggttaggagcaacaacaaaacaaaacaaaaaaaatatctatttgcatataatttactcccccttggttttgcaatggttgcttatatgagacaattaaagatttcatatttttcatatataaaaagttgtctaataaagaatagataattgtcttactattttatctttctctccccctttgtcaacatcaaaaacaaatgatgaatagagaggagaaaaatgttaccacttgttgcaatgtatgagaatcaagtgataccaaaaggcattaaaacaatcattcaatattaatcaagcaaaaacaagtatagtaacacatcaatcaaaaacacaat

SEQ ID NO: 247727 - DNA, 453 bp, Glycine max
  unsure (1)..(453): unsure at all n locations
agctttaatgggcttctatctaactcatctattctctcaaaagcttacaaaatcctacaaaaagatttctagaatgtatccaaagatcatttaaaacttgagaaaacctttcaagatcaagtagatatttcacttgagaaaagcttgtataactcttaaagaaaaaaagtccaagctatgtcttgagattgagaaaagttccaaggaaagagctatttttctcaataactttcaagaattggaaaacaaactgaaagatcttcaaaaggatctaaaggagctgaatgaacttcatgattataaaaaagaagaaaaatatgatttatgaagagaatgtgcacaagcacacaaatactatgaagacctcaaaatgggtaaacataatatttgcgtggaatatgaaaacacagaaatccatgaatttcttgaatgataagcttntgaagaatcaat

SEQ ID NO: 247728 - DNA, 288 bp, Glycine max
tagaatactaagcttcttatccaaggctcatcctggtggtgaagctccttcttccattgcttattccctagtggatggcgcctcccctctcctcttctcctttgccttccgctgcatctccatggtgaaaaatgaccattgaaggacctcattgaagctcaaagatccagcctccatagaagctccacaagcaagcttccatcactggggctgctagtttttgtgaatcccatgagtgcctatgatgtggaaagcttggggaagattttggggtgaagaatggcttca

SEQ ID NO: 247729 - DNA, 465 bp, Glycine max
  unsure (1)..(465): unsure at all n locations
agcttaactcatccaaacatggtaagtgcaacatgctttcaacaaatttcttcacaaaacccatcatatctcccaaaacccaatacccacgaaaatcaagggagaaagaagtccacccaaacctgaaatttcgaagtcccacacgtagagatgagcttcacgactccgaaaatgccctcctttctcgatttggagcaaaaatgatggccaaaggttggagctttgtttggagcttcaatggagaatgaaggagaaagcaaaagcaacgtgagggagagggagagagagcttctgaaaatgtggggctgagtgaagagagagagagttgcttttagttttaaaaaaaaactttttcctcttttcttattattntatctaagctatgccacatgtctccatttgagtggagcaaaaagggcccactttctcttttgattgtgacctatacacagccacagaaagtga

SEQ ID NO: 247730 - DNA, 455 bp, Glycine max
  unsure (1)..(455): unsure at all n locations
gaaactaagcttcatcactttggcaagaacatttggaggagatcaagtagtggtcaatacaaatagagtaatggggacatagtaagtacttaatgagtcacatattttcatattatgatgcaacccattttgacatccaaattttaattntgtgtgtctactgcagtggctatatgcctattgaatatgcattgatggatcttttttaatcaaatctaatgtgttcagctttggtgtacttgtattggagataattagtgggggaaagaataaaaaatttcacaactctcagcatcatcaaaattttcttagtcatgtaagattaaagtctatattaatttccttatcttgatgtattatttcaagttgcaatcatccaatactaactgttgtgtcctaattaaacatgcacgattctctgattcggatagctataaatggaaatgttaaaaatt

SEQ ID NO: 247731 - DNA, 434 bp, Glycine max
agcttgtagagttaagtctcgtactgttttaatctattacggtagtaatttaatcgattacattgttggttgagacaatgattgattctttcaagagtctctactttaattgattaccaagtagattaatcgattacttctctcttgtttaagttgttcagaagtgaacaagaacattttaatcgattacctgcgtcatctaatcaattacattgttcttgagtggttctccagatgttggacggacactctaattgattacttcattgaaatatttgattactttatagattttatcgattgcaagcggttataactattttctctataaataaccagcttgtgttcacatctatacatcatgagatcattagtgaacactcaatacatctcacagattacttcttagtcttagaatgagcaagatcttgtac

SEQ ID NO: 247732 - DNA, 434 bp, Glycine max
  unsure (1)..(434): unsure at all n locations
cacactactagagacatatgttctaacattcgtagatctaacgtccattgtacacactgaggcagacgaataactggcgagctatccgatattaaattcaaccatctaaaagcgctcccccagaaaccatacgagataaactgactatgtctgtacgaggctgtttctcactcgtgaccggctttgatgacgaactaaataattaattatatttttatatttcaggcctccatcagtacattgcgctatatacggaacatcaaaatgctcanacgctccgtacttgtaacctacgagcataactctttaggctcactttaacactgtcgaggtatgaactctcacaataccttngccgttcacgacgaagccacatcagatatacagctatagtaaacgcgacncaaatctagtataccaattgagtcctcacc

SEQ ID NO: 247733 - DNA, 557 bp, Glycine max
  unsure (1)..(557): unsure at all n locations
naggcnnnacggggnccgggcgtccggctcggaattgtactagcnanantcnganangattngngactnnggctctagctcntatagtgacaatcatcacaaatgtgtttagctctttattcgcaaagatagatgtacaagtgagttggatctgaactatgcattgcatagtatcatcagtgcaagtcttgaaatgagggatccaactgtgaagatactggtttgatctaatgtgagcaccagctacatatatgttgtgcacatatacattcgtgatgtctcagtaataagggcccttcagtcaactataatgtgcatgaatcgcatatactccgttagtctacctcttaatcagaatccttctaccttacttcagttctcctcgaaatcacgtagaactaatatcatagcagatgcatgagttgtcgatatataacatatgcatggaatatgtctttatcgatcctcctcgagcatggataccagcggantgaactcttctctgtgaatcataggatatggcatangattgaccgaccactctctgttgctctatn

SEQ ID NO: 247734 - DNA, 425 bp, Glycine max
  unsure (1)..(425): unsure at all n locations
cgcaagcttcatcagacaagcaatatcaatcttataaaccacanaacatagcatttacaaactatttccaacagctttattactactaaattaccaaatcaaaatattgaatcaaacttcacctgtaggtcataattgacaacaaggttgccgctgtccaagctgtaacaaaaggaaatacatcaatgaccaaatttttactacgtcagacaagatgaattagtaattaatgcaaccatacctgagcactgataatttctttcctagagaaacaaagagagctaggctactactatgagaagcagaaatgtgtaggtctttaacaccatttgtgccggaaggcagtaagatgtcttgcatctcagatggagacatacctagtagtagtatgtaaaataaatttaaaggggttataattatttaac

SEQ ID NO: 247735 - DNA, 434 bp, Glycine max
  unsure (1)..(434): unsure at all n locations
gctttatccaggctcatcttggtggtgaagctccttcttccatggcttattccctagtggatggcgcctcctctcacctcttctcctttgcctttcgctgcatctccatggtggaaaatcaccattaaaggaccttattgaagctcaaagatccagcctccatagaagccctagaagcaagcttccatcaattcaagctcttatgaaccataccctcatccaacaactcctttacttgaggaataatctcaagcccaagaggtgtggcagtgctaacaatgtcttttacaaagaagaagatgtagaggttntctaagaggggaagtttctctaatgtttatctctattgcaaaatgaatctctttcttagctaacctcttggaggagacacttacctccttacacttctccttaaccattaaagggttgtcttc

SEQ ID NO: 247736 - DNA, 419 bp, Glycine max
agcttgccttgccccttgatatatatgaaggactcatggtcactatgaatgacaaattccttgggataaagatagtgtagccatgttttcaaagctcgtactaaagcatacaactccttatcataagttgaatagttaagggtaggaccacttaacttttcactaaaataagcaattggatggccttattgcatcaacacagcctcaatcccaacatttgaagcatcacactcaatttcaaaagatttttgaaagtttggcaacgcaagtatgggggcattagctaacttttgcttaagaacattgaaagcttcttcttgtttctctccccatttgaaaccaacattcttcttgagcacttcattgagaggtgctgccaatgtgctaaaatccttcacaaatctgctataaaaacttgc

SEQ ID NO: 247737 - DNA, 392 bp, Glycine max
  unsure (1)..(392): unsure at all n locations
gggatccttaagtcacctgctgctgcagcttgtttccaanacaagttaaattatttttctagtcttcacaacctaactctagctttctctttcccatgtcaactatgcaacttgcaatcaaaatgaatggccttcccaagattacaacgatgtcagtatcttcatagatatccatgaccacaaagactgctgcgaagataaaatgctttaccctgaccaacacgtcttcaatcactccatagggcctgcggatggagcgatcaactaattgcatagtcattcgagtggacataatctctaactctcccagtcttctgcacatggaagaggcatcaaattaatgatggctcacagatcaatcagagtctttctcctctctattgaacaaggat

SEQ ID NO: 247738 - DNA, 423 bp, Glycine max
  unsure (1)..(423): unsure at all n locations
ctcaaccttggcactgacaaccaattatttctcaatatgaaaatgaagcttgngcccaattgaaggatcctgttgggttgggacctttttatttttgcccataagtctcgaaattaagttcctgtcccattttcaaataaaatacatagatacctcttttttttgcaatgtgaattttggatccttatccactcagttcataacttattttcgacaaaatattgcggactcaccttaagaatctaattgtccgtaaactgaattcttaacattnttttttattgaacttcattaagttattatgtatccttaaatcctcaaagacatataataaacttcgaagctaaaatgaatttcgcctctattctttttattctttattataagtctngttctagtagtgcattatttaaactgcaatga

SEQ ID NO: 247739 - DNA, 433 bp, Glycine max
  unsure (1)..(433): unsure at all n locations
tgcttaactatgtatggcaaaatntcattactgttgttcaagacatacaagtgaacttgtaacanatcttctacacttggagtgatcacatgtagtcctcttgaacccttaccacccactctgtcatcatgccgagactcangaaggccaacaggtttagccttctctaagtattctgaacaaaattcaatggcttcttctgcaatgtacctctcaacaatagaagcttctggatgatatagattctttgtataccctcttaaaatctttatgtatcgctcaaccgggtacatccaccgtagataaacaggaccacaacatttgatttctctgaccagatgcacaatcaagtgaatcatgatgtcaaagaaagcacggggaagatacatatccaactggcacagtataattgcgggctcatttccaactcatc

SEQ ID NO: 247740 - DNA, 528 bp, Glycine max
cggtgaccattgaacggtgtgtctcaggaacctgagctgcagctttaaaaaccacggagctctgaaaagcctttattatcttttgagaagttcatgaagctgcctccgaaaaacgctgcccaacctttcttaaccggaggagcttcttcaaacttggtctgcagcttcacaagacacttgtgcatgatctgaccgttgggatccttgataaaatgtctagagtatgctcgaagcttccgttcccgagagcatttcttatttaaggcatttagcctttgctttcatgtagcatatgaaaaacgtcatttcgtcttctttctttcttccaaagcctttctaaagtcccaagaaatgtctccatcacccccaccaccattaaccaccacaaaccatcgttgttctccattgaaccccacaccgagaggaacccttcaaccgaagcggaatctttcaacttggcttgcggattcgatagagaacgagaccctagtctaacctttcgttttctgtcgagtaaccatggttcag

SEQ ID NO: 247741 - DNA, 259 bp, Glycine max
  unsure (1)..(259): unsure at all n locations
tattaacagaaacctagcagcccataattgaaatatttgcataattatgatcatatttgataaataaataacttatcaatgaatataataattataattagacgtgtttttttcttcttctttnttataaactatggtcatacgattttcggttcatgaactataaattccaaaagtgaaggaataattaacactgggcacgacagggatatttgatagcattctagtttggaagattttagtttgaaatgcatgtata

SEQ ID NO: 247742 - DNA, 359 bp, Glycine max
  unsure (1)..(359): unsure at all n locations
aatagtgtctagcgtgtaaatagaatataatagaatattttcatgtctagttctacttttctttattatatattntttgtgaaattaaaagatgctctcttttattttatgccctgttttgtttatacacaaaatataaaatatattttttgcgttatactctgtcttattttaacacgttaatcaaatgcaatcttaaaaccactaaccaaagattatctaagagcaaatgaaatgggagagaaaatggaataaaaaatcgaaggaatctacatatatattgttaagtcattgaagttcacatgatggaatgttgaaaaaagagcggtaatatctatctatctctctctctctctctc

SEQ ID NO: 247743 - DNA, 176 bp, Glycine max
  unsure (1)..(176): unsure at all n locations
gttatgccaacagcactggctaaagttactttactttcattatgccgnggggaagcacctctattggaccttattacgtaccccggggacacttttcccggcctgggtttggcttgttcttgaagaattatatggagttactcctactactttctgatgcttgggacccgcttatg

SEQ ID NO: 247744 - DNA, 432 bp, Glycine max
  unsure (1)..(432): unsure at all n locations
ttcgtgttaatggacgtgaataatacttccgattaccatnttctctctctctctctctctttctctcttctgtgggaggacccttgggcctcgaataccaagcataacactgttctacaactgtggttggtgatcaggtacgagatatgaagtatgaagtggcgtgggagcggcgagcgcaaagtaattgttgatgatggcgagaaagattatacacataaaacataaagactggatttagaattatgaagataggaattaaatacggatcataatattctcttatagaacatttaatcaaaattgaataatatcagattatgaaaaaccattgaactttaattaataagataagaattaaattatattatctgatgcgataatataagtcacgtgatatctcataattacataatataaatcatatcaata

SEQ ID NO: 247745 - DNA, 452 bp, Glycine max
  unsure (1)..(452): unsure at all n locations
agcttctcggggccatttcctgcgaaggcaaacatttgtaatattagttntaccaagaaatgctacccttaanacaaaaatggcatacaacctcctccaataaatacaaacatcaatgtaaatttagagcaagcttatgcgcatacttctttacgagcgttcacttgcacaagacattcttataactaagaaaaatgcacccatatacaatcaaggcaccttggttacctagattatttatatgtacttccaaggtgtatttgttacctacatcacacgcatttncttttgctaaattacatacatgcatactcannagcaccttgctatcanaaattcatacgtgcacattctggatttctaatacctatcatacacaaacttatgatgaaatttgctatctcacaataaggggctcattcatgcttttttaagtgtttttttactaccta

SEQ ID NO: 247746 - DNA, 475 bp, Glycine max
  unsure (1)..(475): unsure at all n locations
cacagatncacaattncttaaaagtaagcctnactcacaaaacatactcctcagaggagttctctactgtcgcaacgtgcccttcacaggcgagcgaaggcagggctcacggttgcgctttccacaagacgaaaagtgtgccgatgcgccaccaatgtctatttgtgtaaaacgtcccgaaaacccaatgacaccggcaaaatgaacatactaagtttgggagtcatacttacgctctacgaaagtcttaacacctcttaccattgtctcgaaggacaaccgccctattttagaactgtggagtggggtatcctaaccttatttctccttattttgttgaacgcgacacacaacggggtcttgctcctacgtccctccatcctacagaaatcagacctacgtagctcttcctattcgtgaatcaatacgccgtttatcctgacgggatctctctaagcctgaccttacaatgacg

SEQ ID NO: 247747 - DNA, 435 bp, Glycine max
atctctaagtcacctgctgcatgcaagctcgtcagagatcatttcttacagtgttggtttattaatctgattcacctaccttctcagtatgcaatgtcaatatgggcagcctagaactatgaaaattaaattgtctttattttacgtttggctagttgtgaaattggataaggtttggttgatgaatatgggggttaccacgggagggcttgattgtggttggtgtcattttgcacataacaatttttagtaatgtgttgtgcaacaaacattaaatgatgatttgagttggcaatatatgttaaaaaaagtatattacatgtaatcagcagtcaatggatgcgtgattgaatataaatactatatcttgaaaaataaaaatagtattaaagtctctatatgtaatcttacagaggagatttattaaaaaaaaag

SEQ ID NO: 247748 - DNA, 154 bp, Glycine max
gttctcagtatgaaaattattagtcgaatgctccaaatcaaaatattccaaatcacccgccacataatactcagaatgctcaaaatgctcaaaatgcacagaatgaccaggatgcacactatgcctaacttatctattaaagggtctatctatt

SEQ ID NO: 247749 - DNA, 481 bp, Glycine max
  unsure (1)..(481): unsure at all n locations
agctngatataaaggtggtttgtggtggatgatntttatcattgtaagttcttagtaccttttggagagcaacaattaacacgacggacttgccgatacccanaagggggattaattctattgaattattatgtcttangtggaaacctaagtacaatgctgttatagttttatccacaagagggtctaagtattgttatgttgagaaaattttatgaattgtatacggtaagattggatcatgcattcatgcataaactcacaattattgttgttgtgagcatgcgcgtaagtctatttactagtgtgggaaggtcagctgagcgatntcacgtgtgatcaaggtcatcgcacacattatgccatagtagctactaccttgatatgcttatcctaacaatgtcactaattactccataatcagtattgatgttaatttccctaaatggtttatggcatgtctcgcatgtatagggtttct

SEQ ID NO: 247750 - DNA, 221 bp, Glycine max
  unsure (1)..(221): unsure at all n locations
gaaattgaattatttaaaaatttaaggatcaaatatatcccaccttatgatatatctattttaaaataaatatctatattttgattgaatcatttatattaatttgtgacatgtcgcattntatgattatatgagtcattttcattaattatactaatctgcgatcatattcaattatttataataatttttaattccacattatttggaattatatctat

SEQ ID NO: 247751 - DNA, 480 bp, Glycine max
  unsure (1)..(480): unsure at all n locations
agctngttganatagctatgtntggatgagttagacatacccattctgttttaagggttttgtgatgatgtttgtgatgtttatatgctgaaattgcctatggaaaactgttagagatgaatggtagagttaacctatggttagaaagtgagaatgtgatgttatgagtggaaaaagagtgaggctttgagagttggaaggttaagtctgaattctgtggtaaatggaggttaaaatgagttaatcctagcttgaaatgtcatttaggacatgtgagaaaggttatgttgtgctatagggaaaaacaaatgaccaaagtgaacaaagagccatttctagggcaaaattgggtgttgaagagtcaaattttgattcggtgagattntaggtgtaaatccagttcgaacaagtctaaatagatgttatggactggtgtgaggtgagaagttgcttcaaatttacctcattctaaatttcact

SEQ ID NO: 247752 - DNA, 272 bp, Glycine max
  unsure (1)..(272): unsure at all n locations
atactaagctctggtctctgcagatcttcacacaacaaaatctctcaaaacactcttggtacttggacctttctctctctataatctctagacatgcaaagctctgaatcccaatccaaactctctctctaaaatatgatttcaagcttaaataagtggccttgttcgtgcttgtgcgcttatcgcaattatggatcgcttaacacacattattgaatntcagcttatcgcgtgcctttctcgcttagaagatgaactgaagcggtacgctt

SEQ ID NO: 247753 - DNA, 428 bp, Glycine max
  unsure (1)..(428): unsure at all n locations
agctngcctcaaggaggtccaggaaggacaaggcggccgaaggaactatttccgctcctgagtatgacagtcaccgctntaagagcgctgtacaccagcagcgcttcgaggccatcatgggatggtcatttctccgggagcgacgcgtccagctcaaggatgacgagtatactgatttccacgaggagataggtcgccggcggtaggcatcactggttacccccatggccaagttcgatccagaagtagtccttgagttttatgccaatgcttggccaacagaggagggcgtgcgtgacatgaagtcctgngtgaggggtcagtggatcccgtttgatgcagatgctatcggccagctcctgggatatccattggtgctggaagagggccaggagtgcgagtatggccagaggaggaaccggtctgat

SEQ ID NO: 247754 - DNA, 272 bp, Glycine max
  unsure (1)..(272): unsure at all n locations
cggtttgagggacttacccgttgaagactgatgaacgatgaagaacgaatgaagaacgtcgaagaacggtcgaaaaccttcgcaaaatcactcacggaaacgttacggaagcgcctcggcttggattttcttcacggaaacaattttcctaagcaaattcgaaagagagagaagtgcctaatggactgaacccttttctactacacttctccccctatttatataaaattgngggagaagcttgccacccagctcgcccaggcgagctcagc

SEQ ID NO: 247755 - DNA, 535 bp, Glycine max
  unsure (1)..(535): unsure at all n locations
aggcacgagtganncttttgtatncatctcgtacncgagatcctctagagtcacctgcggcatgcaagcttatatanatacatttctcttatatgatatgtcatatatatatatatatatatatatatatatatatatatatatatatatatatatatatatatatatatataagggtatgattggcacatggaaaaaatatagagagagaattgtaaaatttgaatagaaagaagatnattttgtgaatttntatctttccgcaatcaaattttgtcaatttttatctaaccaaatagaagaaggtatgtccttattgtgtnctcttcctccaaattaatgtgatggtggacacccaaagaaccatattaactttaatgatatccggtacatatgccagcttaattcttgttcaatttatagagaatttctcctattgggaaacaactgaaaagaatggcaccatggctcaagccaaccttatattacgaaaaaaagtagtttagttacttacgaacaaacacatatattttag

SEQ ID NO: 247756 - DNA, 520 bp, Glycine max
  unsure (1)..(520): unsure at all n locations
cggtggccatgannctgtancatctgacncgggagcttaagtcagcgctgctgcagcttggttcnatacaaggtaaagggttctttctgttatgtgttgctagagaagttaccctccaagtgctgcccacgaacttctgactagctcatttacgaatttcagcatgcaaaatgtttgaacatagcttgtaagcaaatgctagacaaaggaaagaggcattgatccttactgtttcatcaagaatctctataaccgcattacaatcttcaatacaactcattgtcacaaatgcaaagcctctactttttccagagttcctggcgtaaagcaactccatatagatatataataataaatgcgtgaatttcctggcaattaacgagatggtcattgtcccccgataatctactcttngacgagaattggattcatttattgcatgttaaggatgttgcctgcaaaattgtttttattgagagatctgccaaatgcagaacataatgttggtgaccgttctttn

SEQ ID NO: 247757 - DNA, 184 bp, Glycine max
  unsure (1)..(184): unsure at all n locations
tttctttgagcaaagcanaggctntcacttgtctttcacccaaagtataatgccacattcttcttcaccagctcattgagaggtgagacaattatagagaaattangaacggaccttctatagaagcttgttaacccatggaagctcctaatatctcccatacttttttgggggaggggggggg

SEQ ID NO: 247758 - DNA, 148 bp, Glycine max
  unsure (1)..(148): unsure at all n locations
gctgacaacagcacttagactccgcataanactcgcttattatgagctacaaaagtgtggagaatatctgacatagatgtgctgtctctttcagttgactctaagcccatgtgtgattatatttctctcctcatttgtcattacatca

SEQ ID NO: 247759 - DNA, 477 bp, Glycine max
  unsure (1)..(477): unsure at all n locations
acactctcagctgcacttcaccagaaaaataagatttaatatctgaaccaagatattcctgcattatgaatagcaaaactttggcatcaaagtaaattcttctagcaagaaaaatatgtttgcccagaaaaatgacaattgtcgtaccttttcagaaacaaagtaatttaccattggaactacttcaccatatagataaactatgcagcagtaatcattacagcatctctatttggtaacatcttagtcctctgcctcatctgaaaatggataggcaagtaagacatctagtnttataacaaagatgattacacagaagatgcttccctttccagaacgcatcggatatgtgcactactcgtaattctcattttgacgttgaccttcatccaagcgttaaacattagaacagaataggccactagttaaaataaatcattagctaagaagggcctctgcctaatctaacttttcata

SEQ ID NO: 247760 - DNA, 277 bp, Glycine max
tgactggatttcaagtcaaccggacaccttaagttttatctaatgtcaacagtgagctatggttttgaaatgacagcaacatatacatttcataccaatttccttcttgtgttaacaaaggaacacaggatatatcaaaatctatgattaagattctctccaatcaacattctcttcaccttcctccagcctctggctctctctctctatatatattacttggtatttttccatcattttcttttttctttccattattttttagcttctgatctta

SEQ ID NO: 247761 - DNA, 408 bp, Glycine max
  unsure (1)..(408): unsure at all n locations
agctntctgtttcaattggagcgtctcgatatattactgtactcaatttgacatccgaatataaagttttcttcgtttgaatntgctcagagcttctgttctcaattccgtgcgtctcgatatattacgggactcaatcggacatccgagtaaaaagttattgtcgtttgaatttgttcagagcttctgttttcaattgggagcgtcttcatatattacgggactcaatcgcaaatgcgaatataaagttattgtggtttgaatatggtcagagctttctgtctcaatttcgagcttctcaatatattacgggactcattcggacatccgagtaaaaagttatcgtcgtttgaatttgctcagaacttctgttttcaatttcgagcgtctcgatctattatgggactc

SEQ ID NO: 247762 - DNA, 512 bp, Glycine max
ggggccggggtttgacgcctctttattggccctctgatatactccgctcgtatcaatcctcaccagattaacttctgactccgctatccgaatgagtgccgagatagattttgatgctccatcatagaaaacggaagcgcgcacctggttctatatacaaaccactccacctgggatgtcctatagagacccggaacatatcgcgacgctccttatcgaaaccggcagctcgcatcaaattcaaacgacacttacttttaactcggatgtccgattgagtgccgtaatatatctacaccgctccaattgaatacagaagctctaagcaaatgcacacgacaataactgtttactcggatgtccgattgagtctcggaatatatcgagacgctcacacttgaaatggaagctcgttcaattgcccacgacaatactttttgctggagtcaactgagtccggaatatcgcacgctcaattgaaatggagctctttaaattagccacatacctcg

SEQ ID NO: 247763 - DNA, 516 bp, Glycine max
  unsure (1)..(516): unsure at all n locations
agctntctagctnttcattggtgtattctgatctccttttggtgctctaaattgtgggaatgtactcaaatatgtgggggcaatttgatttgttttcttgcttgattaggttgaattaagggtttgtatgagatggccctatgcctataatgcattttgaagtaatggggcatgccacattgtccccgttctcttgctattgacgcctaaacgcgcgcccaccaagtgttcggtgaaatgcctcaatggcattagcgcgtgattnttgtagggaaacaacccatggggcgatttggtttgcacatatnnttgggacatgcattcattntcgaaagagctagagtaattgccccacatatgtcctangcctaggaaccaaagtttttatgcaaaagtacacaaaaggaggtgcatattgngtaaagttaccctcttttgggccagcaatcagctatgggccacactataatattntccctacgcctagatgtctatgaattgtgctcgtcatgaatg

SEQ ID NO: 247764 - DNA, 364 bp, Glycine max
  unsure (1)..(364): unsure at all n locations
agctngatagcacgcagagactaacgacgtcttctgcgctcttcgtcaatctcgtccgacaagcccgttgacatgcggagatatacgtcatcttctgcgctcacaagatctgtcatactgactnttgagtcacgctgacgggcggaaatacccgagtgggtatccgtataaactttntgctgtctgtaagacgaaaagcttgatagcacgcagagactaacgtcgtcttctgcgaccttcgtcaatcgcggccgacaagcccatttacaagcggagatttacgtcatcttccgtgctcacaagatctgtcatactgactnttgagtcacgctgacnggcgcaaatacccgagtggttatctaat

SEQ ID NO: 247765 - DNA, 510 bp, Glycine max
  unsure (1)..(510): unsure at all n locations
ccttgccccatgatatatttgagggacttatgatcactatgaatgacaaattccttgtgataaaggtagtgttgccatgttttcaaagcccgtactaaggcatacaactcctaatcataagttgaatagttaagggtaggaccacttagctcttcactaaaataagcaattggatggccttcttgcatcaacacagccccaatcccaacatttgaagcatcacactcaatttcaaaagatttttgaaagtttggcaacgcgagtatggnggcattaattagcttttgctacaaacattgannagctcttctcgtttctctccccatttgaaacgcaacattttcttgagcacttcattgagaggtgctgccaatgtgctaaaatccttcacaaatcgtctataaaaacttgctaagccatgtgtcgcaacctacccttcagcgggagggcgatgcgtgactcgtcggatgcgtgttccacgaaaggaatacgcgcggagtcgccactaat

SEQ ID NO: 247766 - DNA, 254 bp, Glycine max
attagagtttatctcttttatcttagagagagtgagtctcctaaattcttgagtgattcaagaacaccttggctggatcaaaggactctcacaacctttgtgtgttgccctcgctggaaagagagattctttccttcccttcatcatcacccttgttctttcaaaccacaattccagaaaatccacctctgcccataattatctcgttggcataactcccattttacgcacctcaataagcgattcttgagcct

SEQ ID NO: 247767 - DNA, 441 bp, Glycine max
tacatataatacttcgaagtcccaagtgctagctcgtttattataccactgacccctcaatctttcataatatagaataatattcaataatctacagaacattaaatttaaatgtaaatttaatatattgttcttttaactaaaccaaatatttttttattcaaataataagccaaatttagagcacaaggtgtgtccaatccagccaaaaaaacagtacatgtaaaaggccccgcctttgtaacccataaaaaaactagatctcgtattctgtatctgctacccatttatacatagagataatgacctatcaagcttaaaaaagctatacaatttctcaaaccgacaaaggagccacccaacgacaacgacattccatatgtaatttcaattacaccattcccaaccccttatttcgtggtttctgacaacgtacaatac

SEQ ID NO: 247768 - DNA, 349 bp, Glycine max
  unsure (1)..(349): unsure at all n locations
tctcaaacacctgataacactattaaaatgcattgcaaggaatgtttctgtttagttatcaaatcaatgaataaagcccacatggatatatataaaaaccactcaacttgtttctacttaggtatcatatgaagcttctagtgttgatctttaacaaaccaaacagcatccatagaagttacaagtgcctcaantttggcattttttgcagtgaaataaaaaatcattcctacacaaacttataatagtaaaaagggtaaaagaagaggaataatagctaataggaataatagtagattctaaatcttctaggtgagttagtatcattaacacatgnttttgtaatcac

SEQ ID NO: 247769 - DNA, 427 bp, Glycine max
  unsure (1)..(427): unsure at all n locations
taatatattattgctcacactcttatgctctttgataagagccatatctagttatttttgggattaaaatattagcacttatcttctgattgtaatagttnttcttataaactacccttaaatctagttgttttatagatattgtacatttactaaagcttatgtttaaatatgaaagattcaaccaggatattgtacgctttgatggttgtttgttagatccacaaacaaagtcaaaaggaaaggcacaatggtcattcttcaagatttcagacattcactcgcctacgctagctttcagctcgcatgggctaataagaattcttcagccataagcaaccaacttgcttgggtgagctacaactttcctgcgcgaattggtgccttcagcactgagtcactaatatccctgggtgagctacatatg

SEQ ID NO: 247770 - DNA, 259 bp, Glycine max
  unsure (1)..(259): unsure at all n locations
ntacacacacaacatgaatcttttaagcatgagtcanagaacatcttgttcaaatatgacttttgagaaatatatattagaaggattagagttaatcacaaatgataaaaggttaacaattatttatgatatactcttttcatcaagtcatacaaacatccgagtccactttggcattccggaaaatctttcattngtttcaccctctatgtgcacattttttntccaaaaaacctttcgtgttttgatccatgaattt

SEQ ID NO: 247771 - DNA, 491 bp, Glycine max
  unsure (1)..(491): unsure at all n locations
agcttaactaaagacatcatcatgaatctgaggtactcaataaagtggtcgacaccccgtgccacatttgggtaccatttgcctactccacactctagctcaagcactagctctaactgcatttgatcctaaaaaaacgtaacggtgattcttttcacctcatcaaccaagcacaaaaagccctatcgcaagttaaaccacacaacactatcaaccactttgtagtggttatatactagatttcacacgcaacctaaggcttcccatctcattatctcaacatacatagcacatngactagctaccattagaactctcagaactcactggctttacaacattntgtagaagcaagcttcatgatgatgaaccaagcaattttgatgatgccaaaagcccaagtaattgattcaagacttcaagatcaagcatcaagaatccaatccaagattcaagagaagaaatcaagaagcaacaagtcaagacttcat

SEQ ID NO: 247772 - DNA, 254 bp, Glycine max
tattctcaacagtcacatctttttatttgggtcttgaatggctatcaaagacctatatatatgtgacttgagacacaaatttgagaagagtttttcagaacaaaaaggtcttatcctcttaaaaagcataatcagttcatcctcttaaaaaattcttggccaaaacactcgtgattcaataaggaattatttgagtgctcaaattgttcaatctatctctttcaagagagaatacttcttctcttcttctttat

SEQ ID NO: 247773 - DNA, 487 bp, Glycine max
  unsure (1)..(487): unsure at all n locations
agctngcttgtggagcttctatggaggctggatctntgagctntaatgaggtccttcaatggtgattntccaccatggagattcagtggaagacaaaggagaagaggtgagaggaggcaccatccactatggaataagccatggaagaaggagcttcaccaccaagatgagccttggataagaagcttagagaggatgcttcaatggaggaaaagaaagagagagagagagaaagagagaggggggagcacgaaattgaaggaggaaaagggggagagaagttgaactttgagttgtgtctcacaagactctcattcatcanagntacaaaaagtgttacacatgcttctatntatagactangtagcttccttgagaagctttcttgagaagcttctttgagaaaacttccttgagaaactctcttgagaagattcctagagaagctagatcttagctacacacacctctctaataactaagctca

SEQ ID NO: 247774 - DNA, 309 bp, Glycine max
acactatagaaactcagcttttatccaagcaattcttggtggtgaagctccttcttccttggcttattccctagtggatggagcctcccctatcctcttctacttttccttccgctgcatctccatggtgaaaaatcaccactgaaggacctcattgaagctgaaagatccagcctccatagaatctccacaagcaagcttccatcaagtggttatcacaacacaagagcttcaagtaagtgcctcttaaacctccattaatttgtttgccttaccttctcttccattgttgtgtcttcattttttttc

SEQ ID NO: 247775 - DNA, 441 bp, Glycine max
  unsure (1)..(441): unsure at all n locations
agctnggaaagcatagattngatattgcttccctcatcatgtggctcatgatgtnntacaatgaatgatcctttgctaccctgcaatgagacacacacagatacacaaacacacacacatagagacaaacacacgcagacacaaacacaaacacacacacacacacataaagatacacacacacacacacacagagtcacgcgcacatgaagacacagactaagacacaaacacactgagccacagacacgcacagagacccacacacanagacacacacactgagtcataacacacacatacgcaaacacactcacacacatggacagacacacacacacataaagagacaaacacacacactcacacgctctcagagtaagagacaaccacatacacacacacgcacacacacactgataatgagacggacgcacacac

SEQ ID NO: 247776 - DNA, 468 bp, Glycine max
  unsure (1)..(468): unsure at all n locations
tgattgtgatntatctcagcctgtgtgtagagataagtgcagaccttgcgctcagtgtcatctcttcatgcgctaagctgagcttactcacgcttagcgcaaagacccctgattgattggctgaatggttcaactaaaatcacatcgctgcactaagcccaacatcttcactgtatagtgcaccttaagcaatgcgcttatcgtggatgaagcgctaagcgccactctctctctgtgaaaatttattatagctgcgctaagcgtgccatcctgcgctaagccacagattcattctgttagttgagctttgaagctacgcttantgggaaaggacacgctaagcgccacatcactttgttctgaatcattggaagtgcgcttagcgcatggagtggcgctaaacttgaatcactcactgtacagtgaagctgatgtacggctaacctcgatctaggctatcgctattgg

SEQ ID NO: 247777 - DNA, 459 bp, Glycine max
  unsure (1)..(459): unsure at all n locations
agctatgggaataatatntatcaactggagtattgaacttaacccacaacaagtttctagttatatgaactaatatatgtgtcacttctaatgtttctatggctgttacttttaagtaaagactgggaagaccagcttggagcaaatatcaagagtttattggaatcaggtaagctaaaagctaatagtcttgtccattcttttttcttatccatgcacctttatgtacttgagaatccctaaacatacatgntaacaataattttccccatatgtaaaataacttgacaccctcgaacttctcaaagtcattccaatttctattcgattcgccattgttactgttattttctacagattatgctcctgtcagtggtttgtacaatcaattgtctggagttccctctattatttcatattccccaatatcggaatatttaaaatgtaaattcactggat

SEQ ID NO: 247778 - DNA, 312 bp, Glycine max
  unsure (1)..(312): unsure at all n locations
cgttaatccatggaagctcctaatatctcccacactnnttgnggtgggtcattcttggatggccttgattntctcaagttccacttggaacccatttctaccaactacaaaacctaagaaaactatattatctacacaaaaggtacacttctctatatttgcatagagggtgtttttcctaacgattgaaagaacttgcctgagatgtcctaagtgatcatctangctcctactgtacactaaaatatcatcaaaataaacaactacaaatctacctatgaaatcccttaagacataatgcataagcctcat

SEQ ID NO: 247779 - DNA, 388 bp, Glycine max
  unsure (1)..(388): unsure at all n locations
caagactactacagtcatttctagattaacacaattaatcaagcagtcaaaacgatatagacaagattaaaaaatgtgactttataaaccataacatcctagacatgtccactgtagcaaagattaaaatatgaaatacaaataaccaagcatttaacagcaaggcttcactgatatgtaaacctttaaaacaagctccttggttgtgtgtgttgctatggaaacactacgctgcacaatactagacactatctctttgatagctctgtccattgcaatgggtaccgctctgtaaaaaaataacaatacgaaatagtaactcagacatatagattcgaaaaacaagcagaacattaaagtgagcaccatacctctganaatgcatttg

SEQ ID NO: 247780 - DNA, 194 bp, Glycine max
gatgccccacattatttccatgacacaaatgccaaaatgatgatttggaaattttatgcaaaactggtcatgcatgcacctatgcagacactcaagtgtcaaatttttatggtcatgtgatgctagggcttaagatttatttcctctattttaaatcaacccaatgtttccaaaatatgttcttttatcaattt

SEQ ID NO: 247781 - DNA, 183 bp, Glycine max
  unsure (1)..(183): unsure at all n locations
acctggagatatgtcgcgggggtcaagagacctttgggacgtcangtggggtgctattgcccaaaaccaagcttgaccaatcccgacccaacccgggcatattcggtcagtgagaacatgtgacgtacctaagcaggcgagctcctggccgtccacagataaaaggaaaacaagaccacacag

SEQ ID NO: 247782 - DNA, 430 bp, Glycine max
  unsure (1)..(430): unsure at all n locations
agctntataagcacaggtctggcggacgcgatatacgaatatgatgttcttagtacattggaattggtacaaccatgccctcctgatttccagctgggaaattggcgagtggaggaacgccccgacatttacgcagcgagcataatgtaaacctttacggttttaaaagctctatagttgggcctaggctttagagtttttcttttggttaacgctttgcgtattttgtttttttaatatataatacgaggatctttcttcatctagtcctacgactgtacccatactcatccatttgcatgtttacttcttttctaaaacggcagatccgatgatgagtcccccgaaggtactaatacctgngacccgcctatcaacttcgagcaagaaacgaatcanacggaagatgaacggaacgatgatgtgggac

SEQ ID NO: 247783 - DNA, 173 bp, Glycine max
atatccacgatgtgcgcataaacccaccatcccctgttgcccaccttcatctgagctcacgtattcccacgtagcccatatactcggttctcttaacaccgggtccccatcaatccttccaagcttccacaacatccaatcaaaacaacattcaaacagcacaagctatcaca

SEQ ID NO: 247784 - DNA, 480 bp, Glycine max
  unsure (1)..(480): unsure at all n locations
agctnttcgattcattctatgtacccgtggtggtccacattgtgtttcgtggtattttattctcgtttcatctactttttatacccccttttgacgtgcttaagccattttatttaagtcatttctcgcttaacctaaaaataaaataaatttccaccgatcgtttgaattgtattatccgttaacttcggttaaaatgaattccgaccgttcggtcgtgccgtaaccacgttgaaaataaaaaaaaagaggtaaaaggataatataataataataataaaaaaatgtcttttagtaaaataaagcggaaaatcaatcggacattttctctttgggatttctcattcttaattgaattgactaataactaaagtgaaactaaggctaanatcaactcgcctagtcaagctcgtccataaaaatagttntttttggaaattatcatttcaatntcttactaagtaaaaatggagtcatttc

SEQ ID NO: 247785 - DNA, 480 bp, Glycine max
  unsure (1)..(480): unsure at all n locations
agcttgtaggcctnggatcttcttcatcaatggagtcctttgcttcccgatgatcaatggaagcggaatggagatggaaaaaagatgattggagacgccacttcaaggagaagatgagtcaagaagaagctcaccatcataggaagccatggataagaacttgaaggtangagaagatgggtggagggagagggagagaaggagcacgaaattttgtgtcttanatgaggtctgaactctgaagtgtaattctcaaatgatcaaagttgaaaaaatgcacacacatggttgttatttatagtctaagtgtcacanaaattggaggaaaatttgaatttctattcaaatttcacttcaatttgaaattgaatnntgtggagtcaaatttgaagccaacaattcactaattatgattagtgaatnttagttgtggttcagcccactaatccaaaatcaagtccaagattctccactaagtgt

SEQ ID NO: 247786 - DNA, 366 bp, Glycine max
  unsure (1)..(366): unsure at all n locations
gcttcaatctcctcatacactgaatattcatcttgtgatcttgatcattgttgaagtggtaatgtcacacttggagaaatcatgccaaagtctgataatgaagagctctcgcctaaaagaaatatataccgtgatatagaaggaggttgctatgaaaataagtaaaggctattcaagctctctgtgaacaaaaatgatataaaaaaccaatcatatcattcttgatagtaagaaaataaatgagtagcggttgtcgtctcttattaatattatctacacgttaaaatgaatgaagatnataaaagagaatgaaatagtttgtaggatattaattttagtattcctaacaggaaaaaaagagcgaga

SEQ ID NO: 247787 - DNA, 402 bp, Glycine max
  unsure (1)..(402): unsure at all n locations
agctntgagccaaaatcctgactcaccatataccttgtctccanggtgagaatgtcaatccttaccctcggaagcaaaaaagaatagaagggaaatttccaatcaaagaacagagaacgaatatttccagtgaaagagagaaaagataagagaggaaattcccaatcaaagaatgggagaaagaaaaaagaaaagaaagaaaattcccaaccaaagaatgggagaaagtaaaaaaaggaaggaagctcctggtcaaagaaaccagaagatatgtgcagagaggtctttggaccagacaatatctgaacagtacagaattgtcaccaaatgaacaaaaaggaaggaaaggaaaccacgacctanaatggtcttctccctttaattaccaaccaaaatcccgtg

SEQ ID NO: 247788 - DNA, 266 bp, Glycine max
  unsure (1)..(266): unsure at all n locations
agaatcaatgacaatgcttacaaagntgagctgcccggtgagtataatgttaattccaccttcaatgtctctgatttatctctttttgatgcagatggagaatctgatttgaggacaaatccttctcaagagggagagaatgatgaggacatgaccaagagcaagggcaaggatccacttgaaagacttggagggcctatgacaagggctagagcaaggaaagccaaggaagctcttcaacaagtgctgtctatactatttgaata

SEQ ID NO: 247789 - DNA, 422 bp, Glycine max
  unsure (1)..(422): unsure at all n locations
agctngngatangcattgngcatctatnttgactntcctatgctgtctctaaatacataaaacagccccaccatcccaattttgcaaaatcatgttcatatatcattgnggcatttcaccgagcacttgatgggcgcatgtttggacataaattgcaagagaatgggggcaatgtggcataccccattgcttcagaatacaacataggcctaaggccttctcattcaaatcctcaactccaaaaaatcaagcataaaaacaaaccanaactgccccacaaatataatcacattctcacaatntggagcaccanaagatgaagaaaatataccaatgggaagctaaaaacatcaaggattgaatacttacttgttggagtgaatagaaacaccaaaagcgaaagcaaaaacacgatcaaaagt

SEQ ID NO: 247790 - DNA, 186 bp, Glycine max
ctagtgacgtgaaagaagtgcttactgggtggtaacttgagatttctaaccttttccttcttttttggtaaactatattgctttgacatgtgcatgttgaattttggtggtttgtggacatttcttgattttggtgtgtcttatttttcaatgattgcgtgagcttgctggtactttatgtgatat

SEQ ID NO: 247791 - DNA, 432 bp, Glycine max
  unsure (1)..(432): unsure at all n locations
agctntctcataanaggcagccacatttttctgaaatcatgccacttattatcaattcgagcaacagtaatattgtttatacaaacctactttaaataaaatagaaaatacaattcaagcaaatcattaattcaaccttttaatttggcttatctttgctaccagtaaactggtttcccatgaaacaaatatcttaacttgcaaggggaacaaatctggcaaacagtccttttcatatgggatggttccaaaatctttcactgcattattaaaatcattatgcctacaagaagagtgagatgaatgatgaatcaattttctaattctgtaaacaatatgttcttagaatatttggcggaagatcttttatcagtagaaagaagacttaagatatcattcattgctgtaaatcattgtgaataatattaacct

SEQ ID NO: 247792 - DNA, 331 bp, Glycine max
  unsure (1)..(331): unsure at all n locations
cgacctgtgtgcttagcgagttcataattttttgtgttttatgggtttntgatgaactctctaagcctgacctatgtgcttagcgagttcatgcctcttttataatatttgctgggttttgatgaactcgctaagcctgacctttgcgctttgcaagtttctgaattttcttcgtaattttttggtgttctagatgaacttgcttagcctaacccgtgtgcatagtgagttcatgatttttcctcatatcttctaaggtttttataaactcactaagcccgaacttgcgcttagcgagttctttcatgtgtccataggctctatggttttt

SEQ ID NO: 247793 - DNA, 505 bp, Glycine max
  unsure (1)..(505): unsure at all n locations
agcttcccgacanacacttanaggagaagaagaaaaaaggaagaaaatagttaaaattaacttacgaaccttacaattattagaatctttctcatctaactactccaaaagttgactgcataacgtgattntatcttagtggagaagttttatttattttacctccctatttcttctcctataggtgattgtagaatgtacagaagcttatacaaattgaactattactttgcttatccaataagattagatttatatacttgctagatgcatagtctattaaaaagtaatattacacgaagttctggattattgaatttagtctcgtagcagtttattatttattatanattgaaaatccttttngaacactttgtgtaatcgggttgtactagttattgaactaaccattacttgacctattaatgttagtatacatctcatatcatctcactgataatatttctctctgcaccataatttcaacatggaatcaaagaagtat

SEQ ID NO: 247794 - DNA, 296 bp, Glycine max
  unsure (1)..(296): unsure at all n locations
taagcatttcanagatgataacaaagagatgctgtctgggatntctcattagttatgacaatcataaaatgctagacgtgttactgactggaagccagagctatgcattaacttttgtaaagtgaagaaagcgttacattcgtgtttccttgaatcaaaaagtgaaatttgatcccgaaaagtttcaagaagatccgcaagaccataattaattaaaaaagaaaacatatggagattcctgatatgcaaaattgatggaggcaggtcattcacacctgaatgtgctaaaaacaata

SEQ ID NO: 247795 - DNA, 420 bp, Glycine max
  unsure (1)..(420): unsure at all n locations
agcttgaaccttgaatcttgattcttgattcttganatctaatntcctcttgaaccttgaaatgttcttgattcaatcttgaacttattctttgattcttgagatcatcatctttgttatcatgaagtgttcttaacttttcagctttttgtcatcatctttgttatcatcaaaactctttgaatcaatcttgattcatcatgaagcttgcttctacaatttgttcacggaaccaatatgaaagttatttcctattaattctgttgaattcatattgagataatcaacgaatttgtctcttgataagatcagtatgggctctatgtaaaaaacgttagaanaagtaagcattagcattgatagaaagatattatacaaaatttcaataactaaatataaacattaaacacatcgtattac

SEQ ID NO: 247796 - DNA, 490 bp, Glycine max
  unsure (1)..(490): unsure at all n locations
agctttgagtgaatcaatgtgactnttcacatttaaatttgaattntaacgttcaaggacactggtaatcgattaccaaaacattgtaatcgattactgccttgtgaaaatatttggaacgttgtaaattcagtttgaaaactttttcaaactcattttactactggtaatcgattacaacaatatggtaatcgattaccagagagtaaaaactctttggtaaaggttttgtcaaaaactcatgtgctattcaaagttttgaaaaaactttctaatacttatcttgattgagtcttttcttcattcttgaatcttgagtcttgaatcttgatccttgattgtagactntcttcttgagtcttgaattcttcttgattcttgaactcttgacttgttcttgattcacttgagttgttctttgatctttgagctctntgttcatcacctttgtcatcatcntttgttggcatcattggtatcatcaaaacac

SEQ ID NO: 247797 - DNA, 258 bp, Glycine max
  unsure (1)..(258): unsure at all n locations
tgtagaatggctagacatgatacacgtcaaggtttggtttggttcaaagataaaaaggatgccccacattatttccatgacacannatgcaaaatgatgatttggaaattttatgcaaaactggtcatgcatgcacctatgtggacactcacatgtcaaatttttatggtcatgtgatgctanggctcaagattncatttctctattntaatcaacccaatggttccaaaatatgttcttttatcaatttgtacattc

SEQ ID NO: 247798 - DNA, 447 bp, Glycine max
tcttaagtcacctgccgctgcagctttaggtttagagctgtatcactcgtccatatctaaattagttgaatgcctctcatgatggagagaatctcattaaataataatctctaacttcatacaaggaaactttgcctatcactatacaagaaaactttgcccaattactaatttacagctattcacatctgtcaattaatgaaataaatgcagcacataaatcagagaatactgtcgacaaattataggaaaagcaataaatcaaagatttacctaattatgttgacactaataacatgattacagaaagaagtgtccagttgccaaatctttcaaatcattggatcacactactctaatttaaccaaaaacatacaaacacttagaattcttttatttcataagtagtacaattactacgtaacaatactattatatttcacacta

SEQ ID NO: 247799 - DNA, 188 bp, Glycine max
ttgaacatacgcacttgtgaaacttactgggaattactcactgcgaatttttagccacgatttttaccaaaccttctatacatcctggaaaaaaatatcaaaaaaaaaccgcgcgatttttattaaaggaaagaaaatactccaaattcttcaagttggcacgaaaatcaatgtcctgaataaaaaaa

SEQ ID NO: 247800 - DNA, 462 bp, Glycine max
  unsure (1)..(462): unsure at all n locations
tcttgcagctctggattctgtttggatntgttgaatttgaagaattgagttccatgcacagtgcacttgaggtacagagcaattttgaactgttgattntgtagttctgcgctgttgtttgtttatttggccatggaagaagtgtctatttgtagatgtccataagattaaaattttttatatcttttagaatacttttagtttattggtagtggtaccgattagcattagctcgtagcaatgttgcctgtatttccaaggttcagcttctgattggagcagttctggtgctggaatgttcanganaagaatatgttctgcatcttttgctcataaaaaattgtgcctgcttctaaactggaacgtctttctagaaatctgattaaagcaatatattaatgcattttgganaggggattattttctttgtgtctagtatatagtcgatcttgttagatgttt

SEQ ID NO: 247801 - DNA, 224 bp, Glycine max
tcatcgccatcattagtcttccacctaaattcacccttttatcgtcgccacctgaagcgtctctacaaagaaagcacaaaggcacccagaagaatctctagtcctcaagtaccaaataaaccaacgtgcgtaagaagaacaagggaaaaaggttttgttactcgcctgtggttgaaggttaaaggtttactatggaagaagcatgaaggtgaagaggggagaaa

SEQ ID NO: 247802 - DNA, 507 bp, Glycine max
  unsure (1)..(507): unsure at all n locations
agctngacatggatatagtaagctattaatagttntgtacacttattacattntatgcataanataaatatgtttgtagaaagtgtctgggtctattntaaatntgtaggttgggttcattgtgaaacaagataaatattaaaaaaatacacttaatttctatatcggttgcagctacaatcgatgtagaaagtgcctttacaacatcagttttgggcaaaatcgatgttataaaaacactntctacattggttgtatctacaacctatgtaaagcaatgctntgaacatcggttnttgaaccatcgtcgaaagttcccactttcaaggatgcttgattcaacatccattctaaaccgatgttaaaagtcctccagaaccgatgttgaaggagttttctataataatggccctctagtctaggggttatgatgtaattatccaaatgtactcctctcattgttcttgatgaaaccccncattgttntatgctaagtagttaccttca

SEQ ID NO: 247803 - DNA, 412 bp, Glycine max
  unsure (1)..(412): unsure at all n locations
cacattcactttcttctacatcatattcaaacttgtccaaattaataataaagtcatcttgacacaaagaaggtcatctaagtttcatacaattaatatagaacctatatcctaatgtcacatcctatcagagcgtggtgttctcgcgtcctctagcatgatgttctttatagtcattcacctattcatctgctcccccgaacacaaagttcaagatcatcacaggatccaaacaccaacaacaaaccangagtgagttatcacatttctaactactagagagaaacaacacaacatatagttgcccaataccatttacttagcatatctcacattatttcatcactttgtcattcatcaatcacacttttcatccatcaatcacaccctttcatcatcaatcacaatatac

SEQ ID NO: 247804 - DNA, 524 bp, Glycine max
  unsure (1)..(524): unsure at all n locations
agcttccttaagaagattcctaaagaagctagagcttagctacacatacctctctaattgctaagctcacctccttgagatgaanagctagatcttagctacacaccccctataatagctaagctcacccccatgacaaanaaacatgaaaatacaaaaaaaaagtccttactacaaagactactcaaaatgccccgaaatacaaggctaaaaccctatactactagaatggccaaaatacaaggcccaaacgaaggaaaaacctattctaatatttacaaagataagtgggcccatacttagcccatgggctcaaaatataccctaaggctcatgagaaaccctgggccttcccttagatctctagcccaatctacttggagtcttctacccaatgcccttgcgggataggattgcatcattccctccaccttggaaaggatntgacctcanatcccgaggttcttcatactctgggctccttccctcaacacctggtaaaagaacanaaacatatgtattag

SEQ ID NO: 247805 - DNA, 486 bp, Glycine max
  unsure (1)..(486): unsure at all n locations
tttctgtccatcttagcgacctttataccatcttgacttttgtaggtcttatgtttgntcgcaatagaaatataatataatgttntgaagcanaactgctgtgaaaaattatgatatgaatttataacttggttgataaagattgaaattggaggagtaatcatcgcttttattggggccttattcaacctgtggtctttacaagatttcgagggtgatgctatgtgcaccccacatttttagtgaatgggcgaaaatgccattcactcaaattgatccgtatgagccataccgatcaagttcgtccgtacaaatcatacgtatcacacctgatttgatttgatttggatgtntaaattatacctacagatcaagttcatttgtccaaccatacgaatcaaccacgacttcgcgtaccttcggcgttggagaagtttgaaactaaccaaatatgtcatgtgcacaaccctcccagaaatttaagaa

SEQ ID NO: 247806 - DNA, 82 bp, Glycine max
aatgatttgaactgatcaattgcatggattgagtgaatcgtgatggatatatcgcttgcttttaattagtatgcatgtatta

SEQ ID NO: 247807 - DNA, 415 bp, Glycine max
  unsure (1)..(415): unsure at all n locations
gcttgtgggaatttgtgatagtgaatttgccggagatgttgatgatatgaaaagtactaccagatntgtattttttatgggtgattgtgtttttacatggagttctaagaagcaaggcattgtgacactttctacttgtgaagccgagtatgtagctgcaacttcttgcacatgtcantgccattggctaagaagattgttggaggaacttcagttgttgcaaaaggaaagcacacagatctatgttgataatagatctgcacaagagcttgccaagaatccggtgtttcatgaacgaagtaagcatatagatacaacgtatcatttcattagagagtgcattaccaagaaagacatagaattgactcatgtgaaaactcaagatcaagttgcggatattntcaccaagcctctc

SEQ ID NO: 247808 - DNA, 642 bp, Glycine max
  unsure (1)..(642): unsure at all n locations
cagctcgcgcaccactcngcgcgcgctcaattcctcgggcgtacattgtactgaagcagattacattgttgttggnattattnacgcaaaggctcgagggggttggagcccatctatctagcgacactttataatactcatacttgccaatagctctantggctgatgagtaggtccatcctctctaagtcctatcgaatcatgagtcatcacatacataaatctagcttcacatagtgcaaagatccttatggcatctctcatgtagtcagtgaatacataaagcatttagagtttgctgacacaaactttcttgtagcatatgcagggctttctggagtgtatgtctgaaagctgaaatttaattagaagaggggtcaatgatccgcacacaaacgattgaagtcaagtttatatttcttaaaagtttgagcctattctcgcatgaaacacaaagatggatgatgagtgaagatgcaatgtacttaatatgaatctttactggaattcggaaagtacatgttataaccaaccactggaatgaatcaccaccattcagctaaattggatcacacatcttcaactactcacgagatatagctcanaatacatattatcgtgacacactacaccctcgctacg

SEQ ID NO: 247809 - DNA, 469 bp, Glycine max
  unsure (1)..(469): unsure at all n locations
cccatctcatgtggtactatgtggcggtcgggcgatggtgcacaacaagttttccacatccacaatgcgcgcataaacccaccatcccctgttgcccacctncatctgagctcacgtactcccacgtagcccatatactacgttctctcaacaccgggtccccatcaatcctcccaagcttccacaacatccaagcgaaacaacattcaaacagcacaagctatcacagccaagcaaaacagagcagaggcagaaaactctgccaaaacaccaaccagattatagcttttctcacttaaagaccacagtaacaattccttcgatccaattcgttaaccgttggattgactccaaaattntactggaagtctatagtacagaagcctacattgtgaccgttgggatctactagcaaacatccataactcattctgcactactctttncacagccaaccacacacaagcat

SEQ ID NO: 247810 - DNA, 128 bp, Glycine max
ggcagtgatattattgaccagccctctgaaaccttctaccgagatgtcttgggccacatgggcctcgttcaaaaccttcactagcagagcccgatgaggctcggagctcatgagttactccaacagcg

SEQ ID NO: 247811 - DNA, 374 bp, Glycine max
  unsure (1)..(374): unsure at all n locations
agctngatcaaaacanacatctaatcattccagtccactcaattcatacattntctcattcaagtcattcacaaacacttcattcataagaaatcacaccactgaatatcataatcaataagttcactgttcaaacatgcttttgtacaagctatcaacactcaaacaacaaaaatttaaaagactaaaatttaaagactaataaagcataaacaaataattgacatgaactaaataattgataaaagaaactattcataatttgcaaaattntaaaaactatgtagaatntaaaactcatgatcatcctactgctgatcttctgcatgctcgttcagatccagcattggagcagctggtggatcctgtgaact

SEQ ID NO: 247812 - DNA, 341 bp, Glycine max
ctctcattttcttaatacgaagtactgggtataacaatgagaaagattattttgaaaggggtcgaaatagataaataaaataatatcaagagatcgaagacaattgaattgtttctcgatccaatatgagtttgtgccatatcaggatttgagtttgcttatttttttcccaattagagttcaagggtcgctactcgagaactcgatgaatgatacaaattaaacttctgtctctagttaaaccttccataatgaattgagcataacaggtaattataacatataagcgcattatattatatatactttgatggtttggagatggatacagcagagtcaca

SEQ ID NO: 247813 - DNA, 411 bp, Glycine max
  unsure (1)..(411): unsure at all n locations
agctanacattatactntgagcgtctcgatatattactgtactcaatcagacatccgagtaaaaagttattgccgtttgaattggctcagaggttcaaaattcaatttcgagcgtctcgatatattacgggactcaatcagacatccgagtaaaaagttattgtcgtctgaatttgctcatagcttcaacattcaatttcgagcgtctccatatattacgggactcagtcagacatccgagtcaaaagttattgtcgtttgagttggcctagaggttcaacattcaatttcgagcgtcccgatatattacgagaatgaatcggacatccgagtaaaatgttattgtcgtttgacttggctcagagcttcaacattcaatttcgagcgtgtcgatatattacgggactcaat

SEQ ID NO: 247814 - DNA, 193 bp, Glycine max
cgtaatatatcgagacgctcaaagtggaatgtgtaatctttgagccaactcatacgacaataactttctactcggatgtctgattgagtcccgtaatatatccaaacactcgaaattgaatgtttaaactctgatccaattcttacgatattaaccttctactccgatgtccgattgagttccgtaatatatc

SEQ ID NO: 247815 - DNA, 509 bp, Glycine max
  unsure (1)..(509): unsure at all n locations
agcttgccgcccagctcgcccaggcgagcaaggttgcttcctccagaagcaacagccttctggaggaatcttctggagggcccaagtgggcctagttgctttntgcaccccccctttttactaaatgcaccccttctatttttttggtaattctttttccgtaacgttacgaaactntatgaatttcgtaacgatacttattttccttccgcaaggttacgaatctttacggattatgtatttactcttttttagctntcgaagaagttacggaaacttacggatggtgcaaaaacacctcttttcgactttcgccatattacggaatttcacggattgcgcaagcctgcttccttttgatttctgacacgtctcgggacttcattcattgtgcaacanaggacgccaagtacctcanaaggttgcatgtcatcaagtaataatccccggatgaaaatanggtatgacaacaancctttaatcaaatgtgcaaaatcatgactttcatc

SEQ ID NO: 247816 - DNA, 153 bp, Glycine max
cgtgtgatcaatatcctgatgagggcgttccatatgctctcaacattggactaatacatctgatgcccacactccatggtcttgcacgtgaagaatctcataagcatcttaaagagttccatattgtttgttccaccatcgaaccccctgatg

SEQ ID NO: 247817 - DNA, 494 bp, Glycine max
  unsure (1)..(494): unsure at all n locations
agcntggtatctccttcttcactacatcaagaatcaccatgttgagtcttctctgtggctgtcttactggtttagctccatcctctaaatntattcgatgcatacatgtggatgggctaataccaggaatgtccgccagggtccagcctatagccttcttattcttcttgagaacagacaacaacttctcctcttgctcatcagcaagggaggcagatataatcactggaaaacttttgctatcatccaagtaagcgtatttcatatttgatggcagaggcttcaattctggtgtggtcggctggatagtggtagaaagagatggtttcttcacctgtacctcataaagaaagtcagaggtatgtgtacttcctanaatatggttagtcctatctgactctataaaatcaatctcaagaggtaaaacaccaccaccagacatgcaatcaatatcacttctagattcactctcagcatcagattcagacctatga

SEQ ID NO: 247818 - DNA, 394 bp, Glycine max
  unsure (1)..(394): unsure at all n locations
tgaggactatacctttgactgaacaccgncgagtttctatctctgtccaagtttattgtgagttgtagcaccgggttcacttcccttgctgtgttggaagcagtcgccgtggtattatcctctatagttntctaaagctttagcatggccttcgtgatagaagccatttgatcttttaaggccgataggtcggccctcatctattcttgcactccctcttcattatcccattttctagatcgagtgttatangggtgcctctacgctctcttagttattttgagttccctaaagaaacaaacaatggtgagtatgccaccaaaacatgaatatgctaatgaatgatcggagcacttggatccacctcaagattttagaatacatgatgagtttc

SEQ ID NO: 247819 - DNA, 289 bp, Glycine max
  unsure (1)..(289): unsure at all n locations
gagaagcttctctgagataacattcttgagaaactagagcttagctacacacacccctctcataactgagctcacctccttgagaagcttctgtaagaagattcctaaagaagctagagcttagctacacatacctctctaatagctaagctcacctccttgagatgagaagctagagctcagctacacaccctctataatagctaagctcacccccatgacaaanaaaacatgagaatacataaaaaaagtccttactacaaagactactcaatatgccccgaaatac

SEQ ID NO: 247820 - DNA, 239 bp, Glycine max
  unsure (1)..(239): unsure at all n locations
attcgatgttcatcanatctctgtgcgggcttatctggaacatggacgttagtgtggcaagggcatcgaccatctgattatcctctctacgaatgtgatgaagagatatgtcatcaaagaattctatcaacttcctgatgtaggcccggtaaggcacccattcatggtctatggactcccattcaccctttatctagtgaattaccaaggctgagtccacgtataccttgaacaacttg

SEQ ID NO: 247821 - DNA, 231 bp, Glycine max
  unsure (1)..(231): unsure at all n locations
ttctcaaggtccacttggaccccatttctatcaactacaaaacctaagaaaactatattatctacacaaaaggtacacttctctatatttgcataaagggcgcttttcctaaagactgaaagaacttgtctgagatgtcctaagngatcatctatgctcctactatacacttaaatatcctctaaattaacaactacgaatctacctatgaaatcccttaagacatgatgc

SEQ ID NO: 247822 - DNA, 174 bp, Glycine max
aaagtcgatgtttggctcataaggcctacaaatggcagaacataatgtacgttgggacatctatttggtcaatgattcataaagaggggaatgcccacatcatttccatgaaacgcatatcatgataactagaaattcatgccaaacttatcctagccaatattcatgtggaca

SEQ ID NO: 247823 - DNA, 161 bp, Glycine max
ccgtgccaccccggaagatttaagccaagcccctactttcgaagggcaactcccaccttatgaagactatctccggccagacaatgatgaaagagatacccatcttagccccctgctccaccttaaagatccgtccccccatgaactaccccaaccaaaca

SEQ ID NO: 247824 - DNA, 490 bp, Glycine max
  unsure (1)..(490): unsure at all n locations
tcttggcaatntctntaaaactagtcacttataaatatgtgactnttgaaaaaatcttcagaaacaagtcacttgaagaattgtgacttttggaaatgtaatttttgaaatcagtcactgngaatcgattaccattaaggtgtaattgattacacatcaacagatgtgacttcattttgaattttgaaaattaaaacgtttagagactctggtaatcgattacaagtgttgtgtaatcgattacacaagtttaaaatgatttaaaactgttaaacacaagttgtaactcttgaaatttgaaatcttaacattntanaacactggtaatcgattactaccttctggtaatcgaattcaagagagtaaaactctttggtaatgaatttgtganaacttcttgtgctactcaatgttntgaanaactnntttagtacttatcnttgatgagtcttctcttgattcttgaatcttgagtcttgaatcttgatct

SEQ ID NO: 247825 - DNA, 264 bp, Glycine max
  unsure (1)..(264): unsure at all n locations
gtgatcgactangaaaagaaatgtgtctgtgtttcctgatttcaagggtgtcatcctccaaaagggggagattggagaagccagcctcatgatgatgattcaagtatgaatcacagagttctgatgatgacaaaaagtcccaaataatgaccttcaaattgagtccacaagttcaagatccagattaatttccagaatcatttgaagaaatccagaaaattccagattcaagagaagctgatttccagattccagagaaaaaat

SEQ ID NO: 247826 - DNA, 380 bp, Glycine max
  unsure (1)..(380): unsure at all n locations
agcttctgctntaatntccagacttggtctatctaggatcatattgctcttacactcgtttgcatattctcttttgacacagaaacatacattgcttgctgtagcatgaaaacttcacaggataccctatttacacttgacaatgccaacaaagaaggcataaaaatagcatcaatgcaagtcaatatggaagaaaaggatccaggaggggaagagagaaatgcccctgccaataagcttgacaataatgtaccgccaaacagcaaagaactctgtgaccctgcaatggaatntgctgctggttcttcaccattgaaagagaatcacaacccagataagggaagcagtcatgatactgatcttaataaaacaccacaaca

SEQ ID NO: 247827 - DNA, 494 bp, Glycine max
  unsure (1)..(494): unsure at all n locations
tttttcgggtgttctcccttctattattttctgagttctcgcactacataatgtttatcttttttttgtgttcttgaaccttctacaccttgtgttgcattttcggtttatatctgtatcattggttaattctttttaattgattntttgcagcccanaagcttaaacccgtcttctgcgttattttaacatctaaagttgtgatttttaacgccaaaactgtgattnttatctctaattcctccctagtgcatttctatatcgagttcttggtggaggaacacactaaagctgcgattttatttcaaaactctatgagtacaagttccttttcttggtgattgctcacaatacataagctcaaatatttaattgtgtttcttttcttgggactcctacaatacaacactattgatgcagaaaggtggaagaaacactaagcttgattttatctcaacaagttgtttcttgatcttatctacaaagcttgattt

SEQ ID NO: 247828 - DNA, 614 bp, Glycine max
  unsure (1)..(614): unsure at all n locations
acctcgcctctcgacttgccngtgcagatangtgtctntcgnttanatgtgnatcgtgtacctnattatcgntntggnacttttnangnnncgcancnccgcgggctcgatcgcgatctattatgcgacacttctatatctcaagcttctnagcgcgggtctgggagacaaacgtcaagngctctgcgatatgccaacatgatgcgccgtatactttggatntggcacgaccatgccctcctgctttccagctgggaaactggcgaagtggaggaacgcccccgcattcacgccacgagcataatgtaaacctcttacggttaaaagctctatatttgggcctaagctatagagttccctcttttgtaaggctctgtgccctttgttctgacccataatacaacgacctgtctctatctggtcctggggcctacccatctccttcatttgatgtgtgcttacttttgtgaacacgcagatccgatgaccagttccccgacgggctaatacctggggaccgcctttcgcgtntagcctacatgaatcgaccgtagatactgaatgagatgcggacgttcccacactttaatattggtgccctcagaccaaaacag

SEQ ID NO: 247829 - DNA, 478 bp, Glycine max
  unsure (1)..(478): unsure at all n locations
agctnggttcgaggtacttacccgttgatgatcgaagatcgatgaagaacgaatgaagaacgtcgaagaacggttgaaacctttgcgagattcctcacggaaaacgttacggaaacgtttcggaagcgcctcggcttagattttcttcacggaaacaattnttccaagcaaattcgaaagagagagaagtgcctaaggggctggccccttccttcttgctttcctcccctatntatagcaaaataggggaggtggttgccgtccagctcgcccaggcgagctcagctcgcccaggcgagctcagctcgcccaggcgagcagggttgcttcctccagaagcaaccgccttctggaggaatcttctggagggcccaagtgggcctgggtgctatttgcacccnncattttactaagtacaccccctctgctgtttttggtgattctttttttcgtaagtacagaaacttacgaatttcgt

SEQ ID NO: 247830 - DNA, 256 bp, Glycine max
agagttgactctagccttagcttcactttgggtattagtcacttcattccaagagacttcccacgaaagcttacgattgattcttttgattattttattcaaagatattccgattatttcatcatttttcctctaaacatattctgaccattttattattatcttgcctttctttatttaaccgaggctactgcatgaatgatcgggtggattttattttcctcgtgatttaacgagattacaacacagatgatcg

SEQ ID NO: 247831 - DNA, 474 bp, Glycine max
  unsure (1)..(474): unsure at all n locations
agctntgtatccctgcttactctgctataggatagccttctgaacttccactntgtctaccanaaaatacgactntgtcatcccacataaaacttacaccactgaggcacctttgtaataaatgcactaagacaattattgcagttgtatctccctatactacatcaaatgtaatcattatcatacatttgtactctaaaataataatatcgggagacgtcagcgctatatacggttgtgactcttcacaagtctttgttgcatccttcaacaacagagagtcaccatttaatttgctaattaaatcggtcattatatcgatataacaccaccgccacttacaacacttctatacacatatatctatctatactgcacgttctattcatcttcttcgcatcctgccaaaacanattacancttctattcatcttctttgcattcttatggccacttccgcatcccgctccacta

SEQ ID NO: 247832 - DNA, 317 bp, Glycine max
  unsure (1)..(317): unsure at all n locations
tatattcttgtcaaaaaaactgttttaatttttgccaaattaatgaaatcatcacaacacatcatcactaaatgaaggaaacatgtcatgtcatcacctcaatgatatcatgatgatgtcagcatgcctcatcaacacaattagtggaagatgcacctacactattacaaataattntattntacttaaatatctttaataaaaaaaaagtgtcccttcaaaaaaaatagtgttgtccccacaagaaaaatgttttttaaaatgaagatattaaagagaaaatagattaacttatatgtgcagaagataattgaata

SEQ ID NO: 247833 - DNA, 468 bp, Glycine max
  unsure (1)..(468): unsure at all n locations
agctnggtagaattttctaaaagcttactttctaacctacttataccagaaagaaacattgtataaagtgtgtgcatgacattnttgctaaataaactagggtaggccataccttaagtagaataagcattataccttaaatgaacaacctaacaacttaattatatgtgaagccctatctcatacaagcatgattgtgtataaaggaattgaatccaatgtaatgattcgtatcttatgtgtgtgtacgtataaatagatggatagagaatggataatataatatgacaatgcttgtgaggagaaaaaaaaattgagattaaaagactcgctnganaattcacttaagtaatggtggtgatgagattatatcttcattaagtcactggtgtcactactattaacattacataactnttctaaaaataataatatatcttctagctataagtatcatatgattacaca

SEQ ID NO: 247834 - DNA, 269 bp, Glycine max
  unsure (1)..(269): unsure at all n locations
agcttgtgccacccacatnagcataagttttcatggttgtgccacccacatagcataggtttttcatgggtcctaccctcaattntcatggttacaaatttgagaatctcttccataaccaaatatgaaccaagtagtaaaaaggtgaccaaagagttaccttttatcatcaaccaaactaactattgttttcttcaacagacctaaatcattttatatgttggcttaaaatattggtcgcaaagctgattatctacatcaaggaaaac

SEQ ID NO: 247835 - DNA, 582 bp, Glycine max
  unsure (1)..(582): unsure at all n locations
gactgtcgactgagtatttatcgtgtagagantngaacgtagcaaacatcgccgcggaaccaaccggtnanacactccagctagaagttnnntaagnnnnnggnncctgataccttcgattaccgacctcntaatcatnaagccctccaataaattacaattacatgcgagagatatatacaaggtaatatttgtaaggtattttnctctccttatactggattcatagtatatttccctgcataagataaagctattcataatatatttcctggtatacgataaagctgtactatcatcctggaaacagcaactggatcgagaaagttagaatcataatttaaagaaaattacatcaattgcacataatgagagccctgagcttgnttgctaatataatttgctggcataattgataagcactgttattgcnacatctggatatcttcatgcaaaacagagttggaggctatagtacttctcttaatatgtatttcactcggggactcagcacttcacgtgtgattattttatgaatggatggatgccattaaacaataatgccactatgctttatatgga

SEQ ID NO: 247836 - DNA, 459 bp, Glycine max
  unsure (1)..(459): unsure at all n locations
agcttctgctccaggatatactntgagctactatggttattcttgataacaaaatgattaggcagtaaataatgtctctatttttgaactacaaggaccactgccaaaagctctttttcataggtagatagagattgttgcttcttgtttagtgtcctgttgaagtangcaatggaatgagagtcctacattaaaatcgcccttataccaaaacctgaagcatctacttcaaccacaaaatccttggaaaaattangaagagataagacaggagtagaagacagaaactattttatatgttggaaggctaatatcatcaaagaaaactagcaaaaattttctaaagaattgtttgaaaacaacattcataaggccttgataggttgcagtagcattcatgaagccaaatggcatgaacaggtattcataatgaccaccatatgttctgaatgcagtctt

SEQ ID NO: 247837 - DNA, 184 bp, Glycine max
  unsure (1)..(184): unsure at all n locations
tnccagaccaatctaactataagagatgtaactcacactcaagctcgaggtcacacatgggccaatcattatgctcagccattccgcgaatatggcgatacttattgatgtaagctccattggagcttgtaggcccaggatcttcttcatcaatggattcgctctcttcttggaagataaatgg

SEQ ID NO: 247838 - DNA, 432 bp, Glycine max
  unsure (1)..(432): unsure at all n locations
agcttcaccttctggtcctcctcatagttgtggcatgagataacatgctctantttcatctcccactccaagtaggcctccggatcattctttcctttaaatggaggaatgttgagtttaataccatcaattcggttttgtctaagaacaccatcattccctcttctcctcctttcttcttcattatgatctctattctccatttgatccaacctctcatggagcgcatcatctcgttgtttcattaacctcttcatatgttgcatcaaagctagcatttggaattgcgaaagccccactccatcattaggattagtacctgacatctcaaacaaacaaatcaaacgtaacaagacaattatagttgctgtttgaatacctcacccactcaagtgtatcacaacaatatggcttttctctaatgaaacactc

SEQ ID NO: 247839 - DNA, 322 bp, Glycine max
tcaacattcaatctcgtgcgtctcgatatgttacgggactcaatcatacatccgagaaaaaagtattatcgtttgaattggctcacagcttcaacattcaatttcgagcgtctcgatatgttacgggactcaatcagacatccgagtaaaaaattatggtcgcttgtattggctcagagcttcaactttcaatttccagcgtctcgatatgttacgggactcaatcaaacatccgagaaaaaagttattgtcctttgtattggctcagagcttcaacattcaatttcgagcgtctcgatatgttacgggactcaatcacaca

SEQ ID NO: 247840 - DNA, 481 bp, Glycine max
  unsure (1)..(481): unsure at all n locations
tntgagctctatgtgctaagggaggaanaacagaagcaaccaaataattcacaatattggaaaactacggagtggggaaggaatcagatatactatacagaatgtacaaatggtcatccagaaaatcatcccgaataggtgagtccttatacacacgctcaatcctactcaagtggtcaaccacaaggttctgtgcaccgctccgatcacggatctccaaatcaaactcttggagccaaagcatccacctaatcaatctaggctgtgattcagccttcttcaacaggtacttcagagctgcatggtcagtataaacaataacacgagtaccaagtaattatgaatgaaatttctcaagaggaaaaactatcgctaatagcttcttctcagtggtagtgtaattggcttgcgcagcatncaaagttctagaagcgtagtagatcacccgacgcagcttatcaatctttngagcatagacagg

SEQ ID NO: 247841 - DNA, 506 bp, Glycine max
  unsure (1)..(506): unsure at all n locations
agcttcaatggcgggtggatattaagtatttctaatntggtcatgtggccactgngttggacatggngtatcatatgccttattgttgtgggattctacactgcctatgcaaactggctcttggcagcatttcatttcatcgatgaccgtagattcattagatacagagatctcatgggatatgtttacggtgaaattttcattctttgcatgatatccaaactntgaattaaattttaactgaagtattccttaatttcacaaggcaagagtatgtaccacctcacctgngtcttccagtttttgacccttcttcttggaaatatgggtttcatcctcctcggaggcaaagcacttaaggtaaagtntatgctataaattaagtttattaagagtggacaaatgatgtaaaagattntcactatcgtccaattccgatagtggattatcgagaaaaaaaaaactgttaagattattgtaataattattttagaagtgatattata

SEQ ID NO: 247842 - DNA, 309 bp, Glycine max
aaacagtgcctggaaatatgattcactttagatataagaaatttgtttattctgaataatcaagtttttttatctatatgaattaaaaataagtacccaaagatttataatattttatgcactctatttaatcaagtgaaccaaactttctttataacaattggttaaaagagaaactctttaataacatattgattaatatgaaaaaatctcgtaaaagtggataaagattagagtcagtaacatgattgatcgaaggtatacgtgatataacattagttattatacttactaatcagtctaagaact

SEQ ID NO: 247843 - DNA, 482 bp, Glycine max
  unsure (1)..(482): unsure at all n locations
agctngtaagccttggatcttcttcatcaatggagtcctttgcttcttgaagatgaatggcaatagaatggagaaagaagatgattggagatgccacttcaaggagaagatgagtcaagaagaagctcaccaccataggaatccatggataagagcttgaaggtaggagaagatgagtagagggagagggagagaaggagcacaaaattttgtgcctcaaatgaagtctgaactttgaagtggtaatttaaaatgatcaaagttgaanaaatgcacacacatgacctctatttatagcctaagtgtcacacaatattggagggaaatttgaatttctattcaaatntcactagaattcgtagagccaaaatttcactaattatgattaatgagatttagctatggtttagcccactaatccaagatcaagtccaatattctccactaagtgtgcttaggtgtcatgaggcatgtaaaacatg

SEQ ID NO: 247844 - DNA, 512 bp, Glycine max
  unsure (1)..(512): unsure at all n locations
ncgggttttgangcattctttaatcgacacccttaatactcaagcccgcgcttattttatntaaattcataagatcatgagttactaagtgtgtcctactatgacttgtgaaaaaaaggtgatcaaataaaaacaggcactccttataactgaccaatgcccataatcaaaactggaaaccccacgaccctgttggacttcttcaggtccactgggtgtcttgcgggcgccatccctgccaacaatagatgacatcagaaatcagttgagcgatgtgtattattacctatgttacgatggcgtgacctttgtgtggggacaggcacccggtatgactgacagaggcctattaccagagatggaaaccccagagccctgttggacttcttcgggtccactgagtgtcttgtgggcgtgaaccctatcaaccatagatgacatcatanatcaattgagcgatgtgcatactctactatgtcacgatggcgtaacctttcttggaggacgagcan

SEQ ID NO: 247845 - DNA, 312 bp, Glycine max
  unsure (1)..(312): unsure at all n locations
tctcttagtcacctgcggcatgcaagctagtgtacgctatatttaanntttttggcgagaaatatataagacatgataaggaataacgtgtgaatgtaagtaaagaactcgaagatatttctataaaagtatctgtattttaaaagtcaactaacaaagatgcacaccatctggttgggtcgttaacgttctttctcttccacatgcatgagttccttttaaaatagaaaaatcaatgacagatatagattgacataatagttctcatgtttcccttctcaatctttggtcgaatagagaaagataatgtct

SEQ ID NO: 247846 - DNA, 478 bp, Glycine max
  unsure (1)..(478): unsure at all n locations
agctntcttcanatataaattattctttntcctattattntaaattgcttaatatattattgctcacactcttatgctttntgataagtgccatatctagttatttttgggattaaaatattagcacttatcttttgattgtaatagtttttcttataaactacccttaaatctagttgttttatagatattgtacatttactaaagcttatgtttaaatatgaaagattcaaccaggattttgtaggctctgatggttgtttgttagatccagaaacaaagtcaaaaggaagggcaaaatggtcatttttcaagaattcagacattcactcgcctaggctagcttccagctcgcatgggctaataagaattcttcagccataagcaaccaacttgcttgggtgagctacaactnntctgngcgaattggtgccttcagcactgagtcactaattcgcctgggtgagctacatatgcc

SEQ ID NO: 247847 - DNA, 503 bp, Glycine max
  unsure (1)..(503): unsure at all n locations
agcttgaagggtgcgtagcccaccatatttcatagtagaatatcgataatgtgtctaccatcacgattatcgtctccttttccatcattggaagtaccacttgngctgccagatccttctacctttgggtgtattctttgaaggattcatgctcctttntgcacatgttctgtagttgcatcatatccgaagccattatactgacaccgcctaacgaaggcaaccattaggtccttccaagaatggactcgggaaggttccaagctagtgtaccaggtaacagctaccccagtaagactttcttggaaggaatgtatcagcaattcctcatcttttgcgtatgcccncatcttccgacaatacatctttagatggttcttggggaaagtagtccccttgtacttgtcaaagtccagcaccttgaacttgggaggggtgatgatattgngcactangaacaactcttctaggttagtaaaggcataatcttcaccttcttcaat

SEQ ID NO: 247848 - DNA, 466 bp, Glycine max
  unsure (1)..(466): unsure at all n locations
agcttctnntgagaaacttccttgagatgctagagcttatctacacacacccctctcataactatgctcacctccttgagaaacttctttaagaagattcctaaagaaactagagcttagctacacatacctctctaatagctaagctcacctccttgagatgagaagctagagcttagctatacacaccctataatagctaagctcacccccatgacaaanaatataaaaatacaaaaaaaagtccttactacaaagactactcaaaatgccccgaaatacaaggctaaaaccctatactactagaatggccaaaatacaaggcccaaaagaaggaanaaccaattctaatatttacaaagaagaatgggtccaaccttgacccatgggctcaaaaatctaccctaaggttcatgagaaccgtagggccttctttagtagctctagcccaagcctcttagagtct

SEQ ID NO: 247849 - DNA, 312 bp, Glycine max
  unsure (1)..(312): unsure at all n locations
tcttctagactcatcttctncttgaagtggcgtctnctctctctctttcttctncattccgctgccatttatcttgcaagaagcaaaagaatccattgatgaagaagatcctatgcctacaagctccaatgaagctttcatcaaaagtcatgcttttatagactcttcatgtctggtcgaagaaaccattggaagagttatgacttttgagaaaaccatgttaaaagttataactcttaactctttctttaaaactattcactggtaatcgattaccacaatggtgtaatcgattacacaatgtattttatg

SEQ ID NO: 247850 - DNA, 269 bp, Glycine max
  unsure (1)..(269): unsure at all n locations
agctagttctanatntacattgatgtntgtatgggaggatgttacatgccacttttgctntaagagtaatgtcccactaaaactaactttccaaatgtttgccttcgcaagaatggcaccgacgaagcttgcctcanagaggtccaggaaagacaaggcggccgaaggaactagttccgccccggagtacgacagtcaccgctttatgagcgttgtacaccagcagcgtttcgaagccatcaaaggatggtcgtttctccgagagcgac

SEQ ID NO: 247851 - DNA, 311 bp, Glycine max
tgcttgttgttggtctcgtcccttgtcacaggaagccggaaagtccgtatcaccttcttaattgtacacatggggcactgcgcccccaaatgcgcgagttagaagagataattttccgggctctcgtgtcccgtaaatgcattcatatcatgcatcgcataagcatctcttcataacatcataatggacatatcctgcatttgtccgctatcatattccaccctcacattttgcatgagtcatggcatcatcatgcatatgcgttcaacaaactttttgatctgcaaaattgcataccatctgttttcatg

SEQ ID NO: 247852 - DNA, 492 bp, Glycine max
  unsure (1)..(492): unsure at all n locations
agcttaataaatcaatctatggctngaagcaagcctcctgccaatggtatttgaagtttcatgatgtcgtcacttcatttggctntgaaaagaacatcatggatcaatgtatataccacaaggtcagtgggagtaagatttttttcttgtgttatacgtggatgacattntgcttgcaactaatgataagggtttgctatatgaggtgaaataatttctctcaaagaactttgatatgaaggatatgggaaatgcattttatgtcattggcattaagatccatanggaaagatctcgaggaattntgggtttgtctcaagagacttatattaacagcattttagagagatttaacatgaaagatngtcaccaagtgtagctcccattgtgaagggtgacanactcactctgagtcagtgcccgaaaatgatttgagcggaacacatganaatactccatatgctcagctgttggaagcctattatgctcata

SEQ ID NO: 247853 - DNA, 500 bp, Glycine max
  unsure (1)..(500): unsure at all n locations
agcttcatgatgatgattcaagtatgaatcannatagtttgatgatgacaaanagcccacaagaatgacttcaagattgagtcaacaagttcaagatcaagattaattctaagattcattagaagaaatcaagaagattcaagattcaagagaagttgatttcaagagaagatgaattcaagatttaagagaagaaatcaagaagacttcacaagggaagtattgaaaaggtttntttcaaaaagcaaacttagcacacatttgttctacaaaagagttttctcagatttttctaagttaccagagtanttactctctggtaatcgattgaaaatagtcacatcttttcatataatgcattgtgtaatcgattacatgattatggtaatcgattatcagtaacacgttttgaataaaaggtcaagatatgtaactcttgacatgattntctcaacgttataactcttctaatgggtgtcttgaccagacatgaagagtct

SEQ ID NO: 247854 - DNA, 493 bp, Glycine max
  unsure (1)..(493): unsure at all n locations
agctngccaccttgaaatatatctctggattagaaaagatatntatgataatgtctccatgaacatcacctattcttgatggtttattaccaccaagaaatactaaaacacctacatatatttgatacacaaatgtaaagccttagaaataatagaataccatatataatgataaaggctaaaatcaactgccacccaacaaacccgaatccaactgatctgaagatgttcatggttgactacaatcctaaagtgttcgaatttggtcggattgaacatctaaaacctaagggtatgttnggcttacattttcattttctgaagactgtnttcattctcaaaatattagaattatgaaaatatgtttggtttgactttctaatttctactttcaggagataaaaatactgaacatctatgatatattgaattctngctttctttatattttagaattgcttganatacattcattgcatcacatttcatttac

SEQ ID NO: 247855 - DNA, 606 bp, Glycine max
  unsure (1)..(606): unsure at all n locations
tccgctcacctaccgtgcacaaggggtgcacattctggatgtactttcggttgagnagtcngagcaaggggnaatagggttgaanccattgtaactgctcnnctttttntntatgtgacactctataatactcaagctagtgtaccttggagatacanaagctcatcgtaataattctccgttatttatgacacagcaggtgcactgtagcttcgtcacaatgactactctgtgcatggtcacgtcatcatcgttctctatatgtactcctgatgtctacatcaacacactcactgcgggacactaccanaatgtgtgacgattgagcatctcatattccactttgtactattccgaatgatcctctccatatgagatgcgaccctatgtcaatccctaattttggtctccttgcttacttcaaataatgactagaatattttcctctgactacacgtgatttcggtaccataatccaacacatgtatacctctcgtgatagtgggattgatgcctaggcttgatgcgcttcaatcgcagttcatttctgtatactaaaagggtgcctatgatgacgactcacttctaacaggcgggcctcctact

SEQ ID NO: 247856 - DNA, 448 bp, Glycine max
  unsure (1)..(448): unsure at all n locations
agcttatacgcatatntccctacgaacgttcacttgcacaagacatcctattaactaagaaaaatgcacccatatacaatcaaggtagcttcattacctagattatttacatgtacttccaaggtgtatttgttatttacatcacacacgcctccttggctgaatttacacacatgcctactcaaagcattttggggtaccaaaaaaaattgcacatgcgctcctcttggtatttctaatacctatacatatacaaacttcacgatgaatcttgactacctacacaataaggtgctacatttcatgcctttnttttcaagtttttgctacctaaagccgcatgcaaattcaagcatattttcctttgctgactaaanatgtattcaaattaaaagggatatatnttttgtaatatggtttcttcacataacatgcaacgtatttatac

SEQ ID NO: 247857 - DNA, 438 bp, Glycine max
  unsure (1)..(438): unsure at all n locations
aaagagtagttgtgcatgacagagaagaatatgtngattatcattgaccaatatgaaaggaagatggattnttncattattcaaaggcaggcgcctaaagatgaacaagcaaaggtgttggccctacacccgaaagaaagtatggaagaggtgatagagctatttcacaaagaagacatgaaatggatggatagattcactctcacgctaaattaaagtcaagagctctcaaagctgcaagctaaagccaacgagatggctgacgtatactccactcttgatgaagttcatagtcctttttactacgaanaactctatcaaagagaacatctcttgtggatcaggtctagtggaaggtacatctcttatggaaggtacattcactaaggtcaaagagaacaaaggaaggtacatcccttgtggatcttttgcttgaaa

SEQ ID NO: 247858 - DNA, 273 bp, Glycine max
  unsure (1)..(273): unsure at all n locations
aaagtctccacagaggccattgcctccctcgcccagtattatgatcagccattgaggtgcttcacctttgtggacttccagctatcacccatggtagaagaattcgaagagatcctacgatgttctctatggggaaggagaccatacctcttctcanggttctacccctcattggccagaatttctaaaatagtccatatctcggcgcaggaattagaccgccaaaagcaagtcgaaaatggggtgtgtatgaatacccagacaatgtttgga

SEQ ID NO: 247859 - DNA, 559 bp, Glycine max
  unsure (1)..(559): unsure at all n locations
gacgtgtcccattgaaccctagtatactnttcgtcgacctgcaagcatgcaagactcgtacagtcggggtgttctaaccactatattgtatttctcaacgctctattcttcagctctatcacatgtgttggagctagcacgcgagtgtaaatcaagccaggcttctctatctccattacatgcctccctaagagttataaggaatctcgaaccgtcgctttctgagataaattgtctcacatcctgtgcataatgaactgctgaatcctatgagaccttgaagaacgagtgttaagagtgacaccattaattctgaagccgcctgatcgtatacacaagagaacctgcgacagaccggggccatggtttagcacatatatatatatatcttcttcaactagccagatgtgatattgaatgtctcttgtgtgagcagataggatgatgatgtattcataacagtaataggtgatagagcttatgtctctaatcatacgctgcctcgcgttagtcgtctggatacagaacaggctaattcacttgctttacatgtgacccg

SEQ ID NO: 247860 - DNA, 409 bp, Glycine max
  unsure (1)..(409): unsure at all n locations
gaactggggacatgattcttgttcgttatcattcaaattcttttatatattcttataaagtttgaaacactctcaaaacaccttgcatatcttgagaganaagactatgaacttagatttcatattcgtttgtaagatgattaagagttagtcactcaacaaacaaatctcaaaaaaaatttatttgattaaagctagcaatgacttggtaaggcaaagaatcttgggttgtctcaagcttggtgtaaagcttgagttgtagagttggaagtgacataatactagtatntttgtggaaatagtggaactggattagtagccaagaactagatgtaatctcaatgatagagacaagccaataataaatctctatgtcatatacactnttatgtttatcttctcttttaaa

SEQ ID NO: 247861 - DNA, 497 bp, Glycine max
  unsure (1)..(497): unsure at all n locations
cggggctganngccttattagtcgcncctctatactacagcccgcntggttgagttgatccacaaagctctatagaaaaggtgccgatcttccaatgaaggtgatgcttcatacatcatatgggtgtgagtcaaaaaaaaaatgggaaacgggtgccaaaagaagcttgattaaataagatgtggtttggtcaaatatatttttggtctgggtggggtaaagtacaagtgtcttgggttccattggataattgtggataatgggactagggattatattatggctgatgaagtactggttcacggtttggggtgggaattgtattgcgcttgatattttcatacacttcacatcattgaagaatcttattttggcgaataattgaaatcaagcatttcatgcctttattgtccacaagttggactggtgtttttttaatattccctgctcattacttgaggggtcaaacgaaatattcattcctggctaatggctgg

SEQ ID NO: 247862 - DNA, 520 bp, Glycine max
  unsure (1)..(520): unsure at all n locations
agctngaagtgaganagtgtggaagagtcagtcttcctacttttatttgttgaccacagagtggtacctggagatatgtcngcggggtcaggagaccttgnggacgttaggtggggtgctattgcctaaaaccaagcttgaccaatcccgacccaacccgggcatagtcagtcagtgagaacctgtgatgtacctaaacaggcgagctcctggcagtcaaccaataaaagaacaaagaccacaaagtaaggaggcttgtgtggtggctggccagctatggatcttgagtgatatctggaatatggcttctggtaattgattaccaacggtgtgtaatcgattacaaggcttanaaatgaagacaataagttgagatggcctctggtaatcgattaccaaggagtgtaaccgattatcaggcttagaaatggaaatgggatgttgaggtggcctctggtaatcgattaccagtgctgtgtaatctgatacacagagtaacaggccactggtaatcgattac

SEQ ID NO: 247863 - DNA, 448 bp, Glycine max
  unsure (1)..(448): unsure at all n locations
agctngatgtgagaaagcgtggaagagtcagtcttcctgtctttatttgttgaccacagagtggtacctggagatatgtcgcggnggtcaggagaccttgtggacgtcaggtggggtgctattgcccaaaaccaagcttggccaatcccgacccaacccgggcatagtcagtcagtgagaacctgtgatgtacctaaacaggcgagctcctggcagtcaaccaataaaagaacaaagtccacaaagcaaggaggcttgtgtggcggctggccatctatntatcttgngtgttatctganaaataccctctggtaatcgaataccattcgtgggtaattgattacaaggtttaagaatggagacaggatgttaagtagcttatggtaatcgattaccaattgtgtggtaatcgatacacagtatgatagggcactgcgaatcaattacc

SEQ ID NO: 247864 - DNA, 614 bp, Glycine max
  unsure (1)..(614): unsure at all n locations
tccgtcatcatctgtgtcggcgnatacttcggggtgatagtggactataagtantgtgggnnacacntnnaanacgaagggttgacgccctcgttatgccgcccatagatactcagctctatctncaggcatanaatgattgttcttctagctctagcaatcatctctgatttctgctcttgacgtacagatggacacatgcttgcctctacctctatagcccctgcncacgcctcgctgcatcaatatagcttccatcgtgatgctgcataacccgcaagcatttctcccgtgaaacgtctctatatcatacctttggtgctcccatctttcttgatcttgatacctgtccacagacagcgccactcggtggctctagctataaattctgctacccttaatctgcctgagatcataaaacaagataaacacagataacagagcgaagctctacacagcagagcaagaacccacacatctacgctggtcgccacgtgcctacattcacgggaaaacatacctcatcattgatcgattgatcatgacatactgcggaagcaaagtttatgatgcatcactatcgactccacgtgtcgtggtgaccaccatgctcc

SEQ ID NO: 247865 - DNA, 482 bp, Glycine max
  unsure (1)..(482): unsure at all n locations
agcttgtagaatggctagacatgatacatgtcaaggcttggtttggttcaagggtaaaagggatgccccacattatttccatgacacaaatgcaaaaatgatgatttggaaattttatgcaaaactggtcatgcatgcacctatgcggacgctcaagtgtcaaattnttatggtcatgtgatgctagggctcaagattcatttcctctattttaaatcaacccaatgtttccaaaatatgttcttttatcaatttgtgcattcctccaagtccatttcgggcgtccggngagaatttcacagcattcacccttcaggtgtagacancgtttttcttcaaaaatcggttatgaatcaatgaattttttttcaaagaaaagttggaaatcatctcttttcanaagcatgtcggttnttagctagacaacttattttctcttttccaccttctttntttttttatcattatcatttggttatttc

SEQ ID NO: 247866 - DNA, 245 bp, Glycine max
  unsure (1)..(245): unsure at all n locations
cccggagtatgacagtcaccgctttatgagcgttgtacaccagcagcgcttcgaagccatcaatggatggtcgtttctccgggagcgacgcgtccagctcatggacgacgagtatactgattttcaggaggaaatatggcgccggcggtgggcaccactggttactcccatggccaagtttgatccacaaatagtccttgagttntacgccaatgcttggcccacagaagaaggcgtgcgtgaca

SEQ ID NO: 247867 - DNA, 477 bp, Glycine max
  unsure (1)..(477): unsure at all n locations
agctngattaanatattntatntagttntggttcctctttcttgtatacttcttacacttctaatgtaccttggttatgtctcctttagcattttattctgataaacttattatccatcatgaaaaaagaaacctactcttttttagcagatttttgtttgctttgtatgatattaatgttggaacaggttggtcgaatgacattgggtggattattggctcttgggtacattgttgttgttagttacaagcgtgcctccacaactgtcaataatggcaanggttcaatgtctttagaaactattgatgttcttggtgagacgttcatggtgatgagaggaactaatagaaaggtatgtacttttttcctatcacactaaatttatgtccatntaaaatccaatcttcttgattgcatttactctntactttcaagttactcatcagtcatcatgttcactttatgcaaataatctt

SEQ ID NO: 247868 - DNA, 274 bp, Glycine max
  unsure (1)..(274): unsure at all n locations
tcgccgagtggagcggnctcttctncagcttcgactgcaccatggtctacctncgccagaaagatgacccctggaactccatcttcggcggcgccggcaccggcggattnctctccatgcgccagggcctncccgccagcgcccgcttcgctgagttcagcggcgtccttctcgctctcatcgaaggcgccggcatcatgctcaacaagttcctcatcgcgcagcaaccgatgccgatgattgtcgatgagcctcttccgnctaacgggctacc

SEQ ID NO: 247869 - DNA, 456 bp, Glycine max
  unsure (1)..(456): unsure at all n locations
agctttcgattcattctatgtacccatagtggtccacattgtgtttcgtgcatttntattctcgttntgtttactttttataccccctgttgacgtgcttaagccattttacttaagtcgtttctcgcttaacttaaaaataaaataaatttccaccgaacgtttgaattgtattatccattaacttcggttaaaataaattccgactgttcggtcgtgccataaccacgttggaaatcaaaaagaggtaaaaaataatataataatcaaaaagacatcttttagtaaaataaagcggaaaatcaatcggacgttttctctttgggatttctcattcttaatcgaattgattaataactaaggtgaaacaaaggctaanatcaactcgcctagtcaagctcgtccacaaaaataggcttntgaagtttgtcatttcaatttctctctaagtaaaat

SEQ ID NO: 247870 - DNA, 56 bp, Glycine max
acatgatttcacgcctctctctctctcataacaccggccaaacaaccctagaaact

SEQ ID NO: 247871 - DNA, 494 bp, Glycine max
  unsure (1)..(494): unsure at all n locations
agcttaataaatcaatctatggctngaagcaagcctcctgccaataggtattgaagtttcatgatgtcgtcacttcatttggctttgaaaagaacatcatggatcaatgtatataccaaaaggtcagtgggagtaagatttttttcttgtgttatacgtggatgacattttgcttgcaactaatgataagggtttgctatatgaggtgaaataatttctctcaaagaactttgatatgaaggatatgggaaatgcattntatgtcattggcattaagatccatanggaaagatctcgaggaattttgggtttgtctcaagagacttatattaacanattnttagagagatttaacatgaaagattgttaccaagtgtagctcccattgtgaagggtgacaaactcactttgagtcagtgcccgaaaaatgaatttgagcgggaacacatganaaatactccatatgcttcacgctgtggaagccttatttatgc

SEQ ID NO: 247872 - DNA, 401 bp, Glycine max
tactcaatttatttcacacacttactcacttgactataccaaccctttctgtcaacaatttgtaagatctctcatcataaacataacatgtgctataccatttatatgtttgtgacacacaggactggaaataacactagcaatatgttaatggataactcactttataagaaaagtaaaacttctctgatgaagatcttgcaagctaatttggtcttctttataatacccgcgcccgagaatagtagataagtaacttgtagtcagaaaaatagtggaaagcagcatattctggtcgctgaacattgcaagccatgaatgccgaaataatgagaagtatactgcttatacctcgttaacacctaaatgctgcccataacatgctatctcatttctattta

SEQ ID NO: 247873 - DNA, 261 bp, Glycine max
  unsure (1)..(261): unsure at all n locations
aacatcctttagaatgctagctggttgaaatcaagcttaacgaggtggatatagataaataataggaggaaaaaagtcgtaaaatataaaattctattaaaacttttaaattataaaaagatatttaaaagtttaataaaattacaaagaatagcaactatttaatgtattagttgcacatacttgtttaaacaaatgtgtgacttgtcttggcannaaaatgcgtgagttgcaccttatataagtatttcattcatatat

SEQ ID NO: 247874 - DNA, 473 bp, Glycine max
agcacatggacttgagtgttgtccaatttcatccgatcttttgtaatactcaccaaccgctattagaatctaatacatattcactctttttgtctaataagttcttctactttattcaaggtaatttctaaagcatgcattgccccagatttctcatgcagtaagtaaacataaccataacgtgaactagcctcaataaaggtgataaagtatctctcctttcccaaagaactaacatcaataggtccacatatatcagtatgcaccactctaagaagctgagtggttctccgagcctctttctctcgatgattagttggtgtcccttgatacaatccacacagatatctagatcccgtagatctagatcatgaagaatttcattctgtataatcattccatcctcttctcaaaacagcgaccttaacctttatgccgcaagatagccagatcgtccttcactacactacccg

SEQ ID NO: 247875 - DNA, 418 bp, Glycine max
  unsure (1)..(418): unsure at all n locations
agcttccttgagaagttagagcttagctacacaccctcctctaataactgagttcacctccttgagaaacttccttgagaagattccaagagaagctagagcttagctacacacacccctataatagctaagatcacccccatgcgcaaatacatgaaaatacaaaaaagtccctactacaaagactactcaaaatgccctgaaatacaaggctaaaaccctatactactagaatgactaanatacaacgcccaaaagaaggaagaacctattctaatatttacaaagaanagtggacccaaccttggcccatgggctcaaaaatctaccctgaggttcatgagaaccctanggccttctttagcagctctagcccaatcctcttggagtcttctatccaatacccttgggggggggg

SEQ ID NO: 247876 - DNA, 363 bp, Glycine max
  unsure (1)..(363): unsure at all n locations
gctttctttctaatcaacctgtctactgactaacaattctaattggaagttcacattcttgttctttctttttctaacatacacactagctcagacttatgaaaagaaacacaaattccatcacaatcatgcattcaatccaaaatcagtttataacaccaatttcacaaaaagataaaagtgtttcactgcataatcatcaaagtcaagttaaactgttccatatgcttcaaaaaaagcataccaactattcacaagaagtataaggatataattactaacgaaaaccaaaattactcaaaataatgtactgaaactaatataggtataattattatccaaaaagcanaataatcaagaatt

SEQ ID NO: 247877 - DNA, 257 bp, Glycine max
  unsure (1)..(257): unsure at all n locations
attgcatattntgtccactatgtgtttaaaattgaacaatcttaatctattatacaatatatgtattagacactcacattattcatcattntagcatatcaatgtcacatcattactaacatgagacatcaatattttttaaaagaattaatgaataattaacaatgaaccaaaatgactaaatttaaaaaatgtggggagtgaattaatttgcaataaagaactttagaatcaaaattacatcatttacaaaacaa

SEQ ID NO: 247878 - DNA, 422 bp, Glycine max
cactctatccttctgataactcagcgacactaggaagatgtttgaatactttaccatccatcatagacgctagaggatcttgcaagtgaaaagttcttatcagatatgtgacgtgtcttattctattaatattgttaacaacgacaaaactcaggcttcatctcttgaatcttgtcgatcaaaccgtccaaagttgtctgagtttgcttgagaaaagccttggagtaaaagagtatgtgtttctccatgtcttggaagcgagggtggtcattgtgagacgggccacataaaacaacctctggagtgtaggcttcttcgatgtgtattctgttactaaatgacactttgtagatgcaacattctagtagtatgggtgccctgggccgctcaacatcttctcatattgatcttacaacatcacc

SEQ ID NO: 247879 - DNA, 235 bp, Glycine max
atacaatgcagcttggtatcaaatttgccgcacaaaggaatgagttacgtgatcttaccctactacaaagaagctgtggccattaacgtgccatgactccacagtgtcttcagtgttctcaaacacaacctctattaagcctccgaaatcggcttccatgacagaagtttgaatggagccaccactaccaatggggtagtcaaggatactttccaaggagaacaccccttggatc

SEQ ID NO: 247880 - DNA, 411 bp, Glycine max
agtatggcgtacacattgcatgtctgatatgccttttagaggcgtgaaaagtgcgagagaatgagctgtgttttctagaaaacgcgatgaactcgctaagcaagcatgctgcactaagcgagttcatcaatactcattgtatgtaagcattatttgaagaactcgctaagcgtgcttaccgcgctaagcgagttcatcctttgagaatgaacactcatcctcttgctgaactacttgtggctaagcgaggttgaatcgctaagcccacgtaacttaaccaattttttttttggtgataatcgcgcgctaagccgagcattcctgagccaagcacaattggttgtggcatccgctgagctaagcgagcttcactcgctaagctcccaacacttagtgaagattttgaagagt

SEQ ID NO: 247881 - DNA, 192 bp, Glycine max
catgagctttcccttaccaacttcaccaatagcattaccaccattctcttcatcatcttcctccttatcattcaactcattctcaatcttcccacttcccttctttttcttggtctggatataccctattagctaataagccaaaaccacagctcctgtcatctgactaataacaatgccagcaacagcacc

SEQ ID NO: 247882 - DNA, 533 bp, Glycine max
  unsure (1)..(533): unsure at all n locations
gatctctaagtcacctgcggcatgcaagctngccgcagctgctaatggcgatatagcctgaaccgtcattgtcattggtgagggagctgcttacgtggacatgtcgtcattgttgttggcgagaccggctgagtctggtgacgtggagagagtcgccaatgcttctggtgatataggttgcaggagtggttctcgtcactggaaatggcgagactggtgtcggcggattctcttttcctttaaataggcagcctttgccttgaaaatntgtagtagtcttgataaaagaaagcacagaggagcgtgtttaatcaagaatttacaagccttactttcattatctctagatagcccagctnttgccttgaagtttctcattccatccttanttatttgaagtaacaatctatattgttgttcagtcaataatatatcagtcttgcattcattcttttcaagttaagttttttgaataattgtatcatntacaaattatttattttcgaagtaataattttgtgggtagaatcaat

SEQ ID NO: 247883 - DNA, 87 bp, Glycine max
aactattgataccatgatgcggctagatatttcatttgatgtgaatagttgcaatcaattccttaattttgtgatagccactgggat

SEQ ID NO: 247884 - DNA, 534 bp, Glycine max
  unsure (1)..(534): unsure at all n locations
atcctctgagtcacctgccgcatgcaagcttgtgcattgaagaaaaattaaaaattgtcatagttacagcgccgacacggccaaattccaacaaagaagaaaaaagataaagatagaagacacgtagacataggcatcattgccttgctccgcaacaccctgcccttcatcagcagcctcatcctccactataatgtattcttcatcaatcaggacaccatccttcacatccttgaagggatcgaagagacccaagtcaagttccttcgcaaagaaaccagcctgcgtgaaggccttctgaaatcctttntcaagctgctccaggcctccttcttgtacagaaagagctcttccttaagctccttgttggcctctctttcattggctgcccgtaactcagactcctccaatctggaccncaactccttaagccaagcctctaaattagaaactaccttggctagccagtccctttaaccgccaattnttccaccttctcacccaggcccttcttttcacctgtaagtcttgagc

SEQ ID NO: 247885 - DNA, 451 bp, Glycine max
  unsure (1)..(451): unsure at all n locations
agcttcttctctttcncgtgcctagcattggcattcctgttataaagcaaccttctccgctgatcttcatcaaagattctacacatgtttgtcaactgtgcaaagttgtgaataccgtgatagtttaccatcatctttacttctggttgaaggccattgacaaatttcacgcatttggacctctctccagcttccncctttataatgaggaaaataccttacaaggttctcaaacctcaccgcatactctgccaccgtcatactttcctatttcagctcgagaaacgtcatctcctttctattcttacatcttctggaaatacttctcagaaaagtggtctttagtctccattgacaacacacccctgctcctctgactgggcgaggtttccacagtactctgctcattgtacatggagtacaacacactttgtggtctacatcatacccg

SEQ ID NO: 247886 - DNA, 327 bp, Glycine max
  unsure (1)..(327): unsure at all n locations
agcttcaacattgaatntagagcgtctcgatatattacctgactcaatcagacatacaagtgaaaagttattatcgtttgaaaatcctcagagcttcggtattcaatttcgagcgtctcgatatattacgggactcaatcacacatccgtgtaaaaagttattgtcggttgaattagctctgaggttcagaattcaatttcgagcgtctcaatagattaccggactcaatcagacatccgagcaaaaagttattgtcggttgaattagctcagagcttcacaatttaattttgatcgtctcaatatattaccggactcaatcagaca

SEQ ID NO: 247887 - DNA, 253 bp, Glycine max
  unsure (1)..(253): unsure at all n locations
atgtctgatttagtcccgaaatatatcgaggcgctcgaaattgaatgttgaagctctgagcaaattcaaacgacaatatctttttactcggatgtctgattgagtcccgcaatatattgagacgctcgatattgaatgttgaaactctgagcttattcaaacgacaataactttttactcggatgtctgattgagtcccgtnatatatcgagacactcgaaatggaatgttgaagctctgaggatattcaaac

SEQ ID NO: 247888 - DNA, 394 bp, Glycine max
  unsure (1)..(394): unsure at all n locations
agctntctccccaatttctataaatagggggagaagtgtattggataagggttcagccccttaggcacttctctctctttcgaattntcttagaaaaattgtttccgtgaagaagatccaagccgaggcgctttcgtaacgtttccgtgagtgatttcgcgaaggttttcgaccgttcttcggtgttcttcattcgttctacatcgttcttcagtcctcaacgggtaagtacctcaaaccaagcttttcaattcattctatgtacccgtagtggtccacactctggttcatgtatttttattctcgttntcatttactttntatanccccttttgacgtgcttaagccattntatataagtcatttctcgcttaacctaaaaataaactaaatt

SEQ ID NO: 247889 - DNA, 282 bp, Glycine max
tatgaccatttgaatttcatgagagcattcattattcaatttctataatctcgatacatcatgggcctcaatcatactcccatgtcaaaagttatggccgcttgaattggaccagagcttcaatgttcaatttcgaacgtctcgatatattatgtgcctgaatctaacatccgagtgaaaatattctaccatttaaatgtctagagagcattcgctattcaatttcgagggtctctgtatattattttcctaaatctgacattcgagtgaaaagctatgacc

SEQ ID NO: 247890 - DNA, 403 bp, Glycine max
  unsure (1)..(403): unsure at all n locations
gcttatacatcgtggctctagaatcatatggaagaaagatggggtgaaactagaatgacagaacatgcatttttctgcttgagactgccatagcatagccatcactcaccgagtcaatccagcaagaaacttgcacgggtttgtttccctcanaaaatctcttacactccaacctcttcccacgtgcttcagcctcattccctccatactccatccattcaatgagcaactttcacgaccaanaaaattctgaacccaaacttgtgcctagcttttgttctgcttcctcaacacaaagcatggccaattccctatgcctcacagttccttgctaaagnttgcatcttcggtagtgattntggctntgagtgcgccttattatatcgggtgggagagactctgt

SEQ ID NO: 247891 - DNA, 486 bp, Glycine max
  unsure (1)..(486): unsure at all n locations
tagctntaattntnttggaatcaaataatatatcanaaatagtctcatattgtaaaaattgttcacatcgtgtaagagttagcttatatatgttctagtcaaagtcgtatatatgtttaatttattctcaaataaaaaacaaaaaatagtctcatattgtaaaaatcttaaaaatagtctcatattgtaaaaattgttcaattcgttctcaaaatagttcagaaggatcattggcctatatatgttctagtcagagtcgtatatagagattataagacctaaaataacaattacttccacatttaatttaatacactttgttaattttttttaagaaaaattgtgagttgctatcttaaatattattcacatgtcaaattgactcaattaaagaattaaattaatttatgtatacaaaatatcaacatgaaatacaatnttaactaaatgtgtgatgttataatcaatanttttcgtcaaatatct

SEQ ID NO: 247892 - DNA, 446 bp, Glycine max
  unsure (1)..(446): unsure at all n locations
tggaatccaataacacatggactctggttcctctcccaattggtaataaatgcatcggctgcatgtgggtgtacaaagcgaaattccagcctcatggcactatggactcgcacacagctagactggcactaaaggttacacacaacaagctggtattgatatccggatagcttctctccaatgctcaacttaccttacatagaatccctttggctgctgcaactgctcaaaataggccaaccctcatactcgatggggataatgccctccttgatggtgaactatttgacgaacggtatatgggaactccacagaggacacttccattgatataaccttggctgacgtcaacaatccattatggcctagaaaacatntgacaggatttataaccctctacacacttatgaaataggtcttccaacaagaatgacattctttttacn

SEQ ID NO: 247893 - DNA, 275 bp, Glycine max
  unsure (1)..(275): unsure at all n locations
ctgtcttccacaatatagctgcacatgcctctggactaaatcatgtgataaataaaggtgaaaccagcagaacaaacaacaagactcttcaattagtaaaattatcaataataatggcagtagtcaaccatatcactcagtcactgtctctctctctctctctctctcacacacacacatacacacacatatataatatatatgagaaagtatcatataagagctcatcgttagaaatgaagaagactacanatatagaccattagatcgtattt

SEQ ID NO: 247894 - DNA, 473 bp, Glycine max
  unsure (1)..(473): unsure at all n locations
catgtctctctatctctctctctatataaaagacattaaatttatttatatgttagctttcaaaaatattattaaaagacttggtagggtttatatttatattttaaatattagaaatatatttcttttttgtgtatataatcttagtctatttatcaattaagaaattacataaatgtttccaggctatatatgattgtattgtaaacaatttgtcattaaagtacatgtacaaacatacatatttgactaattataacttataattggattaaagaaacaataattgttggttctattctctcttttggaacatatgatttgttgaaaatattgtagttgttgattctaaacacatgtaaagcgtgtagtatcctctatattcttttaanttcgtntntatatatattatatatatatatatatatatatatatatatatatgtgggcggcggccgtgtgcgcgcgngccg

SEQ ID NO: 247895 - DNA, 458 bp, Glycine max
  unsure (1)..(458): unsure at all n locations
ctttttccctgctattagcgcacctttaatactcagccttcacaaatgtcttacaaataatcatcacacagcagaaacctatctagactacgcatcatatctcccccaaccccgtacccacgaaaatccacagagaatagaagtccaccccaacctgaattttcgaagacccactccgagccacgcactttacgaccccgaaaatgccctcctttcgcgatttggggcagaaatgatgagccaaggttgaagctttgcttggagctctcatggagaatgaagataaaaaaaatggccacctgaaggagagaagagctcgctgaaaagtggggggctgaatgaacaagagaaaaaccttttggtntaaataaaaggtttttcttttttattatttattcagctccgcccatgtcctattgagtggagccaaaagcgcagcttccttttactgtacccac

SEQ ID NO: 247896 - DNA, 57 bp, Glycine max
gaagggggggggggggccaaccccccccccgcggaacggaagaaggaaggagggagg

SEQ ID NO: 247897 - DNA, 60 bp, Glycine max
gaagaaatttttttttttacacgaaacgggggctggggggcatgccccccccccccccct

SEQ ID NO: 247898 - DNA, 195 bp, Glycine max
  unsure (1)..(195): unsure at all n locations
tttttttttcacnaccaggacagtgggttagtaccccccccccctctcctttctatttttttgtttttttattttactgattttttttcgttttgctgttaattcccttatctatttgtctattctttttctttatattgtttgtatttttttttcttttgtagtctttatgtttttttttttattttatttttt

SEQ ID NO: 247899 - DNA, 236 bp, Glycine max
aaggggtgggagatggatggaataaaaaaaaaaagaaatggactgtaactgaacaaaaaaatagaaagaaaagagggagggtggaatgtttaatagaggaaaagagggaggaggaaaaaagaaagaagaaggaggaagaagaaagaggagaaaaagagaaggagaggagaagagggaaaggagggagaaggagaaagggaagaagaagaaggaagaagaagggatagaaaagaaga

SEQ ID NO: 247900 - DNA, 372 bp, Glycine max
gagccaatccaatccttgtgttcggactctcagccacttatgatagccgccgatgatcccattactgcttcccctaagctctctatcctttcttcacgccgcatcccatgccttgcgaactccttggagtaccctcgcgtttgtggtcactgaaaccccatgcgatgaaaggtgtgatgctttcgtctgatggcacttctctcatggggtagccaagctgtcttatggcgaggacaggattataattaatacaaccccttgttcccatcaagagaacatttggacatccttcgcatgaagatagaatcctgattcttccttccttctagcgagggaaccaattaacagacgcccctccatgctagccaagag

SEQ ID NO: 247901 - DNA, 405 bp, Glycine max
gcttcaagaaagcaacttgccatgaaagcatttcgcaagtccgctccggcgaccggcggcgtgaagaagccgcaccgtttcaggccaagtacggtggcactgagggagatccgaaagtaccagaagaacaccgagcttctcataaggaagcttcctttccagagactcgtaagggaaatcgctcaggacttcaagaccaatctctacttccagagtagcgctgtctccactctccaggaagccgcagacgcctacctcgttgtgctcttcgaggacaccaacctctgcaccattcacccaagagagttaccattatgcccaaagacttaggcctaccttgttgggctcttgtttattttcattgaatattggaaattttatttttaaataaatatttaaaaatga

SEQ ID NO: 247902 - DNA, 397 bp, Glycine max
  unsure (1)..(397): unsure at all n locations
ttagatggtgtacataaatctcttttnttttatactcagcaaagtaattattcatttttgccccaatatctctcgatccactttctcgctgaagttaatgccaactagaaaagaacccatttttttaattgagggtgcaatttggaaatcatgctattgaacataaataattcaaatgttaaaacttataaagatatactctccccccttcaattttagagctataagccaaaaaatactggaggatgaaaaatgccctttctatccatctgtggggaaaaggcttgtttttaattattttgaccattcgcgggaaaggctcaactaagagaggaatcgccaaaagaaaaattacccattacgaagacataacaatgtctctgcaaaacccctttaa

SEQ ID NO: 247903 - DNA, 363 bp, Glycine max
gggactcaaccggacttccgaacgaaatgttattgtcgttataatttgcagagagcttcggttttaaatttcgagcgtctcgatatattacgggactcaatcggacttccgagtgaaatgttattgtcgttcaaatttgctacgagcttcgattttaaatttcgagcgtcacgatatattacgggactcaatcggacttccgagtgaaatgttattgtcgtaagaatttgctacgagctttggttttaaatttcgagcgtctcgatatattacgggactcaatcggacttccgagtgaaatgttattgtcgttagcatttgctgcgagcttcggttttaaaatttgagcgtctggatatatta

SEQ ID NO: 247904 - DNA, 386 bp, Glycine max
aaactaaccggtcgaataatgtataacggacaaagaacaatgaagaacaatcacgaaaacattacggaagcaccttgtcgcaacctacccttcggcgggagggcgacgcgtgactcgcgggatgcgtgttccacgaaaggaatacgcgcggagtcgccaccaacgtttatttgaggaaaacgtcggaaaaaccggaaaagacgcgatctacgaacttttaagtttgaaaggttcgggagttgtatttacgcacggggaaggtattagcaccccacacgcccgtcccaagggacggcagcctttaatcgaatgtgcaaacatgactttgatttttatgttcccttttatgttcttatatcctttataccctttttatattttttctc

SEQ ID NO: 247905 - DNA, 287 bp, Glycine max
  unsure (1)..(287): unsure at all n locations
tgaacaatttcatttggtctgcaatataagctgcaatttggtgcatttggttggagcataactctgtatttttaactaggtccctttctctcggtaactgacttgggataagattagtgatcagcttgtatttggttagcacatgattttttatattttccctatgctntctcttttcctttttgtttttttgggtgggtgatcagcttctatttggttagcacatgatcttgttaaggctttccctatgctttctcttttcctttgtttttttagggggggggggg

SEQ ID NO: 247906 - DNA, 405 bp, Glycine max
  unsure (1)..(405): unsure at all n locations
agcttttgtcactccccctatatttggccttcacattaactagacttaacaccgcagacaatagcttcaaggaattattgcacccaggatacaaaggcttctttgaattagtttgtaatgtaccatacataggggcatgtgcttgctgaaaagactcttgtcgaagatcacaaatcatatcctctaagaaatccctcatttctacatcaaatggtttagattgggatccattctgcatgtctgtcaattcaccatgctatattcacgttgtatttgtcgtctccctttaaacaatntatacaaggacaaaaaaaaatttcgtccccatccagtcgacttttttcggaagcaaattgcaagaactgttccatgtcttcctcaaatgtagggcttatgcgactttcg

SEQ ID NO: 247907 - DNA, 424 bp, Glycine max
  unsure (1)..(424): unsure at all n locations
gtcacctgcggcatgcaagcttgtgtaagtcatctaaatatgtctttgcattcttgnacatcttcataacatcatctacatgtgagaaagcatttggattttgaacacatgagttgctatatgactctaaaggtaccccttatttccattcataagctttccaccttcccattttcaccctttgcaagcacattcaaaactagagcaaaattgatagataaatatatatagtaaacaacataaacaagcactactatacaaggaccaatcaatcgaataaataattaaaaaataatccatgtggtgtcattgatactcactgtcccaactcttgtgtatgcataaacacacatcatagttcatcagaagaacttctccaaattggggaaatcagaacaagatctatagctaaaaaatgacatat

SEQ ID NO: 247908 - DNA, 383 bp, Glycine max
agcttgcttcattgctccgctctccgtttttgtttctcttcttcttgatggtcgtgttcgttcgtgttatttttgttgtctcgcgagtattgaaatcttaaaagacgcacagagagagatgtggtgcgcgagcgatagaaagaaagaaagcacacaacaggtttggacaatgcgggcgcaagatagtactaccttgcgccttttttttttattgcctcgttactccctggcgcatgatagttaatcttgcgcctttctttctttattctggatttattgggtaggttcacatgccggcgaaagtaggtttgtttcttgatattggctctctttagccggcggattaataaatctgctctgatgggttgggggattactgtgag

SEQ ID NO: 247909 - DNA, 299 bp, Glycine max
acctgcggcatgcagctacctttcttgcgatattctatctctattatggtggcactacaccatctcatgggctaattataacaggtcaaaagatcagtgaattcctttgtgatttcaactaaatggtcacgacaaggaaaattggaaaattggaaaatcaaaaaacgacagcttcaatgatgtccaattgtcaatgggcgatggcatgcttttgtaaggtccaccaatgtcaatgaacgataattacggttcttaattagggtgatttttttttttttacagggttatgtttcaaaatc

SEQ ID NO: 247910 - DNA, 404 bp, Glycine max
  unsure (1)..(404): unsure at all n locations
agctntgcgagattcctcacggaaaacgtttctgaaacgtttcggaagcgcctcggcttagattttcttcacggaaacaatttttccaagcaaatttgaaagagagagaagtgcctaaggggctggaccctttccttcttcacttcctcccctatttatagcaaaataggggaggtggttgccgcccagctcgcccaggcgagctcagctcgcccgggcgagcagggttgcttcctccagaagcaaccgccttctggaggaatattccagagggcccaagtgggcctgggtgctatttgcacccccatttttactaagtacacccccctctgctgttttttggtgattcttttttcgcaaagttacggaaacttacgaattttgtaacgatacttgttttcttt

SEQ ID NO: 247911 - DNA, 400 bp, Glycine max
catgcacttttggaggaaacaatttttttttcatgtggcatcattaaatgtaatagcataataaatctattcacatattttcaaaaattggtattatttcacaaccaaataaactattaggagtatattattttgccccgttaaacgttattatagctgaatgaattatcaattatcacctcattattaggtacatgcatttaataggtacaacgaaagagactgaaatctgaaaagcaatcaacattcatttttgcaacctaaaaagagattatgacataattatctgggctcatttccctaaccctttaaaagttggtcggctgttatacaagaatagggaacataattacctaatgtaaggaatttttttttcagctatctgtaatgtagctttact

SEQ ID NO: 247912 - DNA, 422 bp, Glycine max
gacctgcggcatgcaagcttgcttctacataataatataaagttatacttttgtgctaaaaacaaacaaaggaggaaacacataagatgaaagaaaacacaaaggattagataacacctcatttcaacagccaaagctctaataccaaatgataagagaacacttagggttgtcttggaaagaggtataaaaagaaaggaacttgaccctaacaacgactttccagtagaaccaacactatcagttcttaacccaagaacaaagaaaaggttctcagtagagaaactctcaaatttcattaatcttcttattctgccaacaaagtatttaaagagtctatttatactcctactgataaccctaatttaggcccaagacccaatagttaatctaatattaaaagactgtaaaataacaattaa

SEQ ID NO: 247913 - DNA, 370 bp, Glycine max
  unsure (1)..(370): unsure at all n locations
gatgcgaagnttaacttgaagtggccacacacaaccacaaggtgatccaggaggtgtatatgtcaagggctcatagcaagtcaccgatatacaatctataggtcaatcaggaataggatcaatacacgcatatcacataactaggtggagattattgaaaagaaggaatcagtgcaaatgcgtaatataaaaatcctttaaaattttatagttgcgggataaagcctaggctctatagtaatactaatacctttgttaggtggtggagatggtagaaccaaagtatatgctggtggtggagtctctgtcttcttcaatgatgaacctggaggtgaaattctaggtgaaggagagggtactgttggtgatg

SEQ ID NO: 247914 - DNA, 331 bp, Glycine max
tatcccgcaagttgtggactcattaaacatttacttctccaacttgggggggtattacaagctgtatgcagaaagatggagttagttattttcagttaaaaggtagttagattagttggcaatgagttagaatagagttagttattaagtttgttaagttgaatataaaacaccgtgtatgcaatattgtactcaacatattatcaataatattttgcagattctccttgctgcacaaagctctccatttattaaaatgttaattacacgaccctaatggatagtttatactctttggattagaaaaaattaacttgatcatatacaaatt

SEQ ID NO: 247915 - DNA, 356 bp, Glycine max
aacagaagcatgtgtaacacttgtgacaactttgatgaatgaaaatcttgtgagacacaactcaaagttcaacttctctccctcttttactccttcaatttcgtgctccctgtcataccctaattttgtccagggacaatttttgtcagtgtgcggacattggttgatcactctgagatgcttaacacccatctctgcgtaatccgtaaagttccgtgacgtttcggaaagaaatcagccaaaaacacaaaaatagggctgcacttatcaaaccgggggggtgtaactagcattgggttcatttggaccatctagaacactctagaggggggagggtgcagtcatcaaattggggg

SEQ ID NO: 247916 - DNA, 295 bp, Glycine max
tgatacacatttcttgcattggatatttgcttgattgtcgttaactattggcattgtgctcctttcacgttagaagaatatttcttgttaccattgaccttgtcatatcagaaacaatgatcttctcatccttagtcaggcgacaacatatggatgtccaacaaataaacttgaccaattcatgattgtgactcccacacattaactttaccatacatcctttgccttccaccactgggtttgcatgtgcctaaaaggacaccacattttctactactagtaattgtcttaccaa

SEQ ID NO: 247917 - DNA, 403 bp, Glycine max
agcttatgcgcatatttccttacgattatttttctcgcacaagatattcttctaactaagagaaatgcacccatgcacaatcaaggcactttcgttacctacattatttgtatgtacttccaaggtgtactacctacaccacatgcatttcctcggctaaatttacatacatgcatgctcaaagcctcttggctaccaaaagttgcacacatgcaaactttatgatgaatcttggctatctacacaataaggtgctacatttcatgatttattcaagtgtttttactacctaaagccgcatgcaaattcaagtatattttcttttgccgactaaaattgtattcaaattaaaaggagtttttgtaaggtattttctttacataacatgcgacatatttatata

SEQ ID NO: 247918 - DNA, 414 bp, Glycine max
  unsure (1)..(414): unsure at all n locations
accgcggcatgcaagctgggcacttagacancattcnataatctaggcatcaaacacggaaacaacgaaatgcattctatgtgcgagaagacagaattgagtgagctttctagtgttagaaaaggaagatcgatggacgttttttttatatatactttgctcatcacttgcacactttaataacaatattaacttattggacatgagtcattaatgtggtaaagttaatgtgttgaatcgtttagatataattaaagttcgattcttggtaaaaataattctttattaaactttacatacctatcaagtgaattctgaattactcaatatatcttgccctgataatatagagagtttacacaacatataaaaaaacataacaacatggatcttagttggaatcattcaatttat

SEQ ID NO: 247919 - DNA, 405 bp, Glycine max
aagctgcatgatttacatctccctctttctaatcaaattcttcttgatatcatcaaaagcttcatgatttacattctccccctttttgatgatgacaaccacctgtaggttaggagcaacaacaaagaaaatatctatttgcatatagtttactcccccttggttttacaatgattgcttatatgagacaattgaagatttcatatttttcatatataaaaagttgtctcataaaacaatagataatttttcttactattttatcttttatctttctctccccctttgtcaacatcaaaaacaaatcatgaatagagaggagaaagatgttaccactcgttgcaatgtatgagaatcaagtgatatcaaaaggcattaaaacaatcattcaatattaatcaagca

SEQ ID NO: 247920 - DNA, 384 bp, Glycine max
agcttgagcagtacctctttttatggattatatcttaaacactcatccctttgtggaaaaaattgatcttttaataattattttcttgtttgccttcaaagtagatttcaggaaataccatatgttgaaaatgtcatagctgtaaccatcctaggcaataatagagataagcaggaccatcaccatttgccttgttctatgtcagttaacaacttaacaatgtttatttcattactctgctgtactgaaatgatttatacatcatgcttttgttcattgatttttttggtgtattaaaatgactgtaccttgtggaaatttcacattctgttgtctactgtaattgatgcttttaggttttgagctatgatggattgcactccc

SEQ ID NO: 247921 - DNA, 415 bp, Glycine max
  unsure (1)..(415): unsure at all n locations
gattcttaagncacctgcggcatgcaagcttgttagaactagcatcacatgatatttttttggcacagaataagttgctttctaagcaacttgagattttaacaaaaacacttggtaagttgccaactaaactatctattggtcaaccttcacattcttctattttgcaggttacaggttgtaccatttgtggtgaggctcatgaaacaggccagtgtattcccattgaagaaaacactcaagaaattcattatatgggaaatcaaaagtgacaagggtatactcaaggaggattttcaggcttccagcagggtccttataatcaacaaggacaatggaggtcacaccctaataatcagtttaacaaagaccagggtggacctttgaataagccaatccaacaagggcctaacat

SEQ ID NO: 247922 - DNA, 397 bp, Glycine max
agcttggtaaagccatcatgaatgatgattctataccctgaaagacataattgttataaactaggaactggaggaatagaaatttcagatatgatatgcatatgtcattaaacataaatacttcacacttgaatatttgtagtctgtgcgttagaaaagctaaccataattgaagtttaatgatgttaaattattgaaacagccaagttgtgtgcaatatagatgtaatgtcactactaatccatagaactcaggctcagtaagtcagttacataaaaagtggggaaagacagatcctacttcattttaattttggaatattttcagcacaaatttcctagaaattagaaaacttaattaatagtgaaagtagaggagtatccatagtccatatacc

SEQ ID NO: 247923 - DNA, 387 bp, Glycine max
  unsure (1)..(387): unsure at all n locations
agcttggtggagaatattntcattctctatcacgagagatcacctactgttaaaagagtgtacttttatttacctagtgaaaattcaataatatttgaagatgatgatgatattgaggctttactctcaaagccaattgttaaggattcgatgtttacatcatgactacaagctaatagccttttcaatgaaggaaagcatctaacatatgtgcaattcataaaaaaatttacatacgtagcaaaggatagacattggaagccacgtaaaagaggctatacatttggaaggcttatctgggtgcccctaagtatcggagagttgtattatcttagtatgatgttggtttttgttaaaggaccaaacgattatgaagaaattcttaca

SEQ ID NO: 247924 - DNA, 408 bp, Glycine max
  unsure (1)..(408): unsure at all n locations
agcttctatataagctgaaccattttatcaattaatacaagttgagttttattcagaaaattagagtttatctcttttatcttagtgagagtgattctcctaaattcttgagtgattcaagaacacccaggctgtatcaaaggactttcacaacctttgtgtgttgccctcaccggaaacagngattctttccttcctttcatcttcaaccttgttctttcaaaccacaattccagaaaatccacttctacccagaattatctcgtggccataactcccgttttaagcactcaaattaagtgattcttgagcctaaattgaatttcaagatgagacctttcacctcgttttggaatcacctcatttggagccctgtagcttgagtttttgccatttctatatttctgt

SEQ ID NO: 247925 - DNA, 370 bp, Glycine max
cggcaggcagcataataggatcgagaagggcaactattttctagtacaaacaggaacctgtgagtatggaaaatacctcatgcattggataaggcgcatagacactggcgaggtgaaaaatgaatggaacaaggcatgcctactattacaataaggaaggactttgatggtatcaaatcctaccacaatggatgatgtagtcaaccaagaccattttcaaaaactcttactgagttgtagaaggaacaccattagacaatgacaccatgaccacacttagaaagagatgggcggccgattttctagaacttcaacgatggatgggaccacatttagacgacttaagcacattactgtgggaactaaacat

SEQ ID NO: 247926 - DNA, 400 bp, Glycine max
agcttcacatggagctacatcaaccttccccgttcttaaatgactcccgaaccctcattttcaaaatacgcagaccctcgaccttttccattttgatttttccgacgttttccttggataaacgttggtggggactccgctcattttccttcaatggaagacgcatctttggtggggactccgctcgatttccaccggagggcaggttgcaacaattggcgactccactggggactgttagagagttaggtcattcagtcagtttgcaatgtttttatcatgacttcctatttatttatgttcccttttccttttatctttggtttggccatattctgacataaactttgctatgttgttgtgtttggcgtattgttgcctatcgattacatttctagtt

SEQ ID NO: 247927 - DNA, 406 bp, Glycine max
gcttataagaacaaaattgcctcatcattttttattatgcatgtgaattaggacgcatcaacaagaatcaagccaaggctattgtgcaagcaatcaatggggcaaaacacaccaaatgattatgatgatggatggctcaaattctcacaaaagtaaactcatcactttcaaattaagctttcaaaactatcatgacatgtagaggagaatcaaggatttcaagtcacaaaatgtcaaaaacttttattttcaaaacaattacccatttcttgaacatatcctataattcaaagaaaaacatgcaaagtcgtacatgcacacaaaattgacccaaaatattaaactaacaatccgacgaaactaacaacattaacaaattaacaaaaccaagataactatgcaaacc

SEQ ID NO: 247928 - DNA, 398 bp, Glycine max
  unsure (1)..(398): unsure at all n locations
aatgatatgagtcgaactcattttctatattcaattctaattataattattatccatactttatttatttatttattttataaaaaacatttaatgtgaatttaattaattaaaacacatcacttaataaatcattaaaatttataccttaattatatttttgtattaaattaaataatataataatgaaggaaaaatcactcgagaaaaacataatttgtagaaatgaaccactcctctcacattaaagttctaccaacacatgtatggggcgtgtacagatattgtttttatcacgcgtatgagaatggttctatagtacccttttgagatcctatccattgttatccatattgatgatccatttttgtgttcaagagctactcatatttnttata

SEQ ID NO: 247929 - DNA, 406 bp, Glycine max
agcttaactcttgacaaagaaataacatatttgattttttttaatatataccagtttactaatgtatatatacttgttttttttaatatgaatacgttagcaagttatacctagatattgtcttaaaatacaccaataatatacctagatattttaattaatatataattagagttatattattattattattattattattaccaaatactccaatatttctatgataaaagcaaatgcactttgacaattaaaaagttacctttcttataaaatatgaattttctatgagtctagcatattctgattaatatataggaaaaaataaaaaaatattagtcaattcaattgaaaactgatgaaaaccataattttattttttggaaaacacatgaattgtccatgt

SEQ ID NO: 247930 - DNA, 390 bp, Glycine max
ttaggctgaatgaagggggtttctgttaaggattaaaatagactctgataccatcttaaaatgtgagacttgagtttttctcaacacataatatgcattgcttttgatgtaactgttttgattgacttcaaaaggactttttagtataataaagatggacagagaactggaattataatatgaaaagtacttccaaactcttgtaataatatacatccttgctattgatatgttaccattatatagatgaggatctttaatattgtataaaagctcagccaaaagaagtcaatatagagatatgacagactttgatgggtctactttcttcttccgaaactcttgctcagtacatgcttgcctcactttttcctccctccccctgattct

SEQ ID NO: 247931 - DNA, 381 bp, Glycine max
gcttccttaagaagattcctaaagaagcttatgtttagctacacacacctctctaatagctaagttcacctccttgagatgagaagctagagcttagctacacaccccctataatagctaagctcacccatatgccaaaaaacaagaaaatacaaaaaatgtccctactacaaagaccactcaaaatgcctcgaaatacaaggctaaaaccctatactactaaaatggccaaaatacaaggcccaaacgaaggaaaaacctattctaatatttacaaagataagcgggctcatacttagcccatgggctcgaaatctaccctaaggctcatgaaaatcctaggtccttcccttggatctctagcccaatctacttggagtc

SEQ ID NO: 247932 - DNA, 402 bp, Glycine max
  unsure (1)..(402): unsure at all n locations
agcttgtaagtgttattattcagattgagtttattctcaaacagtaagaatattatttcattgcaaaaaaatgagggctcaaatttgttgtagaaggataaataatcattcaccaaatttctttttctttttacaaagtctctttattttattttattttataggctcataattactatacaagtattttttttacatattatcaagataagttatcattgattttacatacaaaatgagaaatggaagctttctatttttatattaattatctgaaaggaaagaaaaataatttggaataattccatgcataaaataatatatgttaaaaaggatcaactttntaaatagataattactatcaatcaaaaatatatttgagcttcaccaaaaaataaaaat

SEQ ID NO: 247933 - DNA, 406 bp, Glycine max
  unsure (1)..(406): unsure at all n locations
agctntgagccaaaatcctgactcaccatataccttaccctcggaagcaaaaaagaatagaagggaaatttccaatcaaagaaaagagaaggaaaatttcctatgaatgagaaaaaagaaaagaaaggaaattcccaatcaaagagtgggagaaagaaaaaagaaaaggaagaaaattcccaaccaaagaatgggagaaagtaaaaaaggaaggaagctcctggtcgaagaaaccagaagaaatgtgcagagaggtctttggaccatacgatatctgaacagtacagaatcgtcactaaatgaacaaaaaggaaggaaaggaaaccacgacctaaaatggtcttctccctttaattaccaaccaaaatcccgtgcgctagcgacctttttttctcgtcccgcacta

SEQ ID NO: 247934 - DNA, 276 bp, Glycine max
aaatttcgaacggaagttcatctgacacagaagtggaaggctatataatgcttatattaaaccttgcaacattgctactaccattgtggcaacagttcaaccagtgagtactcaccaaaaaaaaagtacaaccaggtaggtgggatgacaatggtattggcttttgtatgtaacaatctagtcccacgtatcttaattatatgcgcggtgtatatataaatagatgtatctccgaataacggggagcccatttacgaacactcctatcaagaggcg

SEQ ID NO: 247935 - DNA, 408 bp, Glycine max
agcttaaaggatactaggccgcctcctagtatcgcctccttaacgtcttgagccggatgcgggatgatgatctattgatcatgggcctggtagctgctcacactcgtccctaagtctctaaaaacaggaaatggcaccacgcagtaaaacatgactacgctaacacttaccttggtttttcttcgtcttgaattcggcacgatattgaccatcactcgaaacaaatcttcccctgtccctcaactcacaggataaaaatatgcatatgcatgcgtatgcatgggtagtttaagtgcaataacttaaacaaatgtctattatgttcaattttacttaagcgcttgtggcacccctatggatcgagtgagatggctcggaccataaaaagagaatacgcatcttaaagca

SEQ ID NO: 247936 - DNA, 166 bp, Glycine max
acaaaccaacaaacatgagtcccccacatgaacaaaccatgaacgggctaaaaacctagcgcatgagttgacatatccatagtaggatagacgagagggtgaaccatgatcgcctctaccacaagcaaagaaaacaacgggacacatcatggaggggtggtaaaaa

SEQ ID NO: 247937 - DNA, 146 bp, Glycine max
aaaaaacctggcatattattttttaagccctccccctcctttggggcctcacattaactctaggtcatcaagaataaatttaccatttttagaaatttattctcattaaggggtcccaaatcctctcccacaatggcctacatttt

SEQ ID NO: 247938 - DNA, 313 bp, Glycine max
ttgaaattcaaattccattgtgaagagtcacatcttttcataaaatgcctttgtgtaatcgattacatagttttggcaattgattaccagtgacaagttttgaaataaaatcaagagatgtaactcttccaatgggtttcttaagattttctcaaggttataactcttccaatggttttcttgaccaaacatgaagagtctataaaagcaagaccttgacttgcattttatacacttgatataacttttttcagatattcttttacaacctttgaatctctgtgaacttcttcttctttttcctttgtcaaaa

SEQ ID NO: 247939 - DNA, 362 bp, Glycine max
  unsure (1)..(362): unsure at all n locations
aactgtgtctcttggataacaatgattgctggctattcaaagggaggggatgttgactctgctcgtatgctctttgaccagatggatcgcaaagattcgctctcatataatgctatgatagcctgttatgctcaaaatagcaaacccaaggaagcccttcatctatttaatgatatgctttaacatgatacatatgtacatccagataagatgactttggctagtgttatatcagcatgttcacaattgggggatctggaacattggaacattggngctggattgagttgagagatataagttaacggtcgactatatttgttgcattttttatacttttagaaactaaacacattattaat

SEQ ID NO: 247940 - DNA, 395 bp, Glycine max
agctttgcaagaaaggacagcacaatctttttctagggagctcaatcatctgaatcatctgtagcatttccaaacttaagggaatccgaagtaggtgcatctgaagcacatatcctggctgaagatcaaccacggagggtgactcttgaagattattctagcttgaccgtgctgtaatttttcccaagcattgcgcggccggaagttcaagctcacaacatcacatatcctgattccttgatccagttgattcaaggaaatttgtttcatggtttgccgaatgaagacccttacgcacaccttgctactattataaaaatctgcaatactgtgaaaattgcaggtgtgccggaagatgcagtaagacttaccttgttttcattttctttggctgg

SEQ ID NO: 247941 - DNA, 400 bp, Glycine max
  unsure (1)..(400): unsure at all n locations
agctcggcattcatacgggacagaccattgtactttacgttcanagggaagctagtatttgaggtgcacacgtatggctccactgacgggggagcttgcgctgatgggaacccaaaccaaatatgcggaaaagtgactgcacatataaagcaaacatctaccttcttagtggaccaaagatggccattgtttgtgagtgaatttggtggagactcgagaggcaccaatgtgaatgacaaacgataccttaaccgctttctggcactgggagctgagcttgacttggaatgggcctattggactcttgttggtagctactacttctaagaaggcgttataggaatggaacaaatctatggccttctcacttgggattggactcagggtaagagtaccagtt

SEQ ID NO: 247942 - DNA, 395 bp, Glycine max
atgttaatgtcacaatattttttttaatgaagattccaaatgaaaggagagaggcttgagtagtcactcaaaaccaaatgttgttgaaaatagaggaaggggtaagcaccgtggtaaagaaggccatgggaaatgacgaggaagatcctagtctcgctccaaaggcttaagttgctactactgcagaaagtcaggccataagaagtttgagtgcagattcttgaagagagatcacaaggtcagaactgtccatgctaaccaaatttacccaaagaagaagaatgaaggtggaaccactactgctgtggcatcggacgatgataatgtttttcttatcggtaatgaaaattatttaaatattgcatctgatgattgtatatggataattgactcta

SEQ ID NO: 247943 - DNA, 377 bp, Glycine max
agcttcagtgggcagagtgactcaacatgttttatctaagtaactatggaatggacatatttaataaaaagtgtaatcatagacaatttcctctctttacacgaaaaaaacttctttcctttcctcttatctccatgttagaagttagaacggatcatattttcatgtgagatcttcacattcttttctttccttcactttttgtggatgctttgaaataaggaagagattaattattttagctagttgtcaatacttgtcattcaactcttaacccttccttttcttttgaaccattcaaaacatagtgtacgtgtcataagctcattccaccacacaagacttgattccaagtaaacaaatactccatcggggga

SEQ ID NO: 247944 - DNA, 371 bp, Glycine max
agcttgcttgtggagcttttatggaggctttatctttgagcttcaatgagatcctgtaatggtgattttccaccatggagatgcagcggaagacaaaggagaaaaggtgagaggaggcgccatccactaggtaataagccatggaagaaagagcttcaccaccaaaatgagccttggataagaagcttggaaggatgcttcaatggaggaaaagaaagagggagagaaagagagaggggggagcacgaaattgaaggaataaaagaggaagagaagtggaactttgaagtatgtctcacaagactctcattcatcaaagttacaacaagtgttacacatgtttctaattatagactaggtagcttccttga

SEQ ID NO: 247945 - DNA, 398 bp, Glycine max
agctttgaagagaaaccatgatagctaattgtttataaaatttaagttctctaacgttataaaactgttcggagattcttccgttggagggggagtttattcactctcaaattgattgaaaaatatttctcttttggcttaagggagagaattgtagagtttcaagccaaaagataaagtgcatgcacattgggaattgaatttttttatcactaaggtttaggtgatttaaatgcaaagtggaagattacattttactagatgaaccttacttgaatgaatgcattgaaagttgtttttgtttcaacttcacagataacttatttattatagttggtgacaattttcactataaatagagaagaaaattcgttgagaaacctatcccatgaagagag

SEQ ID NO: 247946 - DNA, 373 bp, Glycine max
gcttcgtaaagacaagtatggggttaccttatgaaatatatattcctattcttctttatttgtatacttaaatattctattaggaggtgattttgtttgctttattagcttaaaccaatatttgacaaaaacgtacgggtgaattaattagctttggtgcaaaaaagattttgagaggttactttacttgggtaggttttattacatggcagtgtcgaataacagacatagatttatgcctctcccaatgatagatcgaggaaaagaggaaaaaaacatgttcccccggaggctgttttgctcgtcaatcctgtggaaccagagtttaagggagaggtacctttctaatttcacattaatgctgctaatttta

SEQ ID NO: 247947 - DNA, 404 bp, Glycine max
agcttgatcattttctaactggttaaactatattttggtgtcttcaaatttttcaacttttattatttgggtcttttaaattttcaaagattaattttccttcctaaatatttgttacgtctaatattttcgtcatttatgtctaaaatcaccgctaattatctacgtaacattaattgtattattgtattttatgacggctaaaattctgtcagaaattgcttagtaatagattcttcttcttctctttctcttactcgacaccagccaccgccgacgacaccatccccaaaccagggagagcgagaaaggagacagagggagagtgcgggttgtcgttggtcttctccgtctcgatccaaatgccgacagtggcggtgcgggctggtgttggtattgacggc

SEQ ID NO: 247948 - DNA, 405 bp, Glycine max
  unsure (1)..(405): unsure at all n locations
gctaaagntgctatatcattatgttgtaatttataaagaaaacttctgccagagggtaataagaatctatgaaaaaggaacacggtgtatgttctgcttaaaaacttccaaaagaaaaggggcaaaagtaaatgataaaaaccttctagtgggggtgacagagggtaactgatagagaatttatcaatctcagaagaagagaatcttcacataattggctaaacaccttattgaatgccatcaaaaactataaaaatagattagcttgattcagaatagagtaaacttagtttatattaaccatacacttttctgaattttagtgttcatggaattgggatctatgagaattgcctatatgaaaaaggtgccttggctaggctttaaatgcaatcttatatggaa

SEQ ID NO: 247949 - DNA, 357 bp, Glycine max
aaacctgtgatgtacctaaacaggcgagctcctggccgtctacatataaaaggaacaaagaccacattactaggaggcttgtggtggctggccagctgtgaattttgtttaaatgttgattatggcctctggttatccaattccacaggtgggtaatcgattacatagcttaaaaatgaatacaggaggctaaaatggtttctggttatcgattaccaaggggtgtaatcgaataccaggcttgaaaaacgaagtcttgaaactaacggagcctctggtaatcgattaccaccctgtgtaatcaatttcacagaaggatgggtcactggtaatctaataccacgtatgtgtaatcca

SEQ ID NO: 247950 - DNA, 341 bp, Glycine max
atgcacaggctacctactttgtctgtaatatggcattttattcaaagaatgggagcaacatggatcaaactctatagtctagatgactcagtcaaagactcatgaaccaacttaataagcttaagctattaagtaaaaatgcatgattggccttctattacatccctaacaaggttgtatttttagctgcaaaaacaaattgaaaaatgtttgtctggcatcacttttttttacacttattttgtatctcctaataaaatgtctactcatatggacacacagataagggagagagttaaagaaaccttttttaaagggggtaaatgtgagactcataaaat

SEQ ID NO: 247951 - DNA, 401 bp, Glycine max
  unsure (1)..(401): unsure at all n locations
agctngctttaagactgtatattgatttctttattatgcacaccatgtgttcctttccttcaattgagaaccccattggttggtccatataaatattctcctctaaatatccatttagaaagacagttttcacatccatttgatgtaactccaagtcataatgggctactaatgccataataatcctgaaagaatccttttgtgagacgggtgaaaacgtctctttataatcaatgccaactttctgagtaaaccccttagcaacaagtctaaccttgtaacgttcaaggttgccatgagagtcccgtttagtcttgaagacccacttacaaccaactctcttacaaccctttggtaattctacaaggtcctaaacactattatgttccatggaatttatc

SEQ ID NO: 247952 - DNA, 407 bp, Glycine max
agcttcttatccaaggcacattcttggtgtgtgaatctcattcttccttgtcttattcccttgtggatggtgcctcctctctcctcttctccttttcctttcgctgcatctccatggtggaaaatcaccattgaaggacctcattgaagttcaaagatccggcctccatagaagctctataagcaagcttccatcaagtggtaatcatggcacaagaacttcaagtaggtgctccttaaacctccattaatttttagctttaccttctcttccattgttgtttcttcatttttctccatgtatctcctcacatgtcttgtgctaaatgtttttaacatgattctttaaagttttcaccgattaaactttctatagaagctagatttgattctctatggttcaaattt

SEQ ID NO: 247953 - DNA, 404 bp, Glycine max
aagtcacctgcggcatgcagctttcatactaattcaggttactctttattatatatgatctacaccaatgacgcagcagcatctgctttggacggtgtcaagtggcggaacttactaaatttaactactttcatttttaactgttcctctgtgtcatatctacctttgcctttattttccaaattagtgtgtatgagaggatatagtcatatagccccctttattttaacttaaatttaaatttatttgttaaaaaatactttttttaatataataactagttttctgtttctttatgtttgtctaattcaccttttttttataaaaaaaaagaagcaattttttgttttttcaataattaaatcttatttattccttcaaaaatcataggacagctataaatt

SEQ ID NO: 247954 - DNA, 402 bp, Glycine max
agctgggcaattctcacattacaagcttatttttatggttgagttagaccctactaagtccaaattctaggatggtatcaaactctgttccagatccattgttggccacgagccacctgcatttgccactctccaggatgatatccctaggcatgaggagatgtgttggaaagtcgtattgccttaattgcccgcctcaagtgatgttttggcccatatcaactagagatatgactaaaatagagcttataaagtttgggcaatcttcactttacaagtcgatttttgaggtcataagtccaaattctaagattttccaatgatgagcaaggattgaacttgaatatggaagaattaaaaattcaagagggtggaacaaaattgaacttattatcatagaat

SEQ ID NO: 247955 - DNA, 393 bp, Glycine max
agcttccatcaccaaggatgatctactgttttatttggaaatctcgatgatgtaactagggtcccactaagcttcttaattttatgttggtgtcaaattcccttagctatagtatgactaagtaccaagggatgattccctttaatcgattgatccaaggatgggattttgttccttggttgggttcctagtctactccaaagagctttcctgcaattgacaaactaaagtttctaatttaagctactcctatgtggaattgctgtaaagaaagtaataaacggcttaaagcaataaaggaacttaaaataagtacgtgaaataaggaaaattagacaaaatcttgaaagtcgtaggcaagaaaatgactaggttttgtgtattgatgtttgg

SEQ ID NO: 247956 - DNA, 381 bp, Glycine max
  unsure (1)..(381): unsure at all n locations
agcttctacatgtctagagagttttattgtgataaggtccaagttctagagagtttgagagattttgttgtgagaagatctgtanagaccagagcttgaaaaggaagtcgtcctgagagcttgaaatgagtttgtgagtgattgtgaggtcctagaggtggaggagacatccccactacttgtattactacaatctttcatctttcccttctttttcttgtaaagcaagcttcccaggtatggaaagctaaatcctctgttggatattccttgtaggtacttgatgtaaatatcttttttatctatttaacgatgttntgtgtgttcactgtgctattagaacttcattctaccatgcttttgccttgatcatgtaaatgc

SEQ ID NO: 247957 - DNA, 414 bp, Glycine max
ggatcttaagtcaccgcagctgcagcttgtcattagtacaatagcactattattgaccttgaatatttgaacattaagaggcaataatgtttgcatctcatatttgaactttatgaaaaaaaaataaaaaattacatcatgacccctgaaggtctcggtgtcacgataaaacaatactttggaccggcttcaagaagctctcgcacgcctacgtccatgactctcgaagacccagagtaagggacacaaaaaaatcaaggaccaactggaggagtcaatcactgaaaaagtgactcgacaattaatgttgtctttcagccaaatgcagtcccaaatgcaatcgcaactgcaatcacaaggactcacactgcctcctgagcttgaggttggtctttctgctgctcgtgttagcac

SEQ ID NO: 247958 - DNA, 355 bp, Glycine max
aaccagttctgctcccgagtatgacagccacctgtttaggaacgctgaacaccatcagcgcttcgaggccatcaagggatggtcatttctccaggagcgacgcgtccagctcaaggacgactaagataccgacttccaagaggaggtagtttgccggcggtgggcatcgctggttacccccatggccaagtttgacccagacatagtcctcgagttttatgccaatgcttggcctacagtggagggtgtacgagatatgcgatcctgggtgaggggtcagtggatcccattcgatgcggatgctctcagccagttcctgggatacccctttattgctggaggagggccaagaatg

SEQ ID NO: 247959 - DNA, 254 bp, Glycine max
acgcatgattgattttacctttctagcctctcttgctttgatcataaccctaatctcagcctagtagtttccaacttcatagagactttgtctgcatcaattcaacctctcttattcgcccatctctattctgttctctagcaagggaaggtagtgattccttttgtgctatatgtcccataaatgttctcaccaaaccatgacctttatgtaatcggtcagccaatcacatgctctttatcttctttcatttc

SEQ ID NO: 247960 - DNA, 365 bp, Glycine max
atccaaacccaattccatcgggatataagctttgttcaaatcacatgcaaaagagaggaagatattataaaatttgatattcatctggcaatttgaaggcattctgtgtttcatatgttttagcaatagtaaattacaaaaattaggtctgcctatgcttactgaattgtaaattctgtaggagcattgttgggtgacacattaattatacagtgcagagtgtacacaatgagtttgtttagttcttcaaagatattatgtttataccattctcaagccctaagtgttctggctttattgctaatacaaactaagatttgagaacaagtgaagtttatttaaataatcatcacagctctctgcct

SEQ ID NO: 247961 - DNA, 402 bp, Glycine max
  unsure (1)..(402): unsure at all n locations
agcttttctattaagtggggaagactttttttacattgngtgccatgtatgttttcttctatgtaactgcatgatttggactctccaaaagtacatgactagcggttggaagtttaaacttggaaaagtggaattattgtgaacggcagaatcactatggtagctgtctctgtaattaacagatttacacccttgaagtacagctatttttcttagcatttaaggaatttataccttttgtattattacgaatgcaactcatgcataatgcattcttaaaagtcaattcgtagtgtttgctcttatcatgagcttgccacagctgtctgagcatgtgaatgatcttaacatgccccgaaggacttgaaactttgttctcaagcaatatacctaatacaagca

SEQ ID NO: 247962 - DNA, 405 bp, Glycine max
  unsure (1)..(405): unsure at all n locations
agctnncacaataggagatgtgaaagttattttattaaatattattcccaaaaatggggttcagccaaatttagaaaatgatagtaatacacatcttaatctacattgtaaagaatgttttattttaaattaaaatttatcaaaaattgaaaaacaattataaatatcacttccggcccataataagtatcatcttaaattctctttattaagatcaagaaaagttaattaataaatagatgagagagatccagaataataattttataaagataaccatattattaatattacattaattgaaaacctaaagtaatacttgttaagaatattagtgaaaatctcttaaaaaaatggatattagtaaaaaaaaataatattacatcaaaaaattaacatgacact

SEQ ID NO: 247963 - DNA, 358 bp, Glycine max
gcatcaactttccaaaggaggcctttttttttgatgtttgcgggaattaaatggatctagcaattgtactaaaccgccaattgagcgcctaataaaagcggttagtctagtggatctcaggctggcctgaccaatggctatggcctttaatttcccctttcaaatgcacatttaatttaacggcgggtaattgccaatatagtaattggtcttcccatgcacttgccattttggaatttccattttcaatttaatggtaatgtatgtaattttactgcgcacactactagaataattatattctacaacactctaacccacccggttgaacaaactcgtcggtgaaaaaacaccgggg

SEQ ID NO: 247964 - DNA, 399 bp, Glycine max
agcttagttggcaacttactgagtgttttttgttttgtctctagttgctcggatagcaacttgttctgtgccaacaaagcgtccttgtgaggttagctccaataaactcttcttggtagaaatgtgggctcggtccctcaaaatggcaatgtcactagcagccatgctttcaattaactctcttgcttccccaggggtcttacccccatttgaagcaaccaaaagctgcttaaattgtgcgctcaacccatctatgaatatgtcgatctgtattgatattgaaaaaccatgaatgggagtcctccacaataaacctttgaatctttcaagcgccccactcaacgattcatctggaaaatgggggaaaaacaagatggcagctttgccttctgaatcttc

SEQ ID NO: 247965 - DNA, 397 bp, Glycine max
  unsure (1)..(397): unsure at all n locations
cttagcattcttcccattactaatcattttcttttntagtcatttggacttgtgtgtgataaaaaaaaataagttatgttaatgtcttatcagcttaaaatatgtttttttgaataaaatttatatgaatctataatatatttggcacacataattgacaaatcgattaaatgcttatcaatcaaatatttgacacatatattaaaaaatatttttaaataatgtgaaaaccatttaaataaattatcacaattaaaatttattcttaaatttagtagataaaatctaaatagtaattagtttactaaatttagttggataaaacgtattaagtttattaaatcaaatttgtgaaatcatctaattccacaatcaatattgaagtaaaacatataat

SEQ ID NO: 247966 - DNA, 389 bp, Glycine max
agcttgaagaagagcctgaattttttttgttttttacatgcttaactctctggagtggctttagtattggttattgcattgcgcgttgcatcttagtctctaatatttcatatatgtatcatgcatcatcatgtaggagtaagaagaaaagttctaaagctggaaaatctcttctaaagttaaagctctctattttaatcgattaccagttgatcgcaattgattacacaagagtttgtagcttgcagaaaagtctctcatatcggtttaatcgattacaagcttatcgtaaccgattacacaattatttttgagacaatgattgattttttaggagtctctgctttaatccattaccagtagatataatcgattacttctcttcttaa

SEQ ID NO: 247967 - DNA, 353 bp, Glycine max
gctgaacaggagagagaagggtttcttcgctcatcacgacacaaagggcccggagaatgaccggggcacgaacccggggacgcagggggggtgctattgcccacaaccaagcttgaacaaacccaacccaacccgggcataaacagacagagagaacctgtgaagtacctaagcaggcgagctcctggcagccaacagataaaaggaacaaagaccacaaagtaaggagacttgtgtggcggccggccacctgtgaaatttgaatgaaataagggaaatggcctctggaaaccattaccaaggcggggtaatcgaccacaaggcttaaaaacgaagacaggaggctaagacgg

SEQ ID NO: 247968 - DNA, 359 bp, Glycine max
gaaacaccatttcctagttaaccatgcattatgtaccatgttcaattattttggtttgttgttgtgtgtgttttttttttttttttagaaatgggtttatgatctcaacatggttggctcatggtgcctaacacatgcaactaagaatgtagtgtgaagttgcacgcttccccttttttgtttttgtttgtagaggaaaacccacggatgagcaaacatgaaaacaaatggtttgcaattttgcagatcaaaaagtttgttgaacgcctatgcttgatgatgccatgactcatgcaaaatgtgaggctgtaatatgataacacacaaatgcatgaacgatatgttcattatgatgccat

SEQ ID NO: 247969 - DNA, 394 bp, Glycine max
acttaagcaccgcagctgcagcttacaaatgattcgcattctctgttttatgaagtgagctcattcttagcttcccaaatgtgaggtggaacactctgtaaaaattgttaatcatagaaaatcagatctcatcaattgatttatgcaataatacaaatttaaagttggacttatatgctaagacaaagcattgttctgctctaatggatcaaatgataacatacaaattctacttttgataggaaattaagactaaatcgatactatatgtttgtcgaacatccttctaggatctttcaaaacccacgaagtaagagaaaaatcaagagcaacctcttttttcctctcaaaagatgccccaacctcgtgtacttagtgtggatagacatgctct

SEQ ID NO: 247970 - DNA, 345 bp, Glycine max
  unsure (1)..(345): unsure at all n locations
atagggagggtntgctgcccaaccaaaaaactcctatataaatctctgttaagggcctctctcatcataccttgaaacccctcagccactattgttaaaaagcaaagtgcaagaagatccccttggcccaagcctctagaagggacaaactcctttggggggcttccattatataaaactgagatggtggctgatttaaagcaaactgaaatccaatttctccatttaaggcagaaacccaatctcttcaacatatagtccaagataaacccaaaaactgagtcataagcttttcaaaggccactttaaaaatacatacaggctcttttctgtgaaaagcctcat

SEQ ID NO: 247971 - DNA, 425 bp, Glycine max
  unsure (1)..(425): unsure at all n locations
ggatctctaagtcacctgcggcatgcaagcttntatgtccttatggattggctttactattttattacttatgaatatgaatatctaaatttcttttttgtattaatgtacacaaatcaaattagaatgtgaacaccaaaattcccaaaccaaataatgagttgtataggcaattagttttatttgctcaagaatatttagtccgaggttttggtttttgtataggcaattagtagcctatggtcaagaatatttgttgtttccaaaatttgaagccataactttctggtcaactagtagcaaccctatcattgcactaaggctcatcctacattcatttgcataataatatatcagctctaaaagaaccactccaaaggagtacacatctgtcttatttgatacttttccattctcaacatact

SEQ ID NO: 247972 - DNA, 402 bp, Glycine max
agcttgtagaatggctagacatgatcttgtcatggtttggtttggctcaaagataaaagggatgccccacattatttccatgacacaaatgcaaaaatgatgatttggaaattttatgcaaaactggtcatgcatgcacctatgtggacactcaagtgtcaaatttttatggtcatgtgatgctagggctcaggattcatttcctctattttaaatcaacccaatgtttccaaaatatgttcttttatcaatttgtgcattcatccgagtccatttcgggcgtccggggaaaacttcacagcattcacccttcaggtgtatacacatttttttcaaaactagttatgatcaatgaattttttttaaagaaaagttggaaatcatctcttttcaaagcatgtc

SEQ ID NO: 247973 - DNA, 391 bp, Glycine max
agcttccacaacatccaagcgaatcatacttttatcagcgcaagctatcacagccaagcaaaacagagcagaggcagaaaactctgctcaacacatcaaccaaaatcacagcttttctcacttaaagaccccagtaacaattccttcgatccaattcgttaaccgttggatcgactccaaaatgttactggaagtctatagtgcataagcctacattgtgaccgttgggatcgactagcatacatccaggactcattctgtactactctttccacagccaaccacacacaagcattttttgcaccaagctaaaattctgctggccctattttgacagcaaaaatctgcataagtgccgattttgaaaatcacacttcctctcatccaatct

SEQ ID NO: 247974 - DNA, 368 bp, Glycine max
gctttttccactagtcattggagaacgcacatgaggttttaaaatgccaagcaaacttatgaagtcctgtttgcgctttaaagactaaactatttttcaacaaccccacgtttgctttctgcacctaccaatatacttgcacacccatactatttcagataaatttaaaaagttccttttcgctatccgatacaaaacacaaatgtgtaaaaccgttatagatatgtcattcgtatgcgtgcatataaattgcattgttgtttaatggctactaatatgaaaaggggataaaactaaattcgggctcctatgggatatatgattaattttccaacaatgcacgacactaataagacacttaaaaatac

SEQ ID NO: 247975 - DNA, 438 bp, Glycine max
  unsure (1)..(438): unsure at all n locations
ccgcgatccttaagtcacctgcggcatgctagctantaatttttttggaatcaaataaaaaattaaaaatagtctcatattataaaaattgttcaaatcatgtctcaatagaattaattgattgatctaatatgtataaaaaatactcaataggaaaagattcttcagatgaatatgtgatctcattactaatattttcatcaaaatgaggttttctttgaattttacgtttttcacaaaattttggctctatattcatttcgatagccattttttatgtggattctaaagtcaatgcaatcccgttttacctataatgttttttaaataagtgataaaaccttttaaatgatctataacatcatctatatgcatatctttcgattgtagaatcttgctaatagaattgacagtaaacaaaatatcataccaaatatt

SEQ ID NO: 247976 - DNA, 395 bp, Glycine max
tgatgtctgctgagcttgatgtgatattcctttatatgattctaaactgtcgtttgtatcaagggtatttcattggtgaattctctttttgagaggaatgatcttttgtgtgacaagatggtaacaaattgtggattagaccatagtcttatatgagtaactgatttgtgttctttataacatgccaccattaatgtgctgttcaatttggcatgacttatttatttttgcttcatctatcaatttcagtcagttgatttgatatctttaaaacctcacaagtcatcattaacatgattcttcttcatgtgaggctgaagccatccttgctaaagcaaaagcaacagctgagggactagctgttgtgtcaaaatccctaaaagaaagtggaggac

SEQ ID NO: 247977 - DNA, 400 bp, Glycine max
gctgcagctggattactttgtgacgagaatctgttcttttactgtgttcaaaagcctctaagcctgtgttgaaaatgaagctggtatctaaattgtctgtctaaaaaaaaatagaggtggtgaattcacctctaaggagtttacagaattatgcactaatcaaggtatctctatgcaattgacggctgcctacaccccacaacagaaaggagtccccgaacgccaaaaccgaactatcatgaatgttgtacgagcagtattacacgagaagcaagttcccaaatcgttctggcccgaagcggttcggtggtgtgtacacctattgttctggccccaagcggttcggtggttgttacacgtctcaaacacaaactcaacctcccgggtatgatcaacaaac

SEQ ID NO: 247978 - DNA, 364 bp, Glycine max
cgcccggacttaagcacctgggctgcagcttttgaaagacacaactcttcaatctattttgaaaaggcacgaagggcctatatatatgtgtgtctgactttgaaaagcaattgagagatattctaagagaacttcattgtcaaatgctctctcaacaatgtagaagcaagcttcatgatgatgaatcaagattgattcaaggagttttgatgataacaaaaagccccagagaatgagttcatgattgagtcaagaacacttcacgaatcaagagaaatttaatttcaagattcaagaatcaagtttcaagaatcaagaatcaagaataatcaagatcaagattcaagacttaagattcaagaat

SEQ ID NO: 247979 - DNA, 405 bp, Glycine max
agcttttaactgaatgtgcaacattccttatgatttttaaatggtgtaatcgattacaatatattggtaatcgattaccagtgtatctgaacgttgaaattcaaattcaagtgtgaagagtcacatcttttcataaaatgcattgtgtaatcgattacatgattatggtaatcgattactagtgacaagttttgaataaaaggtcaagagatgtaactcttgagatgattttctcaaggttataactcttccaatggttttcttgaccagacatgaagagtctataaaagcaagaccttgacttacattcaaacaacttttggaaaatcttttaaaacaatattcttgaacaacttttgagagacctttaaacctttactacctttacaattctttcctactcat

SEQ ID NO: 247980 - DNA, 409 bp, Glycine max
agcttgaagaggaggataaagctcttttgtctttatattccttaccaaaatcctttgaacattttaaggatgcaatcctttatggcaaagatcaagacattatcctagaagaagtccaaacctcaataaggaccaaaaagatgcaaaaatagcaagactccaaatctgaggataatggtgaaagcctgaatatttcaagggggaggagtgaaaagaagggaccaagaggaaagaagtccagatcaaggtcaagggattcaaagaatggccagaaaacaaagttcaaatgcttcaattgtcacaaaactggtcatttcaaaaaggactgcctaaacaagactaaaaagggatatatggactctgctggcatagttgaaacctctgaaggttatgagagagcaggtgcttt

SEQ ID NO: 247981 - DNA, 384 bp, Glycine max
tgccccacagagcccctcggaacttgttccggccgtgctcttccccttgtggtgcccctctcatggggtagcccagttgccttctaacaagaacgggattgtaactaatgcaaccccttttccccatcaagggaacattcggaaatcctccgcacgaaataagaaccccgggtcttccttcttttcatcgagggaaccagttgacaaacgctccttctttgtttgctaaaagccgcgcccaattttcccctcctttctctgtgcatgaacagtggctttctaacaagcaagcatgcctcacctcttggcgaaaaaggtgtgaaacccaccatacataaagagccggagtataacaaacaatcctcatactgctcttctcacatc

SEQ ID NO: 247982 - DNA, 222 bp, Glycine max
cccctcggagagccgctacagatacatgagggaaaaccaccatagaaggaccacacggaagatcaaagagccaaccaccatagaaggcccacaagcaagcgaccatcacctagagaaggcaaaaagaaccacaaaccgccccacccaaaatgcatgcgcataccagaactagcgtggccccaggatgaacgtaaaagaatcaagaccactagagaaggacaa

SEQ ID NO: 247983 - DNA, 393 bp, Glycine max
agcttgttatccaaggctcatcttggtggtgaagctccttcttccatggcttattccctagtggatggcgccttctctcacctattctcctttgtcttccgctacatctccatggtggaaaatcaccattgaaggacctcattgaatatcaaagatccagcctccataaaagccccacaagcaagcttccatcacctagagagggcatcaacaaccacatttgtttttcccattttgcatgcctttttcttaacttgctttgccctatgatgtacttaagtgattcatgatcactatgaatgacaaattctttggaaacaaggtaatgttcccaagtttggagggttcttattaaagtataaagctctttatcataggtggggtagttgaagg

SEQ ID NO: 247984 - DNA, 402 bp, Glycine max
agcttatccccttccttgaaccctgcatatctgcaaaactatttccactcatttcctatcttcactgaatttggtcttttttttgcaaatagcagcttacacttatgtacccttccataataatttgttaggggtagttcattgatcttcttttgacaaaaaaatgcagcaaaatctttatgcatgttttgcagaatttgaaagtagacaaaacaaatacacatcaaaatggttgttgtgaaagttagtacagtatatgaaaatgcataaagttaaggaagtagacctacaattttgctagtggtagctgaatctttagtcaaagtttgtctgaattctatcatctaagcaacaccaaattgtttgaactaaactcaaattcactaaattgcttaatgtgga

SEQ ID NO: 247985 - DNA, 357 bp, Glycine max
tctgattttaggcttaaataggtgaccttgttcgtgctcgtgcgcttagcgcacttatggactacttaacgcagattagtgaatttcggcttaacgcgtgcctttctcgcttagcggatgaactgaagcggtgcgcttaatgagatgaagtggtgcgcttaacgaacctgtacagatcatcttcttccagagtcttcctcgcgcttagcccatgagtgttgcgcttaacggatgctcgctaagccagcacattggcttaagggatgctcgcttagccagtagattggcttagcgagaaggtgaaaaacaaaacttttcaaagcttgcctaattaacctaaaattgagagaaaatgat

SEQ ID NO: 247986 - DNA, 233 bp, Glycine max
gggggaggaaggggggaaaaagggaaaaaaagaggaaagggagggagggaagggaagaaagggaggggagaggagaaaggggggaagaggggaaaagggaggaaatgggggaaaaggagaaaaaggaaaaagaatagagagggagggagaagggagaagggagggaaaaaggggaggaaggaagaaaggggaaaaagggcggaggagaagaaagagagagagaggaaaaaaag

SEQ ID NO: 247987 - DNA, 51 bp, Glycine max
taaaggaagaatttttttttttagggaagaagggtggataactgccgcaac

SEQ ID NO: 247988 - DNA, 213 bp, Glycine max
  unsure (1)..(213): unsure at all n locations
ggggaagaaaaaccccccccccggganaacaaaagagagacaaagagaaaaaaaaaaagaaaaagaaaaacaaagaaagaaaggaaaagaagaaagacaaaaaagaaaaaaaaaagcgaaaaaaaaaaaaaaaaagaaagggaaagggcgaaacaaagagaagaaaaagaagggaaaaaaagggaagaagaagaaaaaaagacaaaaaaaaaa

SEQ ID NO: 247989 - DNA, 342 bp, Glycine max
  unsure (1)..(342): unsure at all n locations
ctctttcgattcataatattttagtttaactattttcttttttattatcctttacaggctgctgagaaaatgaagattacagccactgaactgtgcaaattacaaattgcagatggtgttatacctgtaagaagctactattaattatgtttttttctcttaaatcttattcacataaatggaatttatcatcttattggtttaaatatgagtatataggtcataagtatttcagtgttcagggaaatttgtcaaacctttaactcctggtgtggatttgttctaattttatcctttcttgtataatatacacatttgaaattacagatngataacaatatt

SEQ ID NO: 247990 - DNA, 365 bp, Glycine max
acaagaaaaagaaataaattgcacttaaagcttcatcttttattcaagaagaaagtgacaaagaggacttgaatgaaatagaagaagatgatgattctcggctctttgtgaaaagattcaataattttctaaggaacacaggaaatcaaagaagaacaaacttcaattcaaagaagaaaggagaatattcctcttttgttccaaagtgctatgaatgtaatcaaccaggacacttgagatctgattgtcctatctttaaaagaagaatgaaaaatccgacaagagaaatttcacagaaaagaaagaaatacatcacttgggaagataatgacatggattcatcaagtgattcagaaaatgaaatc

SEQ ID NO: 247991 - DNA, 436 bp, Glycine max
  unsure (1)..(436): unsure at all n locations
ggaccgcatttcacatgattatgttactcagagagaactcagagaggtcatggatgaaatcctgaagctgaaacagtaaaagccagtttctttatgcttaatttgttgttaatgactttgttggttattaattattctgttgagtctgagtcattattgggtacttttcctgttgtacagagagatgcgagatttggcatcaaagaagggagaggaggaggcattggcccttgttactactcctagcttctgtttgtctagtttgaattcggatgactgtggttccttggctccaacgcaggtgaagcatagaagtagtagtgttaaatattaattgttaatgtgaatagaaaatggaaataggaccggttttaattacttttgnacgtatattgcaggagatttatgcagagttggtgagtaagaaggcttaact

SEQ ID NO: 247992 - DNA, 472 bp, Glycine max
  unsure (1)..(472): unsure at all n locations
gcatgcaagcttacgcatcaagatttggattgtgtatatactgcccacctctccatacatcttcaggacttagtattattggtttgaggatggcagctnggccaacacatatgtaagaatacttgctgtaaatttcaacccttgagccaggactgaagaggtacatttcatcaaatccagttcttccaactgacactgaatttcttctaccctgataaaatcaaatattttggaagagatcatgcaaataattaaaaagaaactacaatgatgtttacctatgtaacattgatgcaaaaggtgttagctgtgtgtgcttacatttaatgagatacgttactaaatttaagcaagaaaattaatgaagatatgcagctggtgatgattttgaaatcctgaaagtgaaatctgtaaaggaatccctactcaataaaatcagagtccaagaaaaagcaacttcaaaattgaacat

SEQ ID NO: 247993 - DNA, 380 bp, Glycine max
cactgcagcatgcaagctggcttgtggagctttattggacgctttatctctgagcttcaatgagatccttcaatggtgcatttccaccatggagatgcagcggaagacaaaggagaagaggtgagaggaggcgccatccactacggaataagccatggaagaaggagtttctccaccaagagagtgtcttggataataagcttggagagggcgcttcaatgtgggataagaaagagagagagaaagagagagggggaagcatgaaattgaaggaagaaaagagggagagaagtgaaccttgaagggtgtctcactaaactctcattcatcaaagttacaacaaggggttcacatgcttctatttatagactagggaactt

SEQ ID NO: 247994 - DNA, 368 bp, Glycine max
agcttgaatgggatttccccagttatattattactataaagttccatgtcattgataaaaaaaatgtttatagttgggcagataaaaaagtctaataaatgactaataatggcataacacatttgtaccaattctatcgcaggggttaaactaaaatctaatagaagtcgttatgttaaaaattgaactgcacaaaatgtcaaggtatatgtgctatgcaaaagtgcaggtctgcaggatcaaatcaattgtagaactataagtaaatggaatgaaagcaatgtggttccactatgacaaggagagtaacacaaatcctctaaaaatctcatgatgaatggaaataaaaagaaataatgccattgatg

SEQ ID NO: 247995 - DNA, 445 bp, Glycine max
  unsure (1)..(445): unsure at all n locations
agcttgcttaaaattttatactgctttttgtttgtcggttagtctggtatcttatgccattaaaaagcactcttccacttgattagtttgtgttantttaggttgttgcgttattatattaaactccatttgttaattgttggatcagtctctctgagatgaagcttgtagtgaaagatagaacagcaaaaaagactgacaaactgacatgaataatgtactattgttgtaggcttttcaaggaatcaccgcatcctgatgaanagcagaggcaacaactcagcaaccaacttggccttgctccaaggcaagttaagttttggttccaaaatcgtcgaacccaaatcaaggtatctaaattcatttacctaattattactcaagaatatatgcaaacttaatctatttaattagaaattatgtaagcattatgcaatattatttg

SEQ ID NO: 247996 - DNA, 446 bp, Glycine max
  unsure (1)..(446): unsure at all n locations
agcttataagaacaaaattgccttaatcatttccaaatatgcatgtgaattaagacgcatcaacaagaatcaagccaaggctattgtgcaagcaatcaatggggcaaaacacaccaaatgattataatgatggatggctcaaattctcacaaaggtaaaatcatcactttcaaattaagctttcaaaactatcatgacatgtagagaagaatcaaggatttcaagtcacaaaatgtcaagaacttttattttcaaaacaattacccatttcttgaacatatcctataattcaaagaanaacatgcaaagtcgtacgtgcacacgaaattgacccaaaatattaaactgaaaatccaacgaaactaacaacattaacaaattaacacaactaacaaattaacaaaaccaacaaaactagcaaaaccaaagaacacttccnccccccc

SEQ ID NO: 247997 - DNA, 339 bp, Glycine max
  unsure (1)..(339): unsure at all n locations
agactttagctatgtgtgttgatgtcggctacactgatagagctggcgaaattttttatgaaatgaaaagttctgggacttgccagcctgacagttggaccattttatccttgattaccatttattcccgcagtggtaaagtttcagaggtggaagggatgttgaatgaaatgatccaatctggatttcaacctacaanttttgttatgacatcactcatccggtgctatggaaaagcaaagcgaactgatgatgttgtgaagatatttaaacagctcctggatttgggcattgttccaaatgatcacttctgctgttgccttttaaatgttctgactc

SEQ ID NO: 247998 - DNA, 296 bp, Glycine max
acacgctcgccacaacttattaaccattggatcttctcgagaatttgggctgcaacctcacaagacaattgtccatgatcagaccattgcgatctttgagaagatgtctggagtgtgccagaagcttctattcccgagagcattttttatttaagcatattcagccttcgctttcgtgcagcttaggaaaaaccgcatttcatcttctttctttgttcccaagccattgttagagtgtcaagaactttttccatccccacagccaccttaggcaccacagaccatcattgttttca

SEQ ID NO: 247999 - DNA, 434 bp, Glycine max
agcttgctggactatgattgtttaaaaatctcgccttctatcatggctgcatcagttatatttcttgccaaggttattatctggcctgaagtgcatccttgggtaagtatattatattcttgataatgatatattcttcttctttttaaaagaataagctcttagccatgtttcaaagcactcaaagttgagcacctattgcagacttctttgtctgaatgcttgggttatgaaccagctgattgaaaagaatgtgtcctcatcttgcatgacttgtatttgtcaagaaaggcagcctccttaaaagctgttagggagaaatacaaccaacacaaagggaatatttctgcatcttttttgactgcatatacatcaattctccttgtgacaaattgagtaactacatatcttcggacagttcaaatatgtggaaa

SEQ ID NO: 248000 - DNA, 431 bp, Glycine max
  unsure (1)..(431): unsure at all n locations
tgccgcatgcaacttgctgcaccatacgcactaatttttatgtttatttataaaccatttgagtcatcaactgcaactaaaactctcacactcttcaaatgaaagttccctcaaacatgggagatcagatacatcaggtatctgtgttaaaaatttgcagttgtcaaacttcacaactgttaaatgcccgaacttctgcaaaggaaaaaaaaaaattaattcaataagaaccacatgaataaatctaaagtgactttattaattcacgggattcaggaaacagtctctttgcatatgcaagggtaaggctgcgtacaacatctctcccccataccttcgcatagcgaagagcctgtgggctacgacagttattaattcccgggatgagganaatatcactctctaaacttgccttcgatgggccatggaac

SEQ ID NO: 248001 - DNA, 440 bp, Glycine max
agctttgtggatatggtcttcaccgacatttgatcaatgttgtatgaaaagaggcaaacttaatcatcttgcttggacgaatgagaaaactgccggcaatgaagagggtgagaatgagggagaagcccatgctgtgactgccattcctatacaaccaagtttcccaccaacccaacaatgtcattattcagccaataacaaaccttctccttacccaccacccagttatccacaaaggccatccctaaatcaaccacaaagcctgtctaccgcacttcctatcacaaacaccacctttaggacgaaccaaaacaccaactgaggaaggaattttgcagcaaagagcctgtagaattcaccccaattttggtgtcgtatgctaacttactcccttatgctggacaagcggcctcacatatcttaagaatgtggggttgaat

SEQ ID NO: 248002 - DNA, 416 bp, Glycine max
  unsure (1)..(416): unsure at all n locations
agcttctggaaggagatcaactngatgttttgtgcctcttgatggtggcagtccatgaggaatctccttaggaaagacattttttaattcctgcaataagggttgaacactaggagaaatagaaatgaattatcagtagaaattttactgtctttgcaatactgtagattgagtggatcatgagcaagtaacactttcctcacttcactcgcctctgcaaaataattaaattttctctcatgtgtatcactcttttcctcgggtgtatcactcttctttttcatattcctttgcggngcctcactattttctttctcttgttctctctnttctctcattctgaattggccatcacacacttctctaggggatagaggtttaagagtaaacgaggaagatttggctattcgtctgta

SEQ ID NO: 248003 - DNA, 329 bp, Glycine max
  unsure (1)..(329): unsure at all n locations
agaggatgctccaatggaggaattgttngagggattatatagagagaggggggagcacgaaatttaaggaatagaaagggagagaagttgaactttgagttgtgtctcaatggactctcattcatcaaagttacaacaagtgttacacatgcttctatatatagactaagtagcttccttaagaagctttcttgagaaaacttccttgagaagcttctttgagaaaacttccttgagaagctagagcttagctacacacacccttctcataactaagctcacctccttgagaagcttccttaagaagattccttaagaagctagagctt

SEQ ID NO: 248004 - DNA, 237 bp, Glycine max
gatggccttcaccttgtcaggcgccacctctattcctttctggcttaagataaagccgaacagttttttggacttgacccccaaatacacttggaaggattcaatcttagccagcacttataatgacttcgaatacttcccgcaagtagacgagatgctcctcctctgttttagacttggcgatcatacatccacgttaatatcaattctttgtgcaccaaacatggaataatgcta

SEQ ID NO: 248005 - DNA, 396 bp, Glycine max
  unsure (1)..(396): unsure at all n locations
agcttccctgctggaactgttggacattgtttcttgtgtggtggtcgaagcaacacaaagngagatgcaggcacgcagcttaccaaaaaatatgttaaccaacgaataatgggtccatcgggtattcttagggagggttgcctctcattatgctctaaataccatgttacgggaaaagaagatgagacttgtgaagtccatgtgtctaaactacatgacagcgattaacttatgaccaaaagtaataaatacatagattaaatctatcctaattactgtaattacatgaaaatattattagcttatacattttatctagatgccatttaatagtgttaaagagaaagaacanagacatattgagacctgaaccatgtctgaatacagcatgggact

SEQ ID NO: 248006 - DNA, 382 bp, Glycine max
  unsure (1)..(382): unsure at all n locations
agcgtggcctatgattatttatagcatgttctgagtgatactncgcgctaagcctggaattgcccgctaagcgagagttgcacgctaagcctggattgcacgttgagcaaattgcttaattcttccgactcttcttcaattctgtctcttccacattattttgtcaattttcctcttaaacacttcaatacttcttcttttgacttctgagaataaaatattacacagatgttaattttttcgtaatttcattaaaaacaatactaaagtgaagaaactattattattattaaccaaaaataacgatcaatgtagctcaaatctcagagttatcagtggttaatatgacaattctatttaataattgataatcagtaaaatt

SEQ ID NO: 248007 - DNA, 444 bp, Glycine max
  unsure (1)..(444): unsure at all n locations
tgcttatgcgcatatttttttactaacgttttntcgcacaatacatgctatataactaagaaaagtgcacccatatacagtcaaggcagcttcgttacctagattatttacatgtactttcaaggagtatttgtttcttacatcatacacacctccttggctgaatttacatacatgcatactcaaaacattttggggtaccaaaaattgtacatgtgcacatcttggtatttctaatacctatacatacacaaactccatgatgaattttgactacctacacantaaggcgctacatttcatgcccttattaagtttttgctacctaaagccgcatgcaaatataagtatattttctctttgctgaccttaaattgtattcaaattaaaaggttatattattttgttatgaatttttttacatacatgcactatatttaatat

SEQ ID NO: 248008 - DNA, 393 bp, Glycine max
agcttctattggacctttatcatgcaactttctcctctttcaaaaccatgctatgtgctcgcgactggtccctctctttctttcgcaacttgagttcactattgctaccccatagagctccgcgaaatttgttccggccatactcttccttgcgagccctcttggtctcttgttcgagggctcttgcggtaattgcattttcttcccgtaacccggcacactccttccgaacgtttgtagcggacaacttgaacctctccttggcaaggtatgcctttcctaactcgcttttcgagagcttggacttcttcgtccttttccggtgcttcaaaactctctctgctgacgacttttaactgggcgagccaatctaaacctcgtatatgaactttc

SEQ ID NO: 248009 - DNA, 354 bp, Glycine max
  unsure (1)..(354): unsure at all n locations
ataattaatagggtaaaatacgttttcagtccccaactcccggtacttttactagttntagtcctcaaacttcaactatgatcaatttggtctcctgaactttactaacggtaaaaccgtgggacaaaacccactgttttcttctaagagggaccgaattaatcaaagntaaaatacggagtctaataccaacttttaccgagaataatacaggcactaaaaacatattttaactcaagtaacacgtaaccatagaatgaacgagacaagatacttgggagcgcgggcatcgacgccgctggttttgaccgagaatatgtctttgggggcgaatttgttcttggcgcgttgtac

SEQ ID NO: 248010 - DNA, 377 bp, Glycine max
  unsure (1)..(377): unsure at all n locations
gcctcaaagagatccaggaaggatattgctgtcgaatgaactaattccgctcctgagtatgacagtcaccgctttatgagcgctgtacaccancagcgcttcgacgccatcaagggatggtcatttctccgggagcgacgcgtccagctcagggacgacgagtatacggatttccaggaagagataagtcgccggcggtgggcatcactggttacccccatggccaagttcaatccagaaatagtcctcgaattttatgccaatgcttggccaacagaggagggcgtgcgggatatgaggtcctgggtgaagggtcagtggatcccgttcgatgcagatgctatcggccagctcctgngatatcctttagtgttgga

SEQ ID NO: 248011 - DNA, 432 bp, Glycine max
  unsure (1)..(432): unsure at all n locations
agcttggccactagccactgagatactatatacctttatttatattaggaaacttcatataagagattttatctctgagaacatatgttactcttacaaatataagtcgcgcaaaagtaccacttcaattatattgtgaaccggagacagcgtcgtttttgtgacatggttggcaatctttctaatgcattagtggcacaataattggagagaaacacatcaaatcatatcatataccatgaaataataatggagagagcagcatcatatcatacacgtagataacaattatgccgcaaaggaaagaggggtggcttgtaccatcctcncaatttctcacaatccttcccttcttctccactttttcgtttgcctaatttctgtgttcaattgaaggatacaactctaattaagggagacaaacagtaactt

SEQ ID NO: 248012 - DNA, 377 bp, Glycine max
  unsure (1)..(377): unsure at all n locations
catgcanattgtattacctgaactgccgcctttatttaaaggttttctntgttacacgcgaggaatagtaaggtnttgcttctcagccggaaattaaagaattcacagttgtttcaatcatatataaaacaagcaccttatgccatagaaaattgagccatattccattaataagatttcgacaaaattaaaagaaagaaaatgtggcttaataaagggttatgaaacaaggcggaagttaaacagcctaagagggagccctatgccccaatacgaagaacagagttgacctcagcaaccggtccccggagcatataaattttgggtcgaacaacctaaaatcaagttcaccctagcttcattgaatatcacctact

SEQ ID NO: 248013 - DNA, 407 bp, Glycine max
  unsure (1)..(407): unsure at all n locations
agctataaccncatcgtctctcacagtctttagatgngggagccaatccaatccttgtgtccggactctcagccacttatgatagccgccgatgctcccattactgcttccgctaagctctatgtcctttcttcacaccgcattacatgccttgtgaattccttaaagtaccctcgcattggggtcactgaaacaccgtgtgaaaggcgtgatgctttcgtctgatggcactcctctcatggggtagccaagctgtcttatggcgaggacgggattataattaatacaacccttgttccatcaagggaacatttggacatccttcgcatgaagatagaattctgattcttccttccttctagcgagggaacaaattatcagacgctcctccatgctagccaagagtt

SEQ ID NO: 248014 - DNA, 358 bp, Glycine max
agctttggaaagtggttgttttcaccttttctctaagccaatctgctggcttagtgagcgtctgctaagcgcaacactcatgggctaagcgtgaggaagactctggaagaagatgagttgtacaggttcactaagtgcaccgcttcatctcactaagtgcaccgcttcagtccatccgctaagcgagaaaggcacgcgctaagccaaaattcactaatgtgcgctcagcggtccataattgcgctaagcgcaagagcatgaacaaggccacctatttaagcctgaaatcaaattttagagaggaagtttggactgggatttagagctttccatgtctagagattctagagagagaaag

SEQ ID NO: 248015 - DNA, 443 bp, Glycine max
  unsure (1)..(443): unsure at all n locations
agcttgtattcataatttctttttgattttttcttcccacggatttcggggaattgatccttctgtnttgtgccatttcctcttttaataaacttttcatttattgaaaagatattcaactgggaaaaataaataaaatctagaagcttgttgtgatgggaaatttcaacacaaaattcctgttccatgattgcaccaagagaatcaattcaagttagaaacaagtaaatatatgaatagttatgtatgtttcttatggatgcttgcatggtggagacagcttagggattttaggattacatgttatagaagttggaaggaaagaaacattaggattcgtggaagtaataagtaaaatactgaggggacagaggacttggacgagaactttcttatgcgtttcttgtctcanaagggtatatgtgagaagacatgcatctgtc

SEQ ID NO: 248016 - DNA, 446 bp, Glycine max
agcttcggaagaaagtgatgaggtacaagtcctaaaggcagagcttgaaagagcccgagtagtcgaagagaagttcaagtccatagccatcaaagtctgaaaagagtatgatgaactaagggacgtcaatatggccaccgctgatgccttggaatgagaaaccaagaaggcccaaaaggaagaacacgtgccagcaaagttttgaggggctttatagggcagcaatagtgagctcaagctccgaagaggtgaaaggaatcatcacgggtcaaaggcatgatcttgaaggacgagctaaaggcttaccttaggtcgaaaagaaaattgtcctaacagttaagcgagactgaagggaatatgtgggccgtcatcgatgagtgcaaagagaagctaaatctagcggcgactcacgagcaaaggctagaggatgagtacgccaagatatc

SEQ ID NO: 248017 - DNA, 401 bp, Glycine max
  unsure (1)..(401): unsure at all n locations
agctttctcttggatgtgacatatggtntttgtgggatgtgatcaatccagaatccagtgaaccgcaaccagaagatggagtgtctagagataatgcttctgaggtgagtatcttttatgtttttggtagttgatttgacttgtttgtttaaggaaataggtgatgcttggataaggggtatgtggactacaaattccagatggaagtggttgtatagagaaatcacgttgtttatggaattgtgtagcatcaatgtgaaggctaaatcactgaatggggagtgaactggcttcacgactgctactgctgtcttagacaggcttcttaaattcctgcttataaggaatggcttggtataatcgtccctggtatctaccattatcaagtatcccttgtattg

SEQ ID NO: 248018 - DNA, 414 bp, Glycine max
agcttggtgtcaattcagaccttggttagtgataggtaggagttagttggttaacattcttttattttctgttaagctgtaatgtagatagaactgtgagatatagtaatcttctccttttggataaaatagctctctctcgttcaacatctcttttcttctatcttcaaggtcaagcttggtgttctgggtgatagtgcaattgacacaggccataacagtggtatcaagagattttgtttgttaacaatcctagaagggtcttgcgtggttccagtgtgggtctaggcattgcaatgatgaatgggaacgggccttcgacacacctatcggttcttgacgggaagaactatgatgcatggtgcattcaaatgaaagtcatcttcgggatgcaggatgttcttgacatcgtaa

SEQ ID NO: 248019 - DNA, 463 bp, Glycine max
catgcaagcttgtgaacgacttattcagacgtctattatccatagatctgccatggtattattatgtatttgataccctcaaaatttacctccatctaattactataacctacaacttacaagcacgagaacaaattcatattgtttggggctgaggttctaccatttaattgtctttcaacaattttgcatatatagcgtattcggttttatatttcaatgtgattttttcacatttatactaagacgtttatcgttatagtttttaaaacgatttcttaatttctaaggtgtttcccaactcacatttaataattggatgccattaattgaataagtaagacaatcctggaatttattagaaccaatagcttacaagtcaaaagcacgaagaaataattcatattattggagtctcaggttctaagctgcgtttcaacaattttattagcttatttgattt

SEQ ID NO: 248020 - DNA, 437 bp, Glycine max
  unsure (1)..(437): unsure at all n locations
gcttgtaatcgattacacacatactgttattgtttccagatgagnntttcagataacattctcaacagtcacatatttttatctgattctcaagtggccatcaaaggcttatatatatgtgactagagacacgaattttataagagttttgaagaacaaaaaggtcttatcctcttaacaagcaaaattggtttatcctcttacaaattccttggccaaaacacttgtgattcaataaggaattatttgagtgctcaaatttttcaatctatctctttcaagagagatttctttttctcttcttctttattctaaaaagggattaagagaccgagggtctcttgttgtgaaaggattctaaacacaaaggaaggattgtccttgtgtgtttagaacttgtaaaaggaatttacaagatagtggaactctcaagcggg

SEQ ID NO: 248021 - DNA, 434 bp, Glycine max
  unsure (1)..(434): unsure at all n locations
tgcaagcttctgttttcaatttcgagagtctcgatattttacggngctctatccgacatccgagttaaaagttattgtcattngattattctaagagcttcccttttcaattacgagaatctcgatatattacgggacacaatcggacacccgagttaaaagttattgtcgtttgaattttctcagagcttctattttcaattacgagagtctcgatatattacgggactcaatcagacatccgagtaaaaagttattgtcgtctgaattttctcagagcttctgttttcaattacgagcgtcctgatatattacgggactcaatcggacatccgagtcaaaagttattgtcgtttgaattggctctgagcctctggtttcaattacgagcatctcgatataatacgggacacaatcggacatccgaatcaaaa

SEQ ID NO: 248022 - DNA, 464 bp, Glycine max
  unsure (1)..(464): unsure at all n locations
agctntntcggagccatttcctgcgaagactaacattngaattattagttaagaaggaatatgccactagaaaacaaaaatgggatgcaacccctttttgacttggagcaaactcgtacacacatttccttgaagaaacacatttatggaagtgtatatgtgcaaaagattatgctatctacgttaatgtataagtatattcaaaacattcctgctacctacatccgtatgcataatttgaacacaaacaaatatatgcacgctcaaggtattttgccaaaaaaaaaattacatatatccatatacaaagcgttttgctaccaaatattacatatgtgtatactttgagtattaacatacaaaccaatataggtatcctgctaaccaaatgaatatatcaacaaggtagttgccagagtaattaccaaagggcgttctgatcacctatcatgcaacatatacat

SEQ ID NO: 248023 - DNA, 418 bp, Glycine max
  unsure (1)..(418): unsure at all n locations
gcttgaagcactccaccatctcctcctctgtttgtcatttctgacgcatcatcatatgaagcagctgcccctcctgattcaccagctgcagaaacaactgacccccctgtttccccaattggaggaattgttgatctttctgattcgtcatctggagaagcggttgctctcaccgattccccagcttaaacacttttgacattgttgattcttgatgttactttttgctttttggttttttattattttaattatggttttaatatagcatttattttatgtttgtatacactgctagttntatttatgaatagtaagtttgctctttctgaagcattttgaatagtttaactttgtttttatgacatggcagtgaaacacttttattcttttgtgaaaatgggtgtatgtctttatt

SEQ ID NO: 248024 - DNA, 334 bp, Glycine max
  unsure (1)..(334): unsure at all n locations
attactagnggagaatttcagaaaattatttccaagggtcacatctgttcaattgtgttttacatggccatcaaaggtctatttatatgtgacttggaatacgaatttgctcagagtttttcagaacaaaaaggtcttatcctcttaaaaagaaaaatcatcttatcctcttcaaaattccttggccaatacacttgcaattcaataaggaattatttgagtgctcaaattgttcaatctatctctttcaagagagatttcttctcttcattctatttctcaaaagggattaagagatcgagggtctcttgttgtaaagaaatctgaacacaaa

SEQ ID NO: 248025 - DNA, 448 bp, Glycine max
  unsure (1)..(448): unsure at all n locations
agcttggaagaaagactatctatcttgcatctggactcaatgaacatggtatataaacacacttctaatcacatttagagataaattaatttaatcttttaaatcataattagtcacaaaataaagttgcatgcagtaaaacttgggcaaaaaataactgatacaatgaaaggaaaattaagcctaggagctagaattcttcatgttggaggagtgaaaaaagttttcatgcaactattccgtgtaaaagatggagagaagttactaaaagcgtcttagtgctacctatcaaccacacttcgggaagcatacctcatgcatgtgccacaacgaagcatgccaaagagctccatgagcccatcttgcctaanattcaatagccacctaanaattagacatacccaattgaattcaagaggtagaaataaattgaaatattcatcggatg

SEQ ID NO: 248026 - DNA, 440 bp, Glycine max
  unsure (1)..(440): unsure at all n locations
agcttgtataggcctctctataaactgcttttgatgcaaactatgctgcaatattgggagttattggccatgaggttctaattatcatatattagaatttttaaagagttacttttctaaaactaaatttctttatgttttcttgattgtgactagagcttatttcttgtctgttatgcagtatttccacaactggactggcaacaggtggtgttacataccattgatcatgttatgctttcaaactaaggattttacatgcttttattcccactcgtataatgttctanaattttttctacctagttatagttcacttttggatttctatttgacatatcatacacctgagtttggcagcacattttgttgttggatgtctatatttctcccgtgccatgggtatgttaaaattgaatttacctttatttattatatca

SEQ ID NO: 248027 - DNA, 366 bp, Glycine max
agcttaactacatagactcttctaataacttagctcaccttcttgagaatagaagctagagcttaactacacacaacccctataatagctaaactcacccccatggcaaaataaatgaaaatacaaaaaagtccctactacaaagactactcaaaatgccctgaaatacaaggataaaaccttatactagtagaatggataaaatacaaggccaaaatgaaagaaaaacctattctaatatttacaaagaagagtggacccaaccttggcccatgggctcagaaatctaccctgaggttcatgagaaccccagggccttctttagcagctctagcccaatcctcttggagtcttctatccaatacc

SEQ ID NO: 248028 - DNA, 383 bp, Glycine max
acctgcggcatgcaagcttttgagcaattcaaatggtcataacttttcactctgatgtccgattcaggcgcataatatatcgagacgcttgaaattgaacaacggaagctctcgtgaaattcaaatggtcataactttcaactcggaggtccgattcaggcgcataatatatcgagatgcacgaaattgaacaacggaagttctcgagaaattcaaatgatcataacttttctcacgtaggttagatttaggcgcataatatatcgagacgcttgaaattgaacaacggaagctctcgaaaaattcaaatggtcataacttttcactcggaggtccgattcaggcgcataatatatcaagacgcccgaaattgaacaacggaa

SEQ ID NO: 248029 - DNA, 360 bp, Glycine max
aactggccttgggcttggaggccacgctcaacaaagaactttccacacctactgtacgttgatttgaccaatgctgttatgggaatgttgcaacaatcctttaaagccttattgatacattctgagaggttaattgttatgtggccatatcgacgtccttctctatcataagtcatcgcccatttttcctttgaaatgcgatcaattcatgttgctatggctggactcagttcacgaaatttttctaaattttgataaaaaaaatgtgcttgcaaggagtgtaggcttgctaaaattagttatgaataaaaattttaagtatatatgaaagttaaattaacgtgaccatcaaatatgaaa

SEQ ID NO: 248030 - DNA, 440 bp, Glycine max
  unsure (1)..(440): unsure at all n locations
agcttcatgattcaacattatttagtgtgtttttttcccactngttgaattaaatggactttatctaaatgaaattgatcgaattctacgccctggtggatattggattttatctgggccaccaatccggtggaagaaacattggaaaggatgggaaagaacaaaggaggatttgaatgaagagcaaaccaaaattgagaatgtagccaaaagcctgtgctggaacaagctagtggagaaggatgatatagccatttggcagaaagccaagaaccatttggattgcaaagccaaccgtaagctctctcacaatcggcctctctgcaggcacagagtaaccctgacaaggcctggnatgtgcttcattntcccattgtcctttttatttcattcaaggaaatattttccatctgtttaaaattttggttaaatgaacatgt

SEQ ID NO: 248031 - DNA, 414 bp, Glycine max
  unsure (1)..(414): unsure at all n locations
tgcaagcttgtaatcgattaccagaggacatttttatattattatttccaagagtcacaacttttcaaatggcttttacatggccatcaaaggtctatttatatgtgacttggaacacaaatttgctcaaaatttttcagaacaaaaaggttttatcctctcaaaaagcaaaatcttcttatcctcttaagattccttggccaatacacttgcaattcaataaggatttatttgagtgctcaaattgttcaatctatctctttcaagagagatttcttcttctcttcactctaattctcaaaaagggattaagagaccgagggtctcttgttgtaaagaaatctgaacacaaaggaaggattgtccttgtgtggttcaaaacttgtaaagggattntacaagatagtggaactc

SEQ ID NO: 248032 - DNA, 450 bp, Glycine max
  unsure (1)..(450): unsure at all n locations
tgcggcatgcaagcttgcacctgacgccatggnnggctagtgttacagtccgtgatgatatgaccacgttgcttacaatagttgcaaaacttcttggtgcaatggcgagcaatatgaccaaattgcttgcacggataacattgaacttgtcgggtatcacaacctttgcctttatcctgngcagtataggcaacagcaatagcttctgaaacagaagagtcacgggacaaagctgcttgagtgagaagacgttgttcttcccaaagcagttcgccaacacatacacattcagagagggaagtgggtggcgatttaagagagcagcacgtacagcttcaaattcaggtctaagcttcatgaggaattagtcccgtttagtgacctcataaacctcttgaacagaagccaaagaagttttcaaacagcagcatgaagtatatcagagtgttc

SEQ ID NO: 248033 - DNA, 408 bp, Glycine max
  unsure (1)..(408): unsure at all n locations
ttttgctctttaatcaaaagagaatgcacaaacgtgaataatatttaataaattaatagatacgagggagaagagaaggtgagtgaagtataaagaagagtaacaagttatttagctctttccccagctgctcttgaaaaagggctccggggaagggatttgaagtgaaaaggtaacttgcaacaaagctcttattaataagtgaaaggatgatgagtcacaggctgaacaagatgccgcaaaagatggaaatctcatcgcgatcatgattcggctacgataatgattcagctgatgggataagggattttaagcaaagatataaaatggctaaancgttcaaggaatatcaagaaatcaggaagagataactattctaaaacaacgagtacaaatgcagagaaatct

SEQ ID NO: 248034 - DNA, 240 bp, Glycine max
caacagatacaaccctggatggaggaatcaccctaaccttaagatgggtcagcccttagcaacaacaacagcagcctggtcctttctttcaaaatggtggtggcccaaacagaccattaaattctccaccaatccaacaacaacaacaactccagaaacaaccaacagttgaggcccctccacaaccttccctcgaaaaacttgtgaggcatatgactatgcagaacatgcagtttcagc

SEQ ID NO: 248035 - DNA, 447 bp, Glycine max
  unsure (1)..(447): unsure at all n locations
agcttaggttcaacaagcgaaattggtctttatagctatatatatagataaaactaagagacattatcacaccaggcacaccctctgttgaaaattggttttcttgctttaaaagaggaacagcgtatgaataaataaattccatgcgaagatgatgaaataaagaactataacaatcaaaattacctaaactccgtttgatgattccttctgaagtagatccctctcagtttcctcaatgctttcaaatttacgtcttttaattctgcttacattcataaattatagtatataacacagtgaaatttgaccaaaaacaagaagtaaaaataacaaactcatagcattatctctcagaatagaatgacaactgcaacataaatgcaccanaagcatgaaccctaanatattagtctccctctcttgggtttatgcaaattgtgtcac

SEQ ID NO: 248036 - DNA, 378 bp, Glycine max
  unsure (1)..(378): unsure at all n locations
agcttgaaccttgaatcttgattcttgattcttgaagngncttttattcaatcttgatcatcttgatcatcttaaacatctttgaacatcttgaactcattctttgattatcatgaattgacctttgagctttttttcatcccctttgntatcatcaaaacatctttgaatcaatcttgattcatcatgaagctttgcttctacacaaaatccattgaaatattgtcccacttccactgtggtatctccaagggttgtaacttccctgaaggtctctgatgttctatcttagccttctggcaaagtaaacatgcatacacaaactcactaacctctctcttcatgttgggccaccaaaacatcaccttcaaatcctga

SEQ ID NO: 248037 - DNA, 445 bp, Glycine max
agcttgtttgagaagcttctatggaggctgaatctttgagcttcaattaggtccttcaatggtgattttcaaccatggagatgcggcggaagataaaggagaagaagtgagaggaggcgtcatccactaaggaatacgccatggaaggaggagcttcaccaccaagagagtgccttggataagaagcttagagaggaagcttcaatggaggaaaagaatgagagagagatgggggcatgaaattaaaggagaaaaagagggagagaagttgaactttgaagtatgcctcacaagtttcacattcatcaaatttatgacaagttttacacatgtttctatttattacctaggtcactaactaaatgaaagcctccttgataatcttccttgggaagcttccttgagaaacttccttgagaagttagaacttagctacacacacctt

SEQ ID NO: 248038 - DNA, 289 bp, Glycine max
tcacgtccacctgttaatatatcatcttgtaaaactgaagcagaggggtttacattatctacaatctcagctacgggttctcttatattagagccagccatttctttggaatcaatgcccatttggcatgtaccagcaatctcatccacattttcattttcttcaggaatgcagggaagggctaattttaaactcttacgctttcctgaactgcctaagtttgaattaattccatcccaacgagtttgaactgaagaagtgtactgacccttgcaattggttggcaatc

SEQ ID NO: 248039 - DNA, 359 bp, Glycine max
  unsure (1)..(359): unsure at all n locations
agcttaggntaccatacatctttcagctatatatatcacttgctagaaagaaagatcaatccgactatgaataaaatgtatatgaaattcccagttcttatggcaatggatgacctatacctttatgtaccaaatttctaaggcactggtatttaactctttcttaatgttaacctgcttagaaactgatattacacatgacttttcataacttcaactttgtaattttgtttgaggacattaagctttaaagttagtcagcaattaaattctcagggattntattttactgtccaactcctaaaaaatggttgtgcaaaggttcttgcattcttaaactgagattaaaaaaaatgtgt

SEQ ID NO: 248040 - DNA, 423 bp, Glycine max
  unsure (1)..(423): unsure at all n locations
agcgtattaaacatacattagctctactattttaatgttgttacggcttgtgaagatggttccaaaaaggagctacagaaagatagcctaaaactctcaaaggactttcctcttaccaggactactcttgcatctatggagtctttgtccctgccagtggtactgtggacaccttattctactttcagttntgagattggccatgaactttgcgtatgatggtttggttcttgtgctgggaacaggttcaacaagttgttctttctgctgatatgcaatgtgagaagtgccagaagagggttgctgacattcttactaagatgaatggtaagcctctattttacaccgagcgtggattagtatgttgcacatgcatgattgtgaaattcaaacattgttcattgattggttttggagctctat

SEQ ID NO: 248041 - DNA, 440 bp, Glycine max
  unsure (1)..(440): unsure at all n locations
agctntctcggtgccatcttctaggaaaacaaacatttggaaagtcagtttacaaggaagtgccattttaaagcaaagaccagcaacaacggcctacaactctttccgaatgtaaacctagagcaacttatacatgcatattcaaggcattttcgctacctaagaaatacatatacacatagtcaaggtatattactatttttgctacaaattaacaaggtattttgctaattaaatcaacaaggcattttgctacctaaattgataaagtatttttgctacctaatgcaacacacatacatttcatgaggcatttttgctacctacacgcaacatacatacatttacgaggcacttttgctacctaacatgcaatatatatacattntattaggcattttgctacctaacattcaacatatatacactntatgaggcag

SEQ ID NO: 248042 - DNA, 339 bp, Glycine max
agcttccagagagttcattccatgagaattctgcatactgaagattggttaggtttgcaatggccgaagggattgaaccaataagcttgttgtgagaaagattcctgtaccattccattgaaatgcacaaagaaaacaaataattagaaagttaaatgtagactcttaaacactatgagatttcactactaaaatagaaccaaggaaatttttttcaaacaaattatgttatgaagaataaagcatgaaagatgtcagctatgggagaggagcttacagaaatgttagctctgaacacttctcaatttgggctggaattctccctcctaaaagttcttt

SEQ ID NO: 248043 - DNA, 438 bp, Glycine max
agcttctgggtgatattgattattggtattaccctttaaaacctttatgtactgctcaacaggatacattcaccgtaaaaagttaggaccacacaatcaaatctccctcacgagatgaactattaagtgaacaattatgtcaaaaaatgatggaggaaaatacatctacatttgacaaaggaaaatggtagcctcattctccaaatcatccaattgtcgaggttcaataactttgctacagatagcattaaaagaaaagcacaaacgagttatcgctaccctaactttgtcaggcaagatactgcgaatagctacagtcaatagttgctgactgatacaaggctcttaatatttgaagagtatccttgtgggacttttagactccataaacattgacaaaaacttctcttctttgttggtgacattgtatgatatgct

SEQ ID NO: 248044 - DNA, 67 bp, Glycine max
cccgtgagcttttaggaagcttctcaactgtgcccctggacctggtatcacgacttccggcaacccc

SEQ ID NO: 248045 - DNA, 462 bp, Glycine max
agcttgcttctacataagcatctcttcatggcatcgtaatggacgtatcgttcctgcatttgtctcttatcatttcatgcattgcattttgcataagtcatttattcaccatgcatctgcatctaacatgttttttgtacaccttctattttcatgttcgctcatgcatgatccttgcattttcctctgcaaaacaaagaaagtcacaataaagctcaaacaatgcatcattcgcatacatccgtgcttttcattggttgcattgctcattgcattctttccaagaaaaccaaactttaatcattgttatcataagggaaaaacgcactttatgatacccttactgaacgcatgctaaagctggagtaatggctgaagtagacgaggtgcaatagggttgaaggccgacatggaggccatgaaagaagagatggccacaatgatgaagccatgatgagcatg

SEQ ID NO: 248046 - DNA, 365 bp, Glycine max
agtggatctcttgctcctacgtaccctccatcgaagaggaaatcagacctacgtaattctttcaaaaggggcgaatcaagtgattctttttacttgaaaaggggtcgtttaaggtgttggaccttaaaatgatccattttacttggtgagaaagctaagggcgtggacctctaaacgttttttcagtgatttttgcggacaaagctcgattttgtgagttgattttagccttagtttcacttttgtatttagtcaattcaatttaagaaagaaaaatcccaaagagaaacgtccgattgatttttttgttttattttactaaaagatattttttgattattatattattattttacctctttttt

SEQ ID NO: 248047 - DNA, 394 bp, Glycine max
  unsure (1)..(394): unsure at all n locations
ttccacaacgggggagaaccctaatactttccaacttgggttgagaattcatgtctcttggatgctgttgggggcatgttttgagggactgaggttcatgtaaggtggtcatgttgtgaatttggtgcatctgcgggggacttatgctctctgaccctatctcctccattttcacactccttgatggtctttgttgttttcagaaatgacactggtgagtggaacatgaaaacaacaagaagaaagctctggtngtacttccgatgactgacttcttgtttgagaattttatcttcaattcttagccattttttagattgatcagcgcgagaataatgttttcttgatttcaagggaatgtttggggtgccactgattataattaaaactcatc

SEQ ID NO: 248048 - DNA, 405 bp, Glycine max
agctttgaatgttcattattgcaacgagttcattaaaagaatcgaaatgctggaagtaaactaacaagggaaaggtaaattgcaaaatttaaaggagcagcgagttcattcgatcgaatgaaccatctaaaagacaggaattctaaagtaaaatgaaaaatgcattgcattcgaaatgtaaagtttacagaaacttaaaatggttcacaatcatacatttcccttgcgtactccgttctctctgcgctgggtactttgagtatataaggaatttgtagaaatgatttgcgaccccgaaatctgactaacaactgctatatatagacattttaaaaataaactgtcctaacggtcgaacactatcctaatgccaagtgtcctgctacgtacaccttgcatgcatat

SEQ ID NO: 248049 - DNA, 449 bp, Glycine max
  unsure (1)..(449): unsure at all n locations
agcttataagaacaatattgcctcantcattctcaaatatgcatgtgaatcagggnncntcnncaagaatcaagccaaagctattgtgcaagcaatcaatggggcaaaacacaccaaatgattatgatgatggatggctcaaattcttacaaaggtaaactcatcactttcaaattgagctttcaaaactatcatgacatgtagaggagaatcaaagatttcaagtcgcaaaatgtcaaaaacttttattttcaaaacaattaaccatttcttgaacatatcctataattcaaagaaaaacatgtaaagtcgtacatgaacacagaattgaaccaaaatattaaactagaaatccgacgaaactaacaacattaacaaattaacaaaaccgacataactagcaaaaccaaagaacactcccccccccccatacttaaacaacacattgt

SEQ ID NO: 248050 - DNA, 352 bp, Glycine max
  unsure (1)..(352): unsure at all n locations
agcttctacttatgttgtttggcgggcttttcttaccttcttgnctccaacgcgaactttgaccattgttcttccttcccgcaatgcttcttttcatgtctgcctgagtgggcttatagcctaaaccatacttcccacgattcccttgagtatttatcaggctagttatgccgccgtttgtttttcctaaacccatcccgggttcaaaaccgttccccaacataactcgggccatcattaccgctgcatcggacagacaaggttgcccaaagagggagtccacggaggaaatgctgaccacctcaaaagactggaaagcagtttctaacgattcttctgcggcttccacata

SEQ ID NO: 248051 - DNA, 329 bp, Glycine max
  unsure (1)..(329): unsure at all n locations
agcttngaaggggcgtattctcaccattttcttagcagaatactggtaatgtgtctactatcattgtcattattttttcgtcattgaggtgccacttgagctgccaggttctccacctttgggcgtattctttgaaagatccgtgcccccttttttgcacatattttgtaggtgcatcctatccgaagccattataccgacactgcctaacgaaggcaaccattaggtcctcccaggaatggactcaggaaggttccaagttagtgtaccaagtaacagctaccccagtaagactttcttggaaggaatgtatcaacgattcctcattt

SEQ ID NO: 248052 - DNA, 415 bp, Glycine max
  unsure (1)..(415): unsure at all n locations
agctngaaggcaaactggatgcattggtttacttggtaacccagcaggccttgaaccagaaatctgtacctgttgcaagggtctgtggtttgtgctcctctgctgaccaccatacagacctttgcccttccatgcagcaacctggagcaattgagcagcccgaagcttatgttgcaaacatttacaatagacctcctcaacctcagcagcaaaatcaaccacaacagaacaattacaacctctccagcaacagatacaaccctggatggaggaatcatcctaatctcagatggtctagccctcaacaacaacaacagcagcctgctccttccttccaaaatgttgctggcccaagcagaccatacattcctccaccaatccaacaacaacaacaacagccccagaaacagccaac

SEQ ID NO: 248053 - DNA, 350 bp, Glycine max
  unsure (1)..(350): unsure at all n locations
agcttctcctatatttatctaatcttccgttgattntatgaaattatacacgaatatatctttcatattggtgttttcaggattcctagtgaggatgcagagtctcaactcttaaaaggcagaaaaaaatgcagtggaagcttttgagacagcccaggctatgggtgttattatgtttgacttgccaaattgccctaagaaacattgtcaactagagacatcctctgtcattgaaaaccttcagtttgggaatacacttgttttattaccctttaatatagagcaacctcttaatgcaagggtttttggtggaaagggattatccattgaagtgaaaaaaatgaagatgg

SEQ ID NO: 248054 - DNA, 384 bp, Glycine max
  unsure (1)..(384): unsure at all n locations
gctntgaagaaataggttatgaaccttactcatattcattcttattctttctataaaaagctatctataaattcttataaagttttgaaaagctctcaaaacactttgattatcttaagagaatgtactaagtgttgagattgtatatccgtttacaagagttagttattgagaaacacaaacaacaaatctttctgatttgtatagagccaccagtggcttggtagaacaaagaataccaggttgattcaagcttgaggtagagcttgatttgttagaactagaagtgactatgaaagaagacttgtaacctgtgataagttagtggaatttagtggtttgcaaagaactagacgtagtctcagtggcagaggcaaaccaatg

SEQ ID NO: 248055 - DNA, 452 bp, Glycine max
  unsure (1)..(452): unsure at all n locations
agctttanacattaaagaacagattaggattttgctttaatattatgaaaccgnanacaacacgattacaacagcttctaataataaattaaggataaacttcaatgagagatttgaatccacatatgggaataattttgtagttgctgaatcctgcctcgtaaattaatttctcccactctttcttttctctttcttttccattaaacatagtcaacatcactaaatcatagtctagcttcaattcagtcatttcgcgatcatcacctacttcatcaattgctatgtctataattataacctttccttctttccctttccctgaaatagcttctgtgcaggtcttcaatatcttcacagagagttcatcgttccaatcatgcagaacccactgcaacacaattgagaattccaactttaagtaatatattcacaccaacaataaattaata

SEQ ID NO: 248056 - DNA, 387 bp, Glycine max
tgcaagctaacatgctgagccctcaatcttgacatgtactctgattccgagatctaatcctcatcctctcccttcctcaacttccttaatctgttaaccttggctatgttcactgtggcattttcttcttcatcatccacccacacaggtttcttctgcaaagcgcggtcatcatcatcatgacttccctcagacaagtcagcatcttcttcccggtaaaccgtgagaacgctatccgcagaacggtcagtgaagaacaaatcagaaaccttttcagcagccttcggaggttcaacttcatcctcctcctttccaaactcaagtggggaatataaagaaccaaacaaaaagttctcaagcttcttcatctctttcacttgttccatt

SEQ ID NO: 248057 - DNA, 395 bp, Glycine max
  unsure (1)..(395): unsure at all n locations
catgcaagcttcagcgggggcttaatgggccatatctactatcatcaatggcttaatatgccgcagtactaagacttaccttcagcatgagctgacagaatccatttgatcaagtgcactaagatctgtagctncattttcatagaaaatgctgataaatgtgtcaatcaagccttccacaagaatgccaagcgttttatccaagagaggcttaccaccagcaaaaacctatgacaaaatatgatgaaacaattatttgtatagtgctgatcagatattggttaaactgtaaacaaaaatgagaagtttaagaagtttctaaagcggggactgctttgactaaaatgctctatgcatcaggttcaggttctttattcacacctatgaattattta

SEQ ID NO: 248058 - DNA, 303 bp, Glycine max
  unsure (1)..(303): unsure at all n locations
gggaaaaattgtttccatgaataaaattcaagccgagccgcttccgaaacgtttgcgtaacgttttcgagaggaatttcgcgaaagttccaccgttctttcaaaatcatccgtcgttcttcgttttctctaacttcaacgggtaagtacctcacacccagcttttctaattcattctatgtacccatggtggtccacatttcgtttcatgtatttttattctcngttccatctactttttatactccccttttgacgggcttaagccatttactttaagtcatttctcgcttaatggaaaaat

SEQ ID NO: 248059 - DNA, 338 bp, Glycine max
agatgagaaagatatcttacaccattacgttaatgggagaggtcacttttaacctcataaagaagactcattcccattacttttcttattttatcactcttagaaagtggattatagaagaagcttacccacatcagcccctgaatctaatcccctgggcctaacccatccaaccctaagatatatgcttaggatgtttcctactgcaacctcacatgtatgtaacggaacatttgtcttccttataagaattggtggtttagaccaccaatatgaagtgacatagatatgatcaaaacacgctgtaattgttgggtttcatccctgatctgatgata

SEQ ID NO: 248060 - DNA, 447 bp, Glycine max
agcttttccttgagctttaagctatagcctttaggttgttcaccatgttgatcatgttgcttcccctatctctaacaatgttaagcaacatcgtagttcaaggttaagcttcctatcccctttttcctccataacctaattacacaaatattttaaattctagaaaacaaaatttcaatgtcagaaacaataactaaggacaaaactcataatgatttaaagagcccattctgaatgcatgctttttgtgaaaaattgcaaatagagaagaaaatcgagttaaacaaaagtacaaggatggaaagtgagagaaagaagagtagagtgtaaaagaacttatgctttgcaaaaacctgaaaatcaagttttgaggaaaaataggttctaagaaaaaacattgtggctattctcccattgctttaatttggactcactttgcacttcaat

SEQ ID NO: 248061 - DNA, 399 bp, Glycine max
agcttgagctcactgttgatgccccacatttctccttggaacttgtttcgggcccattcttcctttcgggccctctttgtttcccatttcaaagcttcggttgtggccacattgacgtccctcagcttgttgcactctttcccgaccttgatggccgtcgtcttgaacttttccttgaccgcttgcgccctttcaagtttcacctttaaggcttgcacctcttcgctctcctcaggggtttcaacctcttcctcacttgagatctttagcttcgggagccaagttatctcttgtgttctagccttcagccacttgtgatagccactgatgaccccattgctgcatcccctaagctccttatcctttctttgcaccgcacttcatgcttttcggacactt

SEQ ID NO: 248062 - DNA, 390 bp, Glycine max
  unsure (1)..(390): unsure at all n locations
atgcaagctggcattgtgttggagtgtacatcctctctttaagtatntgatgaagagaaatattttcaaatagaaacaaacttatacaaataattgattcccagatttctaaagatgtagaaaaaagtattaaaaaaaacacaaaacattgtttagaatttttaacgtgtacattattttatatatcatttgcttaaaaaatattatacttgtattatttgggtcatttttttgtattaaataggtaaaaaattctactcatgtaaaacacaaacttttgtaagttttgttatttgaaataaaaaaatttattgcgtcccatatctcatttaatgtttggctcttgatattgtagtttaaaaaaaaatcatcggtttttggataatactt

SEQ ID NO: 248063 - DNA, 434 bp, Glycine max
  unsure (1)..(434): unsure at all n locations
tgcggcatgcaagcttcttcaactcttcatcactgccaatgatcttcaccatgtaaacatagggctcacgcctagctctaatgttaaattcatgtttcattctctggaaaatctcccggccatctttgacaagtccagcatgacaacaggcacataggagagaagagaatgtggcttcatcaggtaccaatcctttctccagcatcttatcaaacatcctgaaagcctccgaagcacatccatgcaagccaaaacccaaaattactgaattaaaagaaacaatattccgttctggcattaccctgaaaacacaaattcccaagtgcaagaaaccacactntgaatacatgtctacaagagcagaggagaccctgacatccaatttcaatccatgccgaagagcataaccatgtacctcacatccgagtcctaca

SEQ ID NO: 248064 - DNA, 317 bp, Glycine max
  unsure (1)..(317): unsure at all n locations
agctttgagaataattgccaacagtcacatcttttcattnggtttttaaatggccatcaaagacctataaataagtgacttgggcacaaattttcttctgagttttcccaattcaaaaaaggcataatcctctcaaacaaaaatctctaatcttcaaaaattccttggccaaacacttgtgttattcaataagtaattgagtgcttcattgtaacatctgtctctttcaagagagatcatttcttcttcttcttcttacttcttaaaaaaggctaagagactgtgagtctcttgttgtaaagcatctgaacacaaag

SEQ ID NO: 248065 - DNA, 414 bp, Glycine max
gcaagctttgcaagagagccagcatagccaaagtcttggtggacttaatggtggcgaaaaaatgcatcctgatttcttgcagaaaaacagttttgagatacatgatggtatatttgacagtctgaaggataatcagggaatcttaccttatgtgcacgagctttctgatatttctgtttatggcaatatgctaaaaggtcttgattcttctcagtattgtagttttgtgccaccaacattacctaagtgtaagcgtcttaaagagtcaacaataccatttatcgattcctgtgatatgaaaaaatatgatttatattcatttgatcaaattcgagacaataattctaataagattgcacaatcatttggaatgcaagcaccccttgatccttggccctcctcgcacagctcaat

SEQ ID NO: 248066 - DNA, 460 bp, Glycine max
agcttataagaacaaaattgccttaatcatttctaaatatgcatgtgaattatgacgcatcaacaagaatcaagccaaggctattgtgcaagcaatcaatggggcaaaacacaccaaatgattataataatggatggctcaaattctcacaaaggtaaaatcatcactttcaaattgagctttcaaaactatcatgacatgtagagaagaatcaaggatttcaagtcacaaaatgtcaagaacttttattttcaaaacaattacccatttcttgaacatatcctataattcaaagaaaaacatgcaaagtcgtacgtgcacatgaaattgacccaaaatattaaactgaaaatccgacgaaactaacaacattaacaaattaacacaactaacaaattaacaaaaccaacaaaactagcaaaaccaaagaacactttccccccatacttaaacaacacat

SEQ ID NO: 248067 - DNA, 448 bp, Glycine max
  unsure (1)..(448): unsure at all n locations
catgcaagctntttattctaatcttgaaattcaagatagtaccttgatttcataagtttatgggataaagatggtcattgaccaatccctcttctatgatttgactcaattgtctagcgaaggtgtaccatttgaaggtactttagatgatgattggaaatttgatttttccatgcatgatgcccgccggttggtttgcaccaaccaagcggatatgaccggaaggcttcttgccggtttattggctcttgaaaacagatccaagacgagttctatgaatttgtcgaaagagtcaaagttaatgtccttttctttgactggtttcatgcttatacctttagaaaggatatagattacccttggaaacaagacatcataggtgatccaacaacaaatgtgataacaaattggcaaactaaggatggtgagttaatccaatcggagttac

SEQ ID NO: 248068 - DNA, 295 bp, Glycine max
attaaggcgcataatatatcgagacgctcgaaattaaacaatggaagcgcttgagcaattaatatgatcctaacttttcactcggaagaccgattaaggcgcataatatatcgagacgctcgaaattgaacaagagaagctctcgagaaattcaaatggtcattacttttcactcggaggtccgaatcaagcgcataatatatctagacgctagaaattgaacaacggaagctgtcgagaaattcatatggtcataactatcaactcggaggtccgattcaggtgcattatatat

SEQ ID NO: 248069 - DNA, 89 bp, Glycine max
cggttcgggggaataaactgtccatcaaggtaaagatcatgctgctatcccttcctaaagaatcccttctgttctttagaaaatgactt

SEQ ID NO: 248070 - DNA, 430 bp, Glycine max
  unsure (1)..(430): unsure at all n locations
agctngacaacaaggtgaaagttcatatcctaactaatgaaggaccacaatctttgtgcttactaacacttgtccttttactataaccatttgtatattgtgattgtgttgaagatagaaaagaacattccattttcaggaattctaatgataaggaagttggaggaagacagaagaatgcagcttgttaaattatgtgcttacaagaaaaaagcaaaagtatggaatttttttaccattgtaagcttcaataatctcttgaaattttgcagtaacagcactatcacctccgtgcttgtcaggatgccatttctatcaaatgtatagaaccaatgtgtacacggtagtaaatcaaacttgtagaaaagaaaattctcagttgaaaattggctactataaaaaggtaggtaccnccaacgcgagtctctgt

SEQ ID NO: 248071 - DNA, 388 bp, Glycine max
agcttttaccagaaaggaatgtggtggtctactatacagtgtttgatgagttcaagggggaactcgagagatgccactgggatgaagagttgactgattttgttgacgacaacattgatgttgccattgtgaaggaattctatgcaaacctctctgaccccgaggacatctcacctaagcaggtgagggtgagaggtcatctaattaagtttgatgaggatactctcatttgatgaggatactctcaacacattcttgaagacccctgttgttgtggaagagggggaaacactttgtgcatattccagatttgcactcctgaggccagaccctcaggagttagctgttaagctctgtatcccatggaggggattcaagcttaatgctg

SEQ ID NO: 248072 - DNA, 434 bp, Glycine max
  unsure (1)..(434): unsure at all n locations
agctngggtgatgttgcgcgtactgatgggtaccatgaggtgtttgctggggtttgacccatgcgggcgttgaagagacggcatgggcatctccttccttcctttttgcccctgttgccccgattcttttggcgttcacgtttgtggaggaaacgtaatcaaactttcctctcttcaatcccacctcgattctttccccggcaaacaccagatccgcaaagctggacggcatgtaacccactagcttctcatagtagaacactggcagagtgtctaccatcatggtgatcatctctctctcaaccatgggaggagctacttgtgccgccaaatccctccatcgctgcgcatattctttanaggtttcaccctctttcttgacatattctgcagttgagtacggcccggagccatatcagaattgtactgatact

SEQ ID NO: 248073 - DNA, 385 bp, Glycine max
gacatgagaaacaatcaagcataatgttacttccttcactaaagcgaggatccatctccacacatattttatcaatagcaacataaaaaatctttgcacggtaatgatgaagaatagagatagtcctcccttctgctcttgaacgaccctgaaccggtatttcgtcatccatatttggtaccggaatacttttagctacacaaaatccttggacatcggcaaaaaaattattccagccactctctctcattgtgcccaaccgagctttgacaacatcaactaattccatggcattcacaatattaagatcttttctttgcaatacattagaaagctcgtttgtgataccaaacaactttaacattaacctcaaaataaaagcaaa

SEQ ID NO: 248074 - DNA, 369 bp, Glycine max
agcttggagatgaaataatgaatataatttataggggtgacagagcggagtcttcatttgagattagacataacccagagttccattctctgaatcgttttgggctcgaagacgaacttgggctcaaacaattgcaggtccagtaagaaaggcacatgggactcctccattttcgctgctagagacaaacatgccactgataacagctgaaacgcccacccaccactttgttgctgccagatattaattattaaaataataataaaaaactactgtgtctcactttttttcctcaaaagcatgacattttacggggggaaaagtaagagagagaagaagggtaccggaagagagcatcgagagaggaaa

SEQ ID NO: 248075 - DNA, 448 bp, Glycine max
  unsure (1)..(448): unsure at all n locations
agcttttgaatgaattaccgggtagggttttgtctggtcancccaactcctaccgcggacaaaaaataaaaaaaatccgccattttctgcctcgccgccatatcctccatgactgccatggctatggcggccgccatctgcaacccaccacgccacaagtatatattaatataaaataatcacaataatatcaaacatatcattaagtaaataaaaattatatataacaataaaaatatatactcattgatttatatgaactacatgtatacctatattctaaacatatttcaactaagttactaacatcaagaaaatgactaattacgatatgaatacagcgctagttaatttctttaaatgattttagccaattcaattatccaaccatccgtacacatattgaattcatgacaagaaatcacccatgtgaaataaaatataaagc

SEQ ID NO: 248076 - DNA, 379 bp, Glycine max
atctccaatcatctttcctccttctccattccactttcattaatcttcatgaagcaaaagactccattgatgaagaagatccaaggcctacaagctctacatggagctacattatgtggtatcaagagcatcttcatctacgtgatgttcttttgcttcctctatctttcgttcgaccaattcactttaatttcttcgtcttcatcgacatctccatgtatctcctccattgttttgtgggtgggtgctgtttagagtatattaaaaaaaataaaccgattaaatcttagatctacacttgttcttgcatttctatggatcaaattttataaatctactattgaatcatgtttctgtggtgattttcggttctataatt

SEQ ID NO: 248077 - DNA, 396 bp, Glycine max
ctcctctaatgactatggcatcatttctggcgctaaactgctgggagttggaagccatcttctcaattaaatttctggcttcagcaggagtcatgtctccaagggctccaccactgccagcatctatcatacttctctccatattactgagtccttcataaaaatattggagaagaagctgttctgaaatctgatggtgggggcaactggcacatagtttcttaaactgggggtgacgggaactccataggactggcagaggcccgtgatcagcgctggaaaccctagggccctattggacttatctgggtccacaaggtgcctggtgggcgccatacctgcagacaaataaatgacattagcaatcacctgggccacgtgggcgctcatacgtgt

SEQ ID NO: 248078 - DNA, 400 bp, Glycine max
tggtaccatttagttgctggaggactttttgagggcatgtgtattacaacaaaaggggagttgagagagttttctaccatttgcacggctccctatttaagtattttgcgtgttttcgatgaatgtatatcgtgaaaaacgaccttcatttgttataataaaattaatggagtttttcacttaaaaaccaaaatgttacgtttgagagttagtgatatcgtagcggcgaggtggatcattacaaatatgttcacaaagcctatttcgaagaagtaagttcatgcattgtctggatctacttaatgtagagtgctgaatatgatttgagttacttgtaattcataaatgttataaacctagaattccaagctccttataaaggagacaataactaattggt

SEQ ID NO: 248079 - DNA, 348 bp, Glycine max
ttcacccatctcctctcaatgagctggtgaaagaaaaatgtggcctttacctggggcgaaaaacaagagcaagccttgtctttgctctaagaagacctctactaaggcacccgttctaccttttcctgacttttctaaaacttttgagctagaatgcgacgcctctggagtgggagttggagctgtattgttacaaggagggcactctattggttatttaagaaaaactttatagtgccccctaactaccccactatgataagagctcatgccttaataagaccctccaactcggaacataccttgttccaagaattgtcttcatagtgatcatcatacttagtacat

SEQ ID NO: 248080 - DNA, 419 bp, Glycine max
ctcggcggcagtgagcgcatgctctatttaatcggcaaaggcgcatgatccatgtttgaaacgccagtgctctgttggacttctccgggtacactatgtgtctaagaagcgtgatccctcgaaattgaatataatgcttgagatcaacgtgaccacatggacactcacctgggtcaggatggcataaactacctagcacttccgcaaaaggaggtcagaattaatgtcgctggggagaatttttctgagcaacaacgacatccaaatctgtggtagggtagtcatgctaatacacatgatctgcacgcgtctacctgctacgctccacgcatagtcttgccccgagacacatagtcgctagctgatgcgtctctcgccgagccccgacgcctatctcctactctgactgaactcacagc

SEQ ID NO: 248081 - DNA, 429 bp, Glycine max
ctgccagcttctgcacaccgtcgggagcgaacttgttttttatcatgtactctcaccatttccattctttgcctataactccaccagacccgatctagacaaagtaagcacaacttctggacttggattggatattgcaatctgcaagaagaataagctcaagttggctggtggggacattgtaaacctgtagcgattatttcaagaattctaacggcagttgaaacttcacaatcttattctacctgaatgtcccgtaatttgtactcctgatacaagtctttcaaagcctgaacagtactagaatctatgtatgtcacagctgcagtcatcagaagtcagaattattatcattatccctttataatttagtatgaacaattgagcggaaacacattcacaacttcataccatgtggtcatgtgatca

SEQ ID NO: 248082 - DNA, 417 bp, Glycine max
  unsure (1)..(417): unsure at all n locations
gagtattaatactatcggaaaaacaaaattatatattgcaaagttgccaatattactatagtaataactctcttcacgatatagtaagactaggtttaagattacgatttattttaaaaactttttttgtaagtatttctacgaaaataaaataatatacattaatttgtttctcttagttatattaccttacacaactcaacttttttaaaaaagaaatagataaaagatttcttctacaaatattgaaatgcacaacttgattttaataatttatggtgagaaaattatttctttttctatttatcttcggtctctacggagaaatntatcaaatacaatttacctacgtacatttaattgtcttgaaacacatgcaagtactatgtttcagacaagcaaataacacaatgggtt

SEQ ID NO: 248083 - DNA, 343 bp, Glycine max
  unsure (1)..(343): unsure at all n locations
ctccacgaggacgaagaatgtgctcctcccaccactctccgtgaggtttccattatgcgaatgctctctcgcgatccccatgtcgttaggttaatggatgtcacacaacgtcaaaacaacgaagggaagacagtgctctacttggtatttgagtacatggacaccgatcctcaaaaattcatacgctctttccgtcaatctggagacaccattcctcnccatatcatcaaagtaattctttctatctgtccatctatattcaatattcgcttcttctctgtcatctttttctgcacattggttgcagagcttgatgtaccagctttgcaacggcgttgctttc

SEQ ID NO: 248084 - DNA, 400 bp, Glycine max
acccaatgaaaatactaagtatttattacctatacttaacaaaacatacctatatcactacaaaataaccataaattgggagagcttgatacaatttatacaagtttcatacacaaaagttagtcattttcaccgactaacaactcccccaaatttacaattttgcttgtcctcaagcaaaaagagaatagctcacttgtcctcaagtgacaatgacatgcagtgactatgtacaaaggtgtatgcaacaaaagttactgattgcatgataaagggatggagtaaaatgccctcatcacttgtctttacaaggtatgcacgtatccaaagagaagaataaaatgtaacctgaacaacaagatggagttacgcataacacaaatggcaaggaaagtagctt

SEQ ID NO: 248085 - DNA, 290 bp, Glycine max
ggggcaaaacacaccaaatgagtataatgatggacggctcatatcctcacagacgcaaaaccatcacctctcaaattcgagctttcaaaactatcatgacatgtaaagaagaacaaggatctcagtcacaacacgccagaacttttatattcaaaaccactacccattctccgaacatctcttgtaattcaaagaaaaacatgcaaagccgacccgcacatgaaattgacccacaaaattaaactgaaaatccgacgaaactaacaaccttaaccaattaacacaactaa

SEQ ID NO: 248086 - DNA, 343 bp, Glycine max
  unsure (1)..(343): unsure at all n locations
ttatttacatgtacttccaaggtgtatttgttacttacatcacacacatctccttggctaaatttacatacatgcatactcaaagcattttggggtaccaaaaattgcacatgtgcacatcttggtatttctaatacctatacatacacaaacttcatgatgaatattgactatctacacaataaagtgctacatttcatgctctcttcaagtttntgctacctaaagccgcatgcaaattcaagtatattttcctttgctgactaaaattgtattacaagggatatattctttttgtaatgtattttctttacataacatgcaacatatttatatatatata

SEQ ID NO: 248087 - DNA, 386 bp, Glycine max
agcttgtacaaatataagaaacatcttcttttatcttggtgattcttgactccatcctattaaatcgcatgtccactcgtaactccaaagtatcaaacctttcaccaacaaaggtttgaagaccatccaacctatccaaaatcttttgaagaagagaggaatcttctccaccatgtccttcttcatcaacaggtcgagcaccctttttcacccaagagccatcatgctcttttttataaccaaaagatgcaatgacagcagcacctattagaaaggatctcttgattggaacataacgttcacaatcaagagggacgctatagtgttgaatgaagacggtgactagatgtggatatggcaatgaagcattaatcgccatgccttat

SEQ ID NO: 248088 - DNA, 285 bp, Glycine max
cccaacagaggggctccaccacgggaacgcctcacacctaacattacacgaggtgcacaaagcaccaatgcggggagtgcctcaaacggcccacaaggcacgggaacacgtcgaaacaaaggacaatgaacacaaggggagtagcaacgggcccatcggccgcaaccgcacgtggccgaaagcccacacacacgaacaggatcgcatcccaccatgaggaccaccaagggggtggaggccgaaactccagaagaaaacgaacaggtacacgccctcaaaacaaac

SEQ ID NO: 248089 - DNA, 311 bp, Glycine max
aattaactacttcataggaaggctaataatacaacccgtagccctattcttttgaatataaacttgtgaccccaaataaaccgttatcaatactagaaagaatatgttatacaaccgaactgctaacaattttcttttttctgatcgatcgcggctaatacttatacatcattcaattcgtaactagcatcgttcctattaatctcccgacaaacagataaaggcagcggctgcaagattcgaatgccacatcgacttattgcgcgcactaatatgatggaaacaaaaacttcgccatctcctgatggtag

SEQ ID NO: 248090 - DNA, 396 bp, Glycine max
  unsure (1)..(396): unsure at all n locations
ttttcaagacatgctattaaccaagaaaaatgcgcccatatacaatnaaggtagcttcattacctacaggatttacatgtacttccaaagtgtatgcgttatttacatcatacacgccatcttgtcaaaatatacacacatgcatactcaaagcatttcggggtaccaaaaattgcacatgcgcccatcttggtatttctaatatctatacatatacaaacctcatgatgaatctcgactacctacgcaataaggtgctacatattatgctctcttttttttttcaagcgtttgctacctaaagccatatgcaaaatcaagcatattctcctttgctgactaaaatcgtactcacactagaaggtatatatcttttggtatatgtctccttcacat

SEQ ID NO: 248091 - DNA, 374 bp, Glycine max
ttttagtaaaacactggtgatgtgtctactattattgttatcattttttctccatcattgagggaaacacttgggttgtcagatccctccacctttgggcgtattttgaaagatctgcgccctctttttgcacatgttctgtagttgcatcctatccgaaaccattatattgacactgtctaacgaaggcaaccattatgtccttccaagaatggactcgggaaggttccaagttagcgtaccaggtaacagctaccccagtaagactttcttggaagaaatgtatcaaccgctccttatcttttgcgtatgccccatctttcgacacacatctttagatggttcttgggcaagtaatccccttgtcttgtcaa

SEQ ID NO: 248092 - DNA, 154 bp, Glycine max
ctttgaagttgtataaaagactcttattcataaaccaacacaagtgtacacacgctcttattacacactagtagccccttgataacccgctgacaaactttcttgaaaacttgtttcacaaagttcttgaaagctgagcttaactcacccccct

SEQ ID NO: 248093 - DNA, 322 bp, Glycine max
gaacacaaatctatccgttattcttgcattctggtgttcatcctttgatctaataactgtgagcttggttaaaattggactgcctaacacgttttatatctgtaagatgctgtgacttactttttttcattgtcagaatactcacatgtaaagcattgtctgccacttttcatgtttttatataatcacctttggtaacatgttatgtttcttaattcggaacgaaacgagattcacatgaaagcttatgtgaatttttaaataccagatcaggaaaactatacgtgttcataattttgcaaagtacgttggtttttagaca

SEQ ID NO: 248094 - DNA, 341 bp, Glycine max
atgcccacaactcgaacatatgtatcacaaatttgaaccaatctatgaacgacgatgccattattttcattcgacgcacggtttcaacctccaccttacttgaatttgacaaacatgtgtgtgagactgacatgttgggattcaattctaaatgtttgagatttaatcaatcaacctaatctcatgataaaaaaaaaatctaatgccgaagcgcacctacattagccataatggaatcatgataaaagactgatgagaagatcggttgtctgatcttctcaacgtagagagtcattttcttcttatgacagtctaaagagacataagcaaactgcgttgtt

SEQ ID NO: 248095 - DNA, 338 bp, Glycine max
gcagaaacctagcaagactactcatcatatcttcccaaaccccatacccacgaaaattaaaggagaaagaagtccaccccaacctgaattttcgaagtcccactcgtagccacgcacttcacgactccaaaaatgcttttcttttgcgatttggagcagaaatgatggccaaagttgaaagcttgtgtggagcttcaatggtgaatgaagaagaaaaacgctacctgagagagggagagaaaaggcttctgaatttcttttttttggctgagtgaggagagagaacaactttctggtttttaaatagaaaggtttttctctttttctattatattatt

SEQ ID NO: 248096 - DNA, 275 bp, Glycine max
aacttctcaaggaagctttctcaagaaacctctctacacgaagctcacctatctataaatagaagcatgtgtaacacttgtcgccactttgatgaatgacagtcttatcacacacaactcaaagatcaacttctctccccctttctcttcttcaattatgagctccccactatctctgtctctctctctctccacccatcgaatcatcctctcccaacttcctatccaacgcacattcttggtagcgaacctcctcctcctatcgcttatatcct

SEQ ID NO: 248097 - DNA, 319 bp, Glycine max
atagaccaaattggagagattcccaatctgagatggaatcttccccatgaatccagtatgagagaggccgaggtgagtcaaggaggtctttgcacacaggacagaacgaattgcataccttcaaatcattgtagctcaagtcaagatatccaagctagagagattcccaatctggagggactgttcgttgccaaaacagaactaggtaagatccccaaattgaagattccatctgagaggaatttccccagaatcacttgaagaagctggtgagcaacgagtcttgtccaggaacaagaattccttcctcctaagaaat

SEQ ID NO: 248098 - DNA, 363 bp, Glycine max
cacaacccggtctaaagtaaacgaaagtgctacaacctactgtataacctatcagattgtcaactctcttttggaaattttgatccacatctgacaacgaacgatcaataacaagctactgagtggctacttccttcaaggtcactacctccatgtattccctcaaagaatattcctgttgaaccaaatgtgaatgtcatattctaccttaactttacaggacatcatatcttggaatggaaaacctgtaacacagtttggagaaacacaagtgatattgggacttgcggacttgatcctgagatgcaaaagtagagcaagaacagctaaatttcctttagctctaaaaggatagcacttcgt

SEQ ID NO: 248099 - DNA, 357 bp, Glycine max
  unsure (1)..(357): unsure at all n locations
attttgttactctccacagattcaacctactcatgttaggaaagcacggttggaatttgattaataacccacatactacaatttataaaattctcaaaaataaatattatccaaatgttggattctatgatgcacaactagggcataaaccaagctatacgtcgtatagtatttttgcttcacatatattggccgaggaaagcatttagtgcaaaagaagtgatggtagctctataaacgtttggactcaaccttgggttcgagcatcaacaagcccatatatcacttcatcaaccctgctcgatcttgatgatctcanagacagttcactcattcacaaccaacaacgatgttggc

SEQ ID NO: 248100 - DNA, 215 bp, Glycine max
  unsure (1)..(215): unsure at all n locations
caagccaacanactatgaatcgctctgatgacggattcatcgacgatggcgaacagtgaccatgatggtgttattgggatccctatcggtgtacggtctatgtacacgtcctatgtgcccattataactcctacgattactgtggctgcttattcaataagacgcacactgagaagaatcacacgacctcttatagtattactgttcaacgggtg

SEQ ID NO: 248101 - DNA, 404 bp, Glycine max
  unsure (1)..(404): unsure at all n locations
ttagcgccacccttgcgcttagcacgagtaagtggatttgaacttancgccaatcatgcgctaagcctggctgaagacaaccgctgcacttagcgcactgatctcgcgcttagcgcgcggccttgatattggtgctatgccagattctctgtcgcactaagcgcactgaagctacaattagcatggactacgcacttagcctaaaaatggtgagctgagcgcaactaccacttatagcacttcaagatttaacctcatttaacctgaaattgaacagatttcatcattaattccaatggaaagtattctagagataactttaacagtaaaacaagatttatttacaaattactacaaaataaccatatattgtagactatacacggtttggagaatggtctcta

SEQ ID NO: 248102 - DNA, 356 bp, Glycine max
ccgacgaagaacgaatgaagaacgttgaagaaccgtcgaaatccttgccaaattccttacggaaaacgttaccgcaccgtctcagaagcgcctccccttatattatcttcacggaaacgatttttccaagcaaattccaaagagagagaagtgccaaaggggccgaaccccttcctatctgccttccctccctatttataacaaaatacgggacgtggttgcccgccagctcgcccacgcgagcagggttgctctctccaaaagcaaccgccttctggaggaatattccccgagggcccaagcgggccctgggtgctatatgcacccccatcttattaactacacccccctctgct

SEQ ID NO: 248103 - DNA, 351 bp, Glycine max
aatgacaggatgaagtggcataaagtgcttatagagttcacttgcatgtgaaaaattttcaaaaagaaaaagactcctgttaaaagaataatgcaaccagattaatacttccaaagaaaagaatattttgtaaagacattttcagacaatttaaatatttttatttggctatattagtataaaacatctctaatccatatatctttttaatattatgctctttttttcattttcttttgatatactttgtgttttaacaacttgaattcaatatgattttgctcatcaattatttttggatgtgaccttacttatacgacatttataagtcctttttttattagtatttcc

SEQ ID NO: 248104 - DNA, 339 bp, Glycine max
aaaatgactcttcgactcactatattctatcttcatatatttacacattccaaatcgcttagaacaatgttcgcggaccataagcatgctatggctcacacatcctcagataaatcgagataaaaagaaaaccctatctagtttgccagagaaaatatgaaatatatatatatctatctatagagccccggaggaaaagaaagattatataatatctcctgaaaatccaatccacaaaatataaaagttataaataatttttttctcttctcccactgctcacaattggaaggagataataaatgcaggagaaagatttagtgccttatcgctggttta

SEQ ID NO: 248105 - DNA, 346 bp, Glycine max
ttaccaagaagagttgggtctatccatgggccacgagcatataatcgccgacgagtatgctccactgtacgcggaaaaagacgctagaggaagggtgatctactctttacaccaagagacaaccatgtggatggaccggtttgctcttaccttgaacgggagtcaagaacttccccgcttattaaccaaggccaaggcgatggcagacacctactccacccccgaaaagatctatgggctcctcggctcttgtcagcatatgatagacttactgggccacataattagatatcgttacgaaacttgtatggcgtctcagaacttgactagatatgacttccttttg

SEQ ID NO: 248106 - DNA, 317 bp, Glycine max
actggtaaaactaactttccaaatgtttgcctttccaagaatggccccgatgaagcttgcctcaaagaggtccaagaaggacaacgcggccgaaggaactatttccgccccggagtacgacagtcaccgctttatgagcgttgtacaccagcagcgcttcgaagccattaagggatggtcgtttctccgggagcgacgcgtccagctcatggacgacgagtatactgatttccaggatgaaataaggcgccggcggtgggcaccactggttactcccatggccaagtttgatccagaaatagtccttgagttttatg

SEQ ID NO: 248107 - DNA, 323 bp, Glycine max
acctcttcattttcaacgacttcaaacatccataacaatatatctgcctcaacaaccttttatggccacatataataaacaatttcactccaaacccttggataggaaaaaaaaaaacaaaacacctctagcgttcgaagaactgctcttgttacatttgaattccactctaaaagccaaacgaacaagagatcaatataccacattaactcaccacgttatgatttaagggccttatgataaggattcatatgctacgacgacaaaaaccatacaaattatcccaactgtgatcttgtgaaactccaacttcttatacctac

SEQ ID NO: 248108 - DNA, 348 bp, Glycine max
acactcatggcatgctctccttttaaccaatgacttattaagtgatacttcaagcccactctctaatctattattatgagacactttttcccatcctttcttctcccccttgtttgtgatatgtgtgggtctctaagaatcaaatgtggcacttcactcacatgttctggcatgcagagtttgttcccaatggtgagacttgactccaaaagaggtaaacttgttttcattacaattactgacttatgagtttgacccaactccaaaacgatgaacctatatatctttttcgattcttcacaagaacaactaatatgcctgcttgttggtgtgcgtgcatccttctta

SEQ ID NO: 248109 - DNA, 360 bp, Glycine max
  unsure (1)..(360): unsure at all n locations
gcctatatgttggacctcccagaagagtatggagtcaccaccacttttaacatttctgatttaactcctcttgcacgtggagctgatattgaggaagaggaactaacagacttgaggtccaatcctcttcaacgggaaagggatgatgcaatcctccctaggaagggaccaatcactataaccatgagcaagacgctccaagaaaattgggctacagctgctgaagaacgccctacggttcttatgaaccttatggtagatttctgagcccatgggccaacgttgncgtcaattatcttcgtacatattagactacgatgtcattatattttgtccttgtatatatggcttcatatttga

SEQ ID NO: 248110 - DNA, 245 bp, Glycine max
tctccatctgtgatgatcaactcgagtctgcaatgatcggactcgatgcacatcactattctcgccttcccacaacaaacactcctctttcgcgaagcctggtggcctagtgaggaatgctctcttaacaaagaactaacacctgccgccgctgccgttgctgttatatgccaccacgatctcttcactagacgttatccagtgcggaacccttatagcccagcctctcacactaaactcgtacc

SEQ ID NO: 248111 - DNA, 353 bp, Glycine max
  unsure (1)..(353): unsure at all n locations
actttaaaaagcatgcatttcattatgtggtgtcaattatgacaatgatgtatcatacatgcgtacatgattttagatgcacgaacaaatntattccattacgcaacaattaattaataactaatgattcattattatacaacanattacattcagtcttcatttaggtccacatattctttctaattgtcattaggctaatgtatttttgtattctaccaatatatgcagctggccactggcttgcctgaggaagagaattgcttgaccacaacaacgctactggcgggaaaggacaatgatncttcagataaacttgttgtatgtgaacaaacattatcaacttacatgaa

SEQ ID NO: 248112 - DNA, 303 bp, Glycine max
ccttgaccgacattcgtattggttggtatctcggctatcgcaccttaatacatctgatacctgtatcgcattatgcattaccctggttagtgtgaagataagtttctctcgaggcaaaaactctttgtattaattgaatacaacctcacctcatcgtaatcgattaccacaagcagttctaagcataaagagtcaagtctcatatcgtgttaatcgattaccgttatctaataactgattactctcgtgcttgagacaatgactgatttattcatgagtctatgctttaatcgattacctagt

SEQ ID NO: 248113 - DNA, 345 bp, Glycine max
ctgtcggacgcacgctggttaggcacacaaatatagagtagccaatctggacttggttgatgtaagtgaatgaaacaattaatttgtctcctctgtcattcatctgataggaactgatgtctaaagactataataccctgcctatgtgacttatgcattgctgggaaatacccaagccccacatcagatgaaatctaacatgcatgtcccagtagtttttgcttttgtatcaaatgctaagtgaaatattgaaaagaatttttactttcattgtaccttaaaaataaaaattatgagtaatgcggacatgtggtattcaagcctttgtattcacaacacatgtgt

SEQ ID NO: 248114 - DNA, 362 bp, Glycine max
cctatctatggcgggtaaaataactctcattaattcagtcttaacagccctacccatctatgtgctctccttcttcaagattcctaaacatgtggtgcaaaagattacatctattcaaaggaattttttatggggaagtcaccaagactccatcaagattccttgggtgaggtgggacacactttgcctacctaagagtaaaggggggttacggatcaaagatctgactaaatttaatgaggctttgcttgccaaaagggagtgcgagtcggcaaataatcagaatcaattctggaccacaattctattgtccaatatggtggatgaaggaattgatttctgtacgactgcacggacctctc

SEQ ID NO: 248115 - DNA, 384 bp, Glycine max
cgctcgcgtctcacggccgacatagacgattattttatccaaacacactgacgcgaccccatttgtgaacataactcaaactatgataatccactcgacgcatctaaagagccactatggaaccacagcttccccagtttatcttgatggtgcccaagacctcagtcacgaatcaagagtcaaaacaagttccaagaatcaaagagtcgcctaatccataatcaagattcacgtgaagactcaacagaagacccacgatctgcatgaacttcaagaaacgcatcacgatacgtataaaaagatttcttcacaagaaagatcgataacaacatttgccacaagaactttcaaaaacaatcttttatcaagttttactctctggaa

SEQ ID NO: 248116 - DNA, 199 bp, Glycine max
ccattctctggagggagaggcgaaaaaatggctgtactaccctgctcccatatccatctctagctgggatgaccttaaaagggtgtgtttggagaaattcttccctgcatctaagaccactgccatcaaaaaagacatttccagcatcacgcaacttagtggagagagcgtgtatgagtactacgaaagaatcaagaaa

SEQ ID NO: 248117 - DNA, 447 bp, Glycine max
  unsure (1)..(447): unsure at all n locations
agcttattcttgactcatcttctctgtgaagttgcatctccaatcatctttcctccttctccattccactttcattaatcttcatgaagcaaaagactccattgatgaagaagatcctaggcctacaaactctacatggagctacattatgtggtatcaacaacatcttcatctacgcgatgccctgttgcttcctctatcttttggtcgatcaatttactttaattccttgttcttcatcgccttctccatgtatctcctccattgttttgcggtttggtgctgtttacagtacattaaaaaaaataaaccggttgaatattccacctacacttgtacttgcatttctatggcgcaaatntgatgaatctactatngaatcatcgttcttgtgttgattttcggttctataatttttcactcataatattcttgcgctgaaccttt

SEQ ID NO: 248118 - DNA, 370 bp, Glycine max
gcttatacagcctaggatgtggttttgtgactttattcaatttagacacaagtcttgcacttgccacattggtacaactccctccatcaatgatcaccatgcaaactttgccattgatcaatcatctagtgtggaaaatgttttctctttgagtttcctccaaagactctaattgatggccaagtaaccgcctaatcatcaacaattcttcctctagtgttttctccactttcttctcatcatcctcactctcttctcccttttcaacttcggactcactaatgtactctccatctctaaaaaatcatggctttcttgtagggcattcatatgcataatgtcccaagccttggcactgaaaacactttac

SEQ ID NO: 248119 - DNA, 410 bp, Glycine max
  unsure (1)..(410): unsure at all n locations
agcttaggtatgtggtatataagcattatgttctatgtaacgtactatgccttcaccagcgtaaaggtttcattaaaatggctgtgtttcgtgttggtcatggagaatcaagtntttggtttgggacctctgtgatctgctataaggctccctatgtgcctattcatgattaaatggatattggacattctagtcccttgcctactcttggttaatatctctcaacaaaccaattctggaatgcattatgtcaattttattaattaatgggaaggctaaggattagctcaattctttatctcataaggcttcgcatattgatcacattttaaaagcttcatcatgatgcaagttgtggtttatatgtacagctagactgatgtgcatttatttttcacattagaataaag

SEQ ID NO: 248120 - DNA, 438 bp, Glycine max
  unsure (1)..(438): unsure at all n locations
agctngaagttcggcatgtaggactcgatctttgtcttcaataccttcctctcgattaggttaaccagaaacttgagtttctcagagatcgggagcaccaccgggccgagggaggtgatgtggactttcaaggcatcccttgcgacgttcatgagctctttggatagagacacgcctaccttgttctcatcgtcctcttcctgaaagacacatttgtagctgttgtcgtcggcaccaacgtgggtccggagcgtgtggaagagctcgtacttcgagcgctggcggtcggagaggtggcttgataggagggctgcagagccgcccatgcggaagaggcaattgaccagcagcattgaagggttgttgccccagtacatgcttgatatttcgttttctgtgcttaaaaccaaagcgtacgagttcgggtgtgcctacaga

SEQ ID NO: 248121 - DNA, 353 bp, Glycine max
  unsure (1)..(353): unsure at all n locations
agctntgaaggtgtgtagcccacctttttttatattagaatactggtaatgtgtctactatcattgtcatcgctttttcgtcatttaaggtgccactttgagctgccacgttctccacctttgggtgtattctttgaaagatttgtgcccccccttttgcacatgttctgtagttgcatcctatccgaaaacattatactgacactgcctaacgaaagccaccactaggtccttccaagaatggactcgggaaggttccaagttagtgtaccaggttacagctacccacgaagactttcttggaatgaatgtatcagctattccttatcttttgcgcatgcccccatcttccg

SEQ ID NO: 248122 - DNA, 438 bp, Glycine max
agcttgtcatcttgaggaatcagggtctatgttattgaacaaatgtgggtagaacaaagtcacctaaaaagaaaaatcataaactcatacatcctaggcaaacaaggcaggccaggtcccaaccttatcaaattctgattttatttcttctatcttctatttttcttatcttatcttttttatctttatcttaatcttttatttttcttatcttttacttttattttctttatcttctatctttatcatcttttaatttaaatcttttattttaatctttaaatctttatcttatctactatattttcttatctttattttaaattctttatctattgcttttaaattgggtttgcattaatctaagtataaacaaagttcctgaggattcgacactcggactttcgagtactttactactcgtgacaatttggtaca

SEQ ID NO: 248123 - DNA, 362 bp, Glycine max
gcaagcctcgggccaatgaagaaacgagagagttttttttcttccatgctcctatcctcctcttcaatcggtcaagatcatggacttcactccgcgtccatcttcactactagaaaaaacgcacctaacaccggtggctcaggacattcaacatcaatatgaatcgatgcagaaagtaccaacgtcaaaagcatcaacatcaacatcgctacgaaaaaaccgatgttaaaatacataatacaacatcgacttttacgaaaaccgacgtggtacacgccgaaatatacacaaaaaaacgccaaaaccggcgccgctcttacattctactcaaaacactacgtcgcggcggtctaacaacccaa

SEQ ID NO: 248124 - DNA, 448 bp, Glycine max
ctgagctgcaacttaaaaaaataaggaaatcaagctatttttttatatatatatatatatatatatatatatatatatatagatatatgaccctaatatccaaaaaagaaaaagcatattaaccacttattttttggagcaagtgtgctacaaatccaaagtgaaattgcttgcatcaacgccacatggaatcaatagcaaaggaggtcacatcccaattgttgcggtttaaataaaagagagttgaaacagggaatattataaaactcacaaaacagtaataaatataacaacttggaacgtggaacattgttacaccctctacccctcacatatatactaataaaggaataaaaactcaatattaattaaaagtattttaaaacacttttaaatcaagcctttcaaaggggtaagaggctcacatatactttcacctacaacatat

SEQ ID NO: 248125 - DNA, 288 bp, Glycine max
accaccaaggcgcctccaacaactgaatcagggccagacagacggatccgcacgtgcgacgccacacaatacaacatgaacagctactcgcaaaaaggaaacatagcccaaacatcaaaacgacccggaaaaaagacccacaggctcaaaaaccatgagctgacaaacgcgtaccaaaagaacaactaccaccattaccgaaaaaacaagatgaaaagagcacccgaataaccacaatgggaaccactgcaacccccgcgtgcaaacacacgacaaaatgagacacaa

SEQ ID NO: 248126 - DNA, 305 bp, Glycine max
gaatccttaatcagcctataaacctccagcttaacaccactctaagaacactcaaacaaacacaacggcccttacaaacagaaagcaaccttacaaacctctagcctaacaacaatcataataaaaaccttcatgaacctcataaccgaataaagaataatcacctacgccaagaacatattacaactacaaaacttagcggcaaacaagaacatggcatttaggagagaatacattttcaaccgcaggccactattttcaatcctcgaataccaagaggagcaccatgcaagtctgaaagacag

SEQ ID NO: 248127 - DNA, 408 bp, Glycine max
  unsure (1)..(408): unsure at all n locations
atccttaagacacctgcggcatgcaagctngncacttttttgagtcactcattttattcctaagtntaattcaattggcgtctttatagaacttgtcttttcttaatacacttaagcaaactcataaataggcattaattgaaaatgcttatgatttgtgtttaaaaggtttgtaataattaaagcatcaagggttttggactcaacaaatttcccataaaataagatgtaaaaacaattatcaaagagacattggagaacattcaccatacaaggatagagagcacatatgaactaatcaaactgaatggtacacatattgaaataataacggactacacaataaatatctatacttcatataacccgttaaaattacctgctacaacaagtcgattttggtgatta

SEQ ID NO: 248128 - DNA, 440 bp, Glycine max
  unsure (1)..(440): unsure at all n locations
agctctcataaatgaagtcaggtgcattcatctccctaagagacctctcacgagggagagtctgagccatgttctcaatatgaaaataaccagccgaatgctcaaaatcagaatgttcacaatcaccaaccacaaaatgctcagaatgcatggaatgctcataatgctcaaaatgatcaggatgcacactatgcctaactaatctatgaaaggttctatctatttcaggatcaaagggttgcaaatcacctggattgcccctagtcatgcactatatgcaccaaatcatgtatttctcacacaagcaccaggggtaaanaggggtaaaactacaactatactctaacgatattgaaatgagctgaaaatntgtgagcaacaccctaaaattctgaatagatagcacaaagatattcagacaaaaattcaaagtctaacta

SEQ ID NO: 248129 - DNA, 393 bp, Glycine max
agcatacaccctaagctgaagctgtgctatttttaacccaggccaacggaaaggatgacgaacagaaaggcagaaagagtaccacttacagttcgattgccaaaaggaacaacagaaagcaatattctttacacaatgcacaaacaaaagaaacaaaacaaacgtggggagaggagcaaaccacatgtcagtgttggagacaaacgcaaagccacgtgtcaatgttggaggcaggggcaattcggacattttgataagccattccattattaaataaatagcacatagaccacaaatacatatatcaagcactaattacagcaagccacacttagagaaaaataagataattatcacaaacaaatgcacaaaatggaaaccctaaccccagaa

SEQ ID NO: 248130 - DNA, 358 bp, Glycine max
atctttctgggcaacccatatctgcaaaatattcccctctagaagaaatttaccaccacattcctagaaacattagcatatgaggtagctcccacccattttgtgaaacaatcaatggcgactaggatgaaacgatgctcattcaaaaccttgggttcgatagccccaatcacgtccatgccccacatcaagaacgaccatggtgctgacaagacattcaatggcgcaggtggggcattaacattatctacaaaggtttggcgcttgtggcatttcctgacgggaacacaacaatcaactctccacggtgagatagaaatacccgactctaaaaacttctgggccatggcatgcccat

SEQ ID NO: 248131 - DNA, 438 bp, Glycine max
tgcaaccttcgcactggataaaggagaacacattatcttttctacgcaatgacattcatggtgctcccgacaagggtggagtatggaggatcgccctgagggcccccactaaggcaatcatgaaactcagctcccaactcgaaagtggaggacacatgaacaaccctaagcaataacatccatgcggctccggaaaagggtgagaatggaggatcgccttgagggtcctcccttaggcaatcatggaacacagctccaaactcgaaaatggaggacacatgaacgacaacgcaatccattcatgtggctccggaaaaggaacagaacggaggactgcctcgagggaccccacttaggcaatcatgagactcagctccaaactcgaaaatggagaacacatgaacagccctaagcaacaacactcatgtggctacgaaa

SEQ ID NO: 248132 - DNA, 415 bp, Glycine max
  unsure (1)..(415): unsure at all n locations
gcttatttttctttccctggaaatatatttttattccttgatgttaaaccttattccacctttgtaacctgtagctntggtatgatcatattgcagagaaagaatacatacattctattgaagatgcaaataaactatgtgagagtgatctgaatgatatcttgaatatcctcagcgtctgtgagttgcgtgaaatttggtgcattttgcttaaaaaggttagaatcaattactagtttttgggtggtatatatcttcatatgaaactttattatgaatggattgcactaattatgcaaataatgtttttcttagagtctttcatagaatgcagttgaccttactttgtgtacaagttgcttgctccatgagtttgtaacctgcgtatcaatttccttttgttattatataatac

SEQ ID NO: 248133 - DNA, 434 bp, Glycine max
agcttgtgtattgttgcattctactaatatatgtaattgcccatcgctctgcctgagaataacaattggttgaccacaacagcgctggaggcggcaacggacaatggtctttcaaataaacctgttgtacatgaacaaacattatatcatgcgctgaccgtgccaaacgaaccaccaaagtcattgcataattgttacactaactatattcaatgtacttgaacaaaatgatttccaaacacgtgaccgacacatatgatgcggtggccaaaagagtcaggtggtggttgacttctaaaagggaaaaatgtcatgctctgttgttgggacaacgatacaaggattactttataccgtgaagcaatcacatatcccatgtgtgttatatccatccactggtccacactaacctgaatgaaccaaacatacacatg

SEQ ID NO: 248134 - DNA, 445 bp, Glycine max
  unsure (1)..(445): unsure at all n locations
agctctcancaaatgtcttcacaaatattcttctcacagcagaaacctagcaagactacccatcatatctccccaaaccccatacccacgaaaattaaaggagaaagaagtccacccaaacctgaattttcgaagtcccactcgtagccacgcacttcacgaccccgaaaatgccctcctttcgcgatttggagcacaaatgatggccaaaggttggagctttgttggggtttcaatggagaatggaggagaaggaaaaagcaacgtgaggaagagggagagcttctgaatttttctgctttggctgagtgaggagagagaaaagctttttggttttaaataaaagggttttctctttctctattattttatttaagcaatgccacatgtctccatttgagtgtagcaaaaagggcccactntctcttttgatggtgacccatac

SEQ ID NO: 248135 - DNA, 434 bp, Glycine max
agcttatgctattaggtggagactcaatttattttttatatttctaacagatacatccatgtaaatgcaactgattcacagttgaacgaccattttcaggaaaaatcaatcatattcgcattgccacagtctgcatatggagcttgcttatttcttggttattggggctatcttttgccttcccaaaaatttagggtttcttacctttttccattcaggcatagctatttggttgtcataaatatctctacaaggatgctacatgatatttttttatcattttctcttccaaaagaagataaagcaaattaataatattctgattgtctgcgaatctaggacctacatagtcccttatggagaggactctacgaattatattgaatttgctctagttaaccacagaaatcaattctctacgttaagatgctcta

SEQ ID NO: 248136 - DNA, 290 bp, Glycine max
ttaagtcacctgcggcatgcaagcttgacctgacgatgaagcaagaatctattctttatttaggagctcaaacggctagcatccctgtatccgcttaagcaacatactatgaagagttattccttgctgaacaatgcctatagaaaattttgaagccgatggatttgctgtattgccacatcggcaaacttaccaagaaccttatcggtggagaacatcccctggtaatcactctcggttgagaccagagtgggccagataaccagcctcgcccacaagggcctacttta

SEQ ID NO: 248137 - DNA, 289 bp, Glycine max
gcctggttgctatttgcaccccctgtttactaaatacaccacctgcctttttttgctagattctttttcccgaaccgttacaaaactttaccaaattctgtaacgaaacttgttttcctctcgtaatgttacagaaccttacggattacgtaatcatccttttttggctctcggaatgttacggaatctcacgggttgtgaacaatgcttccttttgatttccacatgttacaaaacttcacggatcgtgcaccaatgctctcctttgacttctggcacgctatggaac

SEQ ID NO: 248138 - DNA, 441 bp, Glycine max
  unsure (1)..(441): unsure at all n locations
agctttcgagtatattatattntatctgttttatagcagacgggttttcatgagaataaactttgaaaccccactattgaaaaagaaaaatcacattaaaaagcaatagctgcatgaattcacctggcaatgcaattttgaatatctgcaaacacaaaacaagtaaagatgcaaggtctcgtgacttgtgaatataggggaaaaggaatcaaacaccgtaaaataaaaaagaataatacactaaattagtcggtaaaattgtgcctttaagtttttcttttcttttttttagcgattatagttatcttttaccaaaattctgtgatttgtttataccaaaaattattatccgggagacaatttagatatttaatgtaaatgcttactctaggttcaagcataggagatataatctctaaataattntaattcttgaaacta

SEQ ID NO: 248139 - DNA, 376 bp, Glycine max
  unsure (1)..(376): unsure at all n locations
ggatcttaagtaccgcgctgcactttatgagctggatctttagcttattgaggttcttcaatggtgatttccaatcatggagatgtagtggaagataaaggagaagaggtgagaggaggcgtcatccactacggaataagccatggaaggaggagcttcactaccaagagagtgtcttggataagaaacttagagaggaatcttcaatggaggaaaataatgagagagagagaggggaaggggggcactaaattgaacgagaaaacaagggagaagcacgagcttaactatgcacaccnctctaatagctaagctcacctccttgagaagctacaacttatctacacatacccctctaataactaagctcaccctc

SEQ ID NO: 248140 - DNA, 372 bp, Glycine max
  unsure (1)..(372): unsure at all n locations
agctngaatcttgaaactcgattcttgattcttgttatcaaatttcctcttgaaccttgaagtgttcttgattcaatcttgaactcattctttgattcttgagatcatcatctttgttatcatgaattgttcttgatctttgagctttttgtcatcacatttgtcatcatcaaaacttctttgaatcaatcttgattcatcatgaagcttgcttctacattcccaacaaagtgtgatccatcattaccagaatctgcttctccatctccactctctgcagcttcttccttatgcccagagcctctctacccaccaccttcatggtgtagagccactgcacctgtngtcccaccaccatagggtttcgtatct

SEQ ID NO: 248141 - DNA, 269 bp, Glycine max
  unsure (1)..(269): unsure at all n locations
gcttgttgctggtggttgtgatattctaactttttgtgtactgctgcaatactgtggaatttttctccaagtataaacatgctgccactgattntctagcaccaaataaagataaactgtccatttcttacctaattttagattacgggtcctataacttggattatcattgactcccttgaaagacacatgtgatcattaaacagaaaatgtccaacacaaaccattgcgactggaacccagacatctacgttgtctttaatactgcc

SEQ ID NO: 248142 - DNA, 448 bp, Glycine max
  unsure (1)..(448): unsure at all n locations
tgcggcatgcaagcttctcccccaattttctataaatagggggagaagtgaagtagaaaagggttcagccccttaggcacttctctctctctcgaaataactgaggaaaattagttccgtgaagaaaatccaagccgaggcacttccgtaacgttttcgtgagtaattacncgaaaattcttgaccgttcttcaagattcattcgttcttcatcgttcttcagtcttcaacgggtaagtacctcaaaccaagcttttcaattcattctatgtacccgtggtggtccacgttttggttcatgtatttttattctcggcttcatttactttttatacccncttttgacgtgcttaagccatatatttaagtcatttctcgcttaatctaaaaataaaataatatttcaccgatcgtttgaattgtatcatacgctaatattggttaacac

SEQ ID NO: 248143 - DNA, 412 bp, Glycine max
ataaatcacctaattctacaaatttagcccagtctcaagaatcaaatcatgaagttgggtcttttggttctttaaggaaggaaactaacaaatgtaatgataataatgacacaaatgaggaatcaaagggaaaagttgttcctgatgttggtcacaacaataacggattggaaacaagttctaaaccatagactcttggccatcctgatggagcaggtggctttgaatcagcacgcgtaggtgagtagacaggccaaaatggtggatagctcaaacagaccccaaggaggaaaacactatcctgaaggatgaacagaaaagattggatttctctggcgattagagaaaaatacctcaactgatcaataagcagtacatgaaatatgatctgatgttaccaaatggttaacat

SEQ ID NO: 248144 - DNA, 193 bp, Glycine max
taaattactacaattatatgaaatcgacaaggtaatactaagaataaaatattagttgcatgaccgaaaataaaatagccgctgtgtcaaataacataacaattatctcacatacagggaaaaaaaatactccaacgccatcattagccgttttgacttattgccgtaattaaaaaaaatgttgcccatttct

SEQ ID NO: 248145 - DNA, 340 bp, Glycine max
  unsure (1)..(340): unsure at all n locations
agcttgtagtgaggcttggctacaatattattggtntttctaggattgaaaggcttggattctaatagagcacaaatcccaaacttatccaagtagtcttttcaatacaattagcttatgcactagcctctcattttaacttgtatgtgaccttattacaacaacacacactttctctgattgctattttgttttcctcttctctttaatattttacaggggcgtttaacacaactaatttgttgcgtgtgctgatgtgctttgccttccactttacattgcggttaaatcccccaaatttagggaaaatttccttgaaccatcttgagtgcaatcctac

SEQ ID NO: 248146 - DNA, 402 bp, Glycine max
agcttatcatggtagatgttgatcatgcttatcttggagacaaaatcatgaaatttgggtggtgccaatgctttggtgagaaaatctgccacttgatcacttgttgaaactggtagtagctttagagtgcccttcaaaagcttctctcgcacaagatggcaatcaatttccaagtgttttgtgcgttcgtgaaaaaccggatttgaggcaatgtggactgcgctttggttgtcacagtaaagagttggagttctggtaagctgaactctcaaatctgcaaaaagatacaacagccattgcaactcacaagcagctgaagacagagccctgttctctgcttctgaagatgatctggacacagttgcttgctttttacacgcgatgacactatagatttgccta

SEQ ID NO: 248147 - DNA, 303 bp, Glycine max
  unsure (1)..(303): unsure at all n locations
agctntcaagcttcctatgcctatgtttgtctattacttgttgaaaagctagctggaagctgagaaactagcttattgaattacaagtgtccaggaaaactacctgttgaaatagttgaaaagcgtaaaatgataaaaaaaaatactatcctaatttattctaaaaaggtaacacgaaaaatgaataaatatattgaggataaaagcggaagaaattataaaaaggaaaaaaccacaacctagccttgtaaaaaatactacttgaaataccctttctaacacatctcaaattactaaacaaag

SEQ ID NO: 248148 - DNA, 429 bp, Glycine max
  unsure (1)..(429): unsure at all n locations
agctngactgacataagcaccatattttttttttgtgaagctcaaagtaaatcagtgtctgaaatacttcaagaagacaggttttgattttatttaattgttaacttttcattctttgccattttccactttggtgttatcaatattgtatttggtcatatttccaattcatttcagagaataaagagctctgataaaaatgaaatggaggccacagaggcattgatcacttggtatgttttgcttgcctttaatctttgtatgccttggattacccaaatttaaatatgtccagtttttgagtgttctcaacttcttatcttgtcttgcagaataacattccacagcagcatcacttagaaatatttattgtatggtattgatcgctttcattctctaatccttaacatttgcccttcaatgaaatca

SEQ ID NO: 248149 - DNA, 361 bp, Glycine max
  unsure (1)..(361): unsure at all n locations
agcttgaagtgagaaagcgtggaatatttatttttcctactttngcttgctgaccacagagtggtacctggagatatgtcgtgggggtcaggagaccttggggacgtcaggtggggtgctatatcccaaaaccaagcttgatcaatcccgacccaacctgggcatattcagtcagtgagaacctgtgacgtacctaaacaggcgagctcctggcagtcaaccaataaaagaacaaagaccacaaagcaaggaggcttgtgtggtggctggccagctatggatcttgagtggtatctggattttggcctctggtaatcggttaccaagggtgtgtaatcgattacaaggcttcaaaatggag

SEQ ID NO: 248150 - DNA, 392 bp, Glycine max
gctttacagcagatgtcactctatgctaaatttctgaaagatatgccaacaaagaagaacaagtacaatcagattgcaatgggtcccaaagatcaagagaagacaacttttacttacccgtttggtgtatttgcttctcggtgtatgcctttcggtctgtgtaatgcttcagctacatttcagaggtgcatgatggcaattttttctaatatggtggagaaatgtatcgaagttttcatggatgatttctttgtctttgggtcatcttttgatgcttgtcaatcaaatctggaaaaagtattgtagagatgtgaagagtctaacttggtgcttaactgggagaaatgtcacttcatggttcaagaaggcatagtgctggggcataaaatttc

SEQ ID NO: 248151 - DNA, 426 bp, Glycine max
agcttaggttctaggagagcattcatccatttatttgttggatcaagtggcctcaaaataattaagaagggggttgaattaattattcctaaacctttactaattaaaaaattactcttctaaggcttttactatattgttaagtaaatgaagaatagaaaagaaacttaaccaaaagtaaaagcgggaattaaaatgcacaacggaaattaaaagaatagggaagaaggagacaaacacacaagagtttttatactggttcggcaacaacccatgcctacatccagttcccaagcgacctgcggtccttgagatttcttttcaaccttgtaaaattcctttacaagcaaagatccacaagggatgtactcctccttgttctttttgaacaacctagtggatgtacctccactagaactgatccac

SEQ ID NO: 248152 - DNA, 440 bp, Glycine max
gcttcttgactctctttagccatctttttttagaagaagaagtcaaagtcaggctcacaatccatgaaagatgaagatgagagccctggtggaaggagaaggagaagaagcagcattagccatttcagaagctcaagcaccgcagattcaaagtccttgtactcctccttgagttcagagtttcgaactcctccttatgtacaaacaccaacaaagagctgcaaggaattcagaaccttctcatcagaaaaaaagcatgcactgtccttttcagcaaagtacaacaacaacaatggacaacaaataagatcatcaacaacaaccactttgcagaatgagttgttgtgggatgagaagaaaaagagggaaccaacaacaacaacaacaacaaccatgttagatgataatagcaaccacaaacacttatcagagaaacaaag

SEQ ID NO: 248153 - DNA, 186 bp, Glycine max
tcatcttgcagctccttatagcctccttcaaccatttcccaaacatcatgtgctgcaagaaaggccttcatttcggcgctcaaattatcatggcgctcccccttaaaagtggaacctggagagatgccactccattgcttgccatgactatatagggatttcttatcagaccctaagccctaaaac

SEQ ID NO: 248154 - DNA, 373 bp, Glycine max
gcaagcttgcttctacactcctctatacttattttgttttttttagctaaaccgggagagagcccggcttatcgagagtagcaggttttttgatctgcataactcgctaagcgggtgtatccgagcgctaagccaagccttttgtttgtgcaaaaaaaaaatctgattttgaacttgaaacgtcagctaaacgcgcggatctactaagcgagcttctctaagaaaccaaacgtctctctggctcgcttagcgcagcagtccactaagcgagagtgtcgaaaactacttaagtgagtgtaacggcagctacactcacaattgccatatttcaccaactttttctctacattctctctctccaaaattttgcaca

SEQ ID NO: 248155 - DNA, 442 bp, Glycine max
  unsure (1)..(442): unsure at all n locations
catgcaagcttctanaatacttgtgtaatctattatttatagaaggcaattgactaaaactgagagttgtgcattgaagatgtttcttacctaagaaacaatcttcctacttctacatggtgatgcatgatatacacataggtagattaaaactaaaaaacaaaaattaatacaaataccaccgaataaggagttaggcatgtaaaatgacaaaactcttcaaagcttgatcttcatgttactttccctatctctaacagaattgggttttgaaatatttttagtgtttctttgaaaacaaaagatttctgactatagtttagaataagcgagttcataatgaaaagttgttctgagctcagaatggaaattcaagctgcttataatgaaaatgcaatagttatggaaaaataattcttttgcagcttaagacttatgtatc

SEQ ID NO: 248156 - DNA, 411 bp, Glycine max
  unsure (1)..(411): unsure at all n locations
agcttgtangattatggggtacccatcacatgntgtactaggtggcggccgcgcgatggtgcacaacaaggtttccacatacacaatgagcgcataaacccaccgtcccctgttgcccacctccaactgagctcacgtactcccacgtagcccatatactctttcttctcaacaacgaggccacatgactcctcccaagctttcacaacatccatagcaatacacattctcaccgcacaggctctcaaacccaagctaagcaaaacaaacgccaaaaactctggcaaaacacccaccaaaattcacagctttatccacctcaagaccccaaaacagttccttcgatccacctagtgacccgtggatcgacccagaatgttctggaattatatttgataagcctacatatga

SEQ ID NO: 248157 - DNA, 421 bp, Glycine max
  unsure (1)..(421): unsure at all n locations
agctngataggaaaaacacacttgggatatttttattatcttggaattacaagaaacaagcttgtgtagcactatccactacaacagcaaaatacattgtagttggaagttgttgtgctaaaagtctctagatgaaacaacaacttgaagactttggggtaacccttgatcccattcctctaaaatgtgacaacataagtgctattaatctgtctaagaatccggtcatgctttctagaactaaacatatagagattagacatcattntctaagagatcatgtatcaaaaggtgattgttgcattgagtttgttgatagtgaacatcaactagctgacatccttattaaacctctttctggagataggttcttctttattagaaatgagctatgtatcctagatggatcgagtattgaaag

SEQ ID NO: 248158 - DNA, 440 bp, Glycine max
  unsure (1)..(440): unsure at all n locations
agcttctcccccattttcctataaatatgtgtgtgaagngaagangaaaaatgttcagccctcctggtaattcgagaccacttgaaattagtgaaaaaaattggttccttgaagaaaatccaagccgaggcacttccgtaacgtttctgtaacgtttccgtgggtgatttcccgaagattttcgaccgttcttcgacgttcttcgtcgttctttggtcttcaaccggtaagttccctaaatcgaacttttcagttcattctatgtacccttagtggtcctcatttgtttcatgtactttcgttttcatttcatttactttccgcaccctcttttgacgtgctttagtgattcgcttaagttattttctcgcctaaaaaaaataaaataaatttccaccgatcatttgaattgtaatatccgctaatctctgttaaatgaa

SEQ ID NO: 248159 - DNA, 432 bp, Glycine max
agcttgctctaaattacattgatgtttgttttatgggaggaggctatatgacattcttgctttaagagtaacgtcccactggtaaaactaactttccaaatgtttgccttcgcaggaatggccccgaggaagcttgcctcaaagaggtccaggaaggacaaggcggccgaaggaactagttccgccccggagtacgacagtcaccgctttaggagcgttgtacaccagcagcgcttcgaagccatcaagggatggtcgtttctccgggagcgacgcgttcagctcagggacgacgagtatactgattcccaggaggaaatagggcgccggcggtgggcaccactggttactctcatggccaagtttgatccagaaatagtccttgagttctatgccaatgcttggccaacagaggaaggcgtgcgcgacatg

SEQ ID NO: 248160 - DNA, 152 bp, Glycine max
gcggacaccaaacccgacagaggcggacctcaacaccggcgagcaagacgccaaggggagacacgccccctgcaacgcgaacaatgggaccaaaagccctcgccgcaacaccggcccgggaaaacagagacacggaaaagccaacgaaaaca

SEQ ID NO: 248161 - DNA, 348 bp, Glycine max
tcagcgggccgatcattataataatgaactcagcgacaatctctttggacagcagcttctatcgaataaagagacagccaatccctacgtgcttggtcctctcatggaagactgggttcgaagcaatgtgaagagcacactgactatcacaatataactccatttgcaccactttgcagaatctcaactcttcaagaatttgcttaatccacataagctcacatgtgaccatagccatataaccgtattcagcccccgcactagatcgagcaacaacagcctgcttcttaccttttcaagagataacatctgcgccacaagagacgcacaatcccgatgtggatctcc

SEQ ID NO: 248162 - DNA, 367 bp, Glycine max
  unsure (1)..(367): unsure at all n locations
agcttggattgattcagcctgactagacttttatttttagtaatntaggctacaacatagaacacaaaagcatgatcgattagagaaacgttcttatatgcattagctggtctgttaaaaagacccaaaacttctacctactgctgtcaattttacttacccgcatttttactgtttttatcctaaacctagtttaattcagttctaaaccatcaattatcaatatttctttcgacaatgccttatttctgaatttaacctggtcttagactagtttccctgagttcgatactcagattcatccggtttaatatttaaatacttgatgatcggtgcgcttctccgcaaacccgatttcccttgaata

SEQ ID NO: 248163 - DNA, 287 bp, Glycine max
gctccggagtatgacagtcaccgctttaagagcgccgtacacccacagcgctttgaggacatcaagggatggtctgtttttcgggagcgacgcgttcagctcaagacgttaaagaagcgctactatgaggccacctaataccttttaaatttctggctgctatttgatcactttttataggaggacgcacatcattgctcatgatcccgggaatttatatatagcacaccgcctctcgtgagggaatcataccttacaaacatattttgtatgttagggcgtgaaat

SEQ ID NO: 248164 - DNA, 363 bp, Glycine max
  unsure (1)..(363): unsure at all n locations
agcttcanacaaagctccaacctttgtttatcatttctgctccaaatcacgaaaggagggcattttcggagtcgtgaagcgcatctctacgtgtcggacttcgaaatttcaggtttgggtggacttctttccctcttgaatttcgtgggtatgggattttgggagatataatgggtagtcttgctaggtttctgcttcatgatagttatttgtgaagaaatttgttgaaagcatgttgaacttgccatggttggatgagttaagcttacccattcagttttaggggttttatgatgatgcatgtgatgtttatgtgctgaaattgtttatggaaaacttgtacagatgaagggtggaattaac

SEQ ID NO: 248165 - DNA, 425 bp, Glycine max
  unsure (1)..(425): unsure at all n locations
agctngacccatgagctccaccatttagtgttcaacctgtaacctgcaaaacagatgagggtaaagattgactagcatgcaattgagttagcaacttacttagtgtttcagttaaagcttcaagttgcttggacaacaacttattttgggccaacaaggaatcttgtgatgaaagctccaataaactcttcttattaggaatgtgaactctatcatgcaaaattgtgtggtcactagcagtcatattttcaattaagttcatggcttcttcaggtgtctctaacttaattattcctcctacagaagtgtcgagtaactgctttgactgcggccataacccattaatgaagatgttcagtcgtatacgctctgaaaaactatgagtgggaggttttctcagcaagctatggaaatcttctaatacc

SEQ ID NO: 248166 - DNA, 355 bp, Glycine max
aacaaaacataaagcgaggagcttctatctatgtattaaaacaataagacaaaagcaaaactcatggagagttcatccacgaaagatacaggttcaaacctaaaacctttttgagccccttgaatcctttgatcaaccattgccaacctacaatcacaaagaaatggcaaaccatttcctcaccgcttcaaattcaaaagaataagctcggagaaaaataaaaccttagtaccagaacagattaatatagcatcaccaataacaaagcatccttacaatccccttgtatctctcctcatctaaccttgtccttgaaaataaaggatgcatagttccattgttaaataccatatca

SEQ ID NO: 248167 - DNA, 434 bp, Glycine max
  unsure (1)..(434): unsure at all n locations
agctngaaggctcaccctttccttcattgatacttaatataatatcgatcttttggcattcattggaagagataaggaccctaacttctactccaaggaggcaacaatcaacgagtgcacaaagataaccctttttttattattataatttgtaatacactattgttcatgcataaccaaaagaatcatatgatgctgttaaaaatttgaggctaattaatttttgtttttgatcaacaaataaaagggctatattgatatagagtatgttgcaaggggtaccatcccatttacatcaattctgaattttgctaactattatctaaacttctatttaacgtctagtgttgctcaattagctgatcattttaattttgtttttagcaaggtcaacaccaaaaaagaatgcagcaaacactgtattattctattac

SEQ ID NO: 248168 - DNA, 412 bp, Glycine max
agcttaagcagtgatcaaacttgctctttgttattggctttgagaacatatcaacaggatggtgcagagtgctgatcttatgaactttgattcttctttctgaccgaatgaagtgatatctcacatctatacgcttgattctatcatgacgaacatgatccttggctaagcatatctttaggaggtttgtgaccctttctggctctgattgattccagaaatgagctgtggaggatcatgttcagcagcccaatgagacaattgcattggaatcttctgagttctcccttcttgaagaactactggagaggttcagagcgccctctttttttaagccttggttatacatctacatcctttcttgaggagagtggtgctgtttgttccccaattcgacctacgcttggatgaa

SEQ ID NO: 248169 - DNA, 385 bp, Glycine max
agcttctacattcaattgcaagctttttttatattacgggactcaatcggacatccgacgtaaaagttattgtagtttgaatttgctcagggcttcggtattccattccgagcgtctccatatattacgggactcaatcggacatcagagtaaaaagttattgttgtttgaatttgctcagagctctggtattccatttcgagcatctcgatatattacgggactcaatcagacatccgagtaaaaagttattgtagtttcaatttgctcagggcttcggtattctatttcgagcgtgctgatgtattacgggactcaatcacacatccgagtaaaaagttattgcccgctgaatttgcttagaacttctacattcaatttcgag

SEQ ID NO: 248170 - DNA, 448 bp, Glycine max
  unsure (1)..(448): unsure at all n locations
taaacgactgagctgccacttgatttctatactcgggaatttcttttgagcccaataattcttttacagacaaaacttcatatttcggaatattaatcatgcctcaaataatatttattcttctagaaaaaccacgcatcaaatccaacacgaagaatttaaaagctagttcaacaagcttatcataattcagcaggatacatttataaataagtctcatgtttttcactcattattcgatcagtcaattcattcattaattaaactaaacataactttataaaaatcactatgcgagctcctcaaatttttattatgaaggagggttttcatgtgagagtaaaaaaaggaagtgaattttggccgttagattaaattatgaaatgctaagacttanaagttgtcatatgactctaacttttatatagttacgtgattattaataact

SEQ ID NO: 248171 - DNA, 219 bp, Glycine max
gcttaccttgaacattcgcttgaagaaatattattaattgttagtacgtgtgtaccccaactcttttaaattcccatgaccacaatcgaataaaaagtggtaattcgtgcgggcggctattgcgtaccaaattaccattcaacaaactacatcctctatcctagacttatacgctgcaatcgacaattacccatgtgacatgtctaatctataaccccc

SEQ ID NO: 248172 - DNA, 375 bp, Glycine max
agcttgagaaagtccttctgattctatttatacattttttttactttatggcatgagatgaagtacaaagattggagcttttgcaaatttttattaatgaatagcttaaacactgtggtttaagctactttccttgatatttgtcttatgcctaacttcatctaattgtacaggttacattttattcttctctttggataactgcatgccttgtaaaagacaagtgaagagggcatttttgcttcattctcttatgatgcaatcagtaacttttgttgcatacaccttttgtacatagtcacagcatgttattgtcacttggggaccagtgaactgttctttatttgtttaaggacagcaaactgtacatttggg

SEQ ID NO: 248173 - DNA, 432 bp, Glycine max
  unsure (1)..(432): unsure at all n locations
agcttataagaacaaaaatgccttatttattttcaaatatgctcgngaattaggacgcatcaacaagaatcaagccaaggctattgtgcaagcaatcaatggggcaaaacacaccaaatgattatgatgatggatggctcaaattctcacaaaggtaaaatcatcactttcaaattgagctttcaaaactatcatgacatgtagagaagaatcaaggatttcaagtcacaaaatgtcaagaacttttattttcaaaacaattacccatttcttgaacatatcctataattcaaagaaaaacatgcaaattcgtacgtgcacacaaaattgacccaaaatattaactaaaaatccgacaaactaacacatttacaattacacaactacaaataacaaaccacaaaatagcaaacaaagacactcccccccccc

SEQ ID NO: 248174 - DNA, 431 bp, Glycine max
  unsure (1)..(431): unsure at all n locations
agctntgcgtagtgatttcttagtgcaattctccattctcaacctttttcggagccccatgaattgagttttcgttcatgcgtcctccaccttcgagtttggagccatgcgtagtgattgcttagtgcaattctccattctcaacccctttttcggaggcccatgaattgcgttttcgttcatgtgtcctccaccttcgagtttggagctatgcgtagtgattgcttagtgcaattctccattctccaccttttttcggagcccatgaattgcgttttcgttcatgtgtcctccaccttcgtgtttggggctatgcgtagtgattgcttagtgcaattctccattctcaacctttttcggagccccatgaatttcgttttcattcatgtgtcctccaccatcgacgttggagctatgcgtagtgattgcct

SEQ ID NO: 248175 - DNA, 428 bp, Glycine max
attttactatatatgtgtgtgtcttcgtttatctctacctatttaaaaatgtgataattcactgctcatgtgttgtttatatttggatcatgtgatgatcttaaaccttgtgtttgtgagagcaaatggctaggtgaattactttaagaaaccttatgatggaggactccgagacacaatattttgataggatgtgacattggaacaagagtttttattttaattgcatgacgtatcaaacatgtcattttactttatttgataaacttgaacagtcttgttttaagtcataaatatttctaagaaattttatttggtaacagtgaagcgaatgtgaacattacccacgtggactgatttacgattttattgaataaaattgatttaattagatttcgcattttatatatgtcgtttttcatttatat

SEQ ID NO: 248176 - DNA, 433 bp, Glycine max
agcttaagctccttcaattgcacaaggttcttaatatttgaaaagtatccttgtggaaccttcacccggcgaagacactaacaaaaacttatcttctcctttttggacaaagtatggcaggctgggggcaagtaaattttcttcccatcagaccttggatgcaactgtgatcgtatgcccatatcagctagatctcgaccagtattcaagccatccttaatcttgccttgaatgttaaggagcgtcccaatcacactgtcacaaacatttttctccacatgcataacatcaatacaatgtctaacgtcaagatcggactagtacggaagatcaaagaaaatggacctcttcttccatatgcaactcttacttttatccttcttttgggtcttcccaaatacagtattcacgtgttgaacccgctcatatacct

SEQ ID NO: 248177 - DNA, 349 bp, Glycine max
ttcccagaaaaattattctgatatttttcggcctacctaagcgattgaacaatgtccgatgtgacatttttaaatataaaacctgtggaggatgctgggatctaattcccttatcatagctatatgagcaccttaatgatgctagcatacactatgtgaacaatgagatgtggtatgacttttctataaaaaccaaaattatatttctatattaatcattgtttactcctcgtaatttaattcatcatgggtgattgtgtcacaacatggaccttattttaacatcttttggctattggatcactccaccatttgttgacaaaatatactaaagacacaccttgtacat

SEQ ID NO: 248178 - DNA, 221 bp, Glycine max
  unsure (1)..(221): unsure at all n locations
agcttgagaactttttgtttggttctttatatttcccacttgagntnggaaaggaggaggatgatagtgaacctccgacagctgctgaaaaggtttctgatttgttcttcactgaccgttctgcggatagcgttctcacggtttaccgggaagaagatgctgacttgtctgagggaagtcatgatgatgatgacccgcccttgctaaaaaaacctgtgtgg

SEQ ID NO: 248179 - DNA, 428 bp, Glycine max
  unsure (1)..(428): unsure at all n locations
agctngngagttcttcttgtcctttagcttttgcatgttgcgccaagcttgagagggagtcacctcagtggaaggtcgaacttattgctgagttttgagtgctagcgaatagggaggcatattaacaatagttggctacactgggcgagtcaattgtgggggaggcaaatgaactattacatctgatggaagagctgtcaaggcctcaggcggagtgtgcacaaagtcatagtgtgtctaggtgggtgcttgaacatatatggtttttgttaccattggtttagagaaaaatagctttggagattatggtgacaagtgtatgattattgtgaatgaatgccagagggaatctctagtcattagataatggctcccttggagctgcccttctaaacctacccaggtgtaaagtagaaggaggtggacat

SEQ ID NO: 248180 - DNA, 361 bp, Glycine max
  unsure (1)..(361): unsure at all n locations
agcttgcttctacagtttacaccacattcttatttacatngtgtgggnaccatgatgatagctataaacaaaccatgttgggattgcactcatttcttttaaaaaatgattgaaaatcatgtgaacatggtacctaatgcattgttaaccaggaaatgatggttcttcgagcgtctcatgtcgatctcataattacatttgtcatgcataacataagtatgccctaatcgttcatctctatgatatgttgtcgaagtattgacaatcaaaatttctattccttggattatggggtcgaaccaagcacatgcttttaagaaaagggtttcataagttaaggtcaagtatggacgtaactagt

SEQ ID NO: 248181 - DNA, 242 bp, Glycine max
tttcatttttttaactggacttctttctcttttttcaatttaattattcactcacttttaggaaaataccatcgcatctctgtcccttggatgaaattaagtttaaatattaaatatatgtcaacattgagggacgcattcgaagagaaaggtaccctctggggttggtaccccatttacttattctctcctccactttttactacaaaatttgagacaatattatattataaaacatactg

SEQ ID NO: 248182 - DNA, 132 bp, Glycine max
ccgcgggccgccccacgccaaaaaacaagggcagaccacccacgtgaaacaaaccccaaaaccagcagagcaaccccgcacaaaccaaaaaccgcacccaacccacaaacacccaccaacgccaacccccca

SEQ ID NO: 248183 - DNA, 344 bp, Glycine max
  unsure (1)..(344): unsure at all n locations
atttaactctcttttgaatanaaattacccttaatatgaattactcanaagataatgtaaagtaaacttctttaatgccaaagataaatgacaatcaataaaagaagttaagggaaaagagaatgccaactcagttcttatactggttcagccacgccctatgcctacgtccagtccccaagcaacccgctcgagatttccactatctttgcaaatggcttttacanagtctgaaccaccaaggacaacccttcccttgtgttcagaagtccttacaactcaagagaccctcgatcccttaattaatctctctgaataacaagaggaagaacaacaattctctc

SEQ ID NO: 248184 - DNA, 320 bp, Glycine max
taaaccattccacctaatccctagtatcatctaacatctaccctctctctaacacaggtcatcaaaatcattatcttcaacagaaactaatcatctctcacacagaaaacctaatatccaatgattcttaattgggactctcctcaaaaactagccaatataaaagacacaaaaaactaaccctacaaatctcactaagaatcgtcattccttaacaagtccttctcattgtccacacacaatatcacagtcacagagacaaaatacaaagtcacccatccatcgacaaacacaataacacatatgtatatatgaatcac

SEQ ID NO: 248185 - DNA, 352 bp, Glycine max
  unsure (1)..(352): unsure at all n locations
cacacagtgcaaattttgaattccaatttaatagctgctgtcaatcatttttggccactggtaatcgatcacatcctttggtcatcgattaccacagagtaaatctcttgaaaaagactttttaacttaaatttcttggccacaccttttgctacttcaattacgaattccctctctatntaatatatccttcctaagtctctagagactgtcttgatcatccatcttgaatatctctaatttctttgtcttgaataaagctttgagaagcatgtgatcctctggcatcatcaaaanattcagcttgatcctttgtctacacacgtgacgtgctaataccttncctatgcgt

SEQ ID NO: 248186 - DNA, 386 bp, Glycine max
  unsure (1)..(386): unsure at all n locations
aaaataatatcattacttctctatttttcaactggctttttttgggttaatttttcaaatcgtacgatttacagtgcaatcaaataaaaaaacaataaaacatctgttaatagaaaaaaccgtcttagatttggataccttcaaagacggttattaaaacaaagaatctaacacgaatttgttctaataatcatttttgaaaatgcccaaatctaaagacnggtttcgaggtccaactcgattatatgacattacattctatgacgatcgtgaaaccataactataaatagagacattttacacaacatntaacacgacgatggttaaaaaccgtagtagtatactatctatgtagtagtcaatgacatatcaatatcaatgtata

SEQ ID NO: 248187 - DNA, 98 bp, Glycine max
  unsure (1)..(98): unsure at all n locations
tctcacccccngcacccccttgcaccctgtcagcccttgcttattcacactgaaggacgcgaggacagtatacttgcgacacaaatggagaatgctgc

SEQ ID NO: 248188 - DNA, 308 bp, Glycine max
  unsure (1)..(308): unsure at all n locations
tgcacaggttcgaacttgtgtcgcgctgttatgaccggaatcacccctaaacactcgagtttgagtgaaacaatgactatgaggctttggctgatcatcctctcttgatttctgtcatgcttactagcttattctatctatgactctaatactcgtgatcctatctctgaaaagttgcatgctcgtgagaactgattgattnacaacattcatgactattagttcactatggttgatatcctcgatgaatcaaacaccatctcatattgattgcgcactctttttgtactcgacgacagtgaactatt

SEQ ID NO: 248189 - DNA, 405 bp, Glycine max
cctaccaaaatcaaaatattaacaacatcattatctgtgaatcataacataattaacacttcatcaaaaaaatgtattatttactttctcaaatctatgaaggcgttgttttcaaagagaagcagctatacattccatggtttaggcttaggtactaacgtcaacaacaagttaaagaaggatgtatgagaatgagagaaagtgaggttgtgagttagtgtacccatgacggaaatgcaatgcatgcattgtatttatagaacaaatctaatagtagcacaactcattcagggatatcttagttgttgattttgtcaatgggatccttggccttcaatgtgcattactccaactagtgatatctaggccattgattctgtcatatgatctctgtcgttaacgtga

SEQ ID NO: 248190 - DNA, 300 bp, Glycine max
  unsure (1)..(300): unsure at all n locations
aaatggtaactgcccaaggcaattgtgccttattatttttagcagtttcttatgactcgcttagctcacactcgcgcttagcgagtccatatgacgtttgagtcttaaaggcccatacgcttagcgcgtctgctcggtaagcctaattccaaatacacacaatctagagaagtttttgggattagtgcgaagatatgcgcttagcgcattctgtagctctgattggtcctataactctctcttagcgagccgaggcgttcttagcgaatagaatgcttcttaattgnagtgatggtcgcg

SEQ ID NO: 248191 - DNA, 318 bp, Glycine max
  unsure (1)..(318): unsure at all n locations
taattatgaatatgactctttctgtgaattattctttattnttcagcatttatgataaattatttgccttgtaccatatggtatttacgatagcagtcatcctgctacagaaattctagtggtgtccactccagaccactattcaagattgatatagtttatgctgaaatgtaatcaagaaaacttaatttatttctatatctaggctgaagatttatccgtataattaggcaggtttttatttcttagaatgggcagactttatgtgatatgatctaatttgattcgatttgataataattattattccctctatta

SEQ ID NO: 248192 - DNA, 344 bp, Glycine max
tctcctccacctctaggaacctagaaatcactctaaaacctagaatcctctcgaaagctaaggttttttgtgctcccttgccctgttgcgtctctcacgtatatctctcattcttcaaaagctaaagactctcgcctcccccttttctcactaactctagctcttaacggctctctgtccttgaacgctcgcttagcgccattcttgtgctaagcgtgagttagtgatttctggctaagcgagtcacgcacgaccggcgagctgatggcgcgctaagcgcgtgcatgcgtggctgatgtcttgcttagcggatgttgctcgctaagcgcatatgcctcgcttag

SEQ ID NO: 248193 - DNA, 316 bp, Glycine max
  unsure (1)..(316): unsure at all n locations
ttttattttatttatttttcttgcattgctgctgaatgtctgattgagttcattaatttaactactggcttgacgataggaaggggtggtttttgtgctttcacggtttgtgaatccggagaggggcatgttgaggccatgagctatggaaatgggagcacaatataagcctgattggaactctgattgcactctcttaatgatcaatattggtcctcaaatctctaagggtatggntattttcatgatctattctcactctttaaagntgtttcctctctatagcaagtcattcagcttttacaatgcacacttt

SEQ ID NO: 248194 - DNA, 263 bp, Glycine max
  unsure (1)..(263): unsure at all n locations
actaaatgtattcatacatacatatgtcaaatgtgtgctttatctatattcgcatgtgtgctcatacaatacttacatacaaactacttgtattaacttaatacaagtgagccaaacatagctaacaaggtatacttagagactcaatgtccacactcttgccaacaagatctatcatggtgattgccacangtgcacaatctgccctgttgcatctaataagacttgatgaacaatgattgaaaatagacacagcaagtgtt

SEQ ID NO: 248195 - DNA, 289 bp, Glycine max
  unsure (1)..(289): unsure at all n locations
ccccccccctcgcaccgtctatgcaccccccgcgcctgactatccccncccnccgcaaccccaccgcgcctttttcccagcggtaggaaacaacacccccagactacacaacataacaggataagaacgaaaaagccttgtcaaaacagctaagaccgtataaacccaaaaaacgacgccggattgtgcaaaacatttggaaccatctctataagagagaccagccagactatgaacacgtactagagcccatacactgaaaggcaatgttcgcaaaacctaaccaacc

SEQ ID NO: 248196 - DNA, 400 bp, Glycine max
  unsure (1)..(400): unsure at all n locations
ccaaactcatgcttttacaaaaaggctcatcagtcaagtgaaatatggaagtaaccgtcctgcgaaattggggcacaagatgaattgagtcacatcactgcttcgtctactgccaaacatatttacgattgttgatgtncttgttactctcagtttcaccttgacaaacatgtcatgaccatgttgaaaatctacattgatccacacccatatcctgcttaaaaattcacaatacttcgactgtacatcattcgcatgcatccatgcttttcattggttgcattgctcattgcattctctccttgaaagataaaataaaataaaataaaatgaacttatcaaaaagaaaaggacacgctttacggcgcccttaccgaactcgtgctacagctagagtaat

SEQ ID NO: 248197 - DNA, 396 bp, Glycine max
  unsure (1)..(396): unsure at all n locations
gctcgagatgagtctgtgagcgcatgtgaggtcctataggtagaggagacatccccactacttgtattcttgcaatctttcattctcttctatttgctgaaaagaagcttcccacttatggaaagctaaatcctctgttggatcttcctttgaggtactcgatgtaaatatctttctatctatttaatgatgcttcgtgtgttcactgtgctatcacaacttcattctaccatgcttttgccttgatcacgtagatgcatgtgtctttatgatcatctaacagtggaaactggtctgattcttacaactngataggatagggctagtttatcgtattctctcaacgaatcggcgtatgataacctacttgttgtatgtttgctttactgccggcct

SEQ ID NO: 248198 - DNA, 236 bp, Glycine max
atctagtgccagtattaataaatagtttcctggaatttattccattggttcatgctatggaaagtcttgaagggaagtcttttggctgtatgatatccattcttcatagcatatatcttatactcaggtctattgcttatgggactgataacgattcagaatccccacattctcaaggtggacctgatgcacctgtatgggatgttaacatctcttctacattcttgaagaaatta

SEQ ID NO: 248199 - DNA, 369 bp, Glycine max
  unsure (1)..(369): unsure at all n locations
caatcaaggcagctccttacctacattatttacacctacttccaacgtgtatttgttacttacatcacacacatttccttggctaaattcacatacatgcatactcaacagcatttggggtaccaaaaattgcacatgtgcacatctnggtatttctaatacctatacatacacaaacttnatgatgaatcttgactatctacacaataaggtgctacatttcatgctcttttcaacgttttgctacctaaagccgnatgcaaaatcaagtatatttttcctttgctgacaaaaatggattcacactaaaacggacaccattttttggtagtggatcttctttacataacatgcaacatatttatgtat

SEQ ID NO: 248200 - DNA, 285 bp, Glycine max
gagatgagaagctagagattagctacacaccttctataatagctaagctcacccccatgacagaatacatgataatacaaaaaagttcctactacaaagactactcaaaatgccctgaaatacaaggctaaaatcctatactactagaatggtcagatacaacgcccaaaagaaggaaaaatctatttaatatttacaagaagagggatcaaccttggccatggggcaaaaactacctgacgttatgaaacctaggccttttataacctaaccactccctggatc

SEQ ID NO: 248201 - DNA, 296 bp, Glycine max
tcgttgaccacagagtggtacctggagatatgtcgcgggggtcacgagaccttggggacgtcaggtggggtgctattgcccaaaaccaagcttgaccaatcccgacccaacccgagcatagtcagtcagtgagaacctgtgatgtgactaaacaagcgagctcctggcagtcaacagataaaaggaacaaagaccacaaagcaaggaggcttgtgtggtggctcggcacttgtgaatcttgtgtgatatatgggttatggcctttggtaatcgatacccacggtgggaatcgatta

SEQ ID NO: 248202 - DNA, 317 bp, Glycine max
gtccttcacattcagtttgcgtgttcctgactatatggcaagagatgaattgaaaagattgagacttgtgttagttgttgattgttgaataagcctgaacacttgtgttcgagtgaaattgtagttgtaacgctttggttaatgatcctctcttgatatttgtcgctcttactagcttatttcaattgtgtttcataataatcatgttcatatctttgaaaagcctgatgtcttatgagaagctgtgattgaacattgtatgccattccattcatgtgattgaattctctggagaaaacaccttgtgaataaccact

SEQ ID NO: 248203 - DNA, 291 bp, Glycine max
  unsure (1)..(291): unsure at all n locations
gcctttgtacgggaagccggaaggtccatatcaccttcttaattgtacacatggggcactgcgccccaaatgcgcaagtaagaagagataatttntcgggctctcgtgtccgtaaaatgcattcatatcatgcatcgcataagcatctcttcataacatcataatggacatatcctgcatttgtccgctatcatattccagcctcacatttttcatgagtcatggcatcatcatgcatatgcgttcaacaaactttttgatctgaaaaatcgcataccattctgtttcatg

SEQ ID NO: 248204 - DNA, 433 bp, Glycine max
  unsure (1)..(433): unsure at all n locations
acctcttctcctttgtcttccgctgcatcctcatggtggaaaatcaccattaaaggaccttattgaagcttaaagattcagctttcatagaagcttcacaagcaagtttccatcacgaatgatgcaatcctaccccgcaagggcattggatagaagactccaagtagaatgggctagagatgcaagagaaggccctacggttctcatgagccttangatagaattcgggcccatgggctaagtatgagcccacttatcnttgtacatattagaataacggttcattaattntgggtctcttatttacggcttcataatgtangaagggtacnctagaaatataggatctttcagcccttgtatcttanggcacctagactagtttctgtatcacgggctagtntgtaatttcacatgcactaagtgaatattt

SEQ ID NO: 248205 - DNA, 378 bp, Glycine max
  unsure (1)..(378): unsure at all n locations
agcacaataataaatctccttatttcacaccaccgtgtgtgagcatcctcattatctctatgattccttccatctctgcgaactcctaattttcaaactaaatctaacatatgccaatgtctacttcaatatataaaacgagaaaccatcgcaaaacatacaattcaactctcacacataanaacaacaaatgcgtagagatagacctatctcacgaaagacaattaataaaccacacataccctacgaccaaaacttacaaaacatcgattctgtgtaggtaaaaccaatacaaaaaacttctactacctatggatggctcgcgtaaattaaattctcataataggcaaaataaaaagaacctctacctacatatct

SEQ ID NO: 248206 - DNA, 356 bp, Glycine max
taaaatcttgattatgctggtgtaagcacctcgtgacttctgtccagcacccctagaccaatggtcaaatggaggctgcaaacagggttgtccttaaatctgtgcgcataagactctacaagtccaagggtctatggaaggaggaactccctaccatactctacgcttatcattgttcaccccaaacaacaaccaacaaccaacaaaactcctttccaccttacatatgcgactgacgccatgatccaagtcaaagtcgaggaactgttgacaaggaggttgttctttcaagaacagtagaatgaagacaacatgacggtggaactagagatataggatgaagttcatgatatggc

SEQ ID NO: 248207 - DNA, 306 bp, Glycine max
aatgtgctattggatttcaagcttaaagcgtagagtgagccacgcttaagcatggtcaagccaagcttaagcatgattaagcttaagcatacggcgagccaagcttaatggtgaaaccttgcagaacgtgtatgaatgacttccaaatggatctcaattagaatttccttagtgtataagaattatgagatgcataaataggtttctaacgttatgctaggaattaagtatgaattccttgcactctaattgatgttattgaattgttatcgtctcaattacagattgcgaggacttgtgatcatc

SEQ ID NO: 248208 - DNA, 272 bp, Glycine max
aaccaattcttcagactcaagtctaccacagagtgacaatgaacacatactgttaattaataacacactccaaagcggcgacatattatcttgccaccacttaagcttaaaggtagagcctactattgctcctccttttggcagaacaacacccaaatattgttcatacattccctcccaatcataataagttgcacccagaattggtctatcgcccacacttaagccaagctcgagcgttacatcctctactgtaattatacattatccaa

SEQ ID NO: 248209 - DNA, 134 bp, Glycine max
gctgaggcagccaaattgcccccctatccgcaaagctgtatcctattctatcgatgagacaggaaacaacaacgtacgatcagcctctacaaatttccttgccatctgaacaaacaatgcattatcaaatggac

SEQ ID NO: 248210 - DNA, 381 bp, Glycine max
caagcaatcaatggggcaaaacacaccaaatgattatgatgatggatggctcacattctcacaaaggtaaactcatcactttcaaattgagctttcaaaactatcatgacatgtagaggagaatcaaggatttcaagtcacaaaatgtcaagacttttattctcaaaacaattacccatttcttgaacatatcctataattcaaagaaaaaaacatgcaaagttgtacatgcccacaaaatcgacccaaaatattaaactagaaatccgacgaaactaacaacattaacaaattaacacaactaacaaattaacaagaaactaacaaaactacgcaaacccaagaacactcccccccccccccccatacttaaacaacaca

SEQ ID NO: 248211 - DNA, 320 bp, Glycine max
ggataaaaggggatgtatcatgagatgtctgcgggggtttgacccatgccggcgccgaagtgacagcgtgggcatctccctccttactctttgcaccagttgctccaattcttttagcattggcacttgtggaggaaacgtaatccaacttccctcttttcaaccatactctaattctttcctcggcgaatacttggtccgcgaagctggacggcatgtaacctaccaacttctcatagtaaaacactggcaaggtgtctaccatcatcgtgatcatctctctttcgaccatgggaggggccacttgtgctaccaggtca

SEQ ID NO: 248212 - DNA, 454 bp, Glycine max
  unsure (1)..(454): unsure at all n locations
atgctctctctggtcattgtaatgcttgacattggcaatggatagtttctctctgagatgcttgacattggcaacttgattaacaagaatgtggagacttgttgtacggttcgagatgcttgacattggcaatgactatttcatggttagatttgaacttgaagaagatcgaataaagatgattaacgagggcctttggatggtctctgaccattatttgatagtgcaaacctagacaccggagcttatctcactagtggctaagattgatagagttatggtgtggatntgcttcagaggattgaacttattttactatgatgaaacgcatttatccactcttgctagtgttgtggggagatcaattaaggttgatagcaacaccaaacgtgtctggcgaggtcactctgcatgtgttgagaatgacttgatgaagccagtcganggaacatat

SEQ ID NO: 248213 - DNA, 202 bp, Glycine max
  unsure (1)..(202): unsure at all n locations
ccccacccccacccccacccttcccatcccccccacagcccgtacctaactgaaccccccnnccccgcgacgaaaaactagtagctaccacaacccgaacacaaatcaccacaaaactcccacaccctacgagaacaacaccgccaagatgacaggactaagggacacacaagaaaatacaatgagggacaaacgcatgacc

SEQ ID NO: 248214 - DNA, 186 bp, Glycine max
ccgagaaaggagtgaggaacttggaccgacaagtaaatagcgagaggcgatgagaacaaataataattacacaaaaatgtttcgcatgcgtgagcgaaaaaccacccatgccaccccattactgctccaatatcacgtagtgacgacatccccaccatatattccccatcacacacataaacaaaa

SEQ ID NO: 248215 - DNA, 298 bp, Glycine max
  unsure (1)..(298): unsure at all n locations
ctttggttcctttaaatatttgcctctangattgcttgctattgcttatatcttgatggcggcattgatggccaatttacacataggaatataagatctaagctacgtggccaatggaaaaatactcactagacaagactagtcatgctttgtggcagtgaatgttaagaacgtaactacaaaccacggccaaaaataagtatggccgagataacaatgctgagaccgactattggacaaataacaaagaaaaggattaaatcacgtgtcagacagaacatttgagtagcattacttg

SEQ ID NO: 248216 - DNA, 76 bp, Glycine max
cccccctcccctgatgtgcgccagtggcccctcccccccgcccgcctactgatctttcgcgtcccagcacaccagc

SEQ ID NO: 248217 - DNA, 333 bp, Glycine max
ttcttgcctttctattattctcccttgataaacaataatactataaatccttctatagcgtgaatgaaagctcttttacttgttattcttgagcgtgagtattttaagagttttttcttccatctctttcaacctctagttctaatttaaatttccatcttttaaaagaaattccgaataattaaaacatctaatatactccctataaatcttttattataaatctaaaatataactcttatgtctcaaaatatctatttcttatacattctattcagaactataatcatatattataaattataaatcttagttatatgaaataaatattta

SEQ ID NO: 248218 - DNA, 326 bp, Glycine max
  unsure (1)..(326): unsure at all n locations
tgccaccccggaagagttaagccaagcccctacttttgaggggcaactcccaccttatgaagactatcccgggcaagacgatggggaaggagatacctatcttgtgcccctgctccacctcaaagatccgtccccgcatgaactacnccagccgaacatagtccgccatatcccggcctcacccacacccgtaaaagaatctgttcccttcgcggaagataagggaaagattgacgcgcttgaagagaggttgagagcagtcgagggcctcggcaattacccattctcggatttagcggatttatgtctcgtgcncaacatcgtca

SEQ ID NO: 248219 - DNA, 305 bp, Glycine max
  unsure (1)..(305): unsure at all n locations
taagcttagcatgatcgctaagcaacaactcatcagtggctaagcgggagcttattgtcgcaagcgcaattccttacggccttaatngaggtccacgacgctaatcgccagtcatgacaactaagcgagattctttgccgccatatgagcactaagcgagtacctatcagctaagcgcttgctcctctgtacttaagatgcatcattttagctaagctggctagggccaggcttaccaagagttgtacctntataatctacaagtctcgctaagcagacgtaccctcgcgctaagctgagtctct

SEQ ID NO: 248220 - DNA, 435 bp, Glycine max
  unsure (1)..(435): unsure at all n locations
atgacgggaagtgtggttttcgaaatctgcactttgtgcagatntttgctgtgaaattgtgcagcagagttttccacaagtgcagaaaaatgctatgcatctgctggttgtggaaagagcagtgcagaatgagttctgggtgttctctagtagatcccaacggtcaaaatgtaggcttatgtactagagatttccagtaaaattttcgagtcgatccaacggttaacgaactggaacgaacgaaatgtttctggggtatcggtatgtgaaaagctgtgattttgcgtggtgtcttgggcagagttttctgcctctgcctgtttcgctggctggatagcttgcgcttgttgaatttgtatactctgatgttgggaagcttggaggatgatggcgacccgtgtgagagaacacgatatggctacgcggagtcctgac

SEQ ID NO: 248221 - DNA, 302 bp, Glycine max
ccctctggaggaatcttctggagggcccaagtgggcctgattactatctgcacccccattcttactaagtacacccccctgcccttttcttggtgattcttttttcgtaaagttaccaaacttacgaatttcgtaacgatactttgtttctttccgtaatgttacggaaccttgcggattacataatcatcccctttttgacttaccgaatgttacggaacctcactaattgtgccacgatgcttccttttgatttccggtgcgtcacggaaccttccggattgtgcataataccttctttt

SEQ ID NO: 248222 - DNA, 311 bp, Glycine max
  unsure (1)..(311): unsure at all n locations
atctagaacgatgggtgatccagaggagacacaggaacagatgaaagccgacatgtcggctctgaaagaacaaatggcctccatgatggacgccatgttacgtatgaagcagctcatagagaagaacgcggccaccgccgccgctgtcnttccgctgccgaacagaaccgacttccttggaactacgcaccatccttcctcanacatagtaggacggngaagggacgcactgnggcacgatggcagccctcacctgngatacaaccgagcggcttacccttatggattgccgcccaactattcaccaccca

SEQ ID NO: 248223 - DNA, 412 bp, Glycine max
  unsure (1)..(412): unsure at all n locations
gcctcggaggaaagaggtatgcctatgttgttgtggatgaattctccagatttacctgggtcaactctatcagagagaaatcagacacctttgaagtattcaaagagttgagtctaagacttcaaagagaaaaagactgtgtcatcaagagaattaggagtgaccatggcagagagnttgaaaacggcaagtttactgaattctgcacatctgaaggcatcactcatgagttctctgagccatcacacacaacaaaatggatagttgaaagaaaacggatttgcagagctgcaggtatgctatgccaagacttcctatatcttgggtgagcatgaccagctgcttttccacagagtcccttaaaaggctcacccctgataattgaaggagagcactgtagccttccttttga

SEQ ID NO: 248224 - DNA, 297 bp, Glycine max
  unsure (1)..(297): unsure at all n locations
atcattaacaagccttgatcagaatgctttttggttttcaattttgaaatatttgacctaatttcgcctttctttttaatatgtttttgttttgaaattacattttaaaacaaaaaaaatcaaaaattaataaccacacataacatgacctaaatcattctgaaataattaacacgcacacctaacatttgtttgttaaaaaaattaacctacactatttctttnttattattattacttgcttntaaaaaatagctaaacacaaaacactctttatttttttaataataataaaaa

SEQ ID NO: 248225 - DNA, 318 bp, Glycine max
  unsure (1)..(318): unsure at all n locations
atggatagatgtaaaacctgcttaccaccataagtggagaggttgttcttgcattagaatcagtgaccagtagtgcaaatgacaacaaccttaacctcaatcctcactcttggattatcggctaatgtgtgaataaacatatataattaatactacctccggtcatatatataagaaacaagacaacattctcttggttctaattataagacacatangactactttatcgctaaatttcttttgtacccctaattaatcgggaggtctattaatgatatacactcattntccgatgaaagtgggtgcatttattgag

SEQ ID NO: 248226 - DNA, 95 bp, Glycine max
atgacaccactgctgagatgaagatatgcaaacgtatggcaagaatgcacatgcgtgcacctaatccgacaactctgtgccaaaccacaagggtc

SEQ ID NO: 248227 - DNA, 300 bp, Glycine max
ttgagccttgtcttactcagcaacagtcttggccatcttctcctagtttttctgttggatgtcatcttggtccactagaggaataggcatgttccctctgatgtctaccttcattgcttttaggttgataacaataaagtgtagttgcttggcgatgaaaagacctttacttatgattgattgctcggagtcctcatacattctttcaaagacatgaaagacctagtattccaagatgagtttgttgatgagggcgacatagtatatgtcatcctcttctcccacggtattcatgtttct

SEQ ID NO: 248228 - DNA, 408 bp, Glycine max
gcaagcttgcacttgaggagggaaggatattcgcttctgattaattatctatctaaccacttgtccttgagatctactgttctctgttgctacatatgaaatataaatggtataagggtatcgcgtaaaaacatggcctatatctacttctaagattgttaggggtaaaaatgatcatgtccataacgcatagccttatattatttatatttacatattaggaaaaaaaacagtcaaatctgaaggacaaatagttaagaaagttgttcattagctgcaaatgtctttccctcctcaagtgtaagcttcttgcgtagccgctgttggtgctcagaaaatcccacaaacaaagtcctcttattactagctattttgaatctttagttctgaatgacaacttcaaatttt

SEQ ID NO: 248229 - DNA, 263 bp, Glycine max
cacccccctcccagacacaccgacgacgcgattacgcgggagagttctcactgtagaccacaacatcaaactatccaagctctagatgattctttcagctcgtcttgcagtcttgctataaatcttcaaactcttgatcaaccttctttctgaacttccatgcaagtcctcaaaaaggccaatcttccaatctgactagctaaaacgggttgttggctccacctacgcatatgaccgtacatgctatggattcgctaccggct

SEQ ID NO: 248230 - DNA, 244 bp, Glycine max
  unsure (1)..(244): unsure at all n locations
tactatattcagtactactagacacctctcactctgtgttaccaacacatgcatccagacaccacgagtgagacacacacacaaagatcatgaccagtcactcaaatcttagtcttgctatgtagttggattcctttatactatctatgctctgcggttaacaaatatacgnctcctaattttgaccatttgcgccgaaatcattattaacaaccctagagctcgttaatcttttcatgaaagt

SEQ ID NO: 248231 - DNA, 211 bp, Glycine max
taatttcattttcccttgttttgacttaactcctcgaataagtactaatatcaagtttcgctaatccctattttctccctttggcatcacaacaaccacagtgtgtcagaaatatcacatcatacatacctgactaatcaaacaagagaatacacaacaatctcacacgatatcttacccattcatcaaactaaacagatactagttccta

SEQ ID NO: 248232 - DNA, 291 bp, Glycine max
  unsure (1)..(291): unsure at all n locations
acgacaatatttctttacttgtatgtctggcngagccccggaatatatcaggacgcactcatctgaacgctgaacctgatagcaaattcaaacgacaacagcnttttaaccggaactctgatgagtcccgtaatatatcgagacgctccaaattgaatgctcaacctataagccaattcaaacgaccataacttcttactcggatgtccggttgagtccccgaccatatgcagacgctcgaaatcgaatgttcaacctatgacccattcaacgacataacttttactcgat

SEQ ID NO: 248233 - DNA, 447 bp, Glycine max
  unsure (1)..(447): unsure at all n locations
ccatcacgacccactcttggttcatgaccaacacacatactataatttctctaccttggctagcctaagagtacctcacttcaaatcacaattaaaagaccaatcaaaaggggttatcgaatatccgacaaagtntcccctaaaaacaagaataatctcatattgaataacctatgaaagcctatcatatatatatatatatatatatatagcacccatcgttagatatcaagactactgatcataacataggcccctcgacatactactccaaaatatcaactaataataatgtcggccatatatactaatcatcaaagtgtcttaacacatcataattacaccataagcatatttacatgataggatcatctatatctcaaaataaagaaatcttctctatatctattctctacactatccttatcattgatcatatcggagtac

SEQ ID NO: 248234 - DNA, 270 bp, Glycine max
  unsure (1)..(270): unsure at all n locations
tttcacgccgtcaccaaacttatcattactaccatctcgattgatttacttacaataacaattatcttgatgatcgactactacagatatttcaagccatccatttacatcaagagaagtcaacactacaaaggtttctgatcgatgcattagcatcctcacctaacattcactatttgcccacaccatgtactgatactaagcaggctaacataacctccccatggtatatntgaaactcttttctttaagctgacaactattccttat

SEQ ID NO: 248235 - DNA, 309 bp, Glycine max
  unsure (1)..(309): unsure at all n locations
gaagaccataaaacctttcctaatcttcgaaagaagagatgaatcttctccttcatatccttcttcaccaacatttctagcacccttcttcacccaagatccatcatgctcctttatataaccaaaggatgctatgactgaagcgcctataaggaatgatctcttgattggaacataatgttcagaatcaacagggatgttgaagtgtcgaaggaaaagggtaacaagatgaggattanggcatggggcattcaatccaatgcttatgcatgcgatattaacaaggtgtgccaatcaatttgtaacctt

SEQ ID NO: 248236 - DNA, 149 bp, Glycine max
tgagagcatgatatgagtctgtgagtgatcgtgacgctctacaggtggaggatatggaagcacagcttccaagcttattttgatgatgcccaagactcccgcccagaatcaagattccagctagtttcaagaatcacagagtcatttca

SEQ ID NO: 248237 - DNA, 205 bp, Glycine max
  unsure (1)..(205): unsure at all n locations
gcttgctaccccatgtgagtctctttcgatgnctacctgaatcaaataaacattaaaaatgcagtatctaggaagtgatcctacgtcgtctaccaacgagcaatgatcaaccaaacattcataacagatagtaggaaaatagtaacgaactggggggggggggggcgtcccncctctccctttctccccattcctttcccttact

SEQ ID NO: 248238 - DNA, 388 bp, Glycine max
  unsure (1)..(388): unsure at all n locations
agctcggcgtatcgcttccttactcataataatctnttcttcttagnngagatccacgagtagatcttggaggaaaataactaccacctatttcaactatggctttcctcttttcttagtgaggctgaacttcttgcacttcatctttaatattttgattattgtttgcttcacgaaggtcaccactcttacttttttcttatttgatttaataattctagcatccagtgatgaacatcatgaggaactcttttgtaagagctaatattacttagtatgcttgcaagatgttgcttcattctatctatgcctcctcctttanaagaattagttcaatgaagacaagtgtagacatgagtttttccttcctttttatatganacatgct

SEQ ID NO: 248239 - DNA, 352 bp, Glycine max
ctccccccctccttccccctcgagacccctcttgtgttacgattcaaactggcttacaacataacagatgacactgggacttcttgtaagaattgggctgccccacgactggctctctgcacctaagtaacgtgggaaatgcttctcaatggtgtgtagatatatgtgtaaatataaggggcataaaattcctcgcaagtatgaataattgttttcctaaatgaatgtatgatagcgtggaatgccctttcgaatgccaatatgtgcacgatgtaattagctcttccatatgcctataaatacatatgagtgaaacaataaaaatttgtatggcgtacttcacatgtatgta

SEQ ID NO: 248240 - DNA, 196 bp, Glycine max
cacagaccgacccaaaccccaaacaaaaacaaccggacgaaaacgaagaaaccaaagaagaagacgagaagacatacgggcggatcggagcgcccaccgggcccctctccggccccagcccccaaccctacaccggaccagaacccaccccagccccctcacaccagaaaagaaaaacagctgcggaccaggaacg

SEQ ID NO: 248241 - DNA, 204 bp, Glycine max
gggactggtctcgtccaccctctaagaacctagaacataactcctaaacctagaatctttcctaaagttaggacctttgcttccttgctcagcttttcctctgttctctgcatacaattcgcaatcaattcagacctctttcacgtcgtcaccgctctctttgtttctgtgaaaatcaggcttaaaaagggcttcttaacctcg

SEQ ID NO: 248242 - DNA, 204 bp, Glycine max
cgcactctctagaaaatctctgctatctataagactcagggtccgatgacatgccgcaaccacttggccccacacctttttgctatgtataagactcaaagcatgatagaacgcagagactaatgtcgtcttctgggtctcttcccatccagaggcgacgggcccgatgacatgcgggaaccacttggtcccccactttgcttt

SEQ ID NO: 248243 - DNA, 318 bp, Glycine max
  unsure (1)..(318): unsure at all n locations
taagtgcacccacccacagggaagctccccaagttccaactccgaacacgactcggttggccggtaattccaacacgacaaggaacttccctccgacgccattgccggaattcaccccgctcccaatgacgtacgaagatcttntaccatccctcatcgccaatcatttggccgtggtaactcccggaagggtcctcgaacccctttttccgaagtggtatgaccctaacgcaacttgcaagtaccatgggggtgtcccggcgcattctgtcgaanaatgcttggcccttacatacaacgtccaacatttaatggatg

SEQ ID NO: 248244 - DNA, 247 bp, Glycine max
agcattaatgttctccacacgccacaacaccatggccgagccctcagccgccacccaacattacccctacttctcacaaacgcaccaataccccctcagaacgactcctaatcctaacaaccacctcgaaccacaaaggctcatcggttcgacccagcgccaacgggtcaaccacgtcaggagtcatgacacccaagcgcaactgaatcccaaccggagcaccgaaccgaagcccaagacatctccc

SEQ ID NO: 248245 - DNA, 219 bp, Glycine max
cggcccgacatgccctcccgatttccagatgggaaattggcgactggaggaaccctctcgcatctacgcaacgagcataatgtaaaccctttacgctttaaaagctctatagctgggcccaggccttagagtcttcatcctgctaacgcttccggtctttcgctgccgatttgacaacaccaggacctttcttcatccgtttctagtctctacccactc

SEQ ID NO: 248246 - DNA, 389 bp, Glycine max
  unsure (1)..(389): unsure at all n locations
gggaaacaagacaaaatgggacaaacattacgtccaaatacaatcaaatagcagtttatcaagtgtgtttaaacattntaaggaaatctttgctactaatttaatatgccaatgttaatgatttggcaagcgtaccaaatgtccaagtagtaaagactcagaagtccgagtgtcaatttttacagggactttgttttgtacttgtgttagataatttccaatttataaaaatagaagatgaaatgaggtataaaagatgaattaaaagaatacgataatcaatactaatagagaacacaaggaaatcatagagaaataaatgagatgacgatgttaggacctaccatgccttatttgcctaaggtgtattaattgagattcttcttatc

SEQ ID NO: 248247 - DNA, 375 bp, Glycine max
tccgatcatcctactaggacgactgagaaaactgcggcaaatgaacagggtgagaaagagggagaacaccatgctgtgactgccattcctgtacggccaagtttcccaccaacccaacaatgtctttactcacccaataagaaaccttctccttacctcaccgccagttatccacaaaggccatccctaaatcaaccacaaagtctgtctaccgcactttccatgacgaacaccacctttcacacaaaccaaacacaccaaccacaaaatgaatctttgccgcgagaaagcctttagaattcacccaattccagtgtcctatgctgacttgctcccatatctacttgataattcactggtagccatcaacctacc

SEQ ID NO: 248248 - DNA, 217 bp, Glycine max
  unsure (1)..(217): unsure at all n locations
tcgcgcataaatccaccatcctctgctgcccaccatcaantgagctcacgtactcccacgtaccccatatactggtttctctcaagaccgggtcnccatcaatcctcccaagcttcccccacatccaagtaatttaacattcaaacagcacaaactatcacagtcaagataacagggcaaaggcagaaaactctgccacaaaacacacaaaatcaca

SEQ ID NO: 248249 - DNA, 319 bp, Glycine max
gcttccgtttaaactctcgaccatctcgatatattaccggactcatccggatatccattataaagttattgtcaattcaattttctcagagcttcggatcttaattgtgagcgtctcattatattacgggactcattcagacatccgtgtataaagttattgtcaattcaatcttctcagagcttcggatctaaattttgagagtctcgatatattacgggactaaatcattcatccgagcaaaaagtcattatcgttcgaacttgatacgagcatcagtcttcaatacggagcatctcttgataaattaccacactct

SEQ ID NO: 248250 - DNA, 263 bp, Glycine max
cgtcgcgaaatagatcgacatgctctcatttgaaaaagaaagttcatagcaaattcaaacgacaataactttttacacggatgtccgattgagtcccgtaatatatcgggatgctcaaattgaaaacggaagcccctagcaaattcaaacgacaataactctttactcagatgtccgacagaggtccgtaatatattgagacactggcaattgaaaacacaagcttgaatcacattccaacgacaatatctctttactcggat

SEQ ID NO: 248251 - DNA, 476 bp, Glycine max
  unsure (1)..(476): unsure at all n locations
agcttacgtagtacatatcctcggaatcttggaacctttatgattcattatgagctctttttcgttgattnttttatcagttcaccttttcattatttaatttatgtaagtagtattatatattattcttttggtccatcacaattagtaactctagtagttntatgaagtttaacgttgaaataagtaactatgaaggaatagttttgagaagtttaaactttaaaggtagaaatatagatatatatgtggtatttttttcacatttcanaacacgagttatatacaccacgtgcttattatgggctttatgactntagttnttacacagcacataaagtctccagcatgctatattttctttgactttctatataatttctatagcttctagattcttctaattattggctttgtctatatgcaaagnataaacattantttacagtatccgcgttttgcttttggcaagtact

SEQ ID NO: 248252 - DNA, 357 bp, Glycine max
  unsure (1)..(357): unsure at all n locations
ctcacaaacgctgtgactttttcaaacgggtcttaagtctctttaaaagtactaactcttctcaatggtcttctcgacacacatgacgagcctatccaagcaaggcttcgtttttcatcttggatcaatcattctccaattcctctacaaaactcatacaatctttcacaagccttgaatntcttgacatctctttgaactttccttcttcttctaccaaaagctttatgaagttttctggtgttccaaacctgaaaacctgcgccattcatcacttctattctcttctccctttcccaaaagaattccgcaacgactacatcgctgactctcttcgcgctctcttcctctcttcca

SEQ ID NO: 248253 - DNA, 361 bp, Glycine max
  unsure (1)..(361): unsure at all n locations
atgcaatataattaagaaacatttccttatcattaggaaacaataccgaactattaaatttaaacatcaaaaacaaaacacatataaaaatattaattntaaaaaaattatttatgactttaaagttacaaacaatctaccacttccaaactaaatcttttacaaaaattaagacacagtaaaatctattattatttcaataaaaaatattaaaataatctacgaatctgaactgaagtcgaacaatatgttacgaattattcttctgggtatgtgtttaaaatctattctatctcaaaaagaaacttatcctgaaagatcgtttcgccatattctgcacaaattgatctgaatatagtac

SEQ ID NO: 248254 - DNA, 313 bp, Glycine max
  unsure (1)..(313): unsure at all n locations
ctaactcttataggcgactctgagcgtctgtttatggaggagctcgagcaatttctgattatctctttccagcattgcccgcactcatcaccttacacgatatggcgaagatgtcgatgacgtgaaggtcatgcaacatatacttccacacttacatccacgtntcgactctattgctaccaacatcgaacaaaacaaggatttaaagaccatgactattgagcaactgatgggttccttacccgcctacgaagataaacaaaagagaacaatcaacataacgaggctacggagcaactactacaactcaccg

SEQ ID NO: 248255 - DNA, 240 bp, Glycine max
  unsure (1)..(240): unsure at all n locations
cagtaactatcactgcattacagaagagagagagacagggtctaagactaaaaaanaaaacaacacccttttaaaacaaaactaaagcccatactattgctcatgtaaaagacagaatctttctcttatctacagtacgtgcaatcaacataaacactaccgctcctgagacctgagagtgtgactacctgcaaaaatcaacgcggcggcggcctggtggttggcgcgaccacctacagc

SEQ ID NO: 248256 - DNA, 419 bp, Glycine max
gcgttatacataacgaattatttgaatttctcataaaatcctatcctcgaggcggtagggattacaatttccaaacctgttcggtgtgaaaaatagcctgaacccattcaaacattttccaccaaaggtctatagcttatgaaggtgaactaaaattgttaaaaatggcgatgacgaaactgacagacgccggctcggatatctatttctttacatctgaactatccgtaaccttccgtttgctgcatggaaaaataaacataaaactaaaatgcataaactatatatggagattatagtatctttaccattagcacataaaattatcgtacaatgaatctaatcaaagcaaactcaacaatgtgccaatatggtgtataatggcgaagtatattcaacgatcattggaagtatgacaa

SEQ ID NO: 248257 - DNA, 285 bp, Glycine max
gcgtccgctaagtgcaacactgatgggctaagcgcgaggaagactctggaagaagatgagctgcacaagttctctaagcgcactgcttcatctcactaagcgcaccgcttcagttcatccgctatgcgagaaaggcacgcgctaagccgaaattcactaatgtgtgctaagtggtacagaattgagctaagcgcacgagcacgcacaaggccacctatttaagcttgaaataagatttcagaaagggagtttggactgggtttctagagagagaaaggcacagtt

SEQ ID NO: 248258 - DNA, 425 bp, Glycine max
  unsure (1)..(425): unsure at all n locations
tgcaagctggcatctctacccgtgtttctncacgtatgtctatggcttgcgcttggcttgcctgttctgtaccttatagcatgacctcgctggtgcgaaaacatggatatgatctcggatttggaggaatcacgcacttgaggaattgatttcagatggacaagattcattatgataatcatgacatgacgaagaggatggagatgaagataacttttggataaacaccacaatgatgattcatttgttttgttctcaaatttactagtgaagattaaattcatttctcattaacagttaagggggaaacttcatgcattntgccaaaacatgggcgaagtattggtgcgtggaagttcattatatcgagtgtgatggaacatttaagaaaactgtccaacgaagaaataacttactaagattat

SEQ ID NO: 248259 - DNA, 347 bp, Glycine max
tgtgcgtgattcacttcgctacacaacccatgaccctgctaactcttgcatattatctgattgcaaagaaccaacgtatctatttaatcttaacctgatctacaggtgcacgggaccttcatagtatgctgtcggcaacggaactatgttatcaaagctccttgctctggacctgcgaagctggactgattctagtatggatgctctcttgatatcctttgaacaagcctcgtacgtaccctgtaattcattaaccaaacaacagcaagacattacttttagttgcatactattaccaattctgatagctgcatttactccaatgaagaacatgccttcccacacat

SEQ ID NO: 248260 - DNA, 302 bp, Glycine max
aaacccactcaccctcattaagaactagctctgttcttcatctattgtctttagttgaatacacctttgttcggtcctctatttggttcttaaccctctcatgcaacttctttacatattctgacctagaattcccttctttatgtataaaagaagtgcccactgggaggggaatgaggtctaacggcgttaggggattgaacccatagacaacctcaaaaggggactgcttggtggttctatgaaccccccttgttgacgcaaattctacatgaggaagatactcatcccaagacttatgg

SEQ ID NO: 248261 - DNA, 448 bp, Glycine max
gcaagcttggagaggatgcttcaatggaggaaatgttagatggagagaaagagagaggggggagcacgaaattgaaggaagaaaaagggagagaagttgaactttgagttgtgtctcacgagactctcattcatcacagttacaacaagtgttacacatgcttatatttatagactaggtagcttccttgagaagctttcttgagaaaacttccttgagaaacttctttgagaaaacttccttgagaagctagagcttagctacacacacccctctcataactaagctcaccttcttgagaagcttccttaagaagattcctaaagaagctagagcttagctacacatacctctctaatagctaagctcacctccttgagatgagaagctagaacttagctacacatcccttataatagctaagctcacccccatgacagagaacatg

SEQ ID NO: 248262 - DNA, 402 bp, Glycine max
tggagatgtagcgaaagataaaggagaagaggtaagaggaggcaccatccactatggaatcagccatggaaggaggagttttgtaacgcccagaaattttgataattgaaaatagatgtttgatgtttttcttgtgttatttgattacttgattaatttggatgagttaaggtattatgtgaattatccatgtgtgattctcttgatgtggatgttgagttatgtggacttttattgacttaggttgaaattatgagatttcaagttttacttaaacctggttcactaaaaccacaatcctgaattagttaaccgttggatcgctttcaaatttggaccgtagacttgaaacccaattgtgataatctgatttgtgggatgacaatataacatcttgaatat

SEQ ID NO: 248263 - DNA, 302 bp, Glycine max
gttgacgtgcttcacctttggggacttccagctatcacctatggtagaagaatttgaagagatcctatgatgctctctagggggaaggaaaccctacctcttctcaggattctatccctcattagctagaatctccaagatagtccaaatctcggcgcaggaactagaccacaggaagcaagtcgaaaattgcgtggttggaataccgagaaaatatttggaggccaaagacagaatcttggcaggtaaggcgagcgggccccattcatagatattctcgcattgctgattttcggaggagt

SEQ ID NO: 248264 - DNA, 441 bp, Glycine max
  unsure (1)..(441): unsure at all n locations
ttataaataaatcttgttttatggttaacgttgtctctataacatttccattggatttaatgacgaaatgtgtgcatttttaggtaaaaaaaaggctaagttttgaattgcaaaaagtagcagttgggctaagctcaacagttgggctaagcgcataaccactgctaagcgcagcttcagcgcacttagcgcaaaggagaatctggtagagcatcagcatcaaagtcacgcgctaagcgcaagatcagtgtgttaagcgcagaggtgccttcagccaggctaagctcgagactggcgctaagcccaatttcacttactcgtgctaagcgcgagggtggcgctaagcgcaatgtcacaatttcagagcctatntaaagcctattctgtgcacaaatanggtacaatgcccacggcacanaattctacagcagccacaatgcc

SEQ ID NO: 248265 - DNA, 293 bp, Glycine max
gatgaatgagaaagctgcggcaaatgaagagaatgagaacgagggaggaacccatgttgtgactgtcattcctacatggccaaatctcccaaccaactcataatatcaatactctagcaataccagcccttctcattacccacccaccaatcaaccacaaaggccatccctaaatcaaccacaaagcccgcctgcctcaagcgaacctaagggcacatcaaaatttctcacttggtaagttgaaaactccaaagggacgcctaagccaaaattacggttgatataaaattaaa

SEQ ID NO: 248266 - DNA, 252 bp, Glycine max
aaatgacctgaaaaagaaaggaattacacttaaagcctcatcttttattcaagaagaaagtgacatagaggacttgaatgaattacaagaagatgatgattttagtttcttcataaagagattcactaagtttctaaggaataaaggaaatcaaagaagaaaaaatttcattccaaagaaaagacaagaagattcatcttctgttccaaagtgttatgaatgtaatcaacctcgacatctaagagttgattg

SEQ ID NO: 248267 - DNA, 362 bp, Glycine max
  unsure (1)..(362): unsure at all n locations
actcctcttggcctcacatgaaccccaatattttcgcagctcctgatgctatgattggtttgcgcacactccttcacatgtaaagtcaaccaatctcctccttaccctatgtcttgcgacattgtcctcatctacagatctccttctattcttcttacgccttcctctttggaccctnctatgtggtggaacagggtgtgcatactgtggctaggcctaatattgcggtccttggactgcgtaataaaatgccggtctgtcttattataagcctctattgacagccagtcatgacacatgtcctcacgcttcccttctttgcgagttatctgtgcaatggcctgcatcatgggctccctaca

SEQ ID NO: 248268 - DNA, 380 bp, Glycine max
cgagaagacgcaaaactgatcaccctgctttgatgaatacaaagcctcgggcaaatatagagaatgagaaggagggaggaacccatgttgtgactaccgctcttacacggccaaatttcccaccgactcaacaatgtcaatactcagccaatatcggctcttctcattacccaccaccctatcaaccaagaacactcaatcattcacaaaggcccctaaatcagccacacagtcttcctatcgcacatcaaataccaaacatcacctctaacccaaaccaaaacaccaaccgaagaaggatatttccagcacacccacctctagaacttacgccaatttcggtattgtatgctaacttactctcatatctactcaataat

SEQ ID NO: 248269 - DNA, 240 bp, Glycine max
tttccttgatttgaagctcactacaagccttaagtgaaaaaccatgatatcaccatatccttaaggaattccggagctttggaattgttttgggaataagtgtggggggtttttgatacattggacaactagatttgttggctatgcttcatgatgtatatcgggccatacttgatgcacattgtatattgctcaaatgttggacatgctgaatgaaacgtcgttactcaaaggctacaa

SEQ ID NO: 248270 - DNA, 294 bp, Glycine max
  unsure (1)..(294): unsure at all n locations
cactcctctaaggacaatagcatcactntcggcactaaactgctgggagtttgaagtcatcttctcaattaaatctctggctccagcaggagtcatgtctccaagggctccaccaatggcaccatctatcatacttctctccatgctactgagtccgtcataaaaatattggaggagaagctgctcataaatctggtggtgagggcaactagcacatagcttcttaaatctctgccagtattcatataagctctctccactgagttgcctaatgcctgaaatatccttcctgat

SEQ ID NO: 248271 - DNA, 274 bp, Glycine max
ttataattgaacgacacaacttatactatctactaagtgctttcaatgttctccaattaaatgtcacagcttcatctcagtaacttctttaataaatgtctgcataccaattacgaagatgaaactctaattctgattagagaacacaacaaacaatacctatagaaatcctttcacacacaaacttaatgccattcaatagaacacacacagtctatatattgcggcttatctaacatcctcacaatgtctcttaactcgttccataatctct

SEQ ID NO: 248272 - DNA, 292 bp, Glycine max
  unsure (1)..(292): unsure at all n locations
gagagaaggcgggagcatgaaattgaaggaataaaagagggagagaagtggaactttgaagtgtatctcataagactttcattcatcaaagttaccacaattgttacacatgcttctatttatagactaggtagcttncttgagaagctttcttgaccaaacttccttaagaagcctttttgagaaaacttccttggtgtcataccctaatttcgtccggggattattacttgatgacatgcaacctttaattggccgcttaagatacttggacccttttgttgcacaatat

SEQ ID NO: 248273 - DNA, 251 bp, Glycine max
  unsure (1)..(251): unsure at all n locations
caacactccttctccatcgctgatttcacgcttaaataggcggccttgttggtgctcgtgtgctctacgcgaataagtgaattccggctcggcgctcgantcatcgcttatcgaatgcatgccagcagtgcacttacggggatgagccctcgcttagcccatatgtccaacttatccttcttccagattcttcctcccgctcagccgtaagagtagtgcgctcaacggatggcttgcttacgccgcagatc

SEQ ID NO: 248274 - DNA, 346 bp, Glycine max
  unsure (1)..(346): unsure at all n locations
aatacttaggagttaagacggttcatattataaagtacaaataactcaataaaaaaggtaaacccaaaagatatatgtcatttgtataacactcatatcaccgagggcttgaaccaactagtggaagattatttcaacttaacaagaggtcttgaattcgagtcctaagtatatatgcaatcgtgttaatgcagcctacaatgtgtttatctgatctcaaatcaaacataattgtctactgtgaaaaatacatgtaatctanaaaaaatacaataaattattgttctataaattatagagtaaaccctcattttagtaacttatctgacatctttctcagtttagt

SEQ ID NO: 248275 - DNA, 439 bp, Glycine max
  unsure (1)..(439): unsure at all n locations
tcgccggagaaagaatcgagtccggactgaggaaaggcaagtttgaatatgcctncaacgccgcccctaacaataatagaagagccctgatggtgggcacatggaaaaaggaaggagatacccacacggtcaccaccgccccgacgtggatgaaagcgccccaaaatgcccaaaactcataccaacacaaccacccgaacttttcgatccgagccggaagttccctcccaaatcaagtggaagggcctnccgtaacagaaaaaacgcctgcccaacacacaactccagccactccccggcctgccaataatacaactcctggcgcgagctataacaatgcacgacgcctcccgaaagacgagttctctcctattcccatggcatattccgagttgtggtcctcattattagaaaatcatttggtggtggccactacccg

SEQ ID NO: 248276 - DNA, 380 bp, Glycine max
tagagcaaataatatctagatgagaaattcaaatctagataagataagatctagattaaataatatctagatgagatcaaatctaaataatatctcgataagactaagataagatcagatctaattctgtagaataagaatagtctggccctcttcaagtccaagctcaattctggattcaagcccaagcccaattctggattcaaacccaatgcttcattaattcctgagatcagattaaaaacatcaaattagctgaatgggccccaataataaaactgcctaataaatttgacaattaagactaatcagtatttaacatggcgcacaagggtaagaaaacgagacaggatggcccatactcacaatcctttactcct

SEQ ID NO: 248277 - DNA, 341 bp, Glycine max
  unsure (1)..(341): unsure at all n locations
gccaaagaccncggcaaacaacacaganatgacaaagaagtaaacaacctataaatatcacagtataaaacacaagaagccaaactcacaaagaagaaataatcaaaccagaatccaaacaactgaaaatgtcaacaatcacaaaacatccaagaccgaaattgaaaaaaaacacacgacaaataagcaaagcacttagcataataatgtaaattctaagaaactaaaagccaaaatacacggcttatacaagaaaaataatcagaaactaaaatctaagaagacggacgtgggggtggaagatcgacactccgacgaatgtatccgacatcctcttcaag

SEQ ID NO: 248278 - DNA, 291 bp, Glycine max
ccaccccccccgccatgaggcgccacctgagctgaccggtctcttcaactttgggcgtatcctccgaaagaaccgtgccactctctgcacatgtactgtcgctgcatcctatccggaaccacaaaaaactgtactgactactcgctaatgaaggccaccattaggtccttccaagagtggactccagaaggctccacgctagtgtaccaggtaacagctaccccagaaagatttccttggaacgaacgcatcactagtccctcatcttttgcgcactgcccccatcttccg

SEQ ID NO: 248279 - DNA, 475 bp, Glycine max
gcttagctgctctcaacatacgacacaagagtagcttctatttacatataacaactcaatttgttatattatttaattatttaatatggatagataaacttttcagaaaaaatgaagattaaagaaatggaattaaaacaattaaccacccaagtggttacttattaacaactataaatattcgtaacggatttagtagttaattgttgctaaatcgttggaagtattttcaccaaaatttccatttttatatgttccatacaaatttgtgggcttatcccctcactcgatccataataacttgctagggaaactaccaatacgagattcagagtagctcttacaaaatgaaattatctagctaattatccacaataaactgcagtcggaatgaataaaaaccatggaattttatttcgaattaaattaaagtgaactgagaccaatcttacataatgaaaagaattttaataaa

SEQ ID NO: 248280 - DNA, 308 bp, Glycine max
  unsure (1)..(308): unsure at all n locations
atacagcgacacacaacctcccatcgtatatagaatatccggccttgtatcggttagatactttacactccccacaagactcttgaagatccgggagcttaccttctcttcttcatcaaactttgataacttcaacccaccttcataggggtgttcacgggattgcaatcaagcatactaaatttcttcaacacttcttctgtgtacctttcttgcgagacaaagataccattctcccgttgcttaatctccattccaagtaatatgacatgagctccatatctgtcatatcanactcacgagacatg

SEQ ID NO: 248281 - DNA, 388 bp, Glycine max
  unsure (1)..(388): unsure at all n locations
tttgagtctctggngaccataatgcttctaaaacattaaggaagttagcacatgagcctaaaagaaatgttataacttggcaaggatacaatatcaacaagtattcgttctacacgaaatcacatgatgacaagaatacaatgcaaaacaatggtgtaagtcaagggttgaatctcaacactctgctactgtacatgatgacaaacccatgtagctgccttactttggagtcattgaagaaatctatgaggttaattatgtaaaattcagcgtctgcgatctcaagtgtaagtgggtagatagcaatatcagtatgcgaaccgatgatttcggatttacttctgtagatctgaagaagctcgcttatcacaatgagcctttcatcatg

SEQ ID NO: 248282 - DNA, 225 bp, Glycine max
gaggggacacgccccaaaaatttatttcaaaacccccggagacaaggaccgccccaccaacaacgaccacggaaaggcgcaaaaaacccccggcgaaaggcgaacaaacgaaaaagcggaaacggacgagaaaacgcggatgaccctgacacaaaccccaaggcagaacgaaacccaacaacaagcagccgccgcaaaaaacacaccacaacgccgacggaccgc

SEQ ID NO: 248283 - DNA, 249 bp, Glycine max
  unsure (1)..(249): unsure at all n locations
atatgctgacaccatgactcctatcgggtgggcatcgcgggcgactcccacaccataaaggattccgccctgggtgcatttgncgcggctgcattctgactatcatgcatatggggcacaaagtgtaccgccaccaccttcaaaggtacaggcccggaatcgtgacacgtaaaaatactaagaccgcgggggacctcgatgagatatgagctgcgggattcccttaatgacccatatcgcccaagaatg

SEQ ID NO: 248284 - DNA, 380 bp, Glycine max
  unsure (1)..(380): unsure at all n locations
gttcttactcatcttctcttgttgttgatctncaatcacctttcctccttctctattctactatcattgagcttcaagaagaaaaggactccattgatgaagaagtttcaaagcgtacaagctccacatggggctacatcagacagcgtcgactgcgtcacgtcaccaaaaaccaccaagtcctcggcagcattcaggtggaacctcccattctcggcgagaacgagtgtctagcatcccaagctccgtcaacggctcctctggctgggtcccactgaaaacccgacctaattcgggcttgttataaaaagagccacagttttctttattggtcttcttggtgcttttgcattggacaagcgtcttatatcattggttga

SEQ ID NO: 248285 - DNA, 288 bp, Glycine max
  unsure (1)..(288): unsure at all n locations
gatgtctcntccacctctaggacctcacaatcactcacaaactcatctcaagctctctggacggcttcttcttncagctctggtctctgcagatcttcacacaacacattctntcaaactctttggaacttggacctttctctctctagaactctccaattatgcaaaagctttaagaaaaggtcaaactccccctaaaaatctgatttcatgcttaaataggtggctttgttcgtgctcgtgcgctcaccacaattctgaaccgctttgtgcgcattagtgacattt

SEQ ID NO: 248286 - DNA, 246 bp, Glycine max
catatgagatattacaaggtaaagaggcgatttcactacaacaaggtgtcaattcgctgcaacgatttcacccatacactcttgtctatgatttgtgcagaaatttttaaaaaaacttataaaggaattaaacaacaaattaatatccttgggttgcctcccaagcaacacttttttaatgtcacttactcgacatgcgatacgaaattcaaggatcttccaccacttgcgagctctcactttatg

SEQ ID NO: 248287 - DNA, 299 bp, Glycine max
tcatcgcgcgctggataagcatatgacataccaatcatagtctaggtaccctcttgcaaacaattcctaaagtcgactgttttaggcgtctattctgaaccacttcatgggaaatcttatttggatgaatcctttattttcacgttcaaaaattgattactagtcacacaattgactctcttatatcgttacacacaaaagttgatcaagctaatactattcctgctaattaaacgtgaactaatgaaagtcgatatcatctaccttttgaactacattatgtcttacacacaacacac

SEQ ID NO: 248288 - DNA, 460 bp, Glycine max
  unsure (1)..(460): unsure at all n locations
catgcaagcttggagaatggcatgacacgatacatgtttggtgntttgctcggctcaaggataaaaggggatggtcccacattatttcatgacataaatgcaacaatgatgaatttggaaatttatgcaaaactagtcatgcatgcacctatgtggacactcaagtgttgaaaaatttttggtcatgtgatgctagggctcataattcattctctctactttagtcaacccagtgtttccaaaatatgttcttttatcaatttgtgcattcatccgagtctatnttgggtgttcgaanaaactttcacagcatttacccttcaggtgtatacacantttttttcgaaaactggttatgatcagtgaatcctttcaaagaaaagtcggagttagctctttcacaagcatgttgtttttagctacacaacctttattttaataattctttttgtccttcttt

SEQ ID NO: 248289 - DNA, 356 bp, Glycine max
tttttgagaagcttgctcaagaggcttctttgagaagctaaattaactaaactaacctcctcgaatataattacgaataaaaataacgcaacaaatataatctaacatcaaacataattactaacaatatatagagatatatatcagggtgttacacttagcatgcggctatcaacaaaaagtttggttaagttacctgcgcttagcgattcagcctcgcttacccacaggtagtttacaaagaggatgagtgttcattctcagacaatgaactcgcttagcgcggcatgtgcgcttagcgagttctttagataacgcttacatacaatgagtattgatgcactcgcttagcacag

SEQ ID NO: 248290 - DNA, 441 bp, Glycine max
  unsure (1)..(441): unsure at all n locations
tgcaagcttatgcctnttatccgacttggcaagtctgtcttggttttggctcccgctcgtcacgctcttgtctgacttggtggacttcattacaaaatctgaacatttctttcatctggatgtagcccttagctcgctcacgcagctcgtacatgctactgggtggttttttgcacagactgtctgcaaacttgctgaggtgtaaggcgaggagcatggaatgcaatgctacctcggggttgagatttcatatttgggttgttgtgtgcccaaatctgtctatgaactttatgagggactcgtcatcagcttgtcgtagactggccaaggcaatcgaggtcatgtggtgagacttggtagtggcgtactgcatactgaatcgttcgacaagggtgctgaagatgtctaccgacctatgtgggagtcaccatacacgtcata

SEQ ID NO: 248291 - DNA, 330 bp, Glycine max
cgcatcaacgggccattatgaaatctaaactgtgtaatgctctgtcaacttttacgcggccatgaatgatgccctccagccattcttgcgtaaatgtgttgccattttctttgacaatattcttgtatatagctccgacttggacactcatgtgtctcacttggatttcgtgctctctaccttggtggcgcgccaattctttctctgggaacccaagtgcgtcttctctcaaccctaactcaatctacttgggccatgtaatctctgccaggggcattgctcctgactctgataaggttcaagccatgttggactggccgatacctacct

SEQ ID NO: 248292 - DNA, 359 bp, Glycine max
tcggctagccattttgctgcagcttctttgtggaatgaatatcctagtacagttttggcctttggaacatttgtggttccattttgtgttttttcctcctagggtcgtgttcgtttgtggttccctacgatttttaaccttttcttttacaagacctttttggtttgttttgaggctatctaatcccctttttgtatcttccgcttcctatctaatgatatttctttttcctatgaccaatgaaagacatgattaaatgttccatcaaatttcaaaattgtagccatacacagtaccaatcaatacagtaatcatgcttaacaaggttgaaagcatgatcaatcttaccaacaaatgag

SEQ ID NO: 248293 - DNA, 411 bp, Glycine max
attctataaatcgacctccaatcttcaatggagagggttaccactactggaaaacccgaatgcaaatttttattgaggcaatagatctaaatatctgggaagccatagaaatagggccttatatacccaccacagtaaaaagagtttcaatagatggtagttcatcaagtgaaagcataaccatagaaaaacctagagatagatggtctgaagaagatagaaaacgagtacaatacaacttagaagccaaaaacataataacatctgccctgggaatggatgaatatttcagggtatcaaattgtaagagtgctaacgaaatgtgggacactctctgattaacacatgaaggaactacagatgttaaaagatctatgataaatgcactaactcaagagtatgaactattta

SEQ ID NO: 248294 - DNA, 365 bp, Glycine max
accacgccacaagccaatctatacaactgaatctagatctacattactaataaaaatcaaaaataaaaaaacatggagatatcaatatgaaatcggcaatcaccaatcatgaccaagaacaaagagggcccagaacatggtttcctgagccagccaatagagaggccaaaccacccaattgttgagataagctgcaccagcagccaacccaaaaaccacaatgacatctctaacaacataactcatggtacttcaagggtccttcacccaacagtgtttatgaatggcagctctaatatctgccaatttgaacggcggcggcgcactacggtcaaattctcgaaacttctcaccaaccccattat

SEQ ID NO: 248295 - DNA, 92 bp, Glycine max
ccccccggcccccctagcgccatttctttttactcaccacgaagtaccatcgaaaccacccactatgagccactatatcgaacctcaaaagg

SEQ ID NO: 248296 - DNA, 324 bp, Glycine max
ccacataactgtatagtgcctgaattccgcaacagtaataccattaacacgtctctcttttgattcaggctttgtttgattgattgccccaatggccgcgtgtggctatatatctgctgccaacttcaatcatcttgttggcgccagaaacttatccaaattcagttcttcggatgccacaatttcgttatcatttggcgggagcgattcaatgggtcttagtttgcgacccgctccaattcgtgctcctaagaggaaccatttctctcccttgcgtgtcgtttgcgtcgattatcctcgcaccgagctcgaaaacactggtaa

SEQ ID NO: 248297 - DNA, 310 bp, Glycine max
  unsure (1)..(310): unsure at all n locations
ttcgcgccacgtggaaattcgttcttataccgnggctaatgtctaaacatatctggagccctttgacattggttactaaatgttctggtgccactcggccactcgatgttgaaacttgcattgctgaccaatttgtgacctctaaaagcctttcttgctcgagcaaacctaccatattctgctctacgtagcgactctttttaatgctcagccatagacacattcaaagaaaactgttggacgctcttttggacagtaaacacatatctgtcatacataatttgcgtgtgatttggtcatctattattct

SEQ ID NO: 248298 - DNA, 410 bp, Glycine max
  unsure (1)..(410): unsure at all n locations
tggaatgtggatgcgaagagagttgtctgtgacctcaacacaaccgaagcactttcaaggtatttcctaattatatattggcctaaatatgttgaaggtccatgcaaatatagtagttcttgtttttagtccctataatttttttataactcgcaatgtttgttgtttttggtccctgtcgtgaacttgctgttaacatgttttacatctttgcaaatatatctgtttttagtcttatgtncctgcaaaatataacaattttatgtttatggctgctacaaagatagcagtttttgttcttagtccctacttttaggtccctataaaatatataggtctttgtttttagtctatactgctgcggcagcgaccaaaacaagtgatggtgaatattgtanggatcaaaaata

SEQ ID NO: 248299 - DNA, 249 bp, Glycine max
  unsure (1)..(249): unsure at all n locations
actttctcatttcttcatccaatattacagcattccccatcatctttaggccacgagttttcctgacctgcatcgaactaatcactcgacctcgattatnctaaaggcgccctctgtctattacaaagttcctttctgaaccgtatgccacgagatgacacagaatgcgtgatcatactaaatgagaaaatgcgccgcttcgtagacaagcttcgtcgtgtcgcttatgcctatatgtccgacctcttt

SEQ ID NO: 248300 - DNA, 259 bp, Glycine max
ctatctatcttctgctccctgcctgagaacatgcatgtatagcctggcaattggtccatgcctttgctaaagcttatctgggctgctgcctcgaagcttctttaatttattcaataagatgcatgactaatttaatcctacatcataaactccatacatgatgtaatcatccatgtatcttatcgaatatatacatcttatggttacttcatataattagttcaataactgcggatcattctcgaccaaccctggtgat

SEQ ID NO: 248301 - DNA, 285 bp, Glycine max
aaaaacataatgtaatcaagcactacggcaatcctacacgtcttgacaaaatttataactaaaaaatgcacccatatacaatcaggcagcttggctacctagactattcacacgcacttccaaggtgtatttgttacttacatcacacacatctccttggctaaatatacatacatgcatactcaaagcatcctgggatatcacaaattgcacatgtgcacactctggtatttctaatacctatacatacacaagcttcatgatgaatcttgactattacacaaa

SEQ ID NO: 248302 - DNA, 307 bp, Glycine max
gctgtaatccgttgccaaaatcggtcccctcccctggaatcccctccataatctacatcaaactttgactgcccaaaaccacaactcagtcttttaactgttctaagaattatcccttgactccaccacgggccaaaataataagccttgtcatcaatttgctgaatctcaatagaaaggattgctggatccccatgaccagcgctgtggaaacagattgatactgaatcatttgtaagaaacactagcgcctcaacaaatacttgatcattctgcttgttccaccccgcttagagaatatatttgc

SEQ ID NO: 248303 - DNA, 292 bp, Glycine max
  unsure (1)..(292): unsure at all n locations
gtgtcattacacttctcagatggatgggaacacatagaccactttgagagtgacactgaattgcgcactcagcgcatgagtgaagcagcaatgaggattgctaccagatctaataatntgcaaaagtggattatatctgatgaattacgaagaacattctattctgctagatctgatgataatcatgagaagaaagaacaaggtaacatagagtccactgacaatacgacaagtggggatgacctaatcagaaaactcacaaagaccatggagaagatgggacatgtgatac

SEQ ID NO: 248304 - DNA, 368 bp, Glycine max
atctaatgtagaatggattatggattctagttgctcattccatatgatacccaataagccctcgtttgagaagttcactaagctacagggagggtcagtgttacttggaaacaataagccatgtaaaactcaaggcattggatcaattacacttaaaatgcttgatgggattgaaaatattatataagatgtgagatttgttcctgatcttaagagaaatctaatttctcttggtgaactacacagacaagtttatctgttcagatgtaaaaatggaacattggaggttatgaacgactcacggatcgtcatgaaaggtgtgaggaagcatggcttatactcatccgaaggagagatagtagttgggt

SEQ ID NO: 248305 - DNA, 348 bp, Glycine max
tgtcacggctagcattatcttgaaaattgtgactcaatctcgacagcatttcgcattggcctccaagtacacaacatgacatcggcgaaattaatttctcgatcatcaagcatgcactcaaagaacaactcgaaatgcattgtaccgaaatttcatcaaattaatcacaataataataaccttaacgaatgaatctaacatacaaataccagtctccccaaactgtccaaacggacaattaaagactaaatacaatgactaatgcaaattgtccgctagaattattgcattcagtctcacacgggaatctacggtgcctcatcatgaagacaatttgtatagcatata

SEQ ID NO: 248306 - DNA, 352 bp, Glycine max
  unsure (1)..(352): unsure at all n locations
cctttggttgtcattccctgcttaaacatcttagaactttgttaataagatcttcattgggaaatatctttcctaatgatgcaagatgatttacaatatgtgttaatctcttttgcatatcctgcatagttntattttgattcattctaaataattcatattcttgggttagggtatttattctaaaccctcttgcatatgttgttccttcatgggttacttgtaaggtatcccacatttcttttgcattcttgcagttcgatactctaaaatattcattcatgcctaatgcagacgtaattatatctttggctttaaatgatatcgaccatctcctttcttcttcattcca

SEQ ID NO: 248307 - DNA, 320 bp, Glycine max
  unsure (1)..(320): unsure at all n locations
atcttaacttcctgtcttcatttntaacgcttgtaatcgattatccactcttggtaatcgattaccagaggccatattccaaatattactcacgatccttagctgcgcagccaccacacaagcctccttgctttgtggtctttgctcttttatcggtcgactgccacgagctcgcctgtctaggtacatcacacgttctcactgactgactatgcccgggctgggtcgggattgtcaacctcggttctggcaatagccncccactgacgtcccaacgtctctcgacccgcgaatatctcatgtacactctgggccaccat

SEQ ID NO: 248308 - DNA, 389 bp, Glycine max
  unsure (1)..(389): unsure at all n locations
ggacctgttcagcgctgtcttttttttctataactcccgagctacaatgggatgcctctggagtgggagttggagctgtattgttacaaggtgggcaccctattgcttattttagtgaaaaacttcatagtgccaccctcaactaccccacctatgataaagagctctatgccttaataagagccctccaaacttgggaacattaccttgtttccaaggaatntgtcattcatagtgatcatcaatcacttaagtacattagagggcaaagcaagttaaacaagaggcatgccaaatgggtagagtacctagagcaatttccatatgttatcaaatacaaaaagggaaaaacaaatgtggtagctgatgccctctctaggagacacaca

SEQ ID NO: 248309 - DNA, 226 bp, Glycine max
tggcttggcccccctaggcctaagtcatgttttggcttttatcctaattttcgcaagttgttcgcatccaaaaatggtaatcatacatacacaaatccaatcaaaaggccatattcacaaacttaggcaaaagtaccattgaggcatttcaccgagcacttggtgggcgcacttttgggtaccacaaacaacggaatgggggcaatgtggcttgccccatcatttc

SEQ ID NO: 248310 - DNA, 333 bp, Glycine max
  unsure (1)..(333): unsure at all n locations
actcatttctgactatccaacagcgctccacattatgctcgacgtctgctcttacagtccctcaaagtactagtcgctacagtaccgatttctttgacccaaactatcacaaaataaaattacaacccagtatgtgaccgacaattgaaatcttaattattatctaaacaaataccacaacaatcatcctcatctcggtagacaaggtcttcttcttcttcttcagctgaactctgttcctcctctcttgaggaagagcctctttcttcttgttgcaacatctgtagaacctctntaagactcttagtcacgcctttttggatttgaacctgc

SEQ ID NO: 248311 - DNA, 340 bp, Glycine max
  unsure (1)..(340): unsure at all n locations
catatcttgtcttacaccctctcccttaatttccttacacatgctaaacaccagaacaaagatcatnctacaggcagtacacattgataagcgtcgtgtagcgcttaacatccaaacccaagcacttactcttcatctcctccatcatctctaccgcatgctccacttctcccaacttacacaaagcatcaaacacattgcgttaggccacctcatcgagaaacatcncggattccttacactgatccaccacctccaaagttacgcccatctttcccaaataatgcagaatgtagctaacaaacacacaatttgtcttacacccctcaaatatcttatc

SEQ ID NO: 248312 - DNA, 258 bp, Glycine max
aaacttacaacgaacccatgtatacataaacgaagcgactctatgatttatcacttaaccatttttgacatgggtcaatatgcaaccaccgacccactttgcatctttgtggaacgaaacaagaaatacgcacccacaaagacaacatgaagacatccggagctgtgacctaatttgaaagcaaggatcacaaacaacaggtggtgtcctatagtaaatttaaccacaatgtggatacgacttaactttcaacttttt

SEQ ID NO: 248313 - DNA, 308 bp, Glycine max
  unsure (1)..(308): unsure at all n locations
ttgaatctaccaacccaacaagctttaactgctacgtacacacatgactcattgtatattacatcctacatagatatagcaattacctcggctgctatgccagacgactgaatggccaattcaagccctgcttcatagcttgagtcacggatgtccttctgcatggagttgctctgatacaatgtttgtgcagacattntattaacataatttccgcacttcagatggtcctcaatactactagctggagaactagtcgcaagcatcaagtgcatcatctttataatagcggatggactatccacaca

SEQ ID NO: 248314 - DNA, 313 bp, Glycine max
  unsure (1)..(313): unsure at all n locations
actatggcctactttctggcgctcaactgctgggagttggaggccatcttctaattaaatttttggcttccgcaacagcatgtctccaaggctccanccctggcagcatctatcatacttctctccatattactgagtccttcataaaaatatcggagaacaagctgttctgacatttgatggcgggggcaactagcacatagtttcttacatctctccactactcatacaggctctctcactgagtcgctaatacctgagatatccttctgagcgtgtggcctggaaccggaactttttttaaaatactttt

SEQ ID NO: 248315 - DNA, 304 bp, Glycine max
actcctccgaagcccgtcaatccatcgcgcacacaagacattgtcaccgtctctcctaaccttcataaaatgtcccccctcatcgtaatcaaacgctacatacagcgggcaagcaagaccccagtgtctgcgatatgctaatggtatctgaatgaagctctggaattatccctcacatacatggctaatcccacaatagcagatactatcctcgcgtccacttcataccatacaacgaataagacagtgactatgaacacacatattctatcaccggggacaacaaatcgaaactcgatataac

SEQ ID NO: 248316 - DNA, 257 bp, Glycine max
  unsure (1)..(257): unsure at all n locations
acatccttcgccttgaatggaattgtcatgacacgtttgtcgctactgcctttgatattcggtagctgatattgcgctgcgggaggcaattccgactggattaactcaccatccttcacttgccaattcgttatgacattngttgctggatacctatgatcgctcgcttccaagggtagtctatatcctttctgatggcataagcatgacaccaatcaaacaacaggacattaactcttgactctctcgacacattc

SEQ ID NO: 248317 - DNA, 210 bp, Glycine max
tgcatacaaattgttaggcgacttactctttaaatttttgccatcatctttttctggagtagagtgaagctgggaaggttcatttgcggatgaagaacatgttgctagttgacggtcttgaccctgcttctccgacctcaatgtaatggcacctcacatttttggaatcttgacagatcgacaaggcatctgtcacaatccaggattgtg

SEQ ID NO: 248318 - DNA, 330 bp, Glycine max
gacccaatgaggctgctccacctgaggccacacctgtgcaggttgatccagagccagctgacccacaatctccagcggtgaatccaccactctctcctgagtgtgaagtagtcccccatctccacctctgattgtcatctctgatgcatcatcagatgaagcgactgctcctcctgattcaccacctggagaaacagttgacccttctgcttccccacgtggaggaattgccaatctttctgatttcccagttgacactgtgacattgtgatcctgatgacactttgctctcggttatatatttaagagggttatacagctttctttgtt

SEQ ID NO: 248319 - DNA, 253 bp, Glycine max
tcctttacctcacgtaattgcctctctactcttctctcctattctctcgcaatgcgttattcctatctaccaacaatattgatgttaacaggattttaaatattcaactttaaaattttattttatcttgcatcaagaatttcttttatatcttacatataaagacaccatgattctaaaaaacttatatatatatatccttatacctgcatatataacaactttacataacacgatttattttgttcaaata

SEQ ID NO: 248320 - DNA, 436 bp, Glycine max
gtcatgccagagattcaactaactctagaccacctatccctttgtcttaaccaaatccaagcacattcaattcacaaaaagagaataaaaaatgtgtcattttggttgagttcatgatacaacagaggtgaatgcctcatgcctcaagtataagaaaaagcctccacatcagcattgaggctcctcaggtgatgagaagctatccaagaaacctgccttgtctcattaaatctccatattttttcaagaaataattacaaacacaagcagttgaactagacaagaattaagagacattacccactgaatctccagaatttcctgcaaatagtaccttatggtgtcagacgctcataggaaacatcaatggcttcaataattcctgttatttgtcattcgtctgtgaagacacataacacactgaaacttaataatg

SEQ ID NO: 248321 - DNA, 292 bp, Glycine max
tcaatccccagagagcaagctataaacatgcacaaaatctacaagctcagcaacacaaccctatctagctagcgctagcacctctcactgtggcattgtttgctacattcattattagaaatacctgagacagagttgcaaaaagtacctaagacagagttgtgaaaagtggcgggttgtcaatgtctcgataagggtgcagagacagagagatatagtcgcgaagaagaaccttagacgacacaaaaagagagtgcgagcacaatagggctcgcgttctaattattttaaa

SEQ ID NO: 248322 - DNA, 440 bp, Glycine max
tatgtgggttctcgcaatgacaaaatcgctcacgcaattatatatacactaatggaccggagtgagtcacagttgggagagccccttacacgacttttacctctcggtcttggtcttctatatcttggaaagcaggtaaatagatgtctggcagcctatcatctctgtttttttaattatagatcattttcttttcacctcattaatcttctttaatttctgaataacaattgatagtggtacggttctgctattgtgaaggtgtaatactcactctatacattgcgctttgttactgcaggacagtgttgatgcaacctgccgaatttcaaagactctcaatgaaaaaattataaagtatcgcgacatgacactactatcatgtgcctatgctggaactcgagatgtcctcaacgtacaatcttgtgatgattagttat

SEQ ID NO: 248323 - DNA, 94 bp, Glycine max
gcctcaactcttgatacctcagaatgatggagtgacatgtacccactatttctcccaaatgacattattacatcaaccctcccctctctcatcg

SEQ ID NO: 248324 - DNA, 325 bp, Glycine max
  unsure (1)..(325): unsure at all n locations
gcacctccctactattatcaaactcaaccgacgccagccattatagttacggtgcagcagtactagcatccctttcttgagctctacatccggctataaagccagaccaaacagaaaatcggtggatgtctgttgtcgtacagtcatgagcgtgggaccgacttgaatgcatcaccccaaacatagatcacctattcatggaagaagcacaagaaggactcaaattccctcttgcacgaacgtggtctcgtncaatgaccggaccaaatattccacccattcagtgagattgatacgcatcatacttgataactaccatataacg

SEQ ID NO: 248325 - DNA, 347 bp, Glycine max
ctgaaagacgctgacatctccggggatggtgcagatgatgtcgttagtcactgcatgctatcaggctctgagtcttacggttagccaatgagaccttttcgcagtctcggctggaagacgctaacatcttcggggaaggtgcagatgatgacgtttgtcattgcatgctattgagctttcagccttacggatagcaaatgagacttttctgctgtctcactcggaagaggctaacttctccggcgaatgtggagatgaagacgttactcactgcttgccattgcgctctgagtcttacggatagcaacggagacttctctccagtctcggccggaagaccctgacat

SEQ ID NO: 248326 - DNA, 317 bp, Glycine max
gttacctcttctcctttgcttcccgctgcatcttcatggcggaccaccaccattaaaggacctcattgacgctcaaagatccacccttcatagaagctccataagcaagctccctcagcctgtacctcatatagcaagtaacaagcatatgtacttcctgcaacatggttagtgcattctgactctaacaaatcaacatcaagaggtacaacacccagaaaatcagaaccagactcatattcccactcactctcagcataaaattatatataggatcacattcacactcagattcacattcaatgcataacgaatga

SEQ ID NO: 248327 - DNA, 483 bp, Glycine max
  unsure (1)..(483): unsure at all n locations
gtccgacaaagaagaattgtttttattactgtccgtgagtggtggagacaatttaaatatgatttgacgaggaaatggacacttgcagtcgacaaggacagtgtggacggcactgtttctaaaaaatatgacattagcaaggagaaatgggtccagttttgtcagacccgcagagaaccctcgtggaaggtatgtactttgtcattttaattgttttccactaaaaaatcaattcttataatacattgtagtaatcattttcattaatgttcgcattttgaggacgtgcggaaaaaggcacaggccatccagaagcacaacaccgcccctcacgtgttgtctcgtgggggttatgaatatntagaacanaagctgatggttgagaagactaagaaaaaactggaggaagctgctcactccngaagcactganggcatcattgaccctccatttccatcagacacaagtgagtgaagatgactc

SEQ ID NO: 248328 - DNA, 389 bp, Glycine max
tcgcggcgggaatcgacgccaaccaacagtcacaaaccgcatattccttaactaactccttataaaccggaattaaatccggtttgagaccattcattaccgtctccatcatccgcgccgtcgcattctttggcactgcttgcctcccggcattttgggcaaagccttgcatgggtcggtggccaatttcctttggccgttgagcgccttcgcttccaagcgctctcccgaagcatttggctcgtaacatgtcttcggatcgaagtgaacctgggtcccgggtcaacatagaccgactggtccgagaattgaaccagattcgagctgggattggatgtggaaatcgggttagactctgcaccggcgataccggtgattctcggatcgag

SEQ ID NO: 248329 - DNA, 274 bp, Glycine max
ggagctcaacctctgcagccttccaatctccaatggagatttacctttgaagaagtcacccaatacgaaaagattttccaagctactaatgttgccaatttcaggaggtagagatccaacaaagctgctgttgttgagcacacaaatctgtacaggttctgcagtctcgtccaagatggaaggaagtttctcttcatagctgttatcaaacaggtccaactgctggattgacgagcagctgagtaactccaacggaaacttgccagagagcatg

SEQ ID NO: 248330 - DNA, 284 bp, Glycine max
acattgactgttagctctcaaggaatttggcttgaaaaaggtgcatttagtattttactttggtggctccataaaaactggattgtacctaattatgccgagactcacaattaaacagacacatgttattatgattgattgatttccaatatgtagtattaagccttttttcttttaagttactcgggaaaacacaactggtcggaaaacgattgtcaccattatggtctggtttgtgattcaaaataatgggcataatacaataatatttctttattacaaaa

SEQ ID NO: 248331 - DNA, 268 bp, Glycine max
tcaactaattatataacacattaatactttcactaatactatattagcattttctataaattgagccacctacaagcttggtagatctttttaaaagcttacaagctaacctacttataccagacagaaacattttaaaaagcgtgtgcatgacattcttgctaaataaactacggtacgccataccttaagtagaataagcattataccttaaatgaacaacctaacaacttaattatatttgaagccctagctcatacaagcatga

SEQ ID NO: 248332 - DNA, 359 bp, Glycine max
ggtctaaaaagaggcaaatctgatcatcctgcttggataaatgcaaaaaatggggcaaatgaagagggtgagaatgagggagaaacccatgttgtgactgccctctctatacggccaagtttcccaccaacccaacaatgtcatttcttagccaataacaacccttctccttacccaccacccagttgtccacaaaggtcatccccaaatcaaccacaaaacccacctaccacacaaccaatgctaaacaccacctttagcacgaaccataacaccaaccaagaaatgtaatttgcagcgaaaaagcctgtagaattcaccccaattccggtgtcctatgctgactcgcccatatctac

SEQ ID NO: 248333 - DNA, 319 bp, Glycine max
  unsure (1)..(319): unsure at all n locations
gtgatgcttattatgttaaaattttcttgagaagctagagcttagctacacacacccctctaataactaagctcacctccttgagaagattcctaaagaagctagagcttagctacacacancccctataatagctaaaaaacatgaaaatacaaaaaaaagtccttactacaaagactactcacaatgccccgaaataccaagctaaagccctatactactagaatggccaaaatacaaggcccaaacgaaggaaaaacctattctgatatttacaaagataagcgggctcaaacttagcccatgggctcaaaatcta

SEQ ID NO: 248334 - DNA, 353 bp, Glycine max
  unsure (1)..(353): unsure at all n locations
ccgcggcgtgcangcttccatcaagtggtaatcatatctcttatgtcttaagtaggtgctccttaacactccattaatttttttttgctttaccttctctctcattggntgctcttcatttttttctccatgtatctcctcatatgtcttgtgctaaatgttataactcgattctttagagtttccaccgattaaacttgctatagaagctacatttgattttctatggttcaaatttcttattcttgttcttgaaccatgaattgtgttaagtttaagctcctttgagtcttgtcttgttattttttgtggctgaaacctacatcataaaattcttacaaaaacattaaagt

SEQ ID NO: 248335 - DNA, 361 bp, Glycine max
  unsure (1)..(361): unsure at all n locations
gctcacctccttgagaagctttcttgagaagctagagcttagctacacacccctataatagctaagctcacccccatgacaaaaaaacatgaaaatacaaaaaaaatcctactacaaagactactcaaaatgccctgaaatacaaggctaaaaccctatactactagaatggccaaaatacaaggcccaaaataagaaaacaacctattctactatttacaaagaagagtggacccaaccttggcccatgggctcaaaaatctaccctaaggttcatgagaaccctaacggcttctttatcaactctagcccaatnctcttggagcctcttgctcatggctctggtaacttgtcctttcct

SEQ ID NO: 248336 - DNA, 320 bp, Glycine max
  unsure (1)..(320): unsure at all n locations
tgtccatgaatatgcatctcgttctaaagattctgaatatcatctagcatattctttcttgacaagatagcattagattcatcaaaggtaacatgaatggattcctcaatattcatagctcttttattatatatcctatatgctttgctntgtaatgaatatccaagacagatgccttcatcagattctgcatcaaactttcctagattatctttaccattattaagcacaaagcattctgcaccaaaaacatgtagatgtgaaatgctgggtcttctaccattatataactcatattggggtttctttaaaatgggtct

SEQ ID NO: 248337 - DNA, 312 bp, Glycine max
tgaacatacgcgtgaacaagcagttgtttttgctttagggctcgaaccgaaatgccccaaaacccttcaatccatacaactaccgagatggcttgcactgaacaactgaaggattcaacaccctcttgttaaaccaactacctttacttgcacccaagcctaaatacctcaaacccaatattaagtgaatgacataactctgtaactgaagatttactaatacttcgcagacacatctcactagctatatgtgataaaagaacatttctgcaacacggaagctaagactcgacataataacgaagaataaaa

SEQ ID NO: 248338 - DNA, 381 bp, Glycine max
  unsure (1)..(381): unsure at all n locations
ttaatcatggtatctatacacatttcttatcttntttagggtgggatgttacaattaanagtgcanagtgtaaattacacgtgcatttcattttaagatcattgaggagagtatcaccaaagaanagaatattagttattaaattgatatccattntgcanaatttcttgtaaaaaataaaaaaatattataagggtgtattatgtatctctacggtgcatttaaaanatggtattttattgtgaatttaaataaatattattatttattaactcttagacacaactgatcttaatctaatagacagtaatntaaaattatatttttgggaatgagtagaataggatatttaacgaaattatttctttttattcattaatc

SEQ ID NO: 248339 - DNA, 292 bp, Glycine max
  unsure (1)..(292): unsure at all n locations
agcttcttactcctttcgcgtctcgatgtggggggagattttcaattatttctatnctggcttgagctacttcaatacctcttgctaaaatattatgcccaagcattataccttcaattaccatgaagtgcgaattttgccaattaagcacaagggtcttttcaatgcatctttctaggacgttntccaagttgttgaggcatgacgtgaaagaatctctaaatatagagaaatcatccataaatacctttatgcattnttctaccaagtcaaaaaagatggaattcataca

SEQ ID NO: 248340 - DNA, 335 bp, Glycine max
  unsure (1)..(335): unsure at all n locations
gaagcaacatgaacttcagntaaataccactatctgctagcttggctcacttcctagaatacattgacaaatactttaattataagtcgattcattttatatagtaagttaacacaaatgcttgaaatggcgtagggtgattacaggagacaatgtgtcaataagaattctaaatctagcctatctgcactaaagttttggtgtttgcctctgtacaatagaaagactacagtgaacctgttgaattactatcccattgttatgaatataaagtatttacgggaaataggattttacagctactatggaaatgactgttggtaaagctttaaaat

SEQ ID NO: 248341 - DNA, 252 bp, Glycine max
  unsure (1)..(252): unsure at all n locations
agcttatgctgcanaatntacaatagacctcctcaacctcatcatcattatcaaccacagcagagcaattatgacctctccagcaacagatacaatcctagatggaggaatcaccctaacctcagatggtccagccctcagcaacaacaacagcagcctgctcctttcttccaaaatgctgctggcccaagcagaccatacattcctccaccaatccaacaacagcaacaaccccagaaacnaaccaacagt

SEQ ID NO: 248342 - DNA, 290 bp, Glycine max
  unsure (1)..(290): unsure at all n locations
tgcaagctngtactctctggtaatcgattaccagaaggctgtaatcgattactatatagtcaacatttctgaanaaggatgttcaaaagtgtaatcgattactatgactntgtaatcgactaccaatgcttataacgttcaaaaatatattgaaaaaccttgtaatcgattacacaaaacatgtaatcgattaccagtggctctgaacgttgaaaattcaaatattaaatgaagagtcacaacttttcaagagagataactgtgtaatcgattacaccaggattgtaatc

SEQ ID NO: 248343 - DNA, 378 bp, Glycine max
ccaacacgagctgagctactttcatctgcaatcaactgtaaacatttcttgaaccataagaacatacttactctcaaggcaacataaaaacccactggttctggatgtgacagataaaaaccatcgaccacaccacgttttatagcttcccaatgcaggactatagggatagtcaaactcataaattctggacctatcaagaaaaagggaaaaaaagcatatcttaataataccatattctaactagaaataaataaaacatcattgctagaaatatacatgacaattatgatgaaataaaattactaaagaatatccattaaaaatgattaaactataatgataacccatgatctattgttgtttaacaaaaagata

SEQ ID NO: 248344 - DNA, 466 bp, Glycine max
  unsure (1)..(466): unsure at all n locations
tcttaagtcacctgaggcactgcaagcttgtatcatctacaagtcctaatccaatcaaggaaaccatattatatgatgattattttaaagaaagttgcagtaattagaaaaagaatgaacaattgttgtttgtgttagtggaaatcctagaagtgtagggattggacgtaacctaaggttgttggtgaaccaatataacttttgtgtgtgctttatcctcttttactacctcgcatctacatttacatgatgtgtatntgctttgaaacttgaaanaattgttntataaaagcatattnttgatatctctcaaaatattnttacaaaatgttttagatattagaaacaacatctacttttctatagataagatgtaaaaaccagaatttgcactagctagaacctaaagcttttaaattagctttttgaagcagtatttgtacagtacacacacgcacacacacat

SEQ ID NO: 248345 - DNA, 163 bp, Glycine max
cactatgagcccctactaaagggccacagctgcttttttttttccccttctagttgatgatttcaaactaatttcttgaccgcgtaaatcaggtacagtagtctattaacacaggaaaagacgatgccatgcttaataacgatctactttcaaacactatgct

SEQ ID NO: 248346 - DNA, 389 bp, Glycine max
tttacttcaatccgaatgcttaatatttattatgaccatggagacaaaactcttactaaatggctctcttctaaatcggtttataatactagaatcaatttgtgtaacttcgttattatcaaaagcgaaagatcatatcatactcttaatggagaaataatctcatacgaaagtgaaatgaataaaattactaatattaaataacacagtgtaactaatataaaaaatgtgttttcaattacgtttttcagcaaattataaacaataaaatgcattatctgaaaatcataatgattaaattacaactttaaactgttaaaacaaagtaacataaaaaattctccatcaatcagaatggggtcatcatcactctatttttctcagaacat

SEQ ID NO: 248347 - DNA, 106 bp, Glycine max
ttggtgagtataagagggattttttctaggaaccatggagggaatgtttggcgaaaaaataaacctttgtgtgagtcacagagtgcaggggtactactgggtgggg

SEQ ID NO: 248348 - DNA, 154 bp, Glycine max
acttaggaggccgcccgcttgaagagcacctacgggaacggtttttgtttattgttatgtagcgggggggaaaacatgacttcatgcttcttttttaacctcacgcttacggatttcgaacccgtgactattgaggaaccctttgcggtcccac

SEQ ID NO: 248349 - DNA, 200 bp, Glycine max
tgacctaagcatttgtgccataatgctcctaagattgtattatcaattctacgcttagtaccacacaattctgcattaaaggattcaccataggaagctacagtatcaagtaaatatagattatcattaaccaagagtgaaccagctccaacaatatctgaattataaggcaacctaaacacattatttcttaatgaaca

SEQ ID NO: 248350 - DNA, 255 bp, Glycine max
ttaagtcgacgcggctgcagctttacaaaggtcataagtaagtgagaatggaagtatctttctgcacaatggggcaaaagatgaattgagtcacatcactgcttgtctactggcaacatattaggattgggatgtcttgtacttccatttcacctttgacaagatgtcatggatcatgttggaaatcttaattgattcaaccccatattctgcgtaaaaattcgcaatactttcactggacatcattcgcatgca

SEQ ID NO: 248351 - DNA, 236 bp, Glycine max
acatgcataatgtgctttgacactataaccactcaacagttcatatgcaggagactcattaatggtacacaaaaccatagcacgcaccctgaatgtctattgcagatatgcatcccacacatcaacctcgtcttcccccaattttctcaagtcttcaatcaacgaagtcagatagatggtaatgtcattccctggctgccttggaccactatcatcatacaaagcattatgtactt

SEQ ID NO: 248352 - DNA, 130 bp, Glycine max
ttatctcctagaaagggtgctgaggagatttggacatgtggagcgcatgccatgccatccaccataatgtctcacgtatgaggcgtctgatacagagagggcagagtggtatcaacatgtcatcatatgg

SEQ ID NO: 248353 - DNA, 323 bp, Glycine max
  unsure (1)..(323): unsure at all n locations
tatgggttgtgctcctctactgaccaccatacagacctttgcccttccattgcagaacctggagcaatcgagcagcctgaagcctatgctgcanatatttacaatagacctgctcaacctcagcagcaaaatcaaccacagcagaacaactatgacctctccagcaacagatacaaccctggatggaggaatcaccctaacctcagatggtccagccctcaagaacaacaacagcagcctgctcctttctttcaaaatgctgctggcccgagcagaccatacattcctncaccaatccaacaacagcaacaaccccaaaaaca

SEQ ID NO: 248354 - DNA, 193 bp, Glycine max
  unsure (1)..(193): unsure at all n locations
gctgcagcttagtgagaatgatatcatacatcaggccattctttttttagagaatccgttactaacggaaaaaatactgacagggccatctaaacatgtccttgaaattgcngctcgtaacacaaaacatcctcctcacctgtcaagttaatattattgaaataaaatatgtccaaacactacaagatttaat

SEQ ID NO: 248355 - DNA, 349 bp, Glycine max
  unsure (1)..(349): unsure at all n locations
tcaacccaatgtttccaaaaaacatctcttttatcaagtcacgcacacatncgagtccatgtatgcattcgggaaaaatctttcattgcattcacccttcaggcgcacacatatttttcaaaaatctttgtatatcctaatctgtgaatattccaaagaaaactggcggtcattttctttcaaaagcatgttggctttttagttttctctctcttagctctttttttcaattaatttctttcagacaattttttttcagaaaagggttgaacctgggcaaagttggtattcgagattacactttatcaaaaggaacataaggcgtgtgaatgacaataaaccaacacac

SEQ ID NO: 248356 - DNA, 233 bp, Glycine max
  unsure (1)..(233): unsure at all n locations
gcgacatatctccaggtaccactctgtggtcaacaaataaaagtatgaagactgactctctcacgctntctcacatcaagcttattggattatggggcacccgtcatatttggtactaggtggcgatcaggcgatggcgcaaatcaactatcccatttccaccagccaggcataagcacaccatccccagttgcccacctttaaatattagctcacgtgcacatacgtagtct

SEQ ID NO: 248357 - DNA, 301 bp, Glycine max
  unsure (1)..(301): unsure at all n locations
ctttgacaacttcaaaccacactcaactggagtggttacagaattgccatcatgcatctaanatcaatccaaaatatctctcacatatttcttttgagaatgaaaaattccaacatctgattgcactatttctatacttagaaagtaatgcaacatgccaagatcaggcatttaaaactcattcatcatagacttcttgaattcatcagacatgagagtacaatttccaggagatataagatcatcaacatataagcatactatgagtatttgtcctttttattaaatttaataaacaatg

SEQ ID NO: 248358 - DNA, 488 bp, Glycine max
tcttaagcaccgcggctgcaagcttgctgttagaagtctaaagagaagcctagttcataaatttgagagatttgctgtgtgaagatctgcagagacgagtgctcaaagcgaaagccgttctgagagcttgagatgagtttgtgagtgattttgagatcctagaggtgaaggagacatcctcaccacttgtatttttgcaatctttcatattgttcttctatgtgctgtaaaggaggtttctggactatggaaagctaaatcctctgtttgatctttcctataggtacctaatgtaaatatatttctatctatgtaatgatggtttggtgttctctggctatctacttttcattccagatgccattaccttgatcacgtagatgcatgctttgttagggtcattcaatagtggaaactgttctgattctaaagtccttgatagtacagggctaagttgttgactatcacgagggaatcgggtacaagaa

SEQ ID NO: 248359 - DNA, 76 bp, Glycine max
taagattagatctaaacgaaataatatctagatgagatcaaatctaaataatatctacataagataaagtctagat

SEQ ID NO: 248360 - DNA, 222 bp, Glycine max
  unsure (1)..(222): unsure at all n locations
tctctaagtcacctgcggcatgcaagcttcttagtntcagatgatgcagatgggttngtatctacctcatgcactcctctaatgactatggcatcatttctggcgctaaactgctgggagttggaggccatctcttcacttaaatatctggcttcagcaggaggcatgtctccaagggctccaccactggcagcatctatcataacttctctcatattactg

SEQ ID NO: 248361 - DNA, 218 bp, Glycine max
  unsure (1)..(218): unsure at all n locations
actgggtacccaccaatcatacttccactgttgccacaggtttgggtaaatntctgtatgctgttggaaccaagtccaaatntaatattggaaactatatatttgatcaaactggttagcattcagaatcttttgctgtcgaattacccattgccttcccaactgtattgtgtggcattatgttgagtcaacatcccaatattttaaacaacattgac

SEQ ID NO: 248362 - DNA, 393 bp, Glycine max
  unsure (1)..(393): unsure at all n locations
gagtgtgtattaagctttatgtgttgtcatgttgagtgtgtgagaagctgagtgtctaatccttatccaaaggcagctntccccttctctctctctttctctggactatatatatatacgtgttaataaaaagctaagtgctgagtgtgacaattttctccactcattcaaattcaagttctggagtatctcacatcctcaagcaatgtagtcctctatttttaacacattctaaatacacatcaagatcttgagatagactattataaactcttaactcaactacatagatcactggtctaaactaaaattacagatttattgactactaagacactatcacagtgatgtaatgacaaacaaccaaccgataaccactgctaccgaccaata

SEQ ID NO: 248363 - DNA, 342 bp, Glycine max
  unsure (1)..(342): unsure at all n locations
catcgcttctttgtctacttccaacacatgaatgagctaaataatttacaaaaattaaggactatcgacatccatgttttatttccagcttcactttgacaatatgtgacgaacaatgttgtttaatgaagacttgaattgattcaaccctatgttctactgaatgtcctgtgtaagaattgcaatactctaacaatgcatcatttacatacatncatcatccttttcttttacactggtggatttctattgcattcctccttgaaatagaactgtatcattgtataataggaaaaatgcgcttacttgctcttacgaatgcgtccaagctgagtatgagtg

SEQ ID NO: 248364 - DNA, 408 bp, Glycine max
  unsure (1)..(408): unsure at all n locations
ggatgaggggaagtgtggttttcgaaatctgcattntgtgcagaattntgctgtgaaattgtgcagcagggatttgcacaagtgcagaaaaatactatgcatttgctggttgtggaaagagcagtgcanaatgagttctggatgtttgctagtagatcccaacggtcaaaatgtaggcttatgtactagagacctccagtaaaaatttggagtcgatccaacggttaacgaattggaacgaagggaattgtactggggtctttaagtaagaaaagctgtgattttggttggtggtttggagagctttctgcctttggttctgtttcttggctgcgataagttgtgctggttgaatgttgtattactttgatgttggggaagcttgggaggattgatggggacctggtg

SEQ ID NO: 248365 - DNA, 353 bp, Glycine max
  unsure (1)..(353): unsure at all n locations
gcttctatggaggctagatctttgagcttcattgatgtccttcaatggnganntttcaccatggagatgcagcggaaggcacaggagaagaggataggggaggcaccatccactatggaataagccaaggaagaaggagcttcaccaccaagaattgccttggataagaagcttgaagaggatgctctaatggaggaaaagaaagagagaagggggggagcacgaaattgaaggaataatagagggaaagaagtggaactctgaagtgtatcttataagaccctcattcatcaaagctacaacangtgttacacatgcgtttattaatagactaggtagcttccttgagaagc

SEQ ID NO: 248366 - DNA, 281 bp, Glycine max
  unsure (1)..(281): unsure at all n locations
atcatggagatgcagcggaagaacaaggagaagaggtgagaggaggtgccatccactagggaataagccatggaagaaggagcttcaccaccaagatgagccttggataagaagcttggaaggatgcttcaatggaggataagaaagaaggagagaaagagagatggcggagcacgataattgaatgaataaaagacggagagaagtggaactttgtngtatgtctcacaagactctcattcatcaatagttcaacaagtgttacacatgcttctattaat

SEQ ID NO: 248367 - DNA, 242 bp, Glycine max
agcttatctatgattcacccttagaagcacctattactggacacacacaacaacttggtgggtccttaggccctaagaagccatagttacttgactgctcttcctagtcctcttcagcaacacctttgctagactgataaccactttccgtgttccttataacttcaaaagcagtagtcccttgaccactcttctaagatctcttcaacaacacatattattggctactcgcaacaactact

SEQ ID NO: 248368 - DNA, 236 bp, Glycine max
  unsure (1)..(236): unsure at all n locations
ttggataataccattggatcatacagtgttgttttanaattaagatgactcttcaaaaggcttgacttttgcaatgggcttatgccttctaaacgtataactcttctgaatggccttcttgactagacatgatgagactataaaagcacggcgtttgtntgcattctctaattagtctttctatgaatctcatacaatcctttacaagccttgaatcttgtttaatctctttgaac

SEQ ID NO: 248369 - DNA, 327 bp, Glycine max
ttctacaatcattcttttcaagcccctttgcttattattggtagaataactaaaacaactaattaagaagaactaattcctcggggaagtccacaatgatccattagatataagaaattgaggaagttgcgaaaaaatataaccaccaatcacatgtacgttaagacttcccaggctattttttttatcttgttaatattcgaggaatttacttaatatcacatcaaattaataggccaaattaatctcaaattaacctttaatcattaataaatagacacaactaatagttcaatctttaaaaataaatatttagtcagaatatga

SEQ ID NO: 248370 - DNA, 176 bp, Glycine max
  unsure (1)..(176): unsure at all n locations
cttcctcgnacctcaatcagcaatactgcaactgaagacgtattattattattattatcatcaataaaacatgaacactcacggaaacttatcatacacgaagttgacctacgtacctcgcggagcaagctttgagctttgagcacccacgagtgtttcaacaccctagtagcaac

SEQ ID NO: 248371 - DNA, 312 bp, Glycine max
  unsure (1)..(312): unsure at all n locations
gcagcttatactnagcagctaaaatctggtgtacacattctcttatttaatggatcttctagggacgagaagagagaatgagaatgatgttcaattggagcaaactctcatcttacacaagtgtatacataatttaactttctcaactggataacacctaatatccaccgaatcagatattgactcctcaacacccaattataccctacaaatggctcttgtgtcactctggtcattatgtgttnctctctagcacagcccaagctttctcataagctctanatgacattttaaactaggattaactcactt

SEQ ID NO: 248372 - DNA, 463 bp, Glycine max
ttaagcaccgcggctgcagctaatgagaaaaatttaggccaaggcttgtgtcttttactgctcttattgccagagacacaattcataaggcgtgctaagcttaaccagctgcgctaatcgcccattcaaacaattacttctatctttatgttctcgtgaaaataaactgagctaacctcttttgttttgtcttatattttacagatggcatctaagacaaggaaagctccttctacacctacctaggccagatatgacagatctaggttcacactctcaagaagcctgtgagaatatacagacatcgtggtcctacgaagattttcctgaaggaatgcattatccacacactgagttcatgaattactgataactcagcgtaaaactgccaagagtgcaaacttgtaatggatattgatgggcatttaacggtttatgcacctcttgacccgggtaatcacct

SEQ ID NO: 248373 - DNA, 500 bp, Glycine max
  unsure (1)..(500): unsure at all n locations
tctcagagtcacctgcggcatgcaagcttcattaatcatgtcaagtccccgatatattcaccttgttatttgtttcgtttcanaactcaacgtctatttctagcatttgtttttctaagataagaaaaatggttatagttcacttgatgacatgcatgagctgcctcatttcactttacttcaattaaaaatggtctacaaactgaatatgcgtcattgaagtacaagaaatttcatgtggatacgatactcggtcttaccgttttaattactacttgaacgaattggtgcacttgccaatgagttgaacactttttctttcaactttatcaccaacatagtccgcatcacaatagcttgtgagttataaaatctctcttcttttgacataagaccaaggttangagttccacatagatatctgaatatacgtttaactgatgttagataaagtcctttggttcttctaaaaccttgacataaactacattgacatatat

SEQ ID NO: 248374 - DNA, 378 bp, Glycine max
ctgcagctgatgtcccattatgcattgagaaattgattatattctgtttatggtaacgttgcccctaaacatttcattgaatttataaatctggcatttcagggaaaagaagctaagttgaattgaaaatgtacagttggctaacacatctcaccgctagcgtatttcacgccttagcgcacggagaattagcgagcatatcatcaaaccgccgctaacgcgagacagtgcctagccagagggtcttcacttgctaggtcagatgtgctaaccaatttacttactccctaattcgaggggactagccacatcggattcaagctattaagctgctgtgaaataggatcacttacacttataatttatacgcttttaacg

SEQ ID NO: 248375 - DNA, 125 bp, Glycine max
  unsure (1)..(125): unsure at all n locations
tgactggagttctaacgatcttggaaataaagattctaactggngcatgagaagtaattataattctggagaaacaatagctgctggaagatagcatatgcctcaagcgatgatggtgtgaatga

SEQ ID NO: 248376 - DNA, 254 bp, Glycine max
tcttcatgagttacattctccccctttgtgatgatgacaaccacctgtatgttatgagcaacaaccaagaaaatatctatttgcatatagttctactccccctctgggttacattgaatgcttatatgagacaaatgaagatttcatatttttcatatatataaaagtcgtctcataaaacaataaatagaattacttactatgtgattgtttatctttctcttcccctttggcaacatctaaaacaaatcatg

SEQ ID NO: 248377 - DNA, 151 bp, Glycine max
cattcgcattcgtggaggaaacgtaatcaaacttccctcttttcaatcctacctcgattctttccgcggcatacactagatccgcagagctggacggcatgtgacctactagcttctcatagtagaacactggcagagtgtctaccataat

SEQ ID NO: 248378 - DNA, 203 bp, Glycine max
aagcacctgagctgcagctaagcatcaactactcttattgaaaacattctttatatcctttacataaaaaacaaagaggttgccgctatggagaaatacctcactttgagtcccccaatacaaaagaatttttaatgttggtatatccctgaacctcgctaattgtaaaaaaaagaggctaaagatccccttctcaccctttt

SEQ ID NO: 248379 - DNA, 282 bp, Glycine max
ccttgcgacaggtacatatgattgattccatgccagctgggttaccaaggtgaccaacgcatccagtttgccgtctagctctctatgtttcaatgatgcatatgggtttgtactacctcatgccctcctctaatgactatggcatcatttatggcgctaaactgctgggagatggaggccatcttctcaattaaatttatggcttaatacgagcatgactcctaaggctttacactggcagcacgtatatacttatctcatatactgagtcttcatacaata

SEQ ID NO: 248380 - DNA, 168 bp, Glycine max
actacttgccctaattaaaaatctatttcactctttattccagttatgaaatcccttaatgacaatattcttaaatattaattcacataacacacattggatatgaatattaagcaataataaattaaggagattaagggaagagaaaatgccaacctcagtttatac

SEQ ID NO: 248381 - DNA, 117 bp, Glycine max
ctttttaatatgaatgaacggatcgtattgaacgaaaatcatctgactgtagtgtcatcaaaacatttgccgtataacattctaaagggcttatcccttataaaaaaaaaaaaaagc

SEQ ID NO: 248382 - DNA, 392 bp, Glycine max
  unsure (1)..(392): unsure at all n locations
ttaagcgacgcagctgcacttattttacagcttacacagaaatttcaatattttgattgacccatttctctaaactctcacatgcaaatctctcgaaaatggcaaaatcatccaaatatatttaggctaaatangggcttgtgggcttgacgcttacgcactctggaccgttacggcattatgaattcggttacgcgcattttcctcacgatggactcagcgggccttacgggatagcctcctcacaacaccaccaactcacaaggaggggcgctacaatcctcctaaccataatggtatcagcgagaaataccttcaaatgatgataccgaatgaagatgatataacccaaaggagtctagtttatacatttacaaataatcacctcaata

SEQ ID NO: 248383 - DNA, 279 bp, Glycine max
  unsure (1)..(279): unsure at all n locations
ttctagtatnttaaatcatgatccagttatagaagcagttactagaaggtagatcagttacaactttcaccggtcaggcaaatttccattacattttgtgtgactccacatgatattgattgtccctatgctcgatcccttgtcagcttacaggttatgactcaaaacctggatttagggggcatactcatatcattatcattacatgctaattcctcatggttcatgatgaagtctgtatataaaaatactacatgcatgtatgtgacattggggaaa

SEQ ID NO: 248384 - DNA, 309 bp, Glycine max
gagcggcgccgcaaccggtagtgtcatttaaagcttgaatgagactatgctttcttagtggcgcttcttgacggatgcgtcagggagagaacttactttcgggtacattcttcgaagtaaaggcttcaccgatgttaaaccgttgttcgaaaatataatgacgcacaatctgggggaacaccatatcctgtaaagaaaaaaccgacgtcaactgtactagtgtaaaaagggagaatttccacaccatttacttaagtcttaaataatggaataccatgatatacctaagaatacaacaactggacggaa

SEQ ID NO: 248385 - DNA, 300 bp, Glycine max
  unsure (1)..(300): unsure at all n locations
gagaatgatntcaagaatgactcagcaagttcaagatcaagattaaatcaagattaatttcaagtttcatgagaagaaatcaagaagattcacgattcacgagaagtttgatctcacgattcaagagaagaaatccagaagacttcacaagggaagtattgaaaagatttttcataaaacaaacatagcacacgtttgtttttcagaagagtntttctcanaattttctaacgtaccagagttcttactctctagtaatcgattaccagtggcagagtttgatttcaaaagcttttaact

SEQ ID NO: 248386 - DNA, 337 bp, Glycine max
  unsure (1)..(337): unsure at all n locations
atgaatgaggctctcctacaacctaagacaaggtagaaagagataaactgtgcaagctcaagggtcaataaaacaatcatactttcagctcacaatgggtgcaagggataaatcaatcatgcacaangtaagctttttatctaagtggctatcttcaatcaaaacatggccttcatcatcttcaatttcacacattcattctatacttcngagattcatgcaaaaatcattactcaatgttagtcattctctcacaattaaagacacactctcactgngttacgactaatgcgttccttcacaatcaacctgacanacaactaacattgtcagtcat

SEQ ID NO: 248387 - DNA, 398 bp, Glycine max
  unsure (1)..(398): unsure at all n locations
gtcacctgcggctgcagcttagctccttaactgcacaaggctcttaatattngaagagtatccttgtggaaccttcacccancanagacactgacaataacttatcttctccttcatggataaagtatggcaggctgggggcaagtaaatattctttctatcaaaccttggatgccactgtgatcgtatacccatatcagctagatcttgacgggtattcaagccatccttcatcttgccttgaatggtaaggagtggnccaatcacactcgcacaaacatttttcttcacatgcataacatcaatacaatggctaacgccaagatcacaccagtatggaagatacagaaaatggacctatcttcctatgcactctgactttatcccttttgggcttc

SEQ ID NO: 248388 - DNA, 325 bp, Glycine max
  unsure (1)..(325): unsure at all n locations
ttatagactcttcacgtctggggaagagaactatctataagagctatgactcttagaagaacttattaccaatttgtataagtcaaaaaccatctgaagagttacatcttttgatttattcagaaacaatcactggtaatcgattacacaaagctgtttatgtgaaaggatgtgactcttcacagttgaatntgaatttcaacgttcaaagacactggtaatcgataccaaaacattgttatcgattacagcttttgaataattggaacgttgtaaattcatttgaagcttttgaaaacattttcgatactgtgatcgatacaat

SEQ ID NO: 248389 - DNA, 450 bp, Glycine max
  unsure (1)..(450): unsure at all n locations
agtagttggcaaattgattgtgaaggaatgcattaactgtatcccggtgagagtctgatccttataatttgagagaaatgactatcatttagtactggaatttgcatgaatctctgaagtatggaatgaatgcatgaaattgaggatgatgaaggccattttttattatgacagccacttatccaaaaagctgatcacgtgctagaatgtattatcccttgcacccagttctgagctaaatgaatgtttcattgatggaaccttgagcctatacagttntatctcctgctaccttcactactaaaaaagggctttctacatcgccttattaacatcggttattgtaanactgatgcaacgaaagtcgatggcattttgtattaaaggagtacttacatcggtttgcaaaccgatgtatacttatgtacatggtattaaaaccgtgtacat

SEQ ID NO: 248390 - DNA, 209 bp, Glycine max
  unsure (1)..(209): unsure at all n locations
cacactaaacataaacagaagaggaaaagccaacagaaaatcaaaagccaaaaacacacaatagccgaataacccaccaaaagaacccatttccaagggaagtcctattgatccatgatcacacatgtagattttgatttgataggaaataatgngcaaagtcaagtcatgacatatctatggttcggaataggatgaaacacttacct

SEQ ID NO: 248391 - DNA, 170 bp, Glycine max
agcttccttgagaagcttcttaagaaacttcttgaagcttcttaaaaacttcttgaagtcttggaaacctctgaaactgagttactccacacctctaaactaactactcttgaaagttctgaactgactactccccccttaaatactactctggacttctgactagtatc

SEQ ID NO: 248392 - DNA, 269 bp, Glycine max
  unsure (1)..(269): unsure at all n locations
tatgcaagttgaaagccttggaggaaagaggtatgcctatgtntgtgtggatgatttctccanaattacctgggtcaactctatcagagagaaatcagacacctttgaagtattcaaagagttgagtctaagacttcaaagagaaaaagactgtgtcatcaagagaattatgagtgaccatggcagagagtttgaaaacagcaagtttactgaattctgcacatctgaaggcatcactcatgagttctctgcagccattacaccacaac

SEQ ID NO: 248393 - DNA, 241 bp, Glycine max
cactttggagagtctcgacattggattggagactttaatccttattcttatcctgaaaatttcttaacactctagaagagattaatgcatcatcattatcatatatctcaattcatcaacatatataataatgcagcgcttcatgctatgcaatgcaatcaatatgcaatatgcaatagtgtatatgtctccccttttggattaacaaagccaaaagtgtgatatccacaaactaaactcc

SEQ ID NO: 248394 - DNA, 152 bp, Glycine max
  unsure (1)..(152): unsure at all n locations
cgagcaccggccgaccaacggccaaccccaccncaccagcanccagaaagccacgcaacgacccgaaagcggggacaaaaacaaaagcgaaaaaccaccccaaaagaacaacccccaacccccgacacaaaaacagacacacccggaccaac

SEQ ID NO: 248395 - DNA, 337 bp, Glycine max
  unsure (1)..(337): unsure at all n locations
atcatcaaaagggggaaatgtaaatgtatgtatacatgattntgatgatgtcaaaagaagaatcaaacaaagttgcttcaaaagataagcatggcttcaagattaatacaagattgcttcagcaaacaaagccttgcttcaagattaactcaagatcaagcctttccttaaaacaaagtgctttcaagacaccatcaaaggcaatttatctaggcggtttaacaatggaagggtaaggaaataagctatgaaagcaagcaagaaatgtaaactatgcgaatcctaagagtgttaggatgaccacatttaaggttcccaacaaaacactcacaatcct

SEQ ID NO: 248396 - DNA, 259 bp, Glycine max
ctctctaatagtcttagctcacctccttgagatgagaagctagagcttatctacacaccccctataatagctaagctcacccccatgacaaaaaacatgaaaataaaaaataaaagtccttattacaaagacaacctcaaatgcgccgaaatacaaggctgaaaccctatacctctagaatggccaaaatacaacggcctagacgaacgaaaaacctattctaatatttacaaaataagcgggctcatacttaacccat

SEQ ID NO: 248397 - DNA, 303 bp, Glycine max
  unsure (1)..(303): unsure at all n locations
tgtcaaatacacccatgccaatggttacattagttaattcctttcatattacaacaataacaactttttacgtaatttattttgaagattctatatcgattattgaaccaatacagatcttgttaatgtaaaagggtgaaattttaacattgaactcttaactaatttagaaagccactttccacatatagaaagttatatcttactttattagttcaaactttaaccgtgtaaaanatgactttctaagtaatgtttgatgaatgtagtgatgaatggatataagtgaaatgaacatgtttg

SEQ ID NO: 248398 - DNA, 326 bp, Glycine max
  unsure (1)..(326): unsure at all n locations
gttgtctgctactaagctgcattgatgttatgttttggttncacacgctcgatgagcttccattcgtgactgctgcgatttacgtacgtggctgtagaagcaaagcttcatgatgaatcaagattgattcacagatgttttgatgatcacaaacgtgatgacaaaaagctcacaggtcaactcaaaaatgagttcaagatgctcaagatagaatcaatcacactctcagattccagacgaaagttgatttcaagaatcaagaatcaagattcaaggatcaagcttgcaagaatcaagatcaagattcaagactccagattcaagaa

SEQ ID NO: 248399 - DNA, 376 bp, Glycine max
  unsure (1)..(376): unsure at all n locations
gatgtcacaaccgttatggtagtttgtgccagttttaactgctgcttaattgtcggagcagagagagaagagagaaaacaacctacaaaatggaatatattatctatcgtggtgcaggcatagagttagtgcaaagaaatggacagactttgattgttaatatattattagtttgaagtttgaatatcagagagtcaaaatatgaaacggcataacgagagagagggaatatttggttcatccggcaaaggttacctaatttttcagcanaaaaagacaaggctactctttctagctcttgaattgaaagcgtgacaaccactgagagttatgactcaagattaattatttattttaagtatcaccaatgactaac

SEQ ID NO: 248400 - DNA, 346 bp, Glycine max
atttttaatctacggttgaataaagaattaaataacacagcacagacgtatcacacaagactactctaatggccttggccatgataaatctagctttatagattaacatctctgatacgaaatcatgcataccttgcaatatttgcttggccaatgaccccacagcaatgtaagcatttgtggcataacgtgtatgctgaaatcttctttctacatcaaaaaacgctggctctaatcagcactaaaatatcgagttatattttttctataggcaactgtaatggtgtgcttaaataaagttaacgtatcatgaccaagaaatatatgatcatcttttttcattaat

SEQ ID NO: 248401 - DNA, 276 bp, Glycine max
ctcccttcagtccaagcacagagaaagagggggttccaatatagatactatactctcttcattcacacaatattaccctaattgaatactattgtatgaatgaatcagttaattcagcaacccaatctttcattatatccatgaatgggctgagggaaactccttcactctctttcccttccaatgtgactagactaagctgcaatattaatagaacagctgcacatgtacatcttttcttcttcctgacacaagatgaagaaagtataatcagat

SEQ ID NO: 248402 - DNA, 280 bp, Glycine max
cagaagctcttcctctctctcacgcagccttcttcttctcttcttcctccaccattgttgcctaacaaagctccaacctttggccatcatttctgctccaaatcgcgaaaggagggcattttcggggtcgtgaagtgtgtgtctaccagtgggactctcaaaattcaggtttgggtgaacttctttctcctttgattttcgtgggtatggggttttgggagatatgatgggtagatttgttagtcttctgcttcatgactggtatttgtgaagactcttg

SEQ ID NO: 248403 - DNA, 275 bp, Glycine max
  unsure (1)..(275): unsure at all n locations
tgctactcttaaaacanaaatggcatacaacctcctccaataaacacaaacatcaatgtaaatctagagcaaacttatgcatatacttctctacgaacgttcacttgcacaagacattcttataactacaaacaatgcacccatgtacaatcaaggcaccttcgntacctaaattatttatatgtacctccaaggcgtatgtgttacctacatcacatgcacttccttgcttaaattacatacatgcttatcaaagccattggggtaccaaaaat

SEQ ID NO: 248404 - DNA, 262 bp, Glycine max
taaatattctctcgccctatgtctcacataatcgaatccctatgtattatcttctttaatgagttgagattcctctttaattgctggctatgtagaccttgctatcattctaaggcctgcattccaaaataggttcttcactcctatcttcttggcacacctcttgaagtgctggtaatgaagttagacttacagaggtgtaaagcaacctagtctactcttgcctttcattatacggaggcaatcagaagtgttggctggc

SEQ ID NO: 248405 - DNA, 173 bp, Glycine max
aagctcatgataggctcttataagacatggggtcatcaaaatttacctggtcgtcctactctgatctggatcctctagacgctaagtctgccattacgcatatgtttccttctttatcatccttatcagatgacgtgtcgtctatatctccccacattctcatatgccccttc

SEQ ID NO: 248406 - DNA, 255 bp, Glycine max
acattcttcttacatacctttcatttcgcacgcgaagccaaacgttcaatgtggaacaagatccctatatctgaccacttcaccctttctgatcgctatagggggcaatgacacatagggcgcttactctttattcttgctgcacggcgaagtgcaaccgctcgcacactaacttttgcacacatgtcacacaacgagtgggcatgtcttacagacacgatatgtggcctggtgggactgcatcatggcgccaac

SEQ ID NO: 248407 - DNA, 306 bp, Glycine max
catcatcaatatatttatccaatctcttagttaccctttttaaataaatcatgaatttattatttttctgttattttacatttgtcacgcacttcaacaactatgtttacgaacacttatatattaataagctaatttttaactttcagtcttcagctacaagctaactttccagcttccgattaacataagctatgtttggtataactagctgaaaagctatgtagaaagtgaaaagctagttggtagctgacaaactaacttattaaattatatgtgttcagtaaactagctgttgaagaactg

SEQ ID NO: 248408 - DNA, 205 bp, Glycine max
  unsure (1)..(205): unsure at all n locations
accagctaacaaacaaaccaaanannannggcaanggcgaaccacgccctcttccaactaaattcacaagagcaccagngacaaagctctcaatgaatgatataactattacttactctgcaaagcaatacttgacgtggaaattttggctcgaattgcaacatttcccagttaagtgttccttccttcagactacacatgaaaa

SEQ ID NO: 248409 - DNA, 164 bp, Glycine max
aaagaatgtgcctcactaattctacaacaccacctaagtcaagtttatcgcacaactgaaatcggaaatctagatataccgattgccttcttaccaaagctaaggggcaaaacctattcttgatatagagctcctttgcaggtctacaattaagtaacaattac

SEQ ID NO: 248410 - DNA, 252 bp, Glycine max
gagaaggagaaagatgaatggagatgccacttcaagtagaagatgagtctagaagaagttcaccaccataggaagccatggataagagcttgaaggtagaagaagatgaatgaagggagaggaagagaagagcatgaaatttagtgcctctaaagaagactgaactttgaagtttaattctcacatgatcaaagttgaaaaaatgcacacacaagacctctatttatagcctaagtgtcacacaaaattgga

SEQ ID NO: 248411 - DNA, 323 bp, Glycine max
acatctacgaatatctcttattccttacaatatatggctgcaatataaacatgaaaactggatgagaacgattcatgtcattggtaaccattattctaattggctaagactactcggtgtcttttatctatctattaaaacagtcttctttagttttctataaaactttattcacgagtaaataatattggtggactacttgcgggacagtgactttaccgttcactgtcacacaattgcctactgattattactttattaaatcaatttcacgtatatgatgttcaaaaattcagagtattcttcattaatgattatcttct

SEQ ID NO: 248412 - DNA, 350 bp, Glycine max
aaggttcaccctcctggtatctgagattcacttaaaattagtgagaaaaattgtttccatgaagaaaatccacgccgaggcgcttccgtaacgtttctgtaacgttttcgtgggtgatttcgcgaagatattcaaccattcttcgacgttcttctttggttcttcgtcgttcttcggtcttcaaccggtaagttcccgaaatcgaactttttaattcattctatgtacccttggtggtcccccattgtttcgcgtacttttattttcgtttcatttactttccgtaactcctcttgacgtgctttagtcatttactcgcctaatcaaaaataaaataaatctccaccgat

SEQ ID NO: 248413 - DNA, 300 bp, Glycine max
atacttgaacttataagtagccaacttggtagttaccaagagtcggatgtagtctgagtgatatagacaaacaagcatagctctctgtcttatattcataaactgacttagtgcttgaatttgatttcgctcgaaaaaataatctattttgcaaaatttgtctctatcgtttgaacttgccactagaaatttttttatctggtttacaaaggtattcttcaaatgaaaacctttgttttcacaagaaacgtttataaaatttttaaaatcacaatctaatccttctacttgtgatatttg

SEQ ID NO: 248414 - DNA, 310 bp, Glycine max
  unsure (1)..(310): unsure at all n locations
tagagactccaccaaaggggtcagagcggcttcttatactaatgtcacgagaagtgtggtggttagattcataaagatggagctgacttgtcgatacgaacctcctatgaagatcattactgacaatggcaccaatttgaacaacacaatgatgcaggaaatgtgcgaagatttcaagaatcagcatcataactccaccccttatcgaccaaagatgaatgggtctatagaagcttcaaataagaatattaagaagatngttcagaagataacggtgtcatacacagattggcatgagatgttgctttca

SEQ ID NO: 248415 - DNA, 294 bp, Glycine max
  unsure (1)..(294): unsure at all n locations
acaacatagaacacacaagcacgattggatagagaaatatccttatatgcatcagcttcgttgttaaaaagacccaacactcttacctactactgtcaatcttacttgcatttttattgtttttagcctagacttagtttaattctgttctaaaccactcaatatcaatgtttctttcaacaatgccttatctctgaattaacctttgctatactagttcctgagttcatactcagatcatccgcttaatttaaatacttacgatccggncgctctctggtgttcatttccttg

SEQ ID NO: 248416 - DNA, 288 bp, Glycine max
  unsure (1)..(288): unsure at all n locations
catgtcgngcatggcattccctacatcaaagttgtaaaatcagcacacatgtatgttacgaatgaaaaanaaactataaagaacacaacctgttagttgccatactccacaagtgcatgtccattcactaaattgactaaccttattcccaatgtggactatattcagccctgtttcacaacaaagggagcatgatacaaaggatcttttatctatatgatgaatatgtcagttcaaagtactgcgcactgttatatacttatttacatgaatgtgtttagaattgat

SEQ ID NO: 248417 - DNA, 211 bp, Glycine max
ctcctttaatcttcgctgcggctcatggctgaaaatcaccattgaaagaccctattgaaacctaaagacccagcctctatagaagcttctcaagcaagcttccatcgggaaccgatttcataaacgtgttggtgtttcttcaaactgttcttgaacacgttttaacaacgattcatattgtcttttattttattttaatgtttatttcatt

SEQ ID NO: 248418 - DNA, 301 bp, Glycine max
  unsure (1)..(301): unsure at all n locations
ggcgatggtgcacaacatagttttccacatccacaatgcgcgcataaacccaccatcccctgttgcccacctccaactgagctcgcgtactcccacgtagcccatatcctcgtttctctcaacaccgggtccccatcaatcctctcaagcttccacaacatccaagcaaaacaacattcaaacagcacaagctatcacagccaagcaaaacagagcaaaggcagataactctgctcaacacatcaaccaaaatcacagtttntcttacgtaaagaccacagtaacaattctttcgatccaa

SEQ ID NO: 248419 - DNA, 398 bp, Glycine max
  unsure (1)..(398): unsure at all n locations
gtttatgaacgaacagtttatcttctattagtaagtgatgggtcatgaaatactaagttaacttggttaagaaatgtaaatgcatgggttgtatttctatttgttgagttgatctgttcgatttggaattgcaaaaagctcatgtagtattttcataattagatttatgaaagagtctctaaattaaattgaaaatcaaaaccttaactttgtagtaatgtaacgaaagtgaatcgttaaaaccaagatctaaatccttgtaaggggagatgcacatatttaatgtctaatagtgtctcaaacaagagtctgaagggggagacctatgatacaactttcttnttataaaaaaaccttgcacaaactcttatcattgaacttgcatgaatcacttgata

SEQ ID NO: 248420 - DNA, 346 bp, Glycine max
  unsure (1)..(346): unsure at all n locations
cctcgngcactgctctaatgactatggcatcatttctggcgctaaactgctgggagtnggaggccatcttctcaattaaatttctggcttcagcaggagtcatgtctccaagggctccaccactggcagcatctatcatacttctctccatattactgagtccttcataaaaatataagagaagaagttgttctgaaatctgatggtgggggcaactggcacatagtttcttaaatctctcccagtactcatacaggctctcttcactgagttgtctaatacctgagatatccttcctgatggctgtggtcctagaagcacggaaaaatttttctaagaatactct

SEQ ID NO: 248421 - DNA, 428 bp, Glycine max
  unsure (1)..(428): unsure at all n locations
acaaatcttgtatggtaatgctggctctagaacatcttcattggatttaatgatgaaatctgtgcattctcaggtgaaaaagaggttaagttttgaactgcaaaaaatagcagttgggctaagagcatatccaccgctaagcgtagcttcagcatgcttagcgcaaaggagaatctggtatagcatcagcatcaaagtcgcaacaggtggcgctaagcccaattntacttactcgcgctaagcacgaaggtggcactaagtgtagtgtcgtgatttagagcctattaaagcctgtttgcgccaattaaggacagtttactacctttaagacaatttacaaacggccaggccaaattcaaacaccgcagctattgggaaaaccctaagcaaaaagagcactggctgagctagtttgattgaaaatatga

SEQ ID NO: 248422 - DNA, 330 bp, Glycine max
  unsure (1)..(330): unsure at all n locations
tctagttgctatttgcacccnctcttttactaaatacaccccttgcctctttttgctgattctttttccgtaacgttacggaaacttacgaattacgtaacgatacttgtttcctttcttaaggtacggaaccttacagattacgtaatcatcccttttttgccttcagaatgtacagaacttacggattggcactaacactttctttaattttcggatttacggaacttacggattgtgctacaatgcctctttgacttcgacatgtctcggacttacaaattggtaacgatgggtgcaagtacctcgagtggtcaacaggatcacatc

SEQ ID NO: 248423 - DNA, 241 bp, Glycine max
  unsure (1)..(241): unsure at all n locations
acctacactcaatagaaaacacttataacattgcaaaatgaccataaattgggagagttagatacacattcatacagaggttatacacacgacttattatttttaccgactaacaactcccccacatttacaggtttgcttgtctcttaactaacagagaacaactaacttgtcctcaagtgacattgagatgcagngactatgcacaaaggcgtatgctgcacagctactgattgcatga

SEQ ID NO: 248424 - DNA, 268 bp, Glycine max
  unsure (1)..(268): unsure at all n locations
ctccttaaccaacgaactagcctccttcctcttctcttacccttgcccgcttatattactccgaaccctgcttgcccttgcccttcctcctctcacctccatgacaacctcgatgacaagttgctcgccttcccctctttctctcttcctccaaatctaagactccgacaatgacttcctcctcatcaagtcggtgcttccacctcntctattggctcaaccctgacactgtgcaccactgtctctccctccgatggatgcctctaca

SEQ ID NO: 248425 - DNA, 357 bp, Glycine max
acaagcggagcaactccagctgtgattgatcttcacatgaaatttcgcttatatggatctcttctattaaaagaatggagtaactttgatctattaaaaatcaacgatggaaaatggcaaagcatatgttatagcatgagcactaaacattaagtagaaagaaatctcataacaatgatatactttctccagaaggaggtccttttatttctagagcactacatacaaagaaagctataaatggtcactgcaatgtgcaacgtgcaatgcgaatgaaatcaaaataaaaagatcttgcacgaatgacagtctcttcttttaattgctacttgttgcgaacaactggcatacacttca

SEQ ID NO: 248426 - DNA, 278 bp, Glycine max
  unsure (1)..(278): unsure at all n locations
ggaacagggccactatcattgttatcatctcctattccatcattgggggcactacttgaggtgccagatccctccacctttgggtgtattctttgaaagattcatgctcctttttacacattgatgtaagctccattggagcttgtaggcctaggatcttcttcatcaatggattctntgcttcttggaagatgaatggcagcggaatggagaaggaagagagagaggagatgccacttcaaggagaagatgagtctagaagaagctcaccaccattg

SEQ ID NO: 248427 - DNA, 176 bp, Glycine max
tctctctcttcctcacgtacgcatgtctctcttccctcattctccattgaaaccacaacaaagctccaacctctggtgcccatttctgctccaaatcgcgaaaggacggcatcttccgcgtcctgaagtgtgtggctacgaccgggactcccaaatttcacgttcgggtggacttc

SEQ ID NO: 248428 - DNA, 269 bp, Glycine max
tctaaatttcacaataaaatttgatgactcatcatctttagaatacaattaggtatcctacaccatatcaattgtttgttgtgaccaactgctcttgattatctattagtctatacgtgattatatggaatatcaatgtataaatgtctaccatcgataaaaaataatgaatgaaaaagtgatgaatatctcactagcaacatcggtatcttcattcgtattgtaggtggaattaccctcaactaacagaaattgagtaatggtttgat

SEQ ID NO: 248429 - DNA, 274 bp, Glycine max
ttcttatatcatcctcattccatggatcctgctacttctcatccctctgattcagattggcccattgccatccgaaaaggtactagatcctctcgtaatcctcatcctatctataactttttgagttatcatcgtttgtctcctttatattcttcgtttggtttctctctatcttcacattctgtcccttctaatattcatgaggcacttagtcatcctggatagagacaagctatgattgatgaaatgcaggctctggaacatagtggtactt

SEQ ID NO: 248430 - DNA, 415 bp, Glycine max
  unsure (1)..(415): unsure at all n locations
taatcagagcacaagagcttctgtangtgctccttacacctccattaatattctgctgtaccttctcttccatctttctttcttcattcttctccatgtatctcctcacatgctttgtgctaaatgttcttaacatgattctttacagcttccacagattaaactcgctatagaagctacatctgattttctatggctcaaatttgttgttcttgctcttgaaccatgaattgcgttgagtttacgtcccttcgagttttgccttgctatttttgtggctgaaacctacacataaatctttacaaaatttaagtaaaaaaacctcaaattaaatgactgtcactatgagttcgcaataatctgttacatgaactcgcaaagatctatgtggcgaattatttcctttcttgcaacc

SEQ ID NO: 248431 - DNA, 291 bp, Glycine max
  unsure (1)..(291): unsure at all n locations
attcgatattatgatgaaaaatcgccagaatctattattccgaaaattaaaaatataaattgttacttgtcccttttttcttggctaggtttgaatctgttctcagcactttggaagatgcggttaatgatgcccccaaagcaccagagtttcttggccgcatttttgccaaagctataacagagcatgtagtctctttgaaagagattgcgcggttaatacatgagggtggagaggaaccggngagcctcttataagctggactcgcagctgatgttcttggaacacctt

SEQ ID NO: 248432 - DNA, 241 bp, Glycine max
atacatacaattttacatcttttcctgcgcaaaccactccagagctctctcaagacacccgcatccctgtaacaatgagatctgggcaacaatcttagcgcagagaaagaccacagggaaaaataatatcagcagccaaaccatataaagatgtcatactctcgaacatccaacagtacaactgacacaaaaagaatcatattccacaaaccgactttgaccatatatcaaaatatcaaag

SEQ ID NO: 248433 - DNA, 316 bp, Glycine max
gctccagagtatgatagtcaccgctttaggagtgctgtacaccagcagcgcttcgaggccatcaagggatggtcgtttctccgggagcgacgcgtccagctcagggacgacgagtatactgatttccaggaggaaatagggcgccggcggtgggcaccactggttactcatatggccaagtttgatccagaaatagtccttgagttctatgccaatgcttggccaacagaggagggcgtgcgtgacatgagatcctgtgtaaggtgtcagtggatcccgtttgatgccgacgctatcggccaactcctatgatatc

SEQ ID NO: 248434 - DNA, 389 bp, Glycine max
  unsure (1)..(389): unsure at all n locations
cccttaggcacttctctcttctttcgaattgcttggaanaattgtttccgtgaagaaaatctaagccgaggcgcttccgaaacgtttccgtaatgtttccgtaaggaatatcgcaaaggtttcgaccgttcttcgacgttcttcattcgttcttcatcgttcttcgatcttcaatgggtaagtacctcgaaccaagctcttcgattcattctatgtacccgtggtggtctacattgngtttcgtgtatttttattctcattctctttacttttttatacccccttttgacgtgcttaagccattttatttaagtcatttctcgcttaaactaanaataaaataaacctccaccgatcgtttgaattgtattatccgtaacttcggtaaa

SEQ ID NO: 248435 - DNA, 361 bp, Glycine max
gtgtacaacggtgaaactttctgctcttattcgccgaccactttttggtacctggagatatgtcgcggtggccaggagaccttgtggatgtcacgtggtgtgctattggccaaaaccaagcttgatcaattccgacccaacccggcatagtcagtagtgaaacctgtgattgtacttaacggcgactcctgcattcaccataaaggaccaaacccaacatgagcttgtgtggtggccactgaattttgggatttggtgggcttgtatcatccaagggggtatgtacagctaaatgaacgagtaatgcctgtacatcctgggggatatcactgaacaggcgaattaggctctgatatccagg

SEQ ID NO: 248436 - DNA, 282 bp, Glycine max
gcgcgcggatgagtgcctgttacccttataagggaatttgagttgaaaaagcgatttatccaaataaaataatgtctgcctttttggtagtgattgctcccttgaaagcgtagagccccaccaattttggcgtttgcaacttacaactgagctttgaaaatggcgtatctagggaagaccggacttaaacgactgatagctgaaccttagataaaggaagggactttataactgcactcctgcggaactcgcgtgacttctcagagtaaatattgggaaaat

SEQ ID NO: 248437 - DNA, 202 bp, Glycine max
acccactcctcacgttgggttttctacggaaaaacaccataactaaacgcgccgcaggggatccctatcgcaccagatccaaatgtagaacgatgggtgatcaagaggagacgcaggatcagatgaaagccgacatgtcggctctgaaagaacaaatggcctccatgatggatgccatgttaaatatgaagcacgtcataga

SEQ ID NO: 248438 - DNA, 314 bp, Glycine max
  unsure (1)..(314): unsure at all n locations
tacacccattttttgtattattccgaatggttaatgggttntaccctatgccgngtgtctttgaatattactatggttctctccttctctggggattggcaaagagaacgttaaatgcaaatgcatagacggcattctattccattgtcaatttttggaatgttcatcgctttttgcaatttcccatatttcaagtttcaattctgggattgagaagtgtttttttgaaagtgtttaccattttcactcatattgaaaaccaaatgataatcttgtatttaacaagtgaaacccgaacatataaccacgagatg

SEQ ID NO: 248439 - DNA, 293 bp, Glycine max
  unsure (1)..(293): unsure at all n locations
ggatgaccacattcaagggtcccaacanaacactcactatcctaaagaaaaatcgcctaanattattacacacaaatggaagtttggtaacctatnggaggctcccaacacacttccaatgaaaggccttnttgttaccaaacttgaaagcaatgaaggtaagtaaattgcaaattacaaaattacaaaacggntcctcaatttggtggttgttctctctttggcgattcactcaatttggagtgcttcttagtccaatagctcttaaggtggttggcacatttcttcttgac

SEQ ID NO: 248440 - DNA, 272 bp, Glycine max
  unsure (1)..(272): unsure at all n locations
tttatatggggctcaaagagaagaacgaaagaatgattgaaacacaaaacgaactgaagaacacttcctaattttcttgagaaatatctatctgttgaaattgtattctcttcatggaccactanaatgctggcatgtaatgacttcgtgtggccatatctaatgacaagactcataataacacattattaactaacgaaaatagtagtcctcctatatcataataacacatgttttgatattaaacctcactattctaaaattaataattt

SEQ ID NO: 248441 - DNA, 307 bp, Glycine max
cattattggcggtaccacctgcgccgccaaaatccttcacctttgggcgtgtctttaatgatccgtcccctttttgaaatgtctcgcagttgcatcctatccagaaccatatccaaactgctttgatactgcctaacaaaggcaaccattatgcccttccaagaatggactcgggaagatctcacactagtgtaccacgttacagctaccccactaagactttcttggaaggaatgcattaacaatctcctcatctcttgcgatctccccaccttctgacaatacatcttcagacggctcttgggac

SEQ ID NO: 248442 - DNA, 162 bp, Glycine max
aaaataccgtgcttcacaaaaacatcaataactatatcaagctaaaatgttcaacttttaaaaattgaagccaattttacccttcaaaaaaatcatcatctctatcgctctaattttaaatatatcactttttatctctcaagtactatctaaatcatcttc

SEQ ID NO: 248443 - DNA, 232 bp, Glycine max
  unsure (1)..(232): unsure at all n locations
acatgattatcttcttcanggaatctttgaggggctaaaggcacatacaactgaggatgggtgcatactcttatctcgaccagatgagaatgctcaacgcatgaagagaagtgcagatagattgtgtatgccatctncatctaatgaccaatntgttaatgctgtaaagcagatagttcttgcaaataaacgctgggtattcatgttcctctatttattcatctctaatatt

SEQ ID NO: 248444 - DNA, 315 bp, Glycine max
  unsure (1)..(315): unsure at all n locations
ccaagtgggcctcggtgctattngcacacccattnttactaaatacaccccctgcctttggtggtgattctntctttcgtaaaggtacggaaacttacgaatttggtaacaatacttgttttctttccgtaatgttacggaaccttgcggatcacataatcatcccctttttgacttacggaatgttacggaacctcactaattgtgcaacaatgcttccatttgatttccggtgtgtcacggaaccttacggactgtgcatcaatattttcgtttgaattgtggaatgtcccggaactccacacaaatgcctaa

SEQ ID NO: 248445 - DNA, 282 bp, Glycine max
  unsure (1)..(282): unsure at all n locations
actctattacttgcctttccgcacttagcttttctttttcttaaatagcaacacacacacttttatttatacttatagttnttttttaaatacttgttgcttattagatgactgtgtgttgctcttttcttaccattacaagctttgaccccataattcccccaaatttgggcaaatttgctttgaaccaaaattccttttatgaatgatgctctcctacaacctaagacaaggtagaaggatataaactatacagacttaaggttcaatcaaacaatcata

SEQ ID NO: 248446 - DNA, 340 bp, Glycine max
tttttttttttaaaactttataggagcggacagcgaaatggacgacaaaccagaatggaccctttccctttgaagacttgttaaaaatgtttaaaaaccttaattaatatcgaatttttttattcttatggtatgatgcgagggagaggtgcacacaactttgtaaccatagtacaattcatattgtcatcacatcactatttatttatatatactatccatcttttaggcactgctaagtgaacaatatcttttaagctgaatgtgtatattatgcattatctgttactattctgactccttttttatgaattgcccattgtcatattttgccgacttc

SEQ ID NO: 248447 - DNA, 204 bp, Glycine max
ccactccctgaaacactccttttttactctaacttcgctctgaacactgttattccaccaccacgattctttacccctaggtccaaaacctctagattcacgcacacggctctgtagccactttaataatctcttgcgacgtcttgttccacatatcattcgcacttccttgtgattggtcacaccatcccttccatatctctt

SEQ ID NO: 248448 - DNA, 302 bp, Glycine max
attaatatgctaatgagacagcgaacaacctaacgtggaaaactaaattcacatttatataaaccacacatacagaaacagaaacttctatcccaattattaaggaccaaaaccatactcaagatatagcacacgacaagactttgtccaaaagaattcaagatgcaaaattatgtctctcgtgaaacacaaatattatcacgaaagctttatagcttataatagaacaacctagaaacacgctaatataaaatatcctcacgtctcacaactaaatattatcccatatacatgacaccata

SEQ ID NO: 248449 - DNA, 186 bp, Glycine max
ggatctcaacaaatcttaccctctgacttaattgcggggtagtagcataccggcaccttgacagcaatcttcaaacttctttttcgctaatactttggtcatcatgtctaaccactctcatctgttgaaccttgtaagatgtactttctcttcctcgaggacattctcgaccaatgataccttatg

SEQ ID NO: 248450 - DNA, 273 bp, Glycine max
  unsure (1)..(273): unsure at all n locations
cttgaaagatcttacgggcaatacacctcattggaaactctaagcacgtgcataatcatatgtccttcagtcatgacaggggtgtcanacataaaatcgacttctgtccctttccaatgcttattatgcatctcaaatctcaattatggatgtatttctattttcaagcttattacggctatgggtcaaatgtaaaaataaaaacgaattacttacaacgtcaacatagctactacctcggtattgtataactacttgggatagctcaacaac

SEQ ID NO: 248451 - DNA, 412 bp, Glycine max
aaactcatgaccataatcatgtgtatcagatgataaatgaatatggctaccaggtggcgttaaaggacaaagagggtttcaaccaattgtcttcttatagaagtagtccctaattaggaaccatttgtgagcttccttctcagcataagcaccatcctacaaggctttgagcagggcttcttatgttcttgctagtttaacttcaagcaacttcagtgagaagtaacttcagccttatattcaatttcttcaatgataggatccacatggtgtgtgaagaagaatctggagaatggcaagacaccatacaaaagaaaggtgtgatagacatagcatataattttctttttcatgtataggcccatgtgaaagagttcttgagaaagcacgtatgatcatgggctgatagttg

SEQ ID NO: 248452 - DNA, 450 bp, Glycine max
aagacacacaagtgaacttgtaacaaatcttctacacttggagtgatcacatgtagtcctcttgaacccttaccacccactctgtcatcatgccgagactcaggaaggccaacaggtttagccttctctaagtattctgaacaaaattcaatggcttcttctgcaatgtacctctcaacaatagaagcttctggatgatatagattctctgtataccctcttaaaatctttatgtatcgctcaaccgggtacatccaccgtagataaacaggaccacaacatttgatttctctgaccagatgcacaatcaagtgaatcatgatgtcaaagaaagcacggggacaatcatatccaactgcacagataattgcggctcatttcaactcataactgacggacaatactttgtcatatacatgagaaaacacagcagtatcgtacctgattgtt

SEQ ID NO: 248453 - DNA, 427 bp, Glycine max
  unsure (1)..(427): unsure at all n locations
acattctatggctanctatgttatgagnntctaaacagtttgtgatgaactcgctaagcctgcaactatgcgcttaacgaattcatacgatctggngtttcctatgcgcttctgggtttgtagtgatgaattcgctaagccggcatgtcgcgcttagcgagttcatgagtttaagtttgatattctcacttttctgagtttttgtttcatgagtctttgttcttcgccatgtagcanagctgagtntctcccagaatctgttgctcgctaagcgcctgtacgcgctaagcgagcatctnngattttctatttgtttctatacctgggttagcgctagtgcatgctaaccacgtgtcgtgtaacttctgatgacctttgttttntatgctgggttactcgcactgtgcgctatccctgtctcttcctt

SEQ ID NO: 248454 - DNA, 366 bp, Glycine max
  unsure (1)..(366): unsure at all n locations
acactcaagatgaanatactaactatctattatctatacttaactganaatacttataaccttacaaaataaccataaattgggagagtttgatacgatttatacaagttttatacacaaaagttagtcattttcaccgactaacaactcccccaaatttatagttttgcttgtcctcaagaaaaaagagaacaactcacttgtgctcaagtgacaatgacatgcagtgactatgacaaaggtgtatgctacacagtgactgattgcatgataagagaatggagtaaaatgccctcatcacttgtctttcacaacgtagtgcagtatccaaagaggagaatcaaatgtaacctgaacaaattgatg

SEQ ID NO: 248455 - DNA, 440 bp, Glycine max
  unsure (1)..(440): unsure at all n locations
acaccaccccccctcctttttatgctctgaacatccaatattcggttgctttacatattgttntactctaaccttctgtccaacagagagtttgtcaaacttttcaagatgggaacttggtcctacccacttttcttgctccccacaaaatccaacaaaaatgcttctgtgcaattcatctccttcataccctattccttgaacgacaccaacactacctgcttcaattgatttccaattatttgcattgtcggtcaacctcacccactcttccacttcaaacatttgttcaatcctaaggtctgaaggatctcctctcacaatccttgcagaccgaaaatgcgaccctgacttctcatcncatgaaactgttatacccttgaatcatgcgactctctcaaccacctggtaacaaacagttcgacctactatgccactta

SEQ ID NO: 248456 - DNA, 323 bp, Glycine max
  unsure (1)..(323): unsure at all n locations
tatgaaccgctttcncacattagtgatttctggcttatcgcagctttctcgcttagacgatgaactgaagtggtgcacttagtgagatgaatcagtgtgcttagcgaacctgttcatctcatcttcttttggattctttctcgcacttatcccacgaatgttgcgcttatcggacgctcgctaatccaacagattggcttatcgagaacgtgataaacaacactcttcaaagcttgcctaattaacctgaaactgagagaaaatgattatttaacacacacaatgaaaatactcaggatttattacctatacttaacagaaaa

SEQ ID NO: 248457 - DNA, 439 bp, Glycine max
aataaactaccatgtggcatccaataatgatccctctgatcattaaccaagtataaaaaatgaaaaacaccaaaactgtttgggtcacttacccacaatctttgtccgagattgcgaggaagaatacccgaattagtgagttaaagaatactcgcgtatataaaggggcaaattaatcatttacaacattcataacagtgtctttggactagattcaccgcgacaaataataatcaattgaaataacacatagctgattttattttctctatgcgatcatcatgactttataaaaaaaatataagattgaccgataaaaggaaaaaacaagatatgaattaaattctcctaaaaatcgatagaaaattaaaaataacgcctgtgataaaaaaatatgatttatgaaaaaaatatcttggtactaccaaacacaatgtgg

SEQ ID NO: 248458 - DNA, 289 bp, Glycine max
  unsure (1)..(289): unsure at all n locations
agcttcacactctgtttaattttaatttaatacaaataaatcctaaggtttcccagttatatttacttttttttttacagaacctcagtatatttacttgaaagaattctttcatgtgcctaagataccaataaaagaaatcaaattctcggcataggttcaccataacagaacattgaacatctaaaacatgtttatccgatgcatagtccatacaaagtaaaacaaaaaacagtacggaaaaaataggtcaatatgaacctcanagcatcactccttgtcaaaactc

SEQ ID NO: 248459 - DNA, 265 bp, Glycine max
cacggatttaatccctacaaaccaaacaatatgctacgaaatcgcttgtccataaaatatgtgatatctgtgccccttacaatatataatgcgagacgtctaactctagctcaaaaattatctcaagagatgaggattgtgccctacctatatattctaatgtgaaattacttgtaatcgatgtgaaactctgattattcttaacaccaattttaaacaactagcctttgatggcctttacaataggtgcatagtgatgacttct

SEQ ID NO: 248460 - DNA, 303 bp, Glycine max
  unsure (1)..(303): unsure at all n locations
cttcatacaactttgagctttctgtaaatgaaactttagaactctaatcatttcctccctcttgctaaggcttcgatccaccaaagcaaccttggatttaccaggaaggtaaggcaatgaaatgggaagaggatggctatatacaatttcataaggagtagcctangcaaaagtatggaaggtggtgtcgtaccaccattcatctaaagagagccaatgaacccaatgatgaggtctatctgaacacatacaccaaagataagtctccaaacacctattaacaacctcagtctgcccatctgt

SEQ ID NO: 248461 - DNA, 405 bp, Glycine max
  unsure (1)..(405): unsure at all n locations
cggatgtcggaatgaatactgtattatatcgagacgctcgaaattgacaatatatcgagacgctcgtaattgaaaccaaatgctcgaagcaaattcaaacgacaataactttttactcggatgttcgaatgaatcccataatatatcaagacgctcgtatttgaaaacataagctctaagcatattctaatgataataactttntactcggatgtcggattgagtcccgtaatatatcgagacgcccgtaattgaaaacggatgctcgtagcaaattcaaatgacaatatcgagatggctcgaaatgagcaatggaagctcttgagcaattcaaatggtcataacttttatttcggagggtccgatgaggcncataatatatcgagacgctcgaaatgaacaatg

SEQ ID NO: 248462 - DNA, 66 bp, Glycine max
agtatggcttttatttgctcaaactccggtttaacttccagcttttgcattattaaggactccatc

SEQ ID NO: 248463 - DNA, 419 bp, Glycine max
  unsure (1)..(419): unsure at all n locations
caggagcaaccgccttctggaggaattttctggaaggcccaagtgggcctggttgctatttngcaccccatttttactaaatgcacccccttgccccttttttggtgattctttttccgtaacgttatgaaactttacgaatttcgtaacgatgcttgctttctttccgtaatattatgaaaccttacggattacgtattcatccctcttttaccttccggaacgttatggaactntatcgattgcgcactaacacttcctttcaatntccgtcatgtcacggaactccacagattgtgctacaatgctttcttttgactttcggcatgtcacggaacttcacgaattgcctaacgatgggtgccaagtacctcgaagtgggcaaacgaagggtcgcatccaacaacggatggtccctg

SEQ ID NO: 248464 - DNA, 212 bp, Glycine max
ctcattgcatggctatcgattctagcgcgtacttctactcgcgcaaccctattctctctggtgtatgagatggaagtcgcgctcctccttaaagtacaaattccttctttgagaattccagcccaatcacggttgggagaagcacaatgggccagacatgttttgactagctgaatcctatcgagggaaaaagattggctgccatgaatcat

SEQ ID NO: 248465 - DNA, 275 bp, Glycine max
cggatgtccgattgagtcctgtactatatcgagactctcttaattgaaaacgaaagctcgtagaaaattcaaacgacaataaatcttaactcgaatgttcgattgagtcttgtaatatatcgagacgctcgaaattgaaaatggaagctctgagcaaattcaaacgacaataacttgttactcagatgtccgattaagtcccgtaatatattgagacgctcgtaattgaaaatggaagctcgcagcaaattctaatgacaataactttttactcg

SEQ ID NO: 248466 - DNA, 347 bp, Glycine max
atggctgagaggcggtgaagcaaagcttggacttggagagtaaacaaacccgagtgccatccgaactttaagttggactccattggtgaagttgagaaggtagacatcattgagaagcacgccaaaggccgagtactgatctgcataattaatttcatagtcacattgatcagggtgttcacagttgtagtcctcagttggctgcaaggatgcacaaaggggatccctgcagggtacaaagtcattgctgggcctgtacagtggatggggtgctctgaaaataataagcaataaatctaattcaaacacacaacacataaatgtatctctattctctcactgcatct

SEQ ID NO: 248467 - DNA, 336 bp, Glycine max
  unsure (1)..(336): unsure at all n locations
gatgggcagatggatgagtcctcataaaactatagtgtagtgcagaagaataattttaaagttacttagaagcacaatgcccaaaaccactcaatggaaacagattacctcagcacgggcacaaacatagaatctgcggccaaaattatgtccttgtcttttcaccacccgagcaatacaaggttccttatggcccttgcaaataggtatactgttctgcatcaactgttntattcgctgccactctagtgaagccacattacttttctcttttcttgtggaactaccacttggtccagctatatcccgatcacatgtatcagtatccaactcata

SEQ ID NO: 248468 - DNA, 266 bp, Glycine max
gtcaaagagatagtacgaattggccttacggttaacttccgtacttatgataaccgccatgatcaaaccgtatatacccaacacactcgccatacaaccgcgcggatcgattttatcactagcttcgggctcatcactgccatcgatgcaaccccgacgccgctcttcgcggtgccgtacgccgcgtctatacttgagaaaacacaaacgacacacgggttaagataaaacgacgacggcttccggaaatgagacacaaaaaactc

SEQ ID NO: 248469 - DNA, 444 bp, Glycine max
  unsure (1)..(444): unsure at all n locations
acgttcagaaactactggtaatctattaccatatatgtgtaatcgattacacacggcaaattntgaatcgaaattttaatagctgtttgtaaatcagttttggccactggtaatcgattacatcctctggtaatcgattaccagagagtaaatttcttgtaaaagactttttaacttaaaattcttggccaaaccttttgctacttcaattggaattcccttcctatataatataccctctctaagactctatagacagtcttgatcatccatcttgaatatctctaatttctctgtcttgaataaagcttcgagacgcatgtgagtctttggcatcatcaaaacatcggcttgatcctttgttacaatcttccctctttgatgatgacaatccntgaaataagacaaactatatacacgatgatagtacgttcacacaaccct

SEQ ID NO: 248470 - DNA, 351 bp, Glycine max
  unsure (1)..(351): unsure at all n locations
acaacaagtcttccacatncacaatgcgcgcataaacgcaccatnccctgttgcccacctccaactaagctcacgtacttccacgtagcccatatcctcgtttctctcaacatcgggtccccatcaatccttccaagcttccacaacatccaagcaaaacaaaattcaaacagcacaagctatcacagccaagtaaaacagggcanaggcagaaaactctgctcaacacaacaaccaaaatcacagcttttctcactcacagacaccagtaacacattcttcgatccaattcgctaaccgttggatcgactcaaacatttactggaagtctatagtacataagcctacatt

SEQ ID NO: 248471 - DNA, 344 bp, Glycine max
  unsure (1)..(344): unsure at all n locations
gcgcttctattgttcaatatctagcgtctcgatctattatgcgctngaatcggacctccgagtgaaaagttaagaccatttgaattgctcaagagctctcattaaccaatttcgagggtctcgatattttatgttcctaaatcagacctccgagttaaaagttatgtccatttgaatatctcgagagctctcgctgtttaattccgagcgtctctatatgtgatgctcctgaatcggacctcccagtgaaaagttatgaccatttgaatatctcgagagcttccgttttcaattcgagcgttctatatgtgatgccctgaatcgacctccagttaaaagtatga

SEQ ID NO: 248472 - DNA, 194 bp, Glycine max
cgagatattcaaatggtcataagtttaacctggacgtccgacttacgcacataacatacttagacgcccgaaactcaacaacggaagcactcgagaaaatcaaatggtcattacttctaactccgacgtccgatccaagcgcctcacatatacacacgctcgcaattgaacaacggaagctctcgagataatca

SEQ ID NO: 248473 - DNA, 450 bp, Glycine max
  unsure (1)..(450): unsure at all n locations
gcacaaagaggaagatctcagaaccacatgagattaacatcaattcacattctgtttctaaagaatataagagaaaacacccgattcactcacgcagaggaaaacctctcaaaggtgcataattctcatgcaggcaattgttccatcacaattccaatcactgatatgtcataaatcacattttgcaagtcatttcccatcaaatcaaagataaattgcataatcatgatggatcattacggctcttacgatttggactagctctgaaagaaatattggttcttctggatattcaaaaataccttgagaatacgagagcaacatataaacaaactgacaatttanaataaatcattacttcctatcccttcccatttcaaccaagttatcactacttnctataccanaatctcacttataatattacaacatcttatacagttataacaa

SEQ ID NO: 248474 - DNA, 378 bp, Glycine max
actagatgcattggttaacttggtaacccagctggccttgaataagaaatctgtacctgtcgcaagagtctgtggtttgtgctcctctgctgaccaccatacagacctttgccctttcatgcaacaacctggagcaattgagcagcctgaagcttatgctgcaaacatttacaatagacctcctcaacctcagcagcaaaatcaaccacaacagaacaattatgacctctccagcaacagatacaaccctggatggaggaatcaccctaatctcagatggtctagccctcaacaacaacaacaacagcctgcttcttctttccaaaatgctgctggcccaagtagaccatacattccttcatcaatccaacaacaaca

SEQ ID NO: 248475 - DNA, 368 bp, Glycine max
  unsure (1)..(368): unsure at all n locations
gctcactacaagccttaagtgaaaaaacatgatatcancatatccttaaggacatttggagctttggaattgctttgggaataagtgtggngggttcttgtttcattggacaacttgctntgttggctatgcttcatgatgtattntgcgcatacttgatgtacattgtatattggttaaatgttggacatgctgaatgaaatgttgtttctcacaggctacaaagtacaaaataaaaaacaatcacaaaaaatcgatacaaaaaatcgaaaaagaccaaaaaagcatanagtgaggaatagatctaatggccaagatgataaactttgcttactttatgttaacttatcttacttttttatttctat

SEQ ID NO: 248476 - DNA, 418 bp, Glycine max
  unsure (1)..(418): unsure at all n locations
aattgaaggagaaaaagagggagagaagttgaactttgaagtgtgtctcacaagtttcacattcatcaaacttttgacaagtgttacacatgcttctatttatagcctaggtcactaactacatgaaagcttccttgagaagcttanttgagaagcttccttgagaagctagagtttagctacacacccctctaatagctaagctcatgtcattgagaaagttccttgagaaacttccttgagaagcttccttgagaagctagagcttagctacacatacccctctaatagctaagctcactctcatgccacaatacatgagaatgcttagctacacacacccctcctgatagctaagctcacctcatgccanaatacatganantacaaacaaagtcctactacaagactactcata

SEQ ID NO: 248477 - DNA, 313 bp, Glycine max
tgttgtgacatgatatctcatttctcctccgctatgggatgttttcacctcgatcatcccactcaatcaaaagaatgtatggacacatatggtcacccaaaaggtgtttccataaagaagtcggcaccaagaatttccttttctaattcttccactagatacacatgcaatgcattctgaacggagactcatggtcatttgatagggactatctcattctcaacatcatcaaagatggtgggattccacactaactcttgtattcaagatagattatgtgtttagcccacactctcctgctggcttgctctat

SEQ ID NO: 248478 - DNA, 441 bp, Glycine max
  unsure (1)..(441): unsure at all n locations
atacacattcatggccttcatcatgtnctcattcatacatttcattctaaaattcagagattgatgcaaagactattactcanagctagttattcactcatagtttaagatcacactcttaccgggtttggttcaagcttttctttctcaatcaatctatctactaactaataattctaattgcaagttcacattcttgttctttctttgtctaacatgcatactcgctcaaactcatgaagagaaacaaaaactccatcacaatcatgcattcaatccaaaatcaaatcatacaccaattctcacataaagataacagtgttcgactatagtatcatcaaaactaagtcaaactgttctaaatgcttcaaaatacgcaagcccactaaccataacaanaacaatagtgtatataaacatcaaccacaatcactaaaatac

SEQ ID NO: 248479 - DNA, 251 bp, Glycine max
  unsure (1)..(251): unsure at all n locations
gaacaacatcccagccgaggccgcttcgtaacgttccngtaatgttttcgtgggtgatttcgccaagattttcaaccgttcttcgacgttcttcgttcgttcgtcgtcgttcttcggtctctaactggtcacgtcccgaaatcgaacttttcaatctattctatgtactcttagtggtcctcatttgtnttcacgtcgcttcattctcatttcatttaccttttcgacccccttttgacatgctttagtcc

SEQ ID NO: 248480 - DNA, 434 bp, Glycine max
  unsure (1)..(434): unsure at all n locations
gcaagctcgaggccttggatcttcttcatcaatgttttcctttgcttcttgaagatcaatggcagcagaatggagaaggaggaaagctgattggagacgccacttcaaggagaagatgagtcaagaacaagctcacaaccataggaagccatggataagagctttaacgtataaaatgagtggagggagaaggagagaaggaacacaaaantttatgtcccaaatgaggtcagaactttgaagtgtaattcccaaatgatcaaagttgaaaaactacacacataagacctctatttatagcttaagtgtcacacacaattggagggaaatttgaattctattcaaatttcacttgaatttgaatttgaatttgtggagccaaatctggagccaaaatttcactaattatgattacgtgaatttagatatggttc

SEQ ID NO: 248481 - DNA, 413 bp, Glycine max
  unsure (1)..(413): unsure at all n locations
tgcaagcttctatctttggtcctcctcatagntgttgtatgagaaaacatgctctattttcatctcccactccaagtaggcctccggatcattctttcctttaaatggaggaatgttgagtttaataccatcaattcggttttgtctaagaacaccatcattccctcttctnctcctttcttcttcattatgatctctattctccattngattcaacctctcatggagcgcatcatctcgttgtttcattaacctctccaaatgttgcatcacagcttgcatttggaattgcgaaagccccactccatcattaggattagtacctgacatctcacacaaacaaatcaaacgtaacaagacaattatagttgctggttgaatacctcacccactcaagtgtatcacacaattat

SEQ ID NO: 248482 - DNA, 248 bp, Glycine max
  unsure (1)..(248): unsure at all n locations
cagaccggtacctggagatatgtcgcatgggtcacgagacctctgggacgtcangtgcggtgctattgcccaanaccaagcttgaccaatcccgacccaaccccgccatagtcggtcagtgacaacctgcgatgtacctaagcacgcgagctcctgtctgccaacagataataggaacacaacaccacacagcaaggacgcttgtggtggctggccagctgtgaattttgtgtaatatgtggattgcg

SEQ ID NO: 248483 - DNA, 314 bp, Glycine max
gatcctgtgaagttagatgagctggaaaatgaggctactattatatcgtgtcagctggagatgtattttcctcctactttctttgacatcatggtgcacttaattgttcatttggtcagagaaatcaaatgttgtggtcctatttatttgtagtggatgtacccggttgagcgatacatgaagatcttaaaagggtatacaaagaatctacatcatccagaagcatctattgtggaaaggtacattgcagaagaagccattgaatcttgtttagagtacattgaaaaagcaaaacctggtgggcttcccgagtc

SEQ ID NO: 248484 - DNA, 512 bp, Glycine max
  unsure (1)..(512): unsure at all n locations
gcaagctcgctgatggtaggtatctaatctccaacttataccatcatctaactaatacaccttttaaacagatatatacaagtcagcaacactgacaaaagaatntattntaatcactggttattattgttataatgtgaacactgctttcaatgtcaatgtcaatgccaataagaacaccaggatcatatttacgtagtaattccctttcatccagattatgtgtgacagtgattggcatacaatgaaatatgtcagagagatacctcaaccaatgtagtttgacactcccctggcacacgggaaaataatcttgacagcaattcttgctcgcctcatcctcgtgaatatttttggccatatatacaccgcttagttctcaactttcggcactctgaccatcggcaatattctttagaacttgaaaactttccataatacanaaacaatatgtctcccattagttctaccccaacanatctctntcaaaattaaggttcttccaaatacat

SEQ ID NO: 248485 - DNA, 358 bp, Glycine max
  unsure (1)..(358): unsure at all n locations
ttatattatgtattaacataacagtcaaatcaagttagaaaacccaagatacaatacaattaaagagatcgatctcttattcacgtttcacatgagaaatcactattaatgagacgaatctgtcaatacatctttttttgtgggcatggctagctgtgatatgtgagtggacaataatataacattgacaagaatcaatagccaacacacttcctcttatgtaatgatgcacaatagcacccattgctcgtacaaacactaaaaagtcaaaatgaatgcgtntagacttgcatgcatcgacccaagactatcaactataatgaaagcaacaatataagaactctcaccatcacccgct

SEQ ID NO: 248486 - DNA, 444 bp, Glycine max
  unsure (1)..(444): unsure at all n locations
cttgttttacctagagcgcccgcgcccatccagagggaggccccccaagctccggctccaaccctgactcactcggccagcaacgcccactttagcgccggttccaacgcgataaggaactttcccccgaggccaactacataattaccctcgatcccaatgacgtacgaagacctcttgccgtccctcattgccaaccagatggctgtgatatctccctggaagatctaccaacctccttttccaaagtggtataaccctgacgcaacctgcgcataccatgggaaaaccccgggccactccaccgaanaatgcctggcccttaaatacaagggtccaacattgatagatgccggacgactgacatttcaagaggaccgtcccaacgtgaaaacgaaaccgctcgccaatcatggaggggggagcagtaatgccatcgagtcg

SEQ ID NO: 248487 - DNA, 351 bp, Glycine max
attcttggagttggaaaaatagatactttacaagatactcatattcatgattggtactcgacacggtatggtatgctctgctctattaattcattatacgttgttgaatgtctctcttctctttgctcatgatttgtcttttatgttgaccaagggggagagatacataacatactaaggggaactatctatttttttaacacgttatatatatatatatatgaaatcttcagctctttcatataagacactatcgtaaaatcaccgcggaccatgtgaatcatgcacgtttcgatgatgccacaagtatttacttgatgaaacccaccaatagatcagatgatggttgtc

SEQ ID NO: 248488 - DNA, 317 bp, Glycine max
gatcaaatctcgagttagagattagtatgattaaagagttcaaatgggagactataaaagtgcggatcaatctctctaagtacttttggaaataagatttgaataactcgtagataaccttggtatttggtcttatcatcatgcatctatcacatgtcatcaacgattttgagatttatgtgatcttttgaaactggctcatatttattgaaaatggccttactaagggagctatgggattagcttcatgacaacatcacaaaaagaggtggggtgtggtgtaatggacatgggcttctggaagtgattggagtata

SEQ ID NO: 248489 - DNA, 338 bp, Glycine max
tatgaattatatagaaacatgacatgagaaatatctgcttcttgatagttaagctactctcaaaaagattttagatatattgaaatcttaaacaatgcacattctggacacatctcaggaaaggagaagaagcatgaaatctccatcaagtaaagcaatatgatcttcaagaatggaactcaaagatcatccttgcaacttatagtgatattaaaagggaacaactagaccttctaaaattatgcatacatggtttgtattatattgacctaaattaatgagcatataatgaaatggtatacttgcagagactaacaattgaaaaatctgttgcagta

SEQ ID NO: 248490 - DNA, 400 bp, Glycine max
actaactttacttatgatcttacctcatatataaatatgttaaaacaattatgataatattcaaacataaggtaaaaacctatctcaattcacaaatataatagaaacacacaaacatggacttgcacactcatacaagagtgctgttaaaatgtcacttactatacttatcttaggagttgcatcctgtatattagaaggatataatggtgtttgtctagaatgttgtactccatttaaaagacaaatagcttagttcttattgtttgtgcaaatccctctacaatagttgttgattggaaataataagtataattggaggccagacattacaaagttggccttggtagtgaggtgggacactgtaccctgccctgcagccatattctggatctaaagc

SEQ ID NO: 248491 - DNA, 372 bp, Glycine max
tccccatgtttcagaaatgctaaagcggaagattcaaagtacagagacccatcagtagaacagagaaccaaaggctcaagagagggttactctgggacatcagatagaggtcctaaatacaaattaatggaaaaacccattaaaatagatgaatgtcctgctggagacttgtcaactgaaagatcttccagtgccaaggcttctcctcggggcctgatggaaagatactcttcatcaacaagcattgagcgcaggtatgtgaatagaagtagtgttaagcggaatcttgaaatcgatgaaagtggaaggaggaacagtactgatgtaagagaattctctacttctgatgatagacttggctgggagtctact

SEQ ID NO: 248492 - DNA, 372 bp, Glycine max
gagttatgattgctgaacaccctagccttgcaacaagtcctagggaagtagacacggagatggacaagacaatccgcagtattgtgagtagcattttgaaagacgcctctgtgcctgatgctgagaaagatgttccaacatcttccaacccaagtgtttctgtgcctgatgctaagaaagatgttccaacatcctccgctccaaatgctgaagctctcccttcacccagtgaagaggaatcaacagaagaagaggatcaagcctcagaggagacttctgcaccacgggcaccagaacctgcttcaggtgacctcattgacctggaagaagtcgaatctgatgaagaacccattcgcaacagggtggcacctg

SEQ ID NO: 248493 - DNA, 329 bp, Glycine max
accttttattcttcattccattgttctgctcatgatcctcacgactgcacacttgactctggttgaatctcgagtactgcccccagatcggaagaggaatatcatcctgcatccatatcaacatacactactgcacctccccatgacaatgggatgaacaatattctaccaccgaaactacaaatacaacacatggggagaagagaggtacttatgagtttgcctacgtttgatatacacttgcatcattcacttattcctaacattacaaacgatcttctttctacactgatttgacacacttcatttaatatattccttcgtactca

SEQ ID NO: 248494 - DNA, 276 bp, Glycine max
tttgagactacttcaagtaaaccatgtggcaaaaagttaatgatgcgtaagtggttggtataaccactatgagcacgtggtcatcactgtatttttattacatataagttgggagatgaatcggggtgatgggcctctcctatgtgggataatctatgcaatcttaaataatgtagtcttttcttttttacaatacttctttaattctccatcgggaataattgggaacatgacccggcgttgccgggtaccgactattgctataatataattata

SEQ ID NO: 248495 - DNA, 271 bp, Glycine max
  unsure (1)..(271): unsure at all n locations
atagaacacaaaagcatgattaattagagaaacatcattatatacatcagctggtccgttagaaaacccaacacttctacctactgttgtcaattttacttacctgcatttttactggttttagcctacacttagcttaattatgttctaaactcataattatcaatgtttctttcaacaatgccttatttctgaatntaactctatctaagagtagtcncctaagttcgatactccgattcatcccgtttaatnttaaatacttgatgat

SEQ ID NO: 248496 - DNA, 382 bp, Glycine max
  unsure (1)..(382): unsure at all n locations
ataccactttatgctgatattaagaagggggcaaagtgtttcttttgcaagaagaagggacacatgaaaaagaattgccccggattccagaaatggcttgagaagaaaggtaaatcaatctcattagtatgttatgaatctaatatggttagtgttaatattaacacctgcgggattgattctggatctactattcatattgcaaattctttacagggtatgcaaaacctaaggaaaccagtgggaagtgagcaaagcattntatcaggcaataagctaggctcacatgtggaggccattggaactcgcattttgactctaagtagtggctctatcttaaaattagaaaggactttttatgtaccaagtctttcccgaaact

SEQ ID NO: 248497 - DNA, 312 bp, Glycine max
  unsure (1)..(312): unsure at all n locations
ctaagctcgtgtgtaccggaaaaagcaagagttattcagacctttgtatgtncactgcacgttgaagtggatgccgacttctttgtctctttaactccacaacctgtctctttaaccctgtgcgcaaaatccacaaaacaacaaaattcaacgtcaaatcttgcattctaaaaatcataagaaaccacacactctcttcggtngtcatcatnactgccagagtgactgtataacatangaatcttctgcacactaaaagaaccttgaataccccaaacgcgtcaaaaactttatagtatcagcacatgatat

SEQ ID NO: 248498 - DNA, 408 bp, Glycine max
  unsure (1)..(408): unsure at all n locations
atgtcagactcctgccataattatcgttggaaataatctaaatctcacatcgactaanagtaatcccacattagaatatataagtgaggggtaatcctcaccccttgaacaaacttttaggattaagttagacttctcacgttattcattctaaaaataatataactactaaggtgactatcctacctactctagaaaaggttagtttacattgttaactttcactaccacacactntatttgtgagcttactgtccacctgatcacactgttgtagtctatagactttactctatttattntaatgataaattcccaatccgcatctcactcacattgtgtcaatacattacacagcatatcacatgaaagcagcccatgcatgtgtacattcacttatttgatata

SEQ ID NO: 248499 - DNA, 238 bp, Glycine max
  unsure (1)..(238): unsure at all n locations
agaggggaggcaccatccactangaaatacagcctggaagaaggagctctaccacaaagaatgtgtcttggataagaagctcgaatatgatgctctaacggacgaacagacagagagaacgggggagcacacaattgaaggaatcaaagagggagaaaagcggaactttgaagtgtgcctcataagactctcattcatcaacgttacaacacagtgcacatatgcttctatatacact

SEQ ID NO: 248500 - DNA, 431 bp, Glycine max
  unsure (1)..(431): unsure at all n locations
tgttcaattcttcatgcatccttgtttgtataagtgcttaccactaggccaaaagctataacttatagtcagggcacaactctttctacttaagagcgcaatagcctaagcgccacgagttgattgtgactngacccacttgggcctncgcaataggacaattgatgccactacctgaaaaattatctccccttcagcaatcgccccactgggaatcgaactcatgaccttggctctgataccaattgttggatccagcgcttaccactaggccaaaagctatagcttatagttagggcacaattctttctacttaagagtgtaacagcccaagcgccacaagttgagtgtgacttgcctctaccatgggacgaataatgtcacaactcagcaaacaatcctctccaatctttcgttgagagtaatggtta

SEQ ID NO: 248501 - DNA, 288 bp, Glycine max
  unsure (1)..(288): unsure at all n locations
cgccaagtacgacgaagagttangtctagccacggcccacgagcatagaatcgcggatgagtatgctcaagtatatgcggaacaagaggctagaggaagggtgatcgactctctacaccaagaggcaaccatgtggatggatcggtttgctcttaccttgaacgggagtcaagacacttcccgactgttagccaaggccaccgcgatggcagacacctactccgcctccgaagagattcatgggcttctcggctattgtcagcatatgatagacttaacgcgccacat

SEQ ID NO: 248502 - DNA, 397 bp, Glycine max
  unsure (1)..(397): unsure at all n locations
gcttagcattcatccatgataaacatggagtttatgactatgttcatgacaatatatggtgttctaccatgtagtcaactgtattctcatgatttccacaagcanttttttaaaacatttttttcctgtttatatatcttggccaacattttctcttgtatgattgcttctcctacatataagaaatcaatcacaaaagttatagtatctcaaattgctacatcacacctaaaatttaaaataaagcctcaggaacctcaacttcactcattgcatttgcaaaacctacttaaagagaaggaataatagaattcacttacatcttcaacaactctgacatgttggcatatgtatcacgaatgctatctccctcanagttattgttatcaagttgact

SEQ ID NO: 248503 - DNA, 328 bp, Glycine max
  unsure (1)..(328): unsure at all n locations
catcctcctccattggtttccatgttatcactaccacctctatcattgaaccaaaattctgaaattncttctcattctatcttctattagccactaccaccaccgntggcaccggtaacttataatgaatccccttcaactaaaaattctcaaagttttcaaaccttttccttcaatgccacacaacacctctcaccacgttcgtaagtctcccaatagttataatcgtgcaccaactccttcaaatgaagaagttgatacacaattctctacccaacatgcgttagaaaatattacaacagagganagaggagggagatctaccaag

SEQ ID NO: 248504 - DNA, 318 bp, Glycine max
gcggcctcacatatcttaagaaggggggggggggtgaattaagatattccacactatttcccctaattaaaaatctatttcactttttaaccaagctatgaattcccttaataacaatcttcttcaatattaattccaatgaaacaatttgaatatcaatataacgccactctaaataaaggagattaagggaagagaaaatgcatactcagttttatacttgttcggccacacccttgtgtctacgtccagtccccaagcaacccgctcgagagttccactatcttgtaaatcctctttacaagttctaaacacaca

SEQ ID NO: 248505 - DNA, 246 bp, Glycine max
acaactcaagagttcaagataccaatcaagaagaattcacgactcctgacgacagtctagagacaagaatcaagattcacggttccagatctcacgaatcacgatccagattcacgactcacgattcaagaatgaagagaagactcaatcaagacaagtatcaacacagtttttataactctgaatagcacatgagtttttgacacaaacctctaccacagagtctctactctctggtaatcacta

SEQ ID NO: 248506 - DNA, 272 bp, Glycine max
  unsure (1)..(272): unsure at all n locations
tgatgaatggtgggaagccaaaattcaggtatgtattattcaacgaaaatagacgttttgtgggggtcagtcttttgttcttttgtcttttatgtgtgattatgtttccatgaaagaacgattaatagtttatcttggaattcttgataaaaaaatagataatcatgaaatcgaacaatgtgttttaattaccaacattcttgatttatgaaaaaaaattaattcttgatnttagaacaaaacaattacgcacatttagtttatgcaacaca

SEQ ID NO: 248507 - DNA, 110 bp, Glycine max
agtatcaataagacttgtcatgtgcggtttcatattgtcgtggcagtagattgtgctatatgtggttttcaagctcgacgagagttacatgcggagcaaagtatccatcc

SEQ ID NO: 248508 - DNA, 505 bp, Glycine max
  unsure (1)..(505): unsure at all n locations
gtaacccaccatcttctcatattagaacagtggtaacatgtccactatcattgttatcatctcctattccatcattgngggcactacttgaggtgccagatccctccacctttgggtgtattctttgaaagattcatgctcctttntacacattgatgtaagctccattggagctcgtaggcctaggatcttcttcatcaatggattctttgcttcttggaagatgaatggcagcggaatggagaaggaagagagagaggagatgccacttcaaggagaagatgagtctagaagaagctcaccaccattggaggccacggataagagcttggaggaagaacgagatgaatgaacggagaggaagagaagagcatgacattttgtgttctaaaagagctctganatctgaagttaatattaaatgataaagttcanaaaatgccaccatgactctattatagctagtgtacacaaattgacgaaattgattcattcaattcactga

SEQ ID NO: 248509 - DNA, 62 bp, Glycine max
acttactttctccccttatacaattctaattttttctcgctcttctattagaccacatcctt

SEQ ID NO: 248510 - DNA, 319 bp, Glycine max
  unsure (1)..(319): unsure at all n locations
cctctccagcctgatcaatacagaagtcgcacgtctctacaaccgagtaggctttgtgctctatcactataggaagatggcatgccttgccaaagacaacccgataaggcgacattcctatgggtgctttgtacgcacgcctatgcgcccaaagagcatcatccagcctggtgctccaactctttctattcggttgcacaatcttctctaagatcctttttatctccctgtttgaaatctcagcctgcccattagtcttggggtggtaaggtgtggaaattagtgcacgacccatactttctancaaggcatacatgga

SEQ ID NO: 248511 - DNA, 253 bp, Glycine max
atgcgcccacggcatccctatcgcaccagactcacatctagaacgatgggtgaccaagacgagacacaggaacagatgacagccgacctgtccgctctgaaagaacagatggcttctatgatggaggccatgttatgaatgaggcagctcatggagaacaacgtgcgcaccgctgccgttgccagttcggctgccaaagcagacccaactctcttggcaactgggcaccatcctctctcacacatagtacgac

SEQ ID NO: 248512 - DNA, 293 bp, Glycine max
atcttctattagtaagtgatgggtcatgaaatactaagttaactcggttaagaaatgtaaatgcatgggttgtatttctatctgttgagtcgatctgttgattttggaattgcaaaaagctcatgtagtcttttcataattagatttatgaaagagtttctaaattaaattgaaaatcaaaaccttaactttgtagtaatgtaacgaaagtgaatcgttcaaaccaagatctaaatccttgtcaggggagatgcacatatctaatgtctaatagtgtctcacaccagagtctg

SEQ ID NO: 248513 - DNA, 313 bp, Glycine max
  unsure (1)..(313): unsure at all n locations
cttgcactgaattgttgggagttggaagccatcttttcaatcaaattcctagcctcagtaggggtcatatcaccaagagctccaccactggcagcatcaatcatactcctatncatgttgctaagtccctcatagaaatattgaacaagaagttgctcaganatctggtggcgaagatagcttgcacaccatttcttgaatctttcctagtactcatacaagctctcctcactaagtttcctgatgcctcaaatgtctnttctgatggcagtggccctagatgcacggaagaatntctctcacaacaccctct

SEQ ID NO: 248514 - DNA, 317 bp, Glycine max
  unsure (1)..(317): unsure at all n locations
gctcgacgatgagtaatcaatgaaaactcaacgtgtcctttacctcaagaatctcacttctgtttatacatatcctgatagagcttggatccatgggccttgttgcatagctaccattttaggcaatctatctttaattattgttttaacgggttggtatgcttagataatccaaaatatcatnttctaaacggttaagcttatcctctcgtggtgtatttggctatccacaccatccaaacatgcattagtccagagggaggtctctatatgatctattcacaatgattgaataatcaaggattctctcgcttatc

SEQ ID NO: 248515 - DNA, 290 bp, Glycine max
atattatacttcacaaagtattttgcaacattctgttattggttgatggtaagaatttacgcgcaaaatataacaacttattggggtcacaatcggtcctaattattttataaatacagtatataaacatgcaacacgtggcactacttccatatatctagcaatctagcaatagtagtaactcaatagattctgtgaagaaagaatcgtacattaatgcgtatatggatcaaataagataataaaaaggaataaatcttgcttgaaactcagcacgagaagatatgcgt

SEQ ID NO: 248516 - DNA, 324 bp, Glycine max
cttaacttaatctcgtgtttgaagatgatggccattgaagcatctaatgcttgcattaatgcacatacttcttcatgttggaaaaccatcatctttaactatcgtgttgaatacctcatcaggaaccacttccttttgcgttagagtacgtctgcacaccagagcgctccttttgatgatgattagcaatctttagaactcgatcttcatttactctttataggattcaaaagatcctacgagaatgtatttacaaaacaactcctaaacagagaattaaatcaagtctttacatgtcactctttaatgctgatcatataatga

SEQ ID NO: 248517 - DNA, 398 bp, Glycine max
  unsure (1)..(398): unsure at all n locations
cagaattttccatttcatatttcacttcacaaagtattttgcaacattttgttattgttcgatggtaagaatttaggcgcaaaatataacaacttattggggtcacaatcggtcctaattattttataaatacagtatataaacatgcaacacgtggcactacttccatatatctagcaatctagcaatagtagtaactcaatagattntgtgaagaaagaattgtacattaatgcgtatatggatcaaataagataataaaaaggaataacatttccttgaaactcagcacgagaagaatatgcgtttgttgtaatcttcgacttaagtngatgttcgtgtaacgtgcttatgccctcgatttcgtcatacttgaatcatcagctatatgtatattc

SEQ ID NO: 248518 - DNA, 403 bp, Glycine max
  unsure (1)..(403): unsure at all n locations
caattctcttaacttaatctcgtgtctgaagattatggccattgaagcatctaatgcttgcattaatgcacatacttcttcatgtcggaaaaccattatctctaactatngtgttgaatactccatcaggaaccactctctttcgcgttagagtaggtttgcacagtagagcgctcctcttgatgatgattagccaattttagaacttgatcttcatttaatctttataggattcaaaagatcctacgagaatgtatctacaaaanaactcacaaacagagaattaaataaagtctttacatgtcatcctctaatggtgtatcatataatgactctagctctctatcgttcacacagtagatccagacttgcgaagcatgttctaatactcgctaagacatct

SEQ ID NO: 248519 - DNA, 422 bp, Glycine max
  unsure (1)..(422): unsure at all n locations
agatatctgcaaaatgttatatgcaaagggtgattaattgaacaatgtattggcattgctcttcggtataaatagttaattattttatacaaaaaaaaaaatgatgccaatattggcagtattgtagtgccagtaccagattagaacattaatcattaatcatccatcacaaccaatgagaacaacaagaataagaataaaagcacacggaaataggaaataacaacaattagaatatttgaacattccttacctttntataatcagagaacgatagggatgcatctttgcaaggttgagaaaatttccaagcacattgttcccatatgcgtgcagtgcatctgcttaatagctgaaaaccttcaacaatcatagttccatagatacatntatggaataggtatatgtaatttcagaaatac

SEQ ID NO: 248520 - DNA, 358 bp, Glycine max
  unsure (1)..(358): unsure at all n locations
acagagactcgtgcgtaacgtgagggagcactcagtgaagaacaacacagtcatgttcaagttgaaccaaatggaacacaagtgcaaactgaagtgaacaccgaacatgataattgaacacatgacatggaaattgatgcagtgattaatctgctaacacaagctatccaaacaaatccaaacaatgtaaaatctataccatcntgagttagaagctattgtgtatctcactctcattctcagtctttaatggtccctttacacagaanaaatcaaaccttgtctcaaagaaaactggtcctgcatctgcatctacaaataattctggtattgcaaagacagtgagttgtgcagcaac

SEQ ID NO: 248521 - DNA, 387 bp, Glycine max
  unsure (1)..(387): unsure at all n locations
ttcctgaagcctncgaactngagcaaccaccccaacacagctgattcctccaactggaacaacctccgcactatcgaacccggcaccctccctgccgtaaccgccgccgccaaatccttcgggaaactctccagcgacctgccagcctccgccagcgccaccatcacctcttcccgattgcgggccctctcctcctcctcttcatcaccgccgccgccactttcgccgccgccgcctctccccgacgacctgccaccatccccagctgaggagatggccaagggcggcccgatctannagcaaaattaagaaaaaatatttactttaaatgtgagagaattagtaggtcttntttaccaacatacatacacttcttgtaacatatat

SEQ ID NO: 248522 - DNA, 447 bp, Glycine max
  unsure (1)..(447): unsure at all n locations
tgttaagaaatttctctctcttgttaaataaaaccaactctgtctgagcctgttatatcatacttatagtaatatattttacttgttttgcagcgcatataaatgatagagattctttggatttatcattntattgtattgcacataaatacctttctgaaaatgaatattgacctgttttttctagtgcatataatataaatgatagggattctttggatttatcattttattgtattgtgatggttcttgggtatagatggcttacgaacgaacatcaatgacgaagggataactttttataacaacattattaatggtcttcttgaaagaggtatgatctgtatgcagctattttacctttatntttcttatctctttcattacaactatatgtcaaagtactcttttctgaccgtataccacttatgtaacttgaccattgga

SEQ ID NO: 248523 - DNA, 405 bp, Glycine max
tcaccgctagtttgagaaataaatctaaccttggtttatcaatcgaaagcagtgaggaagcacagccatgaagggactaagcttgttacgttctcccaacaactcagctagatatctgaaaatcaatgcaagaaaccacacaatgagagtaggacattgtaggcattactaatcacaaaagaaaatatagaatataataaaattatcaaggatgaaggatccatgttgattttttccatgaattaaaaagatcatgaatagaaagtacaacaaagacaagaatggtggtgcttccacacaaaattaccaacgacaacaacaaacaacaacaaagccttgtcccactaggtgaggttggctacataaatcacacaacaccgttcagctcacttataaaaatcaaag

SEQ ID NO: 248524 - DNA, 266 bp, Glycine max
  unsure (1)..(266): unsure at all n locations
gatttataacccattcttgggcaaacaaatagggttgtcattctattattattctgaaaatttcaacttgcttaagctgtggatctttgacttcagttggagattctgagttgctcttctaacctctttctagatgatgttgagtgaatgctactaccctttaaggtacaaaacctctgtctttgtcagagtaaatttaaagnttctatttttatttttattcatttttggttttggattattggtgtggtagactctgtgatcct

SEQ ID NO: 248525 - DNA, 438 bp, Glycine max
  unsure (1)..(438): unsure at all n locations
ggagcacgaaatcgaaggaataaaagagggagagaagtggaactttgaagtatgtctcataagactctcattcatcaaagttacaacaagtgttacacatgcttctatttatagactaggtagcttccttgagaagctctcttgagaaaacttccttgagaagcttctttgagaaaacttccttgagaagctagagcttagctacacacacccctctcataactaagctcacctccttgagaagcttccttaagaagattcctaaagaagctagagcttagctacacatacctctctaatagctaagctcaacctcttgagatgagaagctagagcttagctacacacccnctataatagctaagcnttcacccatgacannnaaacatgaaaataaaaaaaagtccttatacacagacactcataatgcccgaatac

SEQ ID NO: 248526 - DNA, 369 bp, Glycine max
  unsure (1)..(369): unsure at all n locations
ttcaaatcttatcacttattcgaaataacaaataatgcctttctcgactaacgtttcatttcaattcatttaactaactgaaaatatttcaacttggtaaaaagtgtccccctatatcttgacgctgatcggtgaaatcaacggaaagatatatttgtctaatccttccctcttagtttacattttgcaactgactttacatttattatatctagttgttacatctgcagaaatcttatcactttaaataactcttttcttttacttttgctgaaccatccaatntatcctaatccnactttcttctcctttcacctttagtaatctctcctcttatttgacgatgtcatccaccaacacatttcaatc

SEQ ID NO: 248527 - DNA, 317 bp, Glycine max
  unsure (1)..(317): unsure at all n locations
aagagtaatgtcccactggtaaaactaactttccaaatgttcgccttcgcaggaatggccccgaggaagctcgcctcaaagaggtccaggaaggacaaggcggccgaaggaactatttccgccccggagtacgacagtcaccgctttaggagcgttgtacaccagcagcgcttcgaagccatcaagggatggtcgtttcttcgggagcgacgcgtccagctcagggacgacgagtatactgatttccaggaggaaatatggcgccggcggtgggcaccacttgattactccatggccaagtntgatccggaaatagt

SEQ ID NO: 248528 - DNA, 285 bp, Glycine max
  unsure (1)..(285): unsure at all n locations
ccatgagaggccggatcttatggagaatatatatcctaatggacaacaaagaggagaagagggaatgatggtgttcctaaacaaaagcgaatngatggtattaaactcaacattcctccctctaaaggaaagaatgatccggaggactactcggagtgggagatgaaaatagagcatgttttctcgtgcaacaactatgaggaggaccaaaaggtaaagcttgccgccacggagttctctgactatgctcttgtgtggtggaacaagctacacaaggagagagca

SEQ ID NO: 248529 - DNA, 337 bp, Glycine max
  unsure (1)..(337): unsure at all n locations
catggggataggcatnctaagtgatatgctgtaaggcaccacaaaaaatgggaactatattacgacttccaccagagatgctatgctggcttctattaaacatggaattgaccttaacgggattagtccttcatcctacaaggaaaggagactacccttcgaatttgggcttaaggcctaactcacancggcttttaaggtacggactaataaagcctcataaggactccattacagcatccctaatgcgtgccattgaagcaacctattttgagttgtgtacattatgttaatctggcccaacaatgtcacactaaatttaacgcaattctatata

SEQ ID NO: 248530 - DNA, 390 bp, Glycine max
  unsure (1)..(390): unsure at all n locations
tttgaatgaagtttcacaaatgtgagtgtaaggaggtttatgactctacaaatcccctctttttacaccttggttctaggcatggaaatggggcccgaacccgtgaggctcaccccggacctgcccccgattntgaaggggaaaacctaagttgattgaggtcaggatcgggttcgagtgttcctcgacagccaaagttgggttcagggtcggngatgagattattaatacctgtcccaaacccgccccgtcaataattaatttacaaaaatatccctacatatatataacatactacaacttgaaactattggataggatcttatgttattgttggatcggatntatgttgcatgtacaatctaaatactgtgtgatcgtataaaaata

SEQ ID NO: 248531 - DNA, 362 bp, Glycine max
  unsure (1)..(362): unsure at all n locations
ggccattgaccaatcncttttccatgacttaacccacatgtccagcgacggtgtaccacttgaaggtacactgagtgacgattggaaatctgatttctctgcacatgatgcccgctagttggtttgcaccaaccatgcagatatgaccggacgccttcttgccggctcattggcttttgaaagctgcatccttcattatctgattgtgcggattctgcttccacgatcttccaatcttgcccaggtttctgaggaagatcttgctatcatgtgggcctttcataccgggcgtcaacttgactgcgcacaccttgtcagatatcgcatgcataacgcattgcgactaaatgctccattgcata

SEQ ID NO: 248532 - DNA, 288 bp, Glycine max
  unsure (1)..(288): unsure at all n locations
actcaatcagacatccgagtaaaaagttattgtcgtttgaattggctcacagcttccacattcaatttcgaggctctcgatatattgngggactcaatcagacatccgagtaaaaagttattgccgtttgaattggctcggagcttcaacattcaatttcgagcgtctcgatatatgatgggcctcaatcagacatcatagtaaaaagctattgtccgttgaattggctaagaggtttaacattcaatttcgagcgtctagatatactacgggactcaatcagacatc

SEQ ID NO: 248533 - DNA, 338 bp, Glycine max
ctctgagccaattcaaacgacaataactttttactcggatgtctgattgagtcccctaatatatcgagacgctctaaatcgaatgttgaacctctgagctaattcaaacgacactagctctatactcggatgtctgattgagtgccgtaacatatcgagacgctcgatattgaatgttgaacctctaagccaattaaaacaacaataacgttttactcggatgtctgattgagtcccgtcatatatcgagacgctcgaaattgaatgttgaagctccgagcccattcacacgacaataaccttctacctcgatgtctgattgagctccataatataac

SEQ ID NO: 248534 - DNA, 359 bp, Glycine max
  unsure (1)..(359): unsure at all n locations
tctcaggatggaccattgggtcaagcccagctcatcaaagggtgagaattatttgatagtatgatgaanaattgcaagaatctattattccgaaaattaaaaatataaattgttacttgtcccttttttcttggctaggtttgaatctgttctcagcactttggaagatgcggttaatgatgcccccaaagcaccagagtttcttggccgcatttttgccaaagctataacagagcatgtagtctctttgaaagagattgggcggttaatacatgagggtggagaggaaccggngagcctcttataagctggactcgcagctgatgttcttggaagcacctcggaggtaataaaaatgg

SEQ ID NO: 248535 - DNA, 325 bp, Glycine max
  unsure (1)..(325): unsure at all n locations
aacgcgccgcacgggatccctatcgcaccagatccaaatctagaacgatgggtgatcaagaggagacgcaggaacagatgaaagccgacatgtcggctctgaaagaacaaatggcctccatgatggaggccatgttaagtatgaagcagctcatagagaagaacgcggccaccgccgccgctgccagttcggctggtgaagcagacccgactctcttggaactacgcaccattctccctanacatagtangacggcgaacggacacactgcggcacgatggcagccctcacctangatacaaccgagccggttacccttatggat

SEQ ID NO: 248536 - DNA, 461 bp, Glycine max
  unsure (1)..(461): unsure at all n locations
tgcaagcttgacaagccaacaactctcgcacctgtatagtttaccaccctcgacaccggacaatacttattcaagttgaggggcttgacaaactcgcaaccctcttacttgtcaaggctactacctttgacaccataaatctcttttgccaacaagctaactcaaagcttgngggattatgtactgcccggggtccacaaaatggacgtggcaagtgacgtggcactccagtgagcacgtcagccctctatgtcaaccttggcataggagcacagacaccttgcccttagcagccaggctactgngccgataggttatctctgatacctcattatttgaatattaatgataatgttagaactcccttatcangtgacaggtacctaattatctataagccacaacttatctactagctattaactataagctataattatcttcaagctagtaattatcta

SEQ ID NO: 248537 - DNA, 340 bp, Glycine max
atgtgcaaaatcacaatgctcaaaattataatgctcaacatcacgatgttcaaaatcaccaataacagaatgcgcagattcaccagctatggaatgctcagaatgatcaaaaggtataaaatgatgcctaactaatctgtgacatgtcctatctatctcacgatcaaaggcttgtcagtcacactggattgctctagtcatacactacattcagcaagcacacaactacgtgccttgtcatgtaaataaaggtgcacgcttgaactacagctaccctcaaatgatatccaaatgactcgaaattttgtacgcacctctataaatgatgagaacatagcac

SEQ ID NO: 248538 - DNA, 406 bp, Glycine max
  unsure (1)..(406): unsure at all n locations
gcaaattatcgaagtgggtctgaaaagaggcaaatctgatcatcttgctctgataaatgcaaaaaaaaaaaanaaaaaaaagctggggcaaataaagagggtgaggatgaaggagaagcccgtgctgtgactgccattcctatacagccaagtttcccaccaacccaacaatgtcattactcagccaataaccaaccttctccttacccaccgcccagttatccacaaaggccatccctaaaacaaccacaaagtctgtctaccgcactttcaatgacgaacattgcctttagcacaatccanaaacaccaaccaagaaatgaattttgcagcgagaaagcctgtagaattcacccaaattccggtgtcctatgctgacttgctccatatctacttgataatcaat

SEQ ID NO: 248539 - DNA, 428 bp, Glycine max
  unsure (1)..(428): unsure at all n locations
ctcacctttcttgagatgagaagctagagcttacgtacagcacccctataatagctaacgctcacccccatgacaaaaaaacatgacaatactaacaaagtccttactacaaagactactcacaatgcccngaaatacaaggctaaaaccctatactactagaatggccacaatacaaggcccagacgaaggagatacctattctaatatttacaaagataagtgggctcatacttagcccatggactcaaaatctaccctaaggctcatgagaaccctacggccttcccttggatctctagccaatctacttggagtcttctacccaatgcctttgcggagtaggattgcatcattaagtctatcatatatacattgctgactctatantctacatgctttcatatagtgtcatgcctatgttctat

SEQ ID NO: 248540 - DNA, 472 bp, Glycine max
  unsure (1)..(472): unsure at all n locations
gcaagcttctagccaaatggacttaccttgaattaattcatttgatagcccctttgagcctatgttcccctttctttgttttgaagttcattacaagtcttaagtgaaaaaccatgatatcaccttacccttaaggaattttggagctttggaattgttttgggaataagctgggaataagtgtggaggggtatgtttcattggaagatataacttttggccatgcttaatgttttattttggccatgcttgatgtatatatatattgcctagttcttgctttaatcttcaaatttgtactgttaaaaaaatgatgaanaaaatgaaaaaaaaaaaatcaattgctgcaaattctgcaaattcatactgttcanaaanaaagagaaaaaaagagaagaagaacagaagtgaagttgaataaatgaggtcttcgtatgaggacttgattnggagcctcggtgattttttatat

SEQ ID NO: 248541 - DNA, 447 bp, Glycine max
  unsure (1)..(447): unsure at all n locations
tagttattagagaggtgcgtgtagctaagctctagcttctttatgaatcttctcaaggagatgagcttagttattagaggggtgtgtgtagctaagctctagcttctcaaggaagttttctcaaagaagcttctcaaggaagttttctcaagaaaaattctcaaggaagctacctagtctataaatagaagcatgtgtaacacttgttgtaactctgatgaatgagagtnttatgagacaaacttcaaagttcaacttctcttcctctnttctctcttcaatatcgtgctcccccctctctttttcttttccttcattaaagcatcctcttcaagcttcttatccaaggcacattcttggtggtgaagctcccttcttcatggcttattcnctagtggatggtagcctccctcttctcttcttctttttgcttcgttgcatctccat

SEQ ID NO: 248542 - DNA, 445 bp, Glycine max
  unsure (1)..(445): unsure at all n locations
agtcatcaagagaatatatatatgtgaccattgtatgagtcncaacactgaatcaagatcatcacagaatcaataatcatcaatcatctntgaatcatctatctttcaatctttacaacatcatctctcaacatctttcaatcaatctttcaatatgtttctacaaaantttctgattcatttctcttcatctctctaaaagttttttatcaacactttctcttccaagaaaagttctttgttcaaaaacttgcgttattcatctttttcattctcttctccctttgcccaaagaacgaaggactaaccgcctgaattcttttgtgtctctcttctcccttacaaaagattcaaaggactaacccgctcacaatcttttgattcttccttcccttaagcaaagattaaaggacaacctctgaatatctttgttccctacaaaatc

SEQ ID NO: 248543 - DNA, 343 bp, Glycine max
  unsure (1)..(343): unsure at all n locations
ataacttagaaatatgtatgagaaacagtcctttggctaagcgcaagcctcgcactaagcgcatctntggtcatgcgctaagccgagagtttaaagcgcttacncccaacccttgcattgagctgatttggccgctaagctggccaaggctgagctaagccacattcaattcgatctgaattcggctaagcaatggccaaaccgctaagcatagtgtattggttggctaagtgtgaactcgtgtcgccaagctcatttccttgcagccagaactggcgttcatggagctaagcgccactcacgatggctaagctgaagtccttgcgacaatgtangcactaag

SEQ ID NO: 248544 - DNA, 239 bp, Glycine max
  unsure (1)..(239): unsure at all n locations
cagcaatcgtgaccggaaggtgcacatataacgtccatcntttttcacatacaaacaaccacaacaagtgacatggcagtgattaaatgattctttattcattctctcttcctgagagagtcaagtggagtcctttctgattcacttctttcaggtctatcactttggaaaattgccagaaccttacaatgcgggaagccctggcatggacatcactggtctcacatacagtccacaac

SEQ ID NO: 248545 - DNA, 424 bp, Glycine max
  unsure (1)..(424): unsure at all n locations
caataagaccaatgactnttgatttgaatctcatgatggataaacctgactctntattatctccatttggccacactttagttagatgtctataattaaaacttggtccatcgatcttttatttattagtctatattataagattcaatcttttactttttaaaaatactttttaattcaaagataattttaaattatataattnttgtccttaagagaattgttctactattctttaaaagtaaaaaatataaccttttaaaaaaatattaaaatcattaaatgaccatntttttactttaaacagactagttcataacaattaatatcaaagtagtgtttagcttcgttctgccgtgtaaaagtgaagcanatgattgtttgtnaatattacccgccaaagtaaataacggaatcttcaata

SEQ ID NO: 248546 - DNA, 328 bp, Glycine max
catcgccaccggataatcctttaccgtcgtctaaaggactgctatcattattactacttaacggaaggaagacaaagctctctttctttctgaccaccgaacatcaagtaccatcactagatttgtgatcgacaacaaagcgatcgacaaaatctcacatctgagatgaacaatgaaaccactactacatctgacaacaaacccactgtacgttgcctggattcgatacgaaggacatcatgaacaaatggttcctctctaatgacagcgatgatgatcctttacacggcgatcatggagggtctttgcagtggtgactgtaaggatg

SEQ ID NO: 248547 - DNA, 288 bp, Glycine max
ctctctaaaataccattaactgcttagctcataactcagtttgaatattttcgtccgcaaatgatgaagttttttgttatttgcagtgtgcgtattatggggataacattggagttagaagccgtgcctacaccgtcgcagcttcaattggaagaaaatgctataatcaatagtggatggtggaatagatcagagtcagtagcttcgcgcaatatctgttcatggtatggtatgtcttgcaacgtcgctggaagcgtaactagaatcaactatcccttttatacacct

SEQ ID NO: 248548 - DNA, 316 bp, Glycine max
caagcaactcgattagactagcgattgtttaccacatttcagcgtacacaaattcggacgcccggtgggaccgcgcaattgtgtgtttctgctctacattattgctaacagcttattcactgctgtcgatttattgcactcttaattgtcttgatcttgtatgcatttaacaagtgggaaatctgttccacacttaacagaatttaatactcgacaaggatggctagaccaccctcaagtaactaaaacaatgaccttctaaatatggaggggcaaccaacgcagacatctgtcactaatgccaatgtaaattctg

SEQ ID NO: 248549 - DNA, 291 bp, Glycine max
  unsure (1)..(291): unsure at all n locations
cgaataatataacgctaaagcgtccattcaatccaaatgttgcaagaacaaccgtatccaagcgccgtgcaatccaaaggtgcaagcatagttagtgttatctggaagtttgctgagatcctttggatcaggaataaacatgcaccacctatgagcaagataattcacattctgtgtacctacgagaaatttgttttggttctgaccagaaaggtccattggaaacttacgttgtccatcgtatctgaatgntccccaatggcgttctaagttccccgagcaatgctctcg

SEQ ID NO: 248550 - DNA, 358 bp, Glycine max
tgagcacttgttttgcttcccgcgatgcttctattcatgctccgctgagtgggcttatagcctaaaccatacttcccacggtttccttgagtatttatcaggctagttatgccaccgttgtctttgctaaacccatcccgggttcataaccgttccccaacataactcgggccatcatttccgctgcatcggacagataaggctgcccacagagggagtcacggaggaaatgctgaccacctcacaagactggaacagcagttctaacgatccttctgcgggcttcacataacgcatggacgatgggcagcttaccaagatgtcttcctcactgacacgatgacaagtgcctctcact

SEQ ID NO: 248551 - DNA, 364 bp, Glycine max
  unsure (1)..(364): unsure at all n locations
catgcaagctcgccttgcccctcgatatatatgagggtctcatggtcactatgaatgacaaattccttgggataaaggtagtgttgccatgttctcaaagcccgtactaaggcatacaactccttatcataagttgaatagttaagggtaggaccacttaacttttcactataataagcaattggatggccttcttgcatcaacacagccccaatcccaacattngaagcatcacactcaatctcaaaagaattttgaaagtttggaacgcaagtatgggggcattagttagctcttgcttaagaacattgaaagcttcttcttgtttctctctccatttgaaaccaacatctttcttgagcac

SEQ ID NO: 248552 - DNA, 273 bp, Glycine max
  unsure (1)..(273): unsure at all n locations
aatggtgggaatcttggaacacaacacattcttgggaagggttcaagatcgcaatcttccaaaggtttcaagcgtctaacctatggaatccttttcaagcattgctggtgctggaacaggaagaaacagtgcaagaattccaaggccaattcaagaagcacatcggaatggtgaacgggttggaagaaccgtttctggtggacgtgtttctcaacgcgctgaaagaagagatcagcactgaggtaaggctccatgaaccanacaacttgatgg

SEQ ID NO: 248553 - DNA, 267 bp, Glycine max
  unsure (1)..(267): unsure at all n locations
ttatggaagaataanattcctagcaaaatttcagtttttgcttggaggctaatagaagatagactaccaacaaggatgaatctgcataggagacaggtgcaattgcaggatctgcaatgtcctttctgcaaagaagctttagaggaggcatctcatttgttcttccattgcatctttatccaaccaatttggtgggaatcgatgtcttggctgaacttacatactgcctttcctcttggacctaaacagaatnttctacagcatatc

SEQ ID NO: 248554 - DNA, 234 bp, Glycine max
  unsure (1)..(234): unsure at all n locations
ttctttcaatctgctgacaaattgtttcngtgaagaaaatcccagccgaggcacttgcgaaacgttccgtaacattttcgtgaggaatttcgcgaatgtttcgaccgttcttccaccttnttcattcgttcttcatcgctcttcgatcttcaacgggtaagtacctcgaaccaagctttccattcattctatgtaccccgggcggtccacattgngtttcgtgtatctttattc

SEQ ID NO: 248555 - DNA, 377 bp, Glycine max
atgcagctctaagcagatttagtaatgacccactatcctagaattattataacttaatgccattaacctagggaattaaaacaaacttaatggctgagtgtaactgaaattgtggcaaccaaaagtcacccccaacagccaacaagtcagccaccatttggtctcccaaaaggctgatgcctaggttgccaattgggcccttattacaacttgaactaaagcccttttagttgattaacccaaaacatatttttggtcagccaactttacaaggattgggccattatttagacaaactaaacactctaaaattgaaataaagtggtgtcatttagtcctccttcatttgggccatgatacaactcacaaccttggac

SEQ ID NO: 248556 - DNA, 310 bp, Glycine max
caagacaattatagttgctgtctgaatacctcacccactcaagtgtatcacacaattatggcttttctctaatgaaacactcttgccttttacgactctaattccccttgagttcttacgtaattcaagagatcatggccccaacaaagaacaattcaccactatgtgtcaccgaacgctacagagacaaggaaaatgttaaccaacacaaatgctaacaatgtctttaggcacaaatgaacgagacaaaattcacaatctacgaattcaacgaacaatccttcatgcaaccaatatattaacttacaga

SEQ ID NO: 248557 - DNA, 288 bp, Glycine max
  unsure (1)..(288): unsure at all n locations
ctctccatcattgacggcgccacttcagatcgcaaattcttccaccttcggcatattctttgaaagatttatgctcctccttacacatgctctgtagctgcatcctattcggcaccctattagaattgtactgatactgcctaacgaacgccaccactacgtcttttcaagaatggactccggaacgttccagattantataccacgtgacgggtgccccagtaagactttcttgggaaagatgcatcaacaatctttcaattttcgagtatgcccccttctcctgct

SEQ ID NO: 248558 - DNA, 389 bp, Glycine max
  unsure (1)..(389): unsure at all n locations
ctacattatttacattnacgagtaacatggccgagaaatttattagcaatttagcatcacttacctcgcaaggtgattaactacaacaataaaagaaatgggcttttcaataaagaagatgaacaaatgtttggcccagctccctatttaagaaaaagacaaactaataataaaagagtgaacaagcattatcacagactaaagtttcaaaggatatttttaaaatattcttaaaattcgagtgtgatttaactcaacttagtaactagtaattcaaaaagtggtgagaactctcttccacttatatattattattattattattatcttaaaactttcaataacgctcatgccgaacaatctgttctttttgtaaacaagatatcaca

SEQ ID NO: 248559 - DNA, 400 bp, Glycine max
gtcatgtgttaaagcacaagtggcaggtggcaaggcacacttggcacgcgtgacatgaacgccataaaacaaaacaaatacattctctccttcacaagttgaccattcctgcattggttgacacaataaaaaatcttacaatatttacataccacgagagaataattcaaataacttttataaaaattatttatgcatgataactttctaatttaatgatagtatttttttatataatcagcgcatagattaatctcttatttaataaacaaaaataatcaagtggatctagtttagtgaataagaattagcattactagttatcatactcgctctattaagaaattaaaatataattcacgaagatgatatccgactctatttttcttaatatactatc

SEQ ID NO: 248560 - DNA, 312 bp, Glycine max
cttgtgtccggactctcagccacttatgatagccaccgatgatcccattactgctctccctaagctctctgtcctttcttcatgcccgcctccatgccttgcgaactccttggagtacctttgcattgcggtcactgaaaccccgtgtaatgaaaggtgtgatgcttttgtctaatggcgctcctctcatggggtagccaagctgtcttatggcgaggacgggattataattaatacacacccatgttcccatccagggaacattcggacatccttcgcatgaagatacaatcctgattcttcctctcttct

SEQ ID NO: 248561 - DNA, 237 bp, Glycine max
  unsure (1)..(237): unsure at all n locations
cccccccccccgccccnccccgcgtccggctaaagcatgaccacagcacgaaaagcaaaaggagaagaaacagggacgatctgcacactcacacacaatctacaccaaaaacttctacacccagatcaaagcccaatacaaacgcaccatcagaaacaccacccacaaaacacaagacgcgaaacgaaacccatagcagtacgccacatgaacaggacaacacagcaacccaccaga

SEQ ID NO: 248562 - DNA, 287 bp, Glycine max
gggagaaagaataattttacgttctgcaattccagatcttactattcacgtaacactaaaatttcgttttctgcttcaatctgcaatttcattctctatcgatcaatggaacgctaagtctccagcgttgttttatatggaggatcaagcacaactctctttgacgttttattattactattgaactctcattagtcttccctcttcaccaactactctgtatttgttgctattaatccatgcatgcttagtgcttgattaatcgtctctgcgctcgacttacattc

SEQ ID NO: 248563 - DNA, 123 bp, Glycine max
ttacctatccctgacccgcccggcctttagttttgacactaagaatgggtacactgcgctcattccacctcaaccaaggaaatgcgcagcaaaaagagaaaattgccactaaaaaccatcagc

SEQ ID NO: 248564 - DNA, 299 bp, Glycine max
tgaggtattacagtcaaagcatggtacatgaagggatctggttgacgaacaactgccaccaaatgcttctatttggtggagagatctaataaaaatatatgacggggagaatgaattgaaatgggtggatggtctgattatatggaaactatggaacaagttggatactatgttttggttagacaagtagagaggacgcgagagtcttgctcataaatatagccgactcttcctgaattcatagcaacaaggagaaatgcgacgaaacctgggagtgtggatccaacatgagtggaagt

SEQ ID NO: 248565 - DNA, 374 bp, Glycine max
  unsure (1)..(374): unsure at all n locations
ctactataccatcgcctatccaaacaggaaaaaattaacatatgctttctatgcttctgatagacttgaactttatatatttgatcaaataaagagtacactagatgaatttctcaataaatatttataggagaaaaaaataataaggtaaaatgaattaaatttctttgtcttcaactaacaagctaattntaactcataagtacttactgagaagtttatccaaataaggtctaaagcttaatcagataccgaaacgggtatggagggagtaaaataatttttaacaaaaagagtgtgacaaacaacaatgaaatgaaagagtacttcgaaattggtcttctacaggtgtactgatggcccatccattatta

SEQ ID NO: 248566 - DNA, 334 bp, Glycine max
  unsure (1)..(334): unsure at all n locations
cctgagttccaaatacctacaacatgcaaagagaaggcttacaacatctcaatgacaggatcttgcaagaggattntaacctcaagatctgattttgcattccattcttgtaaaacttacaaaaaattatctaagatctcacaatacgatatacttctagagtaaagaatggaggagatcttgagagtgataagacactgcagaatctaacaaatagcgattaagatctcanaatgagattntctatcaaagatgctcttagaacactgaactaaccaaactgcgatataacancatgaaatatatttctgaaatctacactttcatcatggag

SEQ ID NO: 248567 - DNA, 451 bp, Glycine max
  unsure (1)..(451): unsure at all n locations
gcttgtgcacaaatggatgtaaaggaggatgtttggttatntctggacacccgttgtatagaatgaacaacattcagtattggattcccaccccttctcagattctcattggtcctactcagtttttgtgtcatgtgtgctctaagagtttcaacagatataataatcttcaggtatgcaatttgttattgttttccttctactctttattatatataaaaatcgaaataataaaataaaatcatggctactttacatacatgtacacatattttgtttcctttgtgttctctttgatgtaaagtcattaaacttctatcttcttcttcttcttctttcttcttcttcacaatactataggtgaatccttctgtgattctgtctgctatcccatccttctgcatggtgttctcgatcttatctacacacatatataaatgaacataattaa

SEQ ID NO: 248568 - DNA, 439 bp, Glycine max
  unsure (1)..(439): unsure at all n locations
ccttccccctccctcgggactcctgactcctcatcatttccaatcttttgctgacacatgtatgagagaatcaccaacttcatactctagcacatgatcaaattactgaacacatgtcaacttatcgacaataagtaacagcttcacatagattgtaactntaggcaaagtataccttccaactaggtcttangataagcataaatgctggagataatcttcttagctcttanacgggacacgaataaactaattaagtagtgacattactatatgttataatataacgcctaaccatacagaaaacatgaatgactcaaacttataagcttagacctaatatgagcaaagtatatctggaaggatcatattatatggcgctggctatagtatgtgaatactgtgtaataagaacatgtaaggttgctgcatgtgtgtg

SEQ ID NO: 248569 - DNA, 355 bp, Glycine max
  unsure (1)..(355): unsure at all n locations
tcccatgtctttactccaaaagtcagtgcaaatcaaatcactcccgcactttatctctagcatgcattcattattctttacctactcctcacgtttgaattttttaggaaaatcaccataactaaacgcgccccaaggcatcctatcacaccagatccaaatctataacgatgggtgatcaagaggagacacaggaacagatgacagctgacatgtcggctntgaaagagcaaatggcttccatgttggaggccatgttaggaatgaggcaactcatggagaanaacgtggccaccactgctgctgttagttcggctgccgaagcagacccaactcttctagctaccgcgcacca

SEQ ID NO: 248570 - DNA, 108 bp, Glycine max
  unsure (1)..(108): unsure at all n locations
tgcctatgtccagtccccaagcaacccgctagagagtttcattatcttgcaaaaactctctacaagttatgaaccacacaacgacaacncctcnctttgtgttcagat

SEQ ID NO: 248571 - DNA, 427 bp, Glycine max
  unsure (1)..(427): unsure at all n locations
ctgccgcttataatctttatggttaaacattttccgtcgtggtacttaagtttatgggataatttattcatttggttttgatgaaaaccccatggatcaatgcatataccacaaggttagtgggagtaaaatatgttttcttgttttatatgtagatgatattttacttgcagccaacgatcggngtttgctacatgaggtgaaacaatttccctctaagaattttgacatgaaggatatgggtgatgcatcttatgtcatcggcattaagattcatagagatagatctcgaggtattttaggtctatcacaagaaacttatattaacaaaattctagagagatttccgatgaaagatcgttcaccaagtgtcgctcccattgtgaagggtgataggtttaatttgaacccatgtccacagaatgac

SEQ ID NO: 248572 - DNA, 411 bp, Glycine max
  unsure (1)..(411): unsure at all n locations
tcatattatatcactggttacatgtctactatcattgggataatctctttctctatttatcgcgggcgctactcgagtcgccagatcccttcaccttttgggcgtgttctttgaaagatccactcccctttttgcacatgttctgtagttgcatcctatccggaaccatatcaaaattgtactgatactcgcctaacaaaggcaaccattangtccttccaagtatggactcgggaaggttccaagttagtgtaccaggtaacaactaccccaataagactttcttggaagaaatgtattagcagttcctcatctttgcgtatgcccttatcttctgacaatacatctttggatggttcttggggcaagtagtcccctcgtacttgtcaaagtccagcacccttgaacttg

SEQ ID NO: 248573 - DNA, 254 bp, Glycine max
  unsure (1)..(254): unsure at all n locations
cccccccgcccgccatacctttacctgacccccccnccggccaccccaagccgcaccccttttttattttactcctctggaaattacgactagagtacttcccctttatagtaccactctggagaaactaactactacacccttaagttgtacccataaaatactgaaacaaaagcctatcaaacatcaatgctgctacagccaaaaaaaactatctatttacaaaagggcaactgcctggtaaattactagta

SEQ ID NO: 248574 - DNA, 388 bp, Glycine max
catgcaagcttatgcggccctccatcagcagggctttcatatagaaatattatatgcccaggcaagccagcagcagtaggaagagggccagcagcagcccgccacagatgcaccaccacctcatctacaggagacaccatccctagggtccatctccgctcacctgcgaaggttagagctccagatgcacaggtacatgcagcatgtgaccagccaacaagcagctaatcacaggggacaggtgtagctgaccaagagcttctatcagtacatccagcaccagcagagccaggacaccaatcctgatggaagcttgcttgtggagcttctgtggaggctggatctttgagcttcaatgagggtctttaatggtgattatccaccatgg

SEQ ID NO: 248575 - DNA, 421 bp, Glycine max
  unsure (1)..(421): unsure at all n locations
gaagagtatccttgtggaaccttcacncgatgaagacactgacaaacacttatcttctcctttttggacaaagtatggcaagctggaggcaagtaaattttcttcccatcagaccttggatgcaactgtgatcgtatccccatatcagctaaatcttgatgggtattcaagtcatccttcgtctttccttgaatgttaaggagcatcccaatcatactgtcaaaacannttttctcacatgcataacatcaatacaatgtctaacgtctaaattagaccagtacggaagatcaaagagaatggacctcttcttcatatgcaactcttacttttatccttcttttgggtcttttcaaatacaatattcaggtgttgaanccgctgatatacctgctcaccagtcaacgggatcatgctcttg

SEQ ID NO: 248576 - DNA, 401 bp, Glycine max
gtgctatataagcgggtgctaatgctccgaaatgagatcctctagtgaagcgatccaccactacaagtatggtagtgtatccttgcgacggagggaggccactaatgaaatcgagagatagatcctcccatggtgaggccggtattggcaggggttgaagcacacccgcaggacgtttaggttcgtatctaatttgttggcaattggagcattggcgaatgaatttgcgaacgtcactgtgcatgttagaccagtggaagttggcctacagtcggtgtagagtcttagccaatcctatatggccgccgatggcggtggaatggaacctctctatttgtgaagtacgaaatacgtggtctgggtccaccagatcttgtcttgaaaaaagtacctgcctgaac

SEQ ID NO: 248577 - DNA, 421 bp, Glycine max
  unsure (1)..(421): unsure at all n locations
ctgcagctctgatgttagagtgtttatagagatataggtccaagttctagagagtntgagagatcttgttgtgtgaagatctgcagagaccagagcttgaagaggaagccgtcctgagagcttgagatgagtttgtgagtgattgtgaggacctataggtggaggagacatccccactatctgtatttctgccatctgtcatctttctcttctctttgttgtaaaggaagcttcccagttatggaaagctaaatcctttgctggatcttccatgtaggtacttgatgtaaatatctctttatctatctaatgatgttctgtgtgtntcccctgctatcagtatttcattctagtatgctttcaccttgatcacgtacatgcctgctctgttaggcgtcattaacagcggaaactggtctga

SEQ ID NO: 248578 - DNA, 166 bp, Glycine max
  unsure (1)..(166): unsure at all n locations
cgccttttaagacatcacggttggtctttcttcaaggagagacgggtctactcaacggaaggagaatatgctgagttctgggaggtactgaacttaatctaccgcgcctatggntcagtatgatccaaacatactcatggagttctatgccaatgcatcggccaca

SEQ ID NO: 248579 - DNA, 309 bp, Glycine max
gccaaccaagcttaactatcaagagtagaagctacacacgatgcttaaccactcaagacagcagcaaaccaataacagtgcttaaccaccatataggtagaagcaacatagcttaaccatcgagagtagaagctaaacatggtgcttaaccactaagacagaagcaaaacaatatttgaatgcttaaccaccataaaggcagaggcaacaccacaatgcttaaccaaaggcagaaatttgacatcaatacttaaccaccatggacagaagcaaatgactgctttctttataaaaaaaaataaacaccta

SEQ ID NO: 248580 - DNA, 195 bp, Glycine max
ctccaaatatagccaagatttcatacctgccatagcaccaaacatgtgttcatgactaccgaagacctcccgacaactccatgctgcgttggaaacaaccttcgacttgttttgagacaggctatcgtctgagcatctgcttctttctgatgaaccagatgttagtctgaactaaaaaattgccgatctataagc

SEQ ID NO: 248581 - DNA, 332 bp, Glycine max
ccttatgttatcaaacataaaaagggaaaaggtaatattgtagctgatgctctttctcggcgtcatgcattactttctatgcttgaaacaaaattgattggtcttgaatgtttgaaaagcatgtatgacaatgatgaaactcttggagaaatttttcagaaaatggtttctttagacatgaaggctttcttttcaaagaaaacaaattgtgtgtgcctaaatgttctactacaaatctgctcgtttgtgaagcacatgaaggagggttaatggggcattttgtggtccaaagactctataacattacaagaacattcttattggcctcatat

SEQ ID NO: 248582 - DNA, 302 bp, Glycine max
gcaagccaactcctcacatccacagatcacacataaacccaccatccgcagttgcccacccttactgagctcacgtactctcacgtagcccttatcctcgttctctcaacccgggtcccatagatctctcaagccttcacaacatctaagccattaacatcccaacactatgaactatacaaccaaggaaaacagggcggaggcagacaactctcgccaacacacaccacaatcacagcttctctcacttacaaccccagcaacattctcctcgcccaactcgcacaccgctggatcgactc

SEQ ID NO: 248583 - DNA, 306 bp, Glycine max
  unsure (1)..(306): unsure at all n locations
gctatttgcacccccatttttactaaacacaccctcctgcctttttttggtgaattctttttcgtaaagttacggaaacttacgaatttcgtagcgatacttggtttctttccgtaatgtttcggaaccttgcggattacataatcatcccctttttttcttacggaatgttacggaacctcanntattgtgcaacgatgcttcctcttgattttccgtgtgtcacggaatttttacggattgtgcatcattatcttcttttgatttccggcacgtcacggaattccacanatcgcctaatgatgg

SEQ ID NO: 248584 - DNA, 517 bp, Glycine max
  unsure (1)..(517): unsure at all n locations
gcaagcttgagcaaaaacttcttattgtgctcttcaacagttntcactagtctttaagtatagctttcttttcttgcaatcctagtttctctacatcaatttcattggtttcttttggagttcaattctttctgcaaaataatatcattaaaccttaaaaaagaaaaagataaaaaaaacttgatgtcaagaaataaagtgtattatatatgtaagtagaggatatatatagaaccatgtccaacaaggacgaatgtatcccatatgcttgttnttaccttatttcccaattttcaaagatttgaataagacaaacttccaagggaattcatggtttcatcctagtgctcttcaaatggtggctttcaactcttctcttgttagacaagcatgagagtgggaaaccactcttgtattaagaatgctaacaacatattcttngacactacaacaacaacatattctttgacgacctactntcaaactcattntattatcgactaaacatatcattaag

SEQ ID NO: 248585 - DNA, 426 bp, Glycine max
  unsure (1)..(426): unsure at all n locations
tagtctttgaaccatcaaacagacaaaatgagaagtaaaaataaggatgaaatagacagaatataaataaatgatataacgatatgaaaacagactaagtaaacatgcaatttanaacaaaaacattaaaaagaaaacagagacggcgtcagagccgcgcggggtctgttacgggaaaaaagagaaaaactgaagcggcgacaaagtcgcacaagatcagtcaagagggagaggagagaataaagaagaactctgaaatctattaacgaaagacaagcttacaaagagtggtttcaagagcttctctctctacaatctttctgactattctatcntagagggtgcctcacaataaacttgaggactccttctatagaaaattttatgtactggagctacagtacagggtacaaaaccggaactatg

SEQ ID NO: 248586 - DNA, 434 bp, Glycine max
  unsure (1)..(434): unsure at all n locations
agcattcgcattggtctncaagtatacaacatgatatatgtgagattaattccctgataatcaggtttccactcagagaacaactagaaatgcattgtaccgaaatttcatcaaattcagcaaaataattttaaccttaacgcatgaatctaccataaaaatatgagtctccctaaactgtctaaacgggcaattcaagattcaatacaatgattaatgcaaactgtccgcaagaatcattttattcaatctcaaacaggaatctaaggttcactcaacacgaacataatttgtatagcatatatcaattgtcattaatggcagtgaacaagtaataaaacattggtaacaaacaacaaattcaaaagtntacaaaanaaacatttgtacttgtgatgatgagcaacagggtccaaaaatagagcaacaatcct

SEQ ID NO: 248587 - DNA, 292 bp, Glycine max
  unsure (1)..(292): unsure at all n locations
tgcaagcttgttatagatacacagtcgacattctcgtccagaatatccttccgaagagaaatgttaagatttatcatatngagtctgatgagttcaaaatggagtgggagaggcgtaatctacacaaacgcctcaccaaccgtcaggatggaagcatagaggtggttgtggttaaggaattctatgctaatttatacaccacagaggaccaagctccaatggaagccttagtaagaggacacctgatcaatatagatgcagacaacctaaatgagtctctttacactctagc

SEQ ID NO: 248588 - DNA, 244 bp, Glycine max
actgcagcatctatatacttctctcatagtactgagtgcttcatagaaatattggagaacaagctgctccgacattcatggtgaaggcaactggcacatagttcactaaatctttcctagtatttatacacggctctctcactgagctgcttaatatctcacatatccttcctgctggatgtggtcctggaaccaaggacaatattctctaagaatactctcttcacgtcatccagctcgtgat

SEQ ID NO: 248589 - DNA, 451 bp, Glycine max
  unsure (1)..(451): unsure at all n locations
atacatgtcatggctggggttggttcaaggataaaagggatgccccacattatttccatgacacaaatgcaaaaatgatgagttggaaactttatgcaaaactggtcatgcatgcgcctatgcggacgctcaagtgtcaaaattttatggtcatgtgatgctagggctcaggattcatttcctctattttaaatcaacccaatgtttccaaaatatgttcttttattcaattgtgcattccctcaagtccatttcgggcgtccgaggaaattntcacagcattcacccttcaggtgtagacacgttttttcttaaaaatcggtatgatcaatgaattttttcaagaaaagtggaaatcatctctttcaaagcatgtcggttttagctagacaactattttctctttcacccttttctacttgctttcccctctttttctattgtctctttc

SEQ ID NO: 248590 - DNA, 282 bp, Glycine max
  unsure (1)..(282): unsure at all n locations
gcacaaaagtcttncacatccacaaagcacacataaacccaccatcccctgctgcccaccctccactgaggtcacgtactcccacgtagcccatatcctcttatctatcaacaccgggtcccactaatccttccaagcttccccaacatcaaagtaatacaacattcgcacagcacacgctatcacaggccaagcaaacacggcaaaggcagacaactctgcctcaaacacacacaaaatcacagcttttcttacttagagactccagtcacaattccttcg

SEQ ID NO: 248591 - DNA, 422 bp, Glycine max
aatctcatatctgcacagacatgaccttatgagatgtttagtaagaatgtcatacaaatatgatttacattatgaagcatgtcaaaaggggaaacaaattaaaaactatttttcaagcaaaaactttgtttccatctcaagaccacttgaactattacatattgatttgtttgcttcaactagaacaacctttatcactagaaggacataaggtctagtagttgtggacaactactcaagatggacataggttatggctcttgctcaagagaatgagtcctttgaagtcttctttaaattctgtacaaaggattctaaatgaacaaggagtatgcattacttcaatcagaagtgatcatagtggagagtctgataatgagagctctcgcttattatgtgaagagaatgaaattcttcataac

SEQ ID NO: 248592 - DNA, 384 bp, Glycine max
  unsure (1)..(384): unsure at all n locations
ccacttttatgatgacaatcattatcaagtgaattcttttcgacatcatcacaacctacatgtttcacattctcccnctttttgatgatggcaaccatctgtaggttaggagtaaaacaaatatctatttgtatagcttattcccccttgattttgtaatgattgcttatatgaaacagttgaagattgcatatatttcatatataagaagttgtctcataaacccttactatcttatcttttgtctatctctccccctttatcaccatcaaacagaaatcatgaacagagaggagaacaatatctagcaatctataatgaatcacaagagtagagcatgtcataccattcacagtatcatttcttggccacaacacatgtacc

SEQ ID NO: 248593 - DNA, 321 bp, Glycine max
  unsure (1)..(321): unsure at all n locations
atgcaacaattggtagctgtggctatacgagacatcttgccaaacaaagtcaggttagccataactcgcctgtgctttttcttccatgctatatgtagcaaagccattgatcctgtcaagtttgatgagctggaaaatgaggccgcaattatactgtgaaagttggagatgtattttccccctgctttctttgacatcatgattcacttgattgtgcatctggtcagagaaatcaaatgttgtggtcctgtttatctacggtggatgtacctggttgagcaatacatgaagatcttanaacggtatacaaagaatctatat

SEQ ID NO: 248594 - DNA, 226 bp, Glycine max
  unsure (1)..(226): unsure at all n locations
aaccatacacgtaactttcttgcttttaaagaactacttacgtctgagctcctcgccgcacttgaggatacgtangagcaaggacggcgaccctcaccaagtataanacatataaaacgaaaaatacataaatattgaagtcatgattttgcacactcaattaaggacctgcactccttatgatggacgcgtgagatgctaataactntnccgtgtgtaaacaact

SEQ ID NO: 248595 - DNA, 343 bp, Glycine max
  unsure (1)..(343): unsure at all n locations
acactatcagatggtcgatttagttgtagnttgcttgatctattctgctgatcatttgccatcttgttgttgtctcattcttctttgtattgagtttgtaatgacaatgcttgctgcgtgttatctatctaagaatctctgtaatggataaactagaccttaataccttaatgaanaggagatggatgctgaaatgttgttagaatcttatgtgggtttttacagacaatattctacttttatttcttacatatctcagccaacattctactctantttttgtaccctgcttacaccctcttctccctacagtatcaccaatatccgataccctaaataatca

SEQ ID NO: 248596 - DNA, 300 bp, Glycine max
  unsure (1)..(300): unsure at all n locations
cttatgaggaactcttaactacttctatcatgagctcanataaatctcttttaattgactctcccataatcaattcataatacttatatcaaatctatctgtgttaaaattcaattcttgtttgcgctttcgcatcattgattcccgttcatcggcactcatgtgtttcattaaacatacattgtcaattagtcgtactgaatggtaagtcgtaaataaaattaatgtatcggttcttcatcctatggagttgaatcgtacccaactatacgttccttctttattatctcgttgcacact

SEQ ID NO: 248597 - DNA, 428 bp, Glycine max
  unsure (1)..(428): unsure at all n locations
tgcaagcttctgcatgtctanggttttctagagaaatataggtccaagttccagagagtttgagtgattctgttgtgtgaagatccgcacagaccagagcgtgaagaggaagccgtcttgagagcttgagatgagtttgtgagtgattgtgacgtcctagaggtggaggagacatccncaccacttgtatttcttcaatccttcatctttctcttctctctgttggaaaggaagctttccagttatggagagctaaatcctctgttggttctttcttctaggtactcgatgtaaatatctgtatatctatctaatgatgtnttgtgtgttcactgtgctatcacaacttcattctaccatgtctttgccttgatcacttanatgcatgtgtttgtagaatcattccacagtggaaactggtctgattc

SEQ ID NO: 248598 - DNA, 365 bp, Glycine max
  unsure (1)..(365): unsure at all n locations
gcttgcagcgcgcttatggcacttgcgctttttcaagcncaaggtatattctattcttcactttctcaatattagtattcactaacacattaaccttaccttaccatctatctatatatctgcaccgtcctcagcttcaatcttctccgccacgtgtcaagcttacagagcaagagggtaccaaacgcgccaacactcctatccggaagcttcttagagaaaccaaattaataggtggtgactctgttctcctctcagaactccttcgtgctcaaacctgcattaacaagctcaaagctgaacacaagttctccaagaaaaagcttgaggatganaagcttctctggaagcgtcgagaattcatc

SEQ ID NO: 248599 - DNA, 331 bp, Glycine max
  unsure (1)..(331): unsure at all n locations
gctagccatctcaatggctgttataacagccattatctccgcacaacaagcgtgctgaatgccaatatgcatagggaagcaacccatgatcccggcgtgatgatgtttctagaaanttttatattcgtttaagacagtacatagaaaataagttgttcgattctcaaatgcaatatataagtntcactatcgtttttgctggagttagcagtgtttcctaactttgcatcanattatcttcccttaatctaaactcttcttgaacaacacaaaaacatgtgtgtatggtttacgggtgcatttcttaccggcggcatgtgactgcggctca

SEQ ID NO: 248600 - DNA, 354 bp, Glycine max
  unsure (1)..(354): unsure at all n locations
tgcagctttcatatccgactttgaaggatctgattaccgccttcctaaggcagtatcagtacaattctgatatggctcctgaccgtactcaactgcagaatatgttcaagaaagagggtgaaacctttaaagaatatgcgtagcgatggagggatttggcggcacaagtagctcctcccatggttgagagagagatgatcaccatgatggtagacactctgccagtgttctactatgagaagctagtaggttacatgccgtccagctntgcggatctagtgtttgccggggaaagaatcgaggtaggattgaaaagaggaaagtttgattacgtttccttcacaaatgcgaatg

SEQ ID NO: 248601 - DNA, 333 bp, Glycine max
  unsure (1)..(333): unsure at all n locations
atcatagaggctcagcggcgaatgggagtctcggnggctgaagcagatacggaatgtcgtcaactccacacgattcatattggaagcattgcatgctactagtatgattgaccttgatggttacaaaggagattcttgtttactgcatccagggacattgcatgatgtggagacttacccaatagcggacgagctactacaacgaataatgaacacggatagattgaagtttgcagtgcgaagaaaggtgaaggagatgtatgtatgtacttaaatgacaaaaacccgagtaagccaagcctttggtgatcacttcacacggacatcacactc

SEQ ID NO: 248602 - DNA, 373 bp, Glycine max
ctgttatcggaatgctgcgacaatctttcaacaccttattgacacattctgataggttggttgtcatgtgaccatatacgtcgccagatgtatcgtaagccatgctcctattttctttgaatgcgacaatccatcttgtatggctgactcagtcacgaaattttctacgttgaccaacacatgctgcaaggaggacgctgacaaattgtatcataaagtgtcgtgactcaactccataaatatggtaaacaccttaccaatcttgacattctttgttccgtgtaattgcatgaatgtgcttggcggccagcacgaaccggggagtgcacaatgtgtacaagaactttctcgacacaaataacaatctctattg

SEQ ID NO: 248603 - DNA, 125 bp, Glycine max
ctaaagccctagtaatatgtttcactaggaatgtgaccggccccaggtccgagtaccccccgatagtgcccaagccgacgccattttcccatcaaagcaataaggccatcccatggaaatatacc

SEQ ID NO: 248604 - DNA, 145 bp, Glycine max
accatcccctattggccacctgcaactgagctcacgtactcgcacgtaggccatatcctcgcttctcgtaacaccggggccccatcaattctaccgagctctccccaacatgcaggtaaaacaacattgcaacatcacaaactat

SEQ ID NO: 248605 - DNA, 335 bp, Glycine max
gggacatagaacacaagtcatacatataattattcaatacaacaatgatattgagtctcttgggatcacacaccaccatcaattgatgagctaaaaatttacattggcataaatatcccaatatagatctattcttggcttaataaactatgttcaaatactcatattcttattaaacaactatcacttggagccataagcttaatgatcctcctaacatatatatactctttttatatgaatctaatgataaacttaatgcttggatcatttcatatcacattgctcacttgtaatatgtttatatcgcaaacgctcttactaatatatctaag

SEQ ID NO: 248606 - DNA, 198 bp, Glycine max
  unsure (1)..(198): unsure at all n locations
agactcaaagaagattggaccacagatgcaagagaaggccctanggttctcatgagccttacggtagatattgggctcatgggctaagtatgagcccacttatctttgtacataatagattaaggtttcattaatttagggccttgtatttatggctccataatgtacgtagggcaccctagaaatatatgatatttc

SEQ ID NO: 248607 - DNA, 133 bp, Glycine max
ccccctggtttttaaaaacgttcgctcgcatattgttattccgcttaaaatttatgtttgcattgtctcgtcgcaggcaagtgtaccgaccaaacgccgtcaaggtacgttcgtagttctatgaaagacgacc

SEQ ID NO: 248608 - DNA, 359 bp, Glycine max
taaaatggtgccccgcttttaaataaattaaaaaaaaatcagtggaccctgtatgatcctctgcaggctcactgtgtatactaacatgtccattacggaccatattcattttttacgggactacggaaagattcctacaacatttgaagttttggcccacagaccaaaattctggcaatgaattgattttaggactcactttactcattaaaactcctgtaaaatagatacataaatcaatttgataatctaaatattattgtgaacaaatatgcattctatcaaaaaaaatatatacatttattaaattacttgaaataccttggtggctcactactgattaataataaataaatgtt

SEQ ID NO: 248609 - DNA, 80 bp, Glycine max
  unsure (1)..(80): unsure at all n locations
catgcgtacacttaacatggntcgttgcagcgtatgaatatccataacacggtgcggatgtcaaactttccaatcgatct

SEQ ID NO: 248610 - DNA, 266 bp, Glycine max
tttttttcttctctgcagggcaaagacacttgacactaaacttatttgggacatggctacgcgggcatagggatcgcagacatctaattactgacacagccgctctccataaacacaccaaaggcctatttgttaaatcgccttgatctttgaaaaacaaatgcggggcatattggctttttctatcccgagtcttattcgatgtaagtcaagaatttcctttccttccaaaattaatttttagaaatgcaccctccacaaaaaaa

SEQ ID NO: 248611 - DNA, 177 bp, Glycine max
  unsure (1)..(177): unsure at all n locations
cttgtactacatgccaattcatggtggtgagagacacaaacacaagtaaagnccttcttctgagcattgtttaactcgtctccattactttacgaaaaggattttgcagaacatatgctcgactgtgctcttgtctctccttaacaacacaatataaactcagacgatgagatatat

SEQ ID NO: 248612 - DNA, 356 bp, Glycine max
tttcctatctcgagaaatattggtggcaggaataaaaaggaaaactgggctgggggtctcaagtccatgggaggggcacaatggggggggagaagactctttgttctttgatgatcaccttgagtgttcactgatttaattgggggttgaaaatgaaaataaatggcttttgacgattgtaaaagaaaattgacatgaattggagggtgccgccataaggagaggaatctggaaccaatttataatagacgctgatcatcaccatgatcatcgagacttctatgacctgtatatcacttgatatacacctggttagacatcgaggacatcacctatagtttacaacatttagttct

SEQ ID NO: 248613 - DNA, 111 bp, Glycine max
cccaacccgcccggtcggctatcccaacgcaataaggaacttccctccgaggccattccaagaattcaccccactcccaatgacatatgaagacctcttgccgttcctcat

SEQ ID NO: 248614 - DNA, 398 bp, Glycine max
ccttgttgactattctttggcatcatcaaaatcatgtattcatacattcacaatgatcataagaatggtgttgggataactatagtcaatgggtggatattataatctagacatgactaagggatcatcaaaagttgcaatgtaggagtggttagtgaagacaaatgtgtttacaccatcaagaagcacataaccatttgagaacttgttgtgttggaacattgttctgaactggagtccttatatcctgagattttaccaagaataaaaaatacagtcagtcaaaacgcactagaaagagatgagccatgccacatacacactctcaaaactgtgaacctctctataatcatatccctaagaagggggggcaaatggtaatactataatttgaataa

SEQ ID NO: 248615 - DNA, 217 bp, Glycine max
aaaaacaacaaatacactttccctataactcaacaatcttcctccatttaccggggtgattaatttcctgagcttttcatatatacatggcggggactataaacagcgagttactgctccttccaactaaatgattgttcgctatcattcttgtcaatacgaatttctatcgatcaaataccttctatagtgccataatctcagcatatgtattgta

SEQ ID NO: 248616 - DNA, 190 bp, Glycine max
  unsure (1)..(190): unsure at all n locations
actttgaagtatgtctcacaagaatctcattcatcagagttacgataagagttacacatgcttctatttatagactacgtagcttccttgagaagctttgctgagaanacttccttgagaagcttctttgagaaaacttccttgagaagctatagcttagctacacacacccctctaataactaagctca

SEQ ID NO: 248617 - DNA, 204 bp, Glycine max
ttcttcgtagtaagaaacactggctgctgccctccacttggcgtttcttgaagatcggccccttttgccatgtatgaagtgatgcatacgagcccttactgcactgtctaaccaaagcaaccttatgccttccaaatgacttgaagtgcaggagcgacctgttcactacctaaaacttctgaggaaagttacattctactttgc

SEQ ID NO: 248618 - DNA, 388 bp, Glycine max
  unsure (1)..(388): unsure at all n locations
acttcatgttccattcgccatgtattgcgtaaggcatataatacaatagaccgttctgtcanaaatgatttaaccatttatagggatgtatgttcttatgatagattactgaattctattgtaacttccataaggatgaatatatatgttgacccctctattatgagtaatatataatatttgtcttcagaccttatgcctcaccaacaaagaatataaatatagttattaactttaggtgtccgcataaggcccttcataagaaatattggaacacctatgcatatgtaaatatatatcacttaagtctcaagccattaatatcatgtatgtttcttcaccgttagatactgaagatgtataactctcagtatagttattattaatt

SEQ ID NO: 248619 - DNA, 142 bp, Glycine max
tggtggtcatgaagccttaacaagaatattaaggtgcatagaaacccaaagacaattggcatggttagagacacaaattgtctgggaaaaccactgttgtattttgggaaaagtggtcatgaaactcacaatgtaagacctt

SEQ ID NO: 248620 - DNA, 350 bp, Glycine max
acacaatgaaaacctataatacttaataaactaaaatatggtttagttctcagataaaatagaaatttgattgggcttaaattttttttattggttataaaaaaactatttgcctgaattgttattcaaaataggattatttgcctatagttgtctttgatagcctttgaaatatgtttatcttgatgctgataagaaaaacaaattgttttaaactactattttatagaataactattactctaaacctatttactaagtatattgtcataaatatttacatcttattgctattactatgcaaggaatttggctatattacttgaaaatattttacaccccccctccgc

SEQ ID NO: 248621 - DNA, 83 bp, Glycine max
  unsure (1)..(83): unsure at all n locations
acccacttttgctcttgatgtgactcatatctcacccacacagaagagaaanaatctgaccttttgaaatgctaaaatcatgc

SEQ ID NO: 248622 - DNA, 278 bp, Glycine max
  unsure (1)..(278): unsure at all n locations
attattccttgttatagatatattttataaaatcctatagttgcatataaacttaggtgaattccagatataattcaagagaacaaacaagtaaaaagcatgaaatttaaagagcaaaattagagatactacgctaccccttaggagcacttcttttacgtctgtanccagacgcacgatgatgatcagtagatcctgggcctagcacctgttcatacttgcgcctaagcttagacaaaagaagnggatcatgccacacaatgtgaaacaatactaca

SEQ ID NO: 248623 - DNA, 227 bp, Glycine max
gtacacaaatgtaccatgctttattatagataagagcttcttgaaagcttttgtaaaacttcttgagaactcttgagaaactccttgaaagctgagcttactcaccaccctctcatactaactcactcttggaggcttcttaaaagatctaagaactgactactcacccatttatactagctcttctggataaactgactactcaccccttatagtactacccttca

SEQ ID NO: 248624 - DNA, 51 bp, Glycine max
catcttgccttatccgatccgaggtagcgcctggactttctgtacctatta

SEQ ID NO: 248625 - DNA, 366 bp, Glycine max
  unsure (1)..(366): unsure at all n locations
actcacgaagatgtaaagagaagcatcgcgggaatgaagagcggtggtcaaagctcgcggttgagacaagatagtgaaggaagcccgccctgccacataattagaagctttataagcgctggtctgggagacgaaggtcaagtggcacgtattatgaagtgatgttcgagtacatcgtattggacgaccatgccctctgatgtcagctgggaaatggcgagtgaggaacccccggattacgcacgagataatgaaantttacggttaaagtctatgtggccatgcttaagtcttctttgtcaaggttgtgtttcgtttgattatataaagatttcttattgtctacgctaccatctattattgatg

SEQ ID NO: 248626 - DNA, 125 bp, Glycine max
cgtgtctcccatattttctgagatagtaatgtatgcgctgatcatttggctaattatggtgtagaattactctattatgttggaagataaactctgaatatggatgaggtgtcaaggcgagatac

SEQ ID NO: 248627 - DNA, 115 bp, Glycine max
aatgcgatctgcatgaaagctgtgatggtcctgccctccgtatggataaaagcaacgaatatgtctgtatattcatatgataaaggctatttacgtacgatgtccacaagattat

SEQ ID NO: 248628 - DNA, 133 bp, Glycine max
cctctcttgggtccttttggatgaaatgtatgcggggatttctgtggcaacacggagaatggtggacaattgtagaatcttggcttggagatttaacaattctaatttcttactaggcgatgttttgagtacc

SEQ ID NO: 248629 - DNA, 324 bp, Glycine max
  unsure (1)..(324): unsure at all n locations
attaaaagcagtaaaccacaccacacctgtgtagcacatggattaaatnggttagggtatgaaatatgtgtgtgtaggaatcaaaatacactagtgtactttatcaactctacacacttcaataatttctatatggatactttatctcanaacatactagaggattaaagttgtctccaaagattatattacaatattactctagtcgaaagtattgctcctcatcatgacattaaattatgaattgacgttaaacatgccatatactcgtgatatctgtcatttgtaaattgtcaacaacaggattataaatcctgtgacata

SEQ ID NO: 248630 - DNA, 377 bp, Glycine max
  unsure (1)..(377): unsure at all n locations
ttgtttctaaagccttgtatttggatatatttctatgacattngaacacttagtatttcttttaatatttgcttagtatgactgaacatgatgattatatttacttgcttctgtgtgtttatggttatgtgtgttaaacttaaatatttttgatgatatatatgcctagcggtatgtacttacatttggtattgtgttgtatgtatgttttcgaactattcatgtatgttaattttatgcactctgcctttttgatgttgccaacaggggagagaaatgagtattttagacatcaagatattatattttcataactctaaaattaagcatacattcacaaagaaaaggggagaaagagatgagtgaacgatataaca

SEQ ID NO: 248631 - DNA, 196 bp, Glycine max
  unsure (1)..(196): unsure at all n locations
ctcttgcctgacttgaaaacctttttaacgaaggttgacttgtccatgtttactaaagtgaaacaaaatcagtgcgaatcanaacttcgacatctatcatgggtggaatggatgaatgcataaggaaatgcatatgatacaaatgcaatntatgaagacgggagcccgggaaattttcttcttcttagatacaacg

SEQ ID NO: 248632 - DNA, 436 bp, Glycine max
  unsure (1)..(436): unsure at all n locations
aactctcgaaccccagaaatatgtctacgttttgtatagtttaatttaatttccttccccagaaacaataatnaaaaacacattctcagctgtgttttacctttttttttaaggaccttaccatggttgtcagtaaccactcccgtaagggtgatttgaataaaataatatataaaacggggtccttccctagaactgatttctaatggtaaaacgaaacaaaaataaacagggatgaaatttgttacggaaacaattcgcctcatgaaataaaataatatatctgctgaaaatataattattcattggtgaaattccaagagcatcaatataataacaacccacttctaatgaataacatatcatcacatataactaagtctatttgcgtaaagaattaatattaatcaattgataaatacaaaaataatcattg

SEQ ID NO: 248633 - DNA, 292 bp, Glycine max
  unsure (1)..(292): unsure at all n locations
tggtacactataaaaccagttcagaaaggcattgcatccgctaacagtgactttatataggaagaataacctaacacatgtantttttttatgtgtatggaagaagaatcaaacccagacataattttattcccaaaattaacaatttctgccttcttacatatagcacaccacccaatgagaaacccgccaatttatatttcatttaaataatagggagcagggacaataaaacatgagacaaagcagttatatttgattgacagtcgacattaaagtgatgacattgatc

SEQ ID NO: 248634 - DNA, 377 bp, Glycine max
  unsure (1)..(377): unsure at all n locations
tctccggagtatcctgctaagcccagaaaactcttaatctccaaacagacttaggactctcccacttaagaacaacttctatctttagagggatccacagctatacccctttgagatatcacatgccctangaaactaactttctctaaccagaactcacacttggacaacttatcatagagttgtcagtccttaagggtatgcaacacaatcctcaaatggttctcatgcttctctctagttctggagtataccaaactatcatctataaatactaccacaaaactatcaagggaanggtngtgagactctatttatgtagtccataaacactcctgnatcattagtcacaccacagggcatgactagatactcat

SEQ ID NO: 248635 - DNA, 217 bp, Glycine max
  unsure (1)..(217): unsure at all n locations
acaaaagatagttgtattctccgactaacaactaccccaaatttacangtttgcttgtcctcaagcanaaagagaacaactcacttgtgctcaagcgacaacaacatgcagtgactatgttccaaggtgtatgcgactaaagttacttgattgatggatagaagaatgaagcacaatccctcatcacttgttttcacaaggatacagtatccaagag

SEQ ID NO: 248636 - DNA, 154 bp, Glycine max
aatcaacacttataaatcaaattctagaactggtccaagtcaaatcaggctgtgcttaatttctacacaaaaatagcttctcaatcaaactttcactcatcattgtcatcataggctgttaagaacacagaataaacttatccagactaacatt

SEQ ID NO: 248637 - DNA, 498 bp, Glycine max
  unsure (1)..(498): unsure at all n locations
taacattatgtcaactcggtctctaatgtctttagcacattgagtatcaacttctctatcacattcttccacagcaataaaagggtcttaaacattctctcctgtggctgcatgcccaacaacatataagtaaggaaaataaaggcttgtcgtagagccctctatcatcaggagtggactttatgaacaattatcancataatattaatatagataatatttatgaaaataccacatatgaataacaaaataagtcattgctcatttcaacaatgcatgtcaaccaacatcactggacctatatatagagccattgaggtataattaccttggtttataaagaaactatcttgtggatgttatatttatctacaaaacctcatattatagattaaatatttcttccaacaaggacttacacattgacatgtaattatactacactataaaccaagcaatgttacactactataatatattacaagtatgtaaattttc

SEQ ID NO: 248638 - DNA, 159 bp, Glycine max
tttttttttttttggctatcacagcgggtgtttttgttttcatctgatgacccacctgagacacttccggttgcttcaggattaggaggcccatctgcttcatattataaggtctcaaatgggactgtacgacctctcatttctgtatcaattattcct

SEQ ID NO: 248639 - DNA, 132 bp, Glycine max
tctgcagttcaaggtgcgagtgtttacgcctgctgtggacgtctgtagtggttccttgctcgctctggttgcaatgagtggagataatactttcgtgctgatatcaaagaatatgtaatccttggtgtggct

SEQ ID NO: 248640 - DNA, 252 bp, Glycine max
gctctgcgctaacgcattcttgccggtaatgacattgtgaatcggtaccgcgtgcctttcctaacgaggatgactggcctaggaataacggcctatgaccgccacctgtggctttttattgcgctacaagaggtgcctcgacctccaagcacgattgctacgagatggaaaaaacattttaaattgcgtattcctgaatgggaaaagagatggcccccctggaggaattttttcgttctcccaatcttacct

SEQ ID NO: 248641 - DNA, 243 bp, Glycine max
  unsure (1)..(243): unsure at all n locations
gtctatcatatgctgacaatagccgagaagcccatgaatatcttcgggggcggagtaggtgtccgccattgccttggccttggctaacaatcggnggagttcctgactcccgttcaaggaagagcanaccgatccatccacatggttgcctcttggtgtaagagtcgacacccttctctacctccttttcgtgatacttggcatactccccggatctatgtctggccgaggtaacctactctt

SEQ ID NO: 248642 - DNA, 118 bp, Glycine max
  unsure (1)..(118): unsure at all n locations
gatggcacaagatgttttgagtataccgattactatacagttgcattagaaatagcatttagcattagtggatgtatacttaacaagtattanagttctcttttgcctgaaaatgttg

SEQ ID NO: 248643 - DNA, 211 bp, Glycine max
acattgatagtcatctcaccggatgccatgattcatcattttcagcatgaccatgatgttggtgatgaagcctatgactgattcttctgtataaaatatcacgttcaaacatgaattcaaaactataaacaagagtagaatgtgttgttatcccttacaatatcttacaattgtgtttagtctttacaaaaataatatatttttacgctct

SEQ ID NO: 248644 - DNA, 256 bp, Glycine max
attagctaacttatcctgcaaatcgttcacataccttctggttcagtgctttttttcgataacacttggctgacgcccctagatcccagattatttgtctgtggggcctacactgtagtcagagatcgttttatgtcattaatcatgaaaaaagcctatcaatcctttatggtcgattcttcaggacggcaaagtctgccattggtgtgcatcccttagataagggcctaacgatggataaacctgcggctcttta

SEQ ID NO: 248645 - DNA, 271 bp, Glycine max
aaagctcaagatacctctgtacagagagaccgaacagatggtagatgatcgacacttcggtcaaagaattgttcagatagatcagttaagattcagtccagagtcagacagatcagactaagatctaatcagaaagactcttcagaaagtttagagttttcaaaccgatgccatgattttctaaacacagtaagctttactctctagtacgataccagattgtgtatcgcatcagacctaaaggttctaaaaccttcactgattacacgtt

SEQ ID NO: 248646 - DNA, 116 bp, Glycine max
  unsure (1)..(116): unsure at all n locations
catccacactaacagttgatccgtccagacatncttctgtctcacaacttgacacatacgatgagccggatatccctgaggttctaatggcacatacaagctggaccttcacatgc

SEQ ID NO: 248647 - DNA, 179 bp, Glycine max
gggacgtcatgtggcgtgctatttcccacaaccaagcttgaccaatcccgacccatcccgggcataatcagttagggagaacctgtgacgtacctaaacaggtgagcttctgacagtcaaccaataatagaacaaagtccacaaagcaaggacgcttgtgtggcggctggccacctatg

SEQ ID NO: 248648 - DNA, 206 bp, Glycine max
gaatcagattcacaactccaagggatacacagagtaatcacaatgacttgctacaagaaaaacattaaacttgttagctatatcgagcgcacaacttgcataaagttccaaagaataactccattatgctttatagatgaaaaaatgcatgttgactcgctaaaacctttaagaatactggacgtttttttcataaaggccttgag

SEQ ID NO: 248649 - DNA, 177 bp, Glycine max
cgctcgatattgcacaacggaagccctcaagaaatgcaaatggtcataacttatcacacggaagtccgataaggcgcagtagatatcgagaatcttgatattgaacaacggaagctgtcgagagaatcatattgtcataacttatcacacggaagcctgattcaggtgcatatatat

SEQ ID NO: 248650 - DNA, 201 bp, Glycine max
  unsure (1)..(201): unsure at all n locations
tctagagtgactcgtcacctattgagtttgcataaagcatgttagcatgaacttgcacataagattcttatgtgagctgaatnntatttcttgttctctgctactcattcgtcatgagagatgaaatatgttacctatattcagtgagtcaatcttctgtaatagcctacatgtcatgcaatctaagagcttgatggacct

SEQ ID NO: 248651 - DNA, 406 bp, Glycine max
  unsure (1)..(406): unsure at all n locations
gtgctnttcacttgttctaccttcatatagncgaaactaanaaccaaaatgtacgtagtcataaagatggcttggtacaaatttaaataaaaaatggctcgataagcctctctattatcgttgctgtgaagccaatttctttgtttctttttacttatttaagtattctatagttttntttgtgtgccataacagtggaacatgagaagatattctaatacttgtaaacagaacaccgaatactatgttgtgaattgcaagtatagactcatggagagaggtatcgcgcttgaatcgtagatatgttttagtccagctattcaaactatgacactatcaacatttctgatacagttgctctcaattacggaagaaccttagataagttgaactgcgtatttttctt

SEQ ID NO: 248652 - DNA, 305 bp, Glycine max
  unsure (1)..(305): unsure at all n locations
ctgtaaatattctttccttcagttattggaaggattaaaatcgatgttgaaactgttctgttgatggatgttctctatattactaatccaatgcttaatgtatatgtatgagtctttgaacttttttgtgttcgtaatgcttttgctattgtgtatgaacacaccattatcgaaccaaattatgactattacccattcattttcattttttataacattanacactgcctttgctgctgaagaagaccgactgtggaatattgtaagagctaagttcttagatctcactgcctggactttcttga

SEQ ID NO: 248653 - DNA, 332 bp, Glycine max
aaattgcttccgtaaaaaaattaagccgagccttccgtatgcttcccacagcttccgtgcgcgatttcgcgaagcttttctgccattcttcatccctctttcgtcgttcttcctcggtcttcggtctttaaccggtaagttccgaaatccaacttttcaatctattcaatgtacccttagtgcgccccacttgtttcgcgtgctcttaatttcatttcatttactttccgtaccccctcttgacgtgctttagtcatttatttaacttatctctcgcctacacgaaaataaaaatactcccctgatcattgaatgaacatctcttatttctg

SEQ ID NO: 248654 - DNA, 292 bp, Glycine max
  unsure (1)..(292): unsure at all n locations
tgatatgttgngacaacgccaccttactataagactcaacttataattcataatctacccctaaacctggcggtggctttccattacaccaaaatttaaagaaacaatcccacacaatgtacaagactataagcatcatgcaagcaattagcacaagtatttgataccttgctgcattcactcttactataagactcaccttataatttataatttacccccaaacctgcgggcggctctccattacaccacaactaaagaaacaattccacacaatgtacaaagtctgatc

SEQ ID NO: 248655 - DNA, 341 bp, Glycine max
cctacgatctctatcagacagtatgctacatggcataccatgtaacctgaaaatctcactaatatacaaggagatcaacacttccaaggaaaaactcgacttaatgggaataaagcgagcactcttggtaaccctgcaacaataacccagatagaataaaaccttcggcggttctagcgtaccctacgacaaaatccacggaaatattgtcccattccactcggcgatctcaagggttgcaacttccccgaaggcctctactgttctatcttagcctcctgacacactaaacatgcatacataaactcactaacccctatcctcatgttgaccaccaaaac

SEQ ID NO: 248656 - DNA, 225 bp, Glycine max
  unsure (1)..(225): unsure at all n locations
accccccccacccaaggacaagacccccccccccgctaatatctgaacccnnncaccggggcagcgccgagcagcaatttagccaggaacaaccacaaaccactcgccaccgccccaaaacagcgcacccccaaacaccaacacagacaacccgcaccccagcaaaccagacaacacagacacaacggaccgacacaaaggaacaccactcacccaagcgcaaaa

SEQ ID NO: 248657 - DNA, 347 bp, Glycine max
  unsure (1)..(347): unsure at all n locations
caaagtgcattctttaacaccaatttcctgattaagcaaagatttattgacctttccaaaactttagagccaaaggtttaaaaatcaataaaataaaacattngcggaagacatagcgcacaaatttttaataacttgcatatattacgacagtttagtatctcccttcacacacacaaatcggttatcgaaaagcgttaaaaatacattgagattaccaaagtaaaggaatgttaacatgctctttcttattggactacaacaacggcggtgacgtggttttatgtcaaatatgtcctgaccacaacaaaaataacgaagatgtggacaatcttgaataatatata

SEQ ID NO: 248658 - DNA, 242 bp, Glycine max
  unsure (1)..(242): unsure at all n locations
gcgcagccacccaagcgagaccccagctttttagacaaacaaggccaaggtggactccaaaagaagagcacaccacttaaatcncgacaaccctttgcagggaccgaatgagagaaaacaacaatcgagcaatcctcaagggaaggagagcacccccctagaagaccacacaaacggagcaacgccccaaacgcctcaccgcgaaaagctaggccagaactagaagattcgaccaggcaagt

SEQ ID NO: 248659 - DNA, 403 bp, Glycine max
cacatgtacaaaataacaactatactttatcacactccactttaaagtaaacttagatccaaaacgatatagaatgacattaaattttcgatttcgatctcgatattcgcaattatctcgtatccataattgattcactcttatattaagacatctattttcctataggcattcctcactgcttctagtgctcactaattccgatgctggaacttttagcaaaaaaaattttatgcctttggaatagtaatctcattcggcatcagctagttctaatgagcgtattttggctttctaagtagcaaataaacaaataaattagagtgctttattttattatatcttatgcttctattgggccactgcccatttgatacccatatctggggtatattgcatccct

SEQ ID NO: 248660 - DNA, 280 bp, Glycine max
  unsure (1)..(280): unsure at all n locations
gggctcaaccgacaccccaaccttctactagtcgaggctactacccaccacttaaacaacctccgccgacatgggacaatctcgcttgacaatggacaacctcttctgccacaagccgcgtcagagcttacggtcttatgcacctgccaagatccacaaaacacatgcgtcatgtcatgtggcaatacaagacacacgccaaccctncatgttaaccctggcacaggagcacaaaccatgcgcccttaacagttgagctcctcaaccgacaagcatattt

SEQ ID NO: 248661 - DNA, 409 bp, Glycine max
  unsure (1)..(409): unsure at all n locations
tccaaagctatccccatgacaagcccttcaataagtttcgttttagcaatagcacttttggcgctattattctcaaaaccttctctcacagagtctgtaaagattgaatgcggatcctcacaatcctccattgataacaacaatataagacggattgcagatgatgactacattcaacacggagaatctcatcaggtctattngggttctaacccattgagcactctgagggtgccacaaatagaaagaagaatcgtattccatcagagttggacaaggagaagaaattcttaccacagcaacgctttactatggcaattacgacgacaaattctctccacccgtgtctgatctctagttcgatgggaaccactgcgctacactcaatacatcacgctattattattat

SEQ ID NO: 248662 - DNA, 94 bp, Glycine max
atctctccccaccccggccgcgcccacacactttttctaaccataggaacacatgcgccaaagccgcaacttcaagggccgacaccaagtaaaa

SEQ ID NO: 248663 - DNA, 233 bp, Glycine max
gactgcagagcaatgacactcgttgcagaagtgagagaggacccacatttcagaacattgcccttcacccatccaaagccaacaacagcaggggggataatggtgacccaacattcggggtacctcccataccggggacacatgattgtccccacccccactcgtccttgcttccccacagacacaacgggggagaatcattgtgacgggaacacaatccccaccccagaact

SEQ ID NO: 248664 - DNA, 346 bp, Glycine max
cgcgacaaacgaacacaaatccaataatttgaatggagaatccaacaatattgaacaagacaacgaaggggaattaaaaaatgactttgaagcttacaatcttgaagacgattagacattgatgttcgctaatcagctataatatctcgcattagagatatgcttgtcctcttttaatacttgaaaaccttgttactgtatcttatttttgtcggcatatggaacgttgttacttatataatcttcattcatcccaatattttatttgagtgtttatcgtaaaatattattttctatatatagatacgtcatcacgtggtgctgaccctccccacccccgtctatg

SEQ ID NO: 248665 - DNA, 391 bp, Glycine max
  unsure (1)..(391): unsure at all n locations
ctaattccgctctcgagtatgacagtcaccgctttacgaacgttgtacaccaccagcgcttcgaggccatcaagggatggtcgtttctcccggaaccaccccttcacctcacggacgacgagtatactgatttccacgaggaaatatggcgccggcggtggacatcactggttcctcccatggccaagtttgatccagaaatagtccttgagttttatgccaatgcttggccaatagaggagggcgtgcgtgacatgagatcctgngtaaggggtcagtggatctcgtntgatgccgaccctatcngccagctcctgngatatcccgtggtgttggaagacggccacgaatgccagtatgcgcagaggaggaatcggtctgatgggtttat

SEQ ID NO: 248666 - DNA, 221 bp, Glycine max
tccacccaacaggggcgcgcaagtggaaaattccccccacctcggcacacattcactattgaagcaaaaatatccggcagtgaaccctaaagaactattcgatgaaaatgtctattcaacttgggggttctctatagaagagcggcccattattgcacccaatcctgggctcttgctcaagcccaggaaccaagatcccaccacaacgccaaacctatctt

SEQ ID NO: 248667 - DNA, 286 bp, Glycine max
  unsure (1)..(286): unsure at all n locations
ccacccagccttgaccacgtcttcttccccgacgctttttaatatccgcctgagcgggctcatagcctaaaccatacttcccacgatatcctctggccttaatcacgctactcatgccgccgctgtccttcgccaaacccattccgggttcgtcacccgcccctaacataactccggccatcattactgctacatcggacaggcaaggctgcccataaaacaactccacggaggacatgctgaccacctccaaagaactgaacaccgttnctaaccgatccttctg

SEQ ID NO: 248668 - DNA, 317 bp, Glycine max
cgaaaaggaccaccccaagcacactccggacctgggggataacttcccgggggccctccagaagaccaaaggaaaagcaatcatctctccaacgcaaaaaaactaagccctcccgcattaacttctcaaagctgaacgcatagccgattaccatagggagaagctataccttctactaattataactcgtctacaacggctatagacaagtaacctatcaacacggactcgcggaaaggggacaccactgatacacgggacgtgctgggaaactctcccacgggaaagaaatgctgccaaaaaacccgaaacaacgc

SEQ ID NO: 248669 - DNA, 256 bp, Glycine max
aacaccacgccacaccaggacaaaaaaccacggtgacgaaccaaatgggcaccaaagcaccccacagccaacaagcagccacactggccccaaagaccacgcaagcgccaagggcctacaaaccgacaaaccacaacccctagcgaaacccaaacaacctggcaccccttaaggacgggccaccaaccacacacccaaacgaaaacggcgcccaccccccctcggcagaacaacaaaccggacctccccgaactgg

SEQ ID NO: 248670 - DNA, 340 bp, Glycine max
  unsure (1)..(340): unsure at all n locations
gctacctccttgagatgagaagctccagcctagctatacacactctataatagctaagctcacccccatgacaaacaacctgaaaattcacaataaaagtccttactacaaagactactcagaatgccccgacatacaaggctaaaaccctatactactagaatgcgcaacatacaaggcctaaacgaaggaaaacactattctaatatttacaaagataagccgggctcatacttagcccatgggctcgaaatctaccctaaggctnatgagaaccctagggcctctccttggatctctagcccaatctacttggagtcttctacccaatcgccttacg

SEQ ID NO: 248671 - DNA, 449 bp, Glycine max
acattaagaaggatttatttttatattagtaaggttcattaataattcattcaacccccccttcttaattatgccgaggccacttgatccaacaagtggtatcagagcaggcatcttgtagaaagtttaaccatttcaagatttatggcctctttaaattctttgttccctgaaggaaattccatccataggccacctatcttcaatggtgagggttatcactattgaaaaacccgtatgcagattttcattgaagccatagatttgaacatttgggaagcaatagaaataggaccttacatacccaccgtagtagatgtaagtactagcaccacaacacaaaagcctagagataagtggactgaagaagatagaagaagaatccagtatgatctttaaagccacaacattattacttcacgcctaggaatagatgagtattttagagt

SEQ ID NO: 248672 - DNA, 434 bp, Glycine max
ttagtcactctataatatctctagcgtcaagcctgagaagcataatcactcgctcatttgagtaatttatagctgatcaatctatagcccctcaaacatcaaccctaaaatgtgcaagcacttgctacatcaaataattcataagttattagtccacaaccacttaagtgtcaagcctaataataggtgtcaacacttgtttgatcaaacgatccattattgatttatttatactctctcaattgacaagcctaaaaggcacatatgcttgcttagtcaagtgatccataattggactcgtcattatcccatgagacttgtctttatgttaagggtcaaacggttgattctcagtcttttatagtgttatgtttagttgaccgactcttgccacaagttttatctttatgcttatggagtcaattgaccaactc

SEQ ID NO: 248673 - DNA, 259 bp, Glycine max
cgctaaacgcttgagactcacggcgtatcgcatgaacagagatgcgcttagtgcaggctttgtctaagcgaaaggactgtttttctttgtttcaaaaaaaacgttttctaagttatattttaatcctttctacaggaaattgaaacccttatgtgaaatattcaaagataggctgatattctcttatgtgcagttcatacaacaagttctaaatgattaaatgcgtgaaaaacacaccaagataatagaaattaaaact

SEQ ID NO: 248674 - DNA, 439 bp, Glycine max
  unsure (1)..(439): unsure at all n locations
ctttgtgagatgttattatgatacaattgcaactgcaaaaacaatcggacaatattgggaagaagatctatcctgcatgagttggcttgatcaacaacctcatggttctgtcttgtatgttgcctttggtagtttcactcattttgaccaaaaccaattcaatgaactagctcttggacttgacctcaccaatagaccttttctttgggttgtgcgtcaagacaacaagagggtataccctaatgaattcttgcggtgtaaaggtaagattgtgagttgggctcctcaacaaaaggtgctaagccaccctgctatagcatgttttgtcacccattgtggttggaattctaccatagaaggtgtgtacaatgggttgcctctcttgtgttngccatattttggagaccaaatatgtaacacaacgtacatttgtgatgag

SEQ ID NO: 248675 - DNA, 418 bp, Glycine max
ctaaagtagttcctatacaaaaatcaattgagggagcttcgccaagtgtccccatcgaaattgaaaaacctttattcaaacctttcaaagttagtgagaaggctaaacggaaaattagggaacttagaaaaactaaatccttaactgagggtgtaggtgacaatcatagtgaattactaaacaagattggtagtttactaaaggtcattccagatactccccaaacctcggaaaatacttccaaaatggtaacaagaagtacctccaaattaattaatgttataaatgaagatagtgaccaaacctcagataacacaactgagataggatcagtgtcagaaaagaatataaatccaattaattccaaacactggaaaacaccctccaaattatattaccaacgtccaactgcccctga

SEQ ID NO: 248676 - DNA, 446 bp, Glycine max
acattggaagctctcgagatttttatatggtcataacttatcacacagaagtccgattcagacgcataatatatcgagacgcttgaaattgaacaacgaaagctctcgagaaattcaaatggtcataacttatcacacggaggtccgattccggcggatagtatatcgagaacctcataattgaacaacgaaagttgtcaagaaattcaaatggtcataacttttcaaacggaagtcctattcaggtgcataatatatcgagaagcttgaaattgaacaacggaagctctcgagaatttcaaatggtcataacttatcacacggaagtccgattcaggcgcataatatatcgagacgctcgaaattgaacaacgaacgctctcgagatattcaaatggttataacttttcaaacggaagtctgattcatgtgcataatatatcgag

SEQ ID NO: 248677 - DNA, 430 bp, Glycine max
  unsure (1)..(430): unsure at all n locations
gagcgcgctgcaagtctgtttccaattgaaagtaataatctggttcttatctattgacttaggtgattagttctcccattattcaaggtgaacttttaaatattttcaggaaaaatatcatttacgacttatagtgctagaggagagtttgagaggaaattctaacagtagtaatcgcggtaccccacagggaagaagtatgagcaacggcccttctcgtcgtcaatccctaggcggagctgataacttctcaaaactaacctctaatgggtgtttatctataagatcaccatcctctcaactgaggtcatccctatcctctatcacagttntgaagcatgctaaaggaacatctaaatcttttgatggtggtacaagatcactggatagggagtaaatgctgctgaatggaacacctctgagatactca

SEQ ID NO: 248678 - DNA, 363 bp, Glycine max
  unsure (1)..(363): unsure at all n locations
ctgcttctactttcatcgcaccttctataagggaatatggcattcactcgtgtctaaaatattccttccatgaatgaatattatttcggggggaatgaaatctcgtatttgatctttatattatgactggaatgcatatctcaatacttgttgacattgacatattaccatctaccattcaatttctngggaaaagaatcacgtcatgattccacaataaatacatgaacttcttctataaatngaactaagatgctcatgaaatgtttctctcattttaacctgagcctaaaacatgagaatcctgcttaatcgccatgttatgagaattggacaccacaaccgctgtcttcaatgcgatgc

SEQ ID NO: 248679 - DNA, 451 bp, Glycine max
  unsure (1)..(451): unsure at all n locations
gacttaagaaccgagcagcagctgcagaccacaaagtggaactgtttaaataaaaagaaaggacaatgaccagagtacttccaatcgacgattatacatgcgcccgtattggatgtgttaaaaaccaaaccattttgatagaaccaggattagaaagacatcgcattcggtgggccaacaatgatactctctctgaactgccaccatacactttagagtatcataagccatctgcatccttctgcattcttaccagaagtatggttaatatggcgatcgagaacgaaaaaactaattgctaagctatatccataaccgaaatgctcccaaacgcaacctacgagggaaacacatttgtagaacattcatgattcctaaactattccaacaatcttagaaccaacaatcctatactattgggagcgtgaacgaacacaccgcntggactcta

SEQ ID NO: 248680 - DNA, 475 bp, Glycine max
  unsure (1)..(475): unsure at all n locations
catgcaagcntataccagtaacttccgttaaacagttatgtataataatttgaccattcatggactgagtatctataagaacctagtatggaagatagccanatccaggacttgaagttcatagtctcaactaccttctcagcctcaacattgtcatgcttaaacactacttcattgcggaacaaccaaattgtccatatagtagcaaaccaaaccactcgtcatctgacacatgaagaaagttctctacgcctttcaaaaaatcaaaagggaatgagacatcccccctcccccaatgcctaagctcaatctcctccatctttgttccttatccttcacattattatcttaatacaacagctgctacaacacttaaaatttacagaaagcagtctcctcccactcccctcccctaaaattgaaagcacttcatgtcacaatatctctagtaattcctattcataccaaattacac

SEQ ID NO: 248681 - DNA, 269 bp, Glycine max
  unsure (1)..(269): unsure at all n locations
aaaggatgttgtgcaagaattcacacataatgaaaacagacgagagtcgcggcatgaatataggagtcacacgagcaagaaatcttcctcgagctaaccttttnattccaagaaaaggagaaaatatggatccgggtcccatgcagccggaaaaagctcacatcagacggcgcaaatatcatatcaataaatgcaacctgacaaatacatttaaacaatcaacagactaaaagctcaacaccatgactgcctgaatatgcgaatgcaaa

SEQ ID NO: 248682 - DNA, 421 bp, Glycine max
  unsure (1)..(421): unsure at all n locations
ttacttcatttgataagcgattacccaacacctagaaacaaagaaaagctctttgtgtgattctataatcgattactacacatgataatcgattatttagacaatacaaaagaaatagagatactcatactgaaatgaattaatcgattacccctttctgataatcaattatccagtttttggaaatgtagaataaaggagattgtagaagtaagcttcatgatgatgaatcaagtatgattcaagaagttttgatgatgacaaaaagcccaaaagaatgatgtcaagattgagttaacangttcaagatcaagattaaagagaagacatctcgaagaatcatgagtcatgagaagatgaattcaagattcaagagaagaaaccacgaggcaacacgtcaagacttcacaagggaagtatt

SEQ ID NO: 248683 - DNA, 332 bp, Glycine max
  unsure (1)..(332): unsure at all n locations
cttttttttgcttattcactccccacaagaaagtgcaacttcccttggttatttggctctccatagatgtgatttggtgctttagttgctcattttttgcaaaatttatgaagcaatttgcacctgaaatccatgcttcgtttgtggagttgatgatttgaatgagaaggcctgacgcctatgttgtattcagaaacaatggggcatgccacattgcccctatttcttgcaatatatgtacaaacatgcgccctataagtgctcggtgaaatgccccaatgatatatgaatatgcaattgcaaaattgggatggtgnggctgttttatgtat

SEQ ID NO: 248684 - DNA, 190 bp, Glycine max
caaccacccacaccaacaccacaaccaaacacccacccaagcacacacatacacagacacacaacaaaacaccacaaaaacacaccccaacaatcacaacgaacacacacccacccacaccaacacacccacaccaacacagacaacaacaccaccgacacacgcaacccgacaaccaaaactcgaacaa

SEQ ID NO: 248685 - DNA, 413 bp, Glycine max
agcttcatccgcagatccgtaggtaagactttgtccttttacacaaccctcttaggtttagactaacttatactgagtgtcatccgcagatccctcatgtaagactagactcagcttaagtagcttatgaaagtttagcctaatttagcctaagcttcgtccgcagatccctcatgtaagactaggcctaaactaaacaacattatgtaacaacataattaaaaccaatacttaacccgcagatccctcatgtaagactaagttttgatcctgcttcaatcaagttctaaggcaacagtacatttcccaatgctaaagtcatctaactgtgaacacaaatgggtgatcagaccaaaagcatacaaacattctgcattgaaggaagcattgaacacagacaacacaatcaatta

SEQ ID NO: 248686 - DNA, 291 bp, Glycine max
acgcggcagcaactaggaagaaggggaggacagcctatagcgagctgaagacccgagagcgaagagaagacaagtccataaccctcaaagtctgaaaagaagatgatgaactaagggacgtcaatatggccaccgctgaagccccggaacgagaaaccaagacggcccgataggacgaacacgcgccaacacagcattgaggggcgtcacagggcaggaacaacaagctcaagctccgaagaggcgaaaggaaacaacacgggtcaaaggcatgatcctgaaggacgagcc

SEQ ID NO: 248687 - DNA, 361 bp, Glycine max
  unsure (1)..(361): unsure at all n locations
agctngtatctcgaaacttgagtcgcgattcttgttatcaaatntcctcacgaaccttgtagcgtgctagattcaatctcgaacacatcctctgattctagagaacatcatcctcgtaatcatgaattgtccccgatctttgagctctttgtcatcacattggtcatcatcaaaacatctttcgaccaatcttgatatcatcatgaagcttgcttctacattcccaacatagtgtgatccatctttaccagaaactgcttctccatatccactctctgcagctctttgcttacgcccagagcctctctacccaccaccttcatggtgtaagccacttgacctgttgccccaccaccatatg

SEQ ID NO: 248688 - DNA, 441 bp, Glycine max
  unsure (1)..(441): unsure at all n locations
taccctttacttatcttcaatatttggaagtggcatcattcattttcgtgacctgtaccaagcgatctgctcctaataaggatcatgtcattntaccatcaccatccaaatctctctctcacactttntctttactttcaacattagcataaatggttcacataaagaattagaatattttttttactacaaggggaacataaatggtttattaaaatatgcttgaaagctactactagtagagtagcagcgtgccagtgtattaagccaaaatttgatcactactattagtaaatttgatgggtcaacctgaatatttggatagtaaatttgacacacatattgacaagtctttnttaatctatntgttccaccataaatgagaaaaaccaaaccaccataacacttagtggcgaattcactataacacactnttatctt

SEQ ID NO: 248689 - DNA, 434 bp, Glycine max
cttggcactgcagagcaatgacactcgttgcagaagtgagagaggaccgatatttcataacatcgtccttcacccattcaaagccaacaacagcaggggggaaaatggtgacccaacatagtggttacgtcgcacacggcggacacatgaatgtccccaccaccactcgtccttgcttccccagaaacagaaggggggagaattatcgtgatgggaacaaattccccaaccagagaagtagtggaaggttgcgccctcccatggaggtgagaagtgtcttcaccaccacaacatgaaacctttaacctttttgaggaagaggattcattgtatgaaccccacgatgagtatcctcttatgaggaaccaccaatagagatgacctttcagtccaccaggggtttctgaatcgaacccctggagtcactaccacct

SEQ ID NO: 248690 - DNA, 368 bp, Glycine max
gtgggcctagttgctatttgcacccccatttttactaaatacaccccctttcacttttttggtgattctttattcgtaacgctatgaaactttacgaattttgtaacgatgcttgttttctttccgtaatgttacgaaaccttacggataatgtaatcatcccctttttgccttccggaacgttatgaaacttcatggattgggcactaacactttcttttaatttctggcatgtcacggaacttcacggattgtgctacaatgctttcctttgacttccggcatatcacagaacttcacgaattgcctaacgatgggtgtcaagtacctcgaagtggttaaatgaggctcgcatcctaacaacggat

SEQ ID NO: 248691 - DNA, 383 bp, Glycine max
  unsure (1)..(383): unsure at all n locations
ccaaagcagtaaaaatgcatctctcagcaatttactattatataagttagcattaacaaagcaattaaagcaatagtgacggcatatgaatactatcgggcctcaaaataaattttgctaaaagtagttctggcgctatcggggcgtcggagcaatggacactagatgcagccaattaccccaactggagctggatgcctttccctcttacatatctcagcngtttgattggagcaaatccaagaagatgtcagacatgggaccctattattagcaagtgtgagagagaacaagtgaaatggaaacatagacacctgtcttttcgggggagagcgactctcattaagacagtgctaacatccattcctatatatatgttctct

SEQ ID NO: 248692 - DNA, 335 bp, Glycine max
agctcgggcattcttcctctcgtgaacgatcttgttactagggaaggagacaccattatcgatcttcttccacgctatctcaagtgttctcgaatccttcttccaccaagattagacaaatgacctccattttctatactaagcttgagttccactctcatttcttgctttattctcacttctagtttcaaaatcatatttttacactctcgaaggttggaaactcgaatctaaactctctcattcttctttctaaactctgtggagcatcatcaatgtagaggggatctatgcaactcttgaaccctataattgtagttaaacttcatttgaat

SEQ ID NO: 248693 - DNA, 494 bp, Glycine max
atccttagagtcacctgcggcatcaagcttgttgcgggaatgtaggaaagagattttgacaaatagtacaattggttttcgttgcaatgcatcctctgctccactacttgaatgattgtgggctctcgtaggaatgttcttcctttctatctataagagcacacacacttgaaattcaaatattagtgaatctgaaatcaatcaccggatgaaaattcaaatgataagagtttctagaacatgaatcatcctcaaaatgcttccatgtgtattgtgaaatcatatggacattaactaacttagtataaagcatttatgtgagttagttatgtcatttcggacacataaagcttctcaaactttggtacttgtcacaatgtatttggacgtttgtttctacacgacatattggacgatgtatgttaacattgataaaacaagttgcatttgtggacactctgagaatgtattgatatgcttaagagattaccact

SEQ ID NO: 248694 - DNA, 391 bp, Glycine max
  unsure (1)..(391): unsure at all n locations
cccaacacatgngttattatgtggcggacgggcgatggtgcacaacaagttttccacatccacaatgcgcgcataaacccaccatcccctgttgcccacctccaactgagctcacgtactcccacgtagcccatatcctcgattatctcaacaccgggtccccatcaatcctcccaagctttcacaacatccaagcaaaacagtattcaaaccgcacaagctatcgcagcctagcataacagagcaaaggcagaaaactctgtcaaaacaccaaccaaatcacagtttttctcacttaaagaccccagtaacaatcccttcaatccaattcgttaaccgttggatcgactctaaaaaattactggaagtctctagtacatatgcctacatt

SEQ ID NO: 248695 - DNA, 458 bp, Glycine max
agcttggcgctgcaaatgacagtcagatattggctggatgtgtctccacgtgcaggaacaggggcagtttggttgttgtttggtgcggcaaaaggacgtgcgtgagagcacagtttggctgttgtttgtgacagaaaggtcattggagctccgacagtggccagaaaagtcattgggaaagcttaaacagcttaaacagtgggtccccaatgagacacaattttcatgatacctcaatcaaaaatatcaagctttgataccatagagaagtttttattataattgtgtgtgtaggatgaccatactaatcctttatttataatgagcaaaagagcatctacattaattacatagaatcaatctaacatgagtgataatgaacaaatccctaattgctctctaatcataaataagagaataatatgtaatctaacacgttataagtcagtgttgatgtc

SEQ ID NO: 248696 - DNA, 418 bp, Glycine max
  unsure (1)..(418): unsure at all n locations
agctnntatttcagcttatctaagaagagattgtgattaaagagatttccacggcttatggactagatgaatatatgcacgaatccgcgagaatcaaatagtatactatattcataggaatctaatatttcaatccatacatgaggcaactgcaaggtataaatatatgctggatatatgaatgtgaggaaaatccactcaccataattcgacggttcttttctttcttgttgtaaaacaacagaacataaaccatctgcacaaagaaaaattgtgggctttagaaagaacaaaacccttatccatatggaaaattttaaaatagttcaaagaaagttatattttaacaataaataaaactaccacaacccagcatataatgccactttcaaaatccacctgcggcaaattggttatt

SEQ ID NO: 248697 - DNA, 454 bp, Glycine max
gcttctatggatgtggcagggcggcgcctctttgtattgtatcccaaccacgggccttggcctttgttcttcctttctaagatatttttccttatgtcagcttgcgtaggtttatagcctaacccaaacttcccacggtttccttaggtgcttaccaggctggttctgccgccgttgtttttgcccgggctcatatccgtaccccaacatcacccgggccaccattattgccatatcagacaggcgagactgctcagagagggaatctacagaggcaatgcttactacctctaaagattggaaagccgtttccaacgactcctccgcggcttacacatatggaatagaggaagggcaacttaccaggacgtcttcctcacccgatactatgaccaaatgtcccttcattacgaacttcagctcttggtggagtgtagaggggatgactcccact

SEQ ID NO: 248698 - DNA, 422 bp, Glycine max
  unsure (1)..(422): unsure at all n locations
atgcatggntngagccaactcccatcctttaaggctttgtgtaaaaatgtggaaaacctaatagaatcaatagctgataggaaactctggcactacaaagaaatgtgtttagtggaactcaagttaatgggtaagtaatcagaactataaaggcaatcatctgaattctgaaggagaattactgaagactcaaggctaccaatatttttctccaatgaatactctaattcagacgatagggaatgttggactaggtcgggnttctcgcatttagatacacattgcagcaataacaattgcctctagagtaggaatcggactagcagatacaaatgtctctcgggtagtagaacaagtggaaagataccctatgtatcacatacttagaaaggagcgtaccaacacccatgcttgactccata

SEQ ID NO: 248699 - DNA, 492 bp, Glycine max
atccttagagtcacctgaggcatcaagcttctccaataagatagtgtcatcggcttattgtatgatgttcaccgggatcttatgcttccccaccatatagctctgacaacagtttttgattaaagcttccctcatcattccagtcaggccttcagccaccaagacaaacaacaatggagccaaagggtccccttgtctcaagcctctgtggggcttatactcagaagttgggcttccattgactaggacagatatagaggctgatgagaggcaccccttaatccaaccaatccatttatcatggaaccccattcttcccatcatataaagcagaaatcgccatgacacggagtcgtaagctttttaaagtccactttaaacaccatacaaggcctcttatacctcctagccgtctcaaccacctcattggcaattaaaacaccatggagcagctgtctatccttcacaaatgctgactgcctttcatcgatg

SEQ ID NO: 248700 - DNA, 474 bp, Glycine max
  unsure (1)..(474): unsure at all n locations
ngcttgacggagtttgccgcatcggggaacaanatcactntataagtgggtcccaattggattcctaattttcaacttacctatttggatgtgacatcatggcagataggtggtcccagctttccattgtggattcagccacaaaacatacttcaatatgttggactatctaacacggggatattcgattctattcccacacagatgtgggaagcactttctcaggttctgtatttaaacctctctcgtaatcatatccatggtgagattgggactacattaaacaatccaatatctatcccaactattgatctaagctcaaatcacttgtgtggtaaattaccctatctttcaagtgatgtgcttcagatagatctttcagcaattcattctctgaatccatgaatgacattttatgttacgatcatgacaagcccatgcaattacaaattctgaatcttgcatacaataatt

SEQ ID NO: 248701 - DNA, 423 bp, Glycine max
ctgcagcttctgttccattataaacattgtttgttattatggtggcaatgaacttgacgccactggcagtgtcgtcgacggcctcacacgccactatgggtttctccagatgcgggtgggtttgtggatggggaaggggagggcatagggcataatggaaaagaggaaaaagagaaaaaagatatgcatagtaacaaattagttcatcgacctttggctgataaataaattcatccactcatctgctcaattatataattaagtagcacaaatgtacatttcttgtgataatctggtccaaaagcattaagtaagcaaaaaccgctgagctcaacagtgaaaagttaactgttagatcaccttgtcacacttttctacatctagatctaaagtttaaattttatctttctcgaaatgtcactc

SEQ ID NO: 248702 - DNA, 466 bp, Glycine max
  unsure (1)..(466): unsure at all n locations
atgcaagctttgtatattggattcagagaacttgagagtgtttttaaccctanaccctaaatcccgtcattgataattttgttattcacaataaacttaataattttgagcaacacttttcttctctttctatcatctgaacttttctgttcgaatataactattctaatattgtctaaaaaaaacacacaaaatatcttacaaggacaaaactcaaattctatgaattttatatcgaaaaaaaatattttagcctattatacatttggtggatgcacgtcgatacacatcttaaagcatatgcaatagaattagttatagtgtgcagaatactaggtatagcaagataatgatgaaaagtttatatattgatgtgaacaaaccatgtgtgacagcattattacaccctcaacttgggcactccaccacatggaactaaccggaatctaatgctcttgtcttggtt

SEQ ID NO: 248703 - DNA, 472 bp, Glycine max
  unsure (1)..(472): unsure at all n locations
gcttaattagacgagtgcatcccctttttatgttgtttctttcacactaggagatgttacagtgcagtttatcatatactgttcatcaataatgcactgcctaaattagtatgccatacacatcaaaatctgtgatatatatgtcatcatgcaggtaacaattcaaaaatttcaatcaattcaccgctgccacattgttactatgcattgtaaatttaataaaaataatttttaaaaggtgcagcaacacagatggatttctatccctgtgataaacaagaaaataaatagcctaaaatatgttttcaatccctaatatatacccagattttttgtttgtttcccaataaattttttctttgcattgagcctgttatataagaacaatattgttttttggtcttaacactntttctagtccctcataaattagtgaattttgtgttgttccctgataaatttttcatatgta

SEQ ID NO: 248704 - DNA, 386 bp, Glycine max
aaagccctcgaggaaagaggtaagcctatgttgttggggacgatttctccagatatacccgggtaaactctatcagagagaaatctaaaccctttgaagcattcaaagagttgagtctaagacttcaagagagaaagactgtgtcatcaagagaatcaagagtgaccatggcagagaaattgaaaacagcaggttcactgaaaactgcacatctgaaggcatcactcatgagttctctgcagccatcacaccactacagaatgggatagttgagaggaaaaacaggaccctgcaagaagctgctacggtatgcttactgccacaaaacttcctaaatcattgggctgaacactgaacacagatgtacataccagcagagccactgg

SEQ ID NO: 248705 - DNA, 313 bp, Glycine max
ttaacaatccctcttatcactagcgatattgtattcttaagtcactgaatgtacaacctttacattgatgctcgatcccctctttctttactgcaaacgaagataatcaaatgctgccaaaacatggatgaagttctaagaaaatcattatcaatgaaaacatggttgaaatcacaatataaaagcacatctacctatctttcagagtcctgttggtaattagtctatgctcctcatgtggtggggatttgtataatatgcttatacttttgccttccaaaagaaacttatcactaatcctcttgttattaat

SEQ ID NO: 248706 - DNA, 310 bp, Glycine max
aggcagaaaacaaccggaagacacccgtagggagggagcaaaagcacaaatgacggaaagatcgaaaaccacacaaaaccccttccaaagtgaatccatgctaagggccatcgatgccaaaacctttgccatacccacaagcagggaacaggaccaaccccacaacaacgcacctcatatcacaagaaacggactcacacgatcattgacttaactaatgcaaagaagacacagcggatagatataactaagcatacaaccctcggaacaatataataaaataaggccgggggaacaaaacaatatataa

SEQ ID NO: 248707 - DNA, 451 bp, Glycine max
  unsure (1)..(451): unsure at all n locations
cctgagctgcactgaaaaatttaactntatgatctattatggtctganacaacctggatcattaacaaaattgagactgaagttgcaaatattgaaataaaaataaacacactaaaagggggattgaatagtgtgtatatcaaagatataaacttttgcaatattaaagcagatatagataatgatatgtgtgtggcaagttgtccactaaagataaaacaaatatataatgaagatcaatatgtgtgtccagtgacttgataaaagagagagttcttaatatattctttcacataaacacttgatgttaaaaagatgatagataatgctataagaatgctccataaatcgttatggagagaagtaacaacacttgttgtatactggttcactcaacctgagctatatccaattctccttactcactagtaaagggntcactaatcaaaac

SEQ ID NO: 248708 - DNA, 445 bp, Glycine max
  unsure (1)..(445): unsure at all n locations
tcacatgacactntattttcacataataagttgctttctaggcaacttgagattttaacagaaacactcggtaagttgccaactaaactgtctattattcaacctacacattctactgttttgcaggttacaggttgtaccatctgtgatgtggctcatgaaacaggccaatgtattcccattgaagaaaacactcaagaagttcactatatgggaaatcaacagagacaaggatatactcaaggaggattctcaggcttcctgcagggtccttataaccacaaggatagtggagatcacaccttggcaatcaattcaacaaggaccagggtggaagataaaattttgtagaaaaaatagtctgccttcttcaagtccaagcccaattctggattcaagcccaatgcttcattaattcctgaaattagaataaaaaaaacatcaa

SEQ ID NO: 248709 - DNA, 340 bp, Glycine max
caatgttaatctctccaatatcagaaaaggaatctcatccagttctggcgcatcaacctcattactgcttccataaatactctctagctcatcacattcacttattcttaaaatgcggacgtttggaaaacaagtggatgatgatggcctaataatatataccagtgtatgacaactgaacacaatcaattcatctaaacactgtataacacacacgatggaataatggacttcatgcctgtacacatctatacagctattctctcaaggtaaacatgcgtcatatcactagtactatcactttctcaaaaatattctttatgccacacgatcttatttc

SEQ ID NO: 248710 - DNA, 473 bp, Glycine max
agctttgtcaaaagggaagcacgtgtaaaactcttttttatgtaaaaacgttgtttctacttcaaaaccctttgaactacttcacatagacttatttggtgcctctagaactatgagtttgggtggtaattactatggcttagttatagtagatgattactcaagattcacatggactttgtttttgaaaaccaaagatgaagcttttgatggtttttgcaaacttgccaaggtcattcaaaatgaaaaaaggtcttaacattgtttcacttagaagttatcatggaggtgaatttcaaaatgagtctcttgaaatgttttgtgaagaaaatggaattcaccacaacttttctaccctaagaacacctcaacagaatggtgtcatggagaggaaaaaatatcccttgaagaggagctataactctttaaatgaaacaaagtgcctaagtacttttggtaatgctaacatacta

SEQ ID NO: 248711 - DNA, 475 bp, Glycine max
ttaagtcacctgcggcatgaagctacaataggctgtgcgaaagaaacatgtttcttttttaataagaattgaaagggaaacatgttaatattcatgcaaacctaatggacaagcgattgtattgccactcaagatagaaggggacggtggaatcaacaaaaaacatacgttagaagggaaacgacgttaaaaatttgacaagtttaacgaaacagtgacattactggtgattgttatagtgatagttatttatgacggtaacaatggtgatgaaagtgataaaaaaatatcattatcaaatatgaaaaatatgtatttttttaaaactataaaccaaattcataagacattttttcatgctcttgaaaatgtgtgaaagtattctgaaaatgatttaaaaatcattacaattctatttttgccaaacacattttattttataaattacatttgtgaaccaaaaataaaaacttgc

SEQ ID NO: 248712 - DNA, 378 bp, Glycine max
ttattccctaacggatggtgcctaccctcttctcttctcctttgacttccgctgcatctccatggtgaaaaatcaccattgaaggacctcattgaagctcatagatccaccctccatagaagctccacacgtaagcttccatcatgtataaatttgcatagaattctttcaccaaatacacgtctatgctcccatcggctaaattggtgaggcgtttatggaaattacgcctctccagctcggtcttaaagtcatctaactcagagtgatacaactctactttcctctcaggtaaaattgttcttcctagaacattatcagtgtatttggcccaagcatctaatgaagagaatctccttgtgtcatattgagatgtgg

SEQ ID NO: 248713 - DNA, 425 bp, Glycine max
  unsure (1)..(425): unsure at all n locations
ttctcctcatatctatntttttataatactcttatatctagctaagaagattaataaatacatgtcgtaaaacaaacacatttgtcatataaatatgttggtcgaggcctaaaggatagaatatatttgttattggtagatagtgggataattaatgccaatagtagttgaaaaactaaggatatttttgcgtaaattcttataattgaattttntctaatatgtatgcatgacttggaaagactattattttaaattagagggagtgtatattatattatatcaaagtatactttcttaaagataattatgtatttgatgatacaatntctaaacttaatgaaaatatttgtttgaacgaatattacagtccctccatccattattgtaagagataatctagatatttccttattcattttcat

SEQ ID NO: 248714 - DNA, 459 bp, Glycine max
  unsure (1)..(459): unsure at all n locations
ngcttcattcttcaagaaggaagaaacattttctctgtttaagacgaagaagatcccttctaccaaaacgaagatgattgttttggtatctgtttagattaaatttaatttcggtcacaaaaccgtctgtctgtaattaatgtgtaattaatactggacaatactacctgtcctgtagccattaaagtcccggtcaaaactacttgtcttgtaacaaacagtcaaatagtcccggtcaaaactaccggcaactaccggtcttagatatttggctatataaggagtcctcaagtatgttgtgaggcaccctttcatatatccaatttttcatgtttcggaagagaggtgctctgaaacaagatatttgtaagcgcttctttctacattcaataaatatctaattttcatccttctctcttctccctccaccgatcctgtgcggctcttgcgccgttatat

SEQ ID NO: 248715 - DNA, 414 bp, Glycine max
  unsure (1)..(414): unsure at all n locations
ctactaatccaaataacgtgaattcttgggacccttcaccccatttgaggccagcacttactttgcctcanatgccagtttttgcagcttggacagatgcatagttcatagctcaatagtccttttaattttttgttctctcaagtgaaatttcaatcctttttattgtctttttttgcatgcatgaacaacacacgaggaaggggttgtagctagtcaaatggagggtctaaatattatatcatcacatcactgtcagcaagtttaatttaaactttcaaatcattacattttagcattttactagttaagaattcctgaatgttcattttcattttcaatatatccttgtggccagaatttgtcaattcattcattgatagacacggacgagaagggatataaaaaggttat

SEQ ID NO: 248716 - DNA, 401 bp, Glycine max
ttaagtcacctgcggcatgcaagcttatggaattcacccctaggccgcgagtcatattctgacttgctgccatccattatcaccaaccaaatggcggttgtgaacaccgtgatgatctaccattctcccttgcctaaatgggacgaccccaatgcaccctatgcatataatagaggtgtcccggggcattctatagaccaacgcatggatatgaaacacctggtccacactttgattgacacacggtggctaactttctacgaagacaacccacatgtgaggaagaatcctcttgctactcatgggggagcggcgaataatgcgctgcatgaatatagaccttcgtgaatgaatcttatggaagatgtgctaacctcgatgaggttcatatcgtatgcgtt

SEQ ID NO: 248717 - DNA, 457 bp, Glycine max
agctcgggaggattgatggggacccggtgttgatatatacgaggatatgggctacgtgggagtgcgtgagctcagatggaggtgggcaacaggggatgatgggtttatgcgcgcattgtggatgtggaaaacttgttgtgcaccatcgcccgaccaccacctaataccacaggtgatgggtaccccataatcctacaagcttgagatgaggaagtgtataagggtgaacttcctgcttttattcgttgaccacagagtggtacctggagatatgtctcaggggtcaggagaccttggggacgtcaggtggggtgctattgcccaaaaccaagcttgaccaatcccgacccaacccgggcatagtcggtcagtgagaacctgtgatgtacctaagcaggcgagctcctgtcagtcaacagataataggaacaaagaccacaaagcaaggaggcttgtg

SEQ ID NO: 248718 - DNA, 314 bp, Glycine max
  unsure (1)..(314): unsure at all n locations
tgggagagagagagcaggggaagagaaattctcgcgaatgggagtgtcattgatgtcacccccactaagcaagtttcgactntctcgctaagcggcaaggttcgctaagcgggcgagcgagacatttggtttttcaaggcctatcgcttaacgaagcctcgtgcttagccaaacttcaaattcaattttctttagagatttaaagttaggcttagcgtgtggatcggaccacttagcgagatctgagatcagaaaacctgcaactctcgctaagctgggctttgggctcgcttaactataatcatgcattttga

SEQ ID NO: 248719 - DNA, 453 bp, Glycine max
  unsure (1)..(453): unsure at all n locations
agcttgtgactctnggcaatttctntaaaactagtcactttttaaaagttgtgactcttttgaaaactagtcactttaaaagttgtgacttttgaaaaactcttcagaaacaaatcactttaagaattgtgacttttggtaatttatttttcgaaagcagtcactggtaatcaattaccatgatagtgtaatcgattagacatcaacatatgtgactcttcatgtttaaatttgaaaatcaaaatgtttagaaacactggtaatcgattacaagtattgtgtaatcgattagacaagtttgaaatgatttgaaaaagttttatcacaagttgtgactctcgaaanttgaaatctaacgctttaaaacattggtaatcgatgacatgattatggtaattgaatacaaccttgtaaataagtttgaaaagaatgttggctactagtaatcaatac

SEQ ID NO: 248720 - DNA, 377 bp, Glycine max
atcgcggacgagtattctcaagaatacacggaataagaggccagaggaagggtgatctactctttacaccaagaggcaaccatgtggatggatcggtttgctcttaccttgaacgggagttaagaatatcctcgcttggtagccaaggccaaggcgatggcagacacctactctgccaccaaagagattcatgggcttctcggctattgtcagcatatgatagacttaatggcccacataattagaaatcgttagcaaacttgtatgggctctcaggccttgactagatacgactcccttttgaaataaatgagttggtcccatgttttactccaaagagcgtgtgaaatcaaatcactcctacatttcatctctag

SEQ ID NO: 248721 - DNA, 329 bp, Glycine max
gcgcccataaaaaagggggagaaagtttttattccataactaacgcacacaacacattgtgcaccgaaccatatatttaataaaacagtcccttcccttaaaactgcaaaaagaggaaaacccctccttcttaacaaaatgaagggccacaactctcaaaaaaaacctgagaatcccttccaatatcatccagacccccaaacatcaatgtatcgaagccagtgcgacctgcgaagggcaggggagccaaatggaccccaaacaacactgacacccttggggagcccactaaaaacagcacagggccaagcggaccctcgtaaccatac

SEQ ID NO: 248722 - DNA, 348 bp, Glycine max
caacttaatttgcagatttacctaaacaaaagccatgaaaacccattattcaaaatacattacaacaagaaaaatagaaagatatgaggcactataatgtgcgtgtgtgtgttgatagaatgtaataattttctatgctaaagcaatggtgccttagaattattatctcatttgtaacctttatctagtataacataaaaatcactcttctattgccttcaccttctgctagtccatcctaatctggccatccctgatcccaatgccctatataagactatgatattaactcaattcatatctaagtcgattatgaataaaatagaaataatatattcatgcctcgat

SEQ ID NO: 248723 - DNA, 68 bp, Glycine max
ccctttttaggcccccccccctatttgatacaccctttagaggccacacaaaatctttagcataaaga

SEQ ID NO: 248724 - DNA, 457 bp, Glycine max
cagcagctaataaaagttaacagaaaaattttttttggatatattcatctttacatccgcgcaatccagaaatcaaaatatcataacagctttgtaaaataaatgcaatattgtcttatgtatgaaaaaataatgcttagtaacttttggttcttaattaaaaagtaatgatatcatcctaatgcatacgaaaaatagctgcacttgaaacgtcgcttattaaagtcaaactacctttcatatatctacagtatcacgatatataacattatacttattgacaaactctcatttataaataattatcactaagtaaagtgaatccacaaaattatgccaccattcctgaatacattccaaagttttaagactaaaaacttgctatgataatataatccacataaactcgacgcacaaataattgtgaacacattcataaatgtacacatatatgcaa

SEQ ID NO: 248725 - DNA, 229 bp, Glycine max
tctgcatgcacgagagtctggccttggctcgaaaccttcgatgtgtaagaagttctatagagagaacggcccaacctccagagagttccgaaagatattgctgtgcgaagatctgtagagatgagagctctaagcggaagccgttctgagagcttgagatgatattgcgacgcgaatgtgagacactagaggtttccggactatggaaagataaatcctctgctggatc

SEQ ID NO: 248726 - DNA, 442 bp, Glycine max
  unsure (1)..(442): unsure at all n locations
agctggggctctngcctcactcaccgtcttttttgtttattactagctatcttatacttatcccaagtttcagaaattctacacctagaccactccttgaaacactccttntatactctaactttgctctgaacattttcattccaccaccacgattctttacccctaggtccaaaacctctagattcacccaacgtctctttagccactttaataatctcttgggacatcttgttccacatatcatttgcacttccttgtgattgtccacaccaaccctcccatatcttttgttggaagattccttgtttctcacccttcaagtgccaccatttgatccttggggctaccataggacttcttctctttgccctatctctaatatctacatccaaaaccacaactctatgttgggtagtcaagctctcttccggggataact

SEQ ID NO: 248727 - DNA, 471 bp, Glycine max
  unsure (1)..(471): unsure at all n locations
agctntacacncttagtaccacctactactggtctctcatatcaacctattatgctcacgatgaagcttggaagcagtaatcccttgactactcatgtgagtttttttccctttaatggtaaaggatggatactacaccttatggtgtcttctatttaggctccattgatgaaggtatttataaacattgatctttcaaattgattctattggctccacctagagttctttggctaaggatgttccttctattaaggggttcgctcgcctgaccttacctttattttttggcactccttccttacaagttgatccttcaaatttgattaatatatatacaaaggagctagctgctgttgtggattttgaggttgaattcaaaattcaaattcatgtagctagtcgttcagctcatattcaactgctatcttttacaacttaaggagttgtcttttcatctctgctcttctc

SEQ ID NO: 248728 - DNA, 425 bp, Glycine max
attaagataatagatactatgaatacagcagtctttgtgtggcaggccttatcgaacatgaattttaagagcagaggaaaattcaatgcactcgttcttatataaatagtatgacttaacatttcttggtaggtagattgaggagaaaaatataaacgtgacggtttctaatgttttactactcttttaagtatttaatttttaaaaggtttttttattcatttttttctgaaagctctttatttgtattagtaaaaaacaaggtgatatctcttctaataccaaacattccttaattggtcgcatttggttgataagctcctagctcttgcatagttctttgatttagaaattaaattactgcctacctctaatcatatcctgtgttgaataaagataagctacaacatggccagtaagacaag

SEQ ID NO: 248729 - DNA, 291 bp, Glycine max
accacaaccaggagaaccccacaattccaccaaccattcaaagaatcaaacttttcattgatgttaaaaggaaagagcaaaacttggaaaacctttgagttcttttcctattagcttccatgttgtaatttgaaacctaaatgaggtaacgaacatagtaggccatgatcatgacgttgcattagtgccccaatgggagctccgaccatgcgaatggagtagtgaatggcgatgatgaagcaccttttggcattggtaatgcaattctctcggaagccacaggagatgcct

SEQ ID NO: 248730 - DNA, 413 bp, Glycine max
  unsure (1)..(413): unsure at all n locations
gcatgcaagctntgaacaatatacttgcccttcattttactgtctctgggctcgcggccacctcaaaaaatactttcgacacctactgtacgttgatttgaccaatgctgttatgggaatgttgcgacaatccttcaaaaccttattgatacattctgagaggttggttgccatgtgagcatatcgacgcccttctctatcataagccatcgtccatttttcctttgaaatgcgatcaatccatgttgctatggctggactaagttcacgaaacttttctaattntgatcaaaaatgtgcttgcaaagagtgtacgctgcataaaattaattatgaataacaatcttaagtatatattgaaagtaaataaacgtgaccatcaaatatgaaatcctacccaatgtctttaacat

SEQ ID NO: 248731 - DNA, 194 bp, Glycine max
caactgcatgatccactaaagaaacatcgttgtatgcatcagctggtctgttataaagacccaacacttctacctactggtgtcaattctacttactcgcatctttactgtttctatcctagacctaccttaattctcgcagaaaccatcaattatcaatgcttctttcaacaatgccttattttttaatttaa

SEQ ID NO: 248732 - DNA, 269 bp, Glycine max
tactaacatcacggaaagtattttctttactatttatttaaattccagccatttatttacatcaattattcaagtttgtggaaatgttaatcaactaatttttttctttccagaaaatggttacccacccagtctcctctcctctgctctactggtgcacatcacagtgcatctccttgaacggacaaaaagcccaccgctagacattgcgacttaccctttgggtaaagatgtggtcatgtcacttgcacggaaagcacggtccataa

SEQ ID NO: 248733 - DNA, 358 bp, Glycine max
  unsure (1)..(358): unsure at all n locations
aacaaaccactgagaaagtaagttaattcaggaaaagatgagaactggtcaaagtaagcagaaaagttatcatgataagaggaggaaaaatctggaattcgagggtggagataantgtatcttgagagtcactccatggactggggttggtcgagcattgaaaacccgaaaactcacacctcgcgttattaggcctttccaaattcttaaaaaagtaggccctgaggcataccaaattgcactacccgcgtctctttctaatcttcacaatgtctttcatgtgtctcaactccgtaagtgaaagagaatttgttggtcaaggtgatgtaccagtgaaagagaatntgacatatgaaac

SEQ ID NO: 248734 - DNA, 404 bp, Glycine max
ctcaaatccaatatcttctttacaacctatgcttatccgatcgccacgaaatcaaataattaatcaaccttcctacattcacatgaagatccttctcctccgaaaacggatatgcctcaatcctatcatacctatgcacagttggggggtaaaccacaacatacccaccaacctcccaaagcagtctctgcccccagtaacctctcaacacatcggaggccatcgtgctgaccgacaccgggagcatcaaggcccaaaacgcgggcgaatggtacatcgtgttaaaggaattcactggcaccatcatgccctgcggcaacgccaccttcggcgcgtgctcatcgaactggatatcaaacgccttcaaccccgactttctagtgaaataaaacaccgaatcgaca

SEQ ID NO: 248735 - DNA, 196 bp, Glycine max
aataaaaatatctatttgcatatagtttactctcccttggctttgcaatgattgcttatatgagacagttgaagatttcatatttttcatatgtaaacaaattggctcataaacaatagataaattttctgactattgtatcctttatctttctctccccctttgtcacataaaaaacaaatcatgaatagagagg

SEQ ID NO: 248736 - DNA, 292 bp, Glycine max
  unsure (1)..(292): unsure at all n locations
ttttagcgcctgcataaactgatcattatattaattgttgatgcatatataactgtctcccaatactgaaactgaaagcgacaatggtagaaaagtttggaacttttttgtcatgagctctgattattggtccgtttcagctacttgcagaaataagtttttctctttctatattncgttgtgcttgcctcaaccacctgccgaaaataatcatgttttcatacaaaacaagactcaacatcaaaattctctataagttgaaataatatagccagtttatacgcatttaatt

SEQ ID NO: 248737 - DNA, 432 bp, Glycine max
  unsure (1)..(432): unsure at all n locations
agcatgcaactcgcacaacaagatatttaggacttatatgaactaaataaaaataaataatgagaagggacaagaaagaaatcaagagatgaaaaagggggattaatatgaaataaaggagaaagacaagaggaagaagacattaataatatagagaatgaaaaaagagaataaaaacaaaaggatgggaaaaagaagtggataaaaataggaaagaattagagaggaatggggaataataaaagaagagaaatgggataaaaaaaaatagatgaatgaaactcattacctacaacttgtcaaagacaataggaggatgcgagaggaggttaatagaggatggaagagttcatacataatcagaggttaacatatgtatgagaaaagttctaaagtgtgtggatttctattntaaaaacatatctactcttc

SEQ ID NO: 248738 - DNA, 346 bp, Glycine max
catcatgccacccctctgtttcttagaagagaacaacaaccttattgattgaaacccatttattgagactcttattaggcatgtaatcatcaaccaaccaaaagctcggtcgcttttctacaatactattggagtgggaccaagtttttttgttgcaacctctccatgagcgatatctccaccatgaatagtgggaacacttgcttctaatcgcggttcgcacatttcacaggaatttgagtgtgattgaggtatgtgcttctacactctcacaaaccctgcagaacctgacaacatctctgtgctatattcccttggcactcaacttaaatccaagttggaaaac

SEQ ID NO: 248739 - DNA, 149 bp, Glycine max
  unsure (1)..(149): unsure at all n locations
aaaaatttacaatgtatctcggctagggtttttcgtgcgacctaaaccgaccctttggttcggttgaaacaggcaagttctcatttattcggcaaggaaaacattaacccacctcggcaaanaaatatttgccaaccgacttcatgcat

SEQ ID NO: 248740 - DNA, 411 bp, Glycine max
ctctgaatctgcgactttgcacttaacgccacccttgcacttatcacgagtaagtggattggagcttagcaccaatcatgcactgagcctgcctgaagacaactgctgcacttagagcactgatctcaccctaagcgagcaatcttgatattgacgcgtcgccagattcttctatcacgctgaagctgcgctcagcgatggatgcgcgcttagcccaactgaagagctgagctcaactgacagttttagcacttcatgacttatcctctttttaacctgaaattacacaaatgtcatcattaaatccaaaggaaatattctagagactgctttaacaataaaacaagaattatttacaaaagtactacacaataaccataacataggaaaatatacaaatgttggaaaatg

SEQ ID NO: 248741 - DNA, 307 bp, Glycine max
aatgacaataagcccgacactacaatggcagagctagataagttctttgtacagatgaatattgaatatattgtcaaatgtgttgttgcgtccagacaagacaaacatgcgtcaaactcaccaggggacgatgaacttgaagaagtcagagaaccaactggatgattcccgaggaaacataatccaaagtcccaaatcattggtgatcctaaggacaaagtctagacaaggaactctctcaagcatacaactctactttccaaaattgagcccaaatacatagatgatgttatgtctgatgaatatt

SEQ ID NO: 248742 - DNA, 250 bp, Glycine max
gaaccttgggaccccggtgggggctttgccaaaccaacttgaccaatcccacccacccggcataccggcagtgaaacctggatgacctaacggcgagctccggcgtcaccataaaggaacaagaccccaagcagggggctggggggctggccactggaatctgtggatatgggatatggctcggaatcgatccagggtggtatcgatacaggctaaatgaaacagagctaaaggctctggaacacaccac

SEQ ID NO: 248743 - DNA, 336 bp, Glycine max
ccctttggctggagggcgaccggtgactctcgggaggcgtgttccatgaaagaataccccggagtcgccaccaacgcttatttggggaaaacgtcagaaaaacccggaaagacgtgatctacgaacttttaagtgaaaggcttcggagttgtatttacgcacggggaaggtattagcaccccacacgtccgtcacaagggacggcagcctttaatcgaatgtgcaaacatgacttttgattttatgttcccttttatgtccttatatcctctataccctttttatatatctcgcgggcgacaagggtgtttccctttgttcttacgtattcctcaa

SEQ ID NO: 248744 - DNA, 293 bp, Glycine max
  unsure (1)..(293): unsure at all n locations
ttctcctttatattccgctgcatctccatgggggaaaaacaccattgaaggacctcattgaagctcaaacaaagatccagtctccatagaagcttcacaagcaagcttccatcagaactgtagatgtcaatataaagacgcgtaatctcttttacgaagttggtcctggatgcttaacaacaactcatgaaatcatcaataatttatacttttgtaaacatcaaaattcaaggtatggtaggtcgtccaatgatgagtggatcactctaacctaacatgatttagntctctta

SEQ ID NO: 248745 - DNA, 363 bp, Glycine max
gtactacaaatctgaagccaggtggtgttacagcacctgtgagtgccaccacactgccatcttctttcacagccttcactgccctgtcacattgccctgcaagtcaccagcaaggaatgaaacactatcaacaacatgagtagtataaattagtattgggggaagtgggattctgggaagaaaattttgtgattttcccttatagagtatattgttaacagggtgtgagcgttgtaaacactctagtaccgtgttcaattgctacagataaaaaaatagagtatattgtttcattgaatttcagaaaattaagtatgatatacatgataacaaatttcttttccatctacctgtgcggacaac

SEQ ID NO: 248746 - DNA, 226 bp, Glycine max
  unsure (1)..(226): unsure at all n locations
acctttggggacttccagctatcacctatggtagaagaatttgaagagatcctangatgccctctagagggaaggaaaccatacctcttctcaagggtctatccctcattagctagaatttccaagatagtccaaatcctcgcgtaggaattaaaccacaggaagcaagtcgaaaatggggtggttggaataccaacgaaaatattggaggcaaaagcaagaatct

SEQ ID NO: 248747 - DNA, 384 bp, Glycine max
  unsure (1)..(384): unsure at all n locations
agtctcacgattgtttcttctgattcaacaattggtagccgtggctatacgagacatcttgccaaacaaagtcaagttagccataactcgcctgtgcttttttcttccatgctatatgtagcaaagtcattgatccagtcaagtttgatgagttggaaaatgacgccgtaattatactgtgccagttggagatgtattttccccctgctttctttgacatcatgattcacttgaatgtgcatctggtcagagaaatcaaatgtcgtggtcctgtttatctacgatggatgtacctagttgagcgatacatgaagatcttaanagggtatacaaagaatctatatcgtctagaagcatctattgtagagaggtacattgcagaat

SEQ ID NO: 248748 - DNA, 403 bp, Glycine max
gcttatcgtaatcgattacaccaatggtttttgagacaatgattgattcattcaggagtctctgctttaattaattaccatgtgatataatcaattacttctctttctataagtgtttcaaaagtgaccaagaacactttaatcgattactttgaggatctaatcgattacattattcttgagaggtttccagtttttgggaagaagactttaatcgattgaaatgataatataattgattacattgtagatttaattgattacaagcagctataacttttttctctctatatacccatcttgtgttctcacttctatgcacaagttcattaagtgcaaacatgcatgagttgatataagtgataagtgagtcgtgatactttctttcagtcaagaagacacc

SEQ ID NO: 248749 - DNA, 430 bp, Glycine max
gcatgcaagcttcttgtggaccttgaacaggcaacttttttctttcaaatttatgctatgtgctcgcgactggtccctttcttcctttcgcaacttgagttcactattgctaccccatagagctccgcgaaatttgttccggccatactcttccttgcgagccctcttggtctcttgttcaagggctcttgcggtaattgcattcttttcccgtaacccggcacactccttccgaacgtgtgtagcggccaacttgaacttctccttggcaagttttgcctttcctaactcgcttttgagagcttggacttcttcgttctcttccggtgcttcaaaactctctttgctgacgactcttaacttggcgagccaatctaaacctcgtatatgaactttcagccattcgtggtacccaccaatgatgccatta

SEQ ID NO: 248750 - DNA, 304 bp, Glycine max
  unsure (1)..(304): unsure at all n locations
taacttaaaatcaaatacgctaacgaacacgtattatacaacctgnttcgtgccgaaaaataattatactgctcgtgacactggattgagaagctatacacttcactcagccttatgctggccggtggccacttttagctgttagtgggatgcaatagctatctgaactggtaacaaattcaattaacttgactcacttcacagccctaaatcagggcatgaagccgaatattgaagagttcaagtccggtttatttaatagacaagccaagattctcggctccaccctaattccttccttaac

SEQ ID NO: 248751 - DNA, 378 bp, Glycine max
  unsure (1)..(378): unsure at all n locations
cttcaatccacctcctctttttcacttttggttttccattttcttggacaaaatgttgtgccttttccattggtgatgatcatggaaggctaaacacttcatcaatccaaggatccactccaaccaaggctgaatttgagttctggtttagtatttctaatctttgtcaatgttcatctttctcttcaatcctattttcgattttcatgataatgattatgcttaggattgaaaatggattaggttatggattcattttctaattttgaaatttattcccagattgcttgaatgaatgtccaacctaatttgcaatctcgaacaatctagggaatgattcgattgaactatctctaatngtattgactgaactttcac

SEQ ID NO: 248752 - DNA, 425 bp, Glycine max
  unsure (1)..(425): unsure at all n locations
acactgatctcttcacacattttatcatagccgtcattcaagtctccattctcatttttccctggctcttcctttttcttatgtaaagcttctgaaattaactcataaagtgccttgtcttcttcaccaggctttagcttctcagccaaatagtccttcacagaaacctcattctttgtctcagttccaacaccaccagtgctagttccagtcactttggacttcactgcacttcctaccactgcaaccttatcataaactggagctaatttctcagtcagagagtgagcaatgttctttccatgttgtgcacgtgagccagacatgttagaagcatccccaactttttgttgctctntatttgttaccactctagtccttatggcatctttctctcctgaaccagcctcagaagctatgacatc

SEQ ID NO: 248753 - DNA, 390 bp, Glycine max
atcatgatccaaaacattgagggaaaaatggacttgctcatttcagtcagagaagttaagcccctttaagttgacacagatgatacataagaatttaatgaattgagaacatgtattacataataaaattcacataagtgtgttgagacataaaatacatgtcatgcatatgattcattcagataacggtcaatgtatattgatgttctcctttgggtgatacaccaacacacaacatacaaacatgatgatgctaataaaaattcttaacattatttggcaattaaatatgcatcaattagaagtatctatctcctttgggtatataaataaaactaatgatacacacaaatcgcctacaattatattcattaattataagaacaacta

SEQ ID NO: 248754 - DNA, 222 bp, Glycine max
tcattctctttgcactaagacagtctctgtctatgaatgcgggtaataaggtcacggagaacacctcgcatttcatttcactcccacaactatgttacaacgatgaaggttactttattgtgaaatgtcagaacagggaacacatggagctggttatggaacaaggtccctatctcatttacagtaaaccgcgatttctttgcacatggaccactgaatttg

SEQ ID NO: 248755 - DNA, 399 bp, Glycine max
  unsure (1)..(399): unsure at all n locations
agattacgtcatcttcacgctcaccagatctgtcatactcgaaattgatttacgctgacgggcggaaatacccgagtggtattccgataacattcttttntggtgtctggtaaacgaaaagcctgatagcaagcagagactaacgtcggtttctgcgcccttcgtcaatcgcggccgacaagtcccgttgacacgcggagatttacgtcatcttccgcgcacacaagatctgtcatactgacatttgagtcacgttgacgggcggaaatacccaagtggttatccgcataaactttctttttgctgtctgtaagacgaanagcctgatagcacgcagagactaacgtcgtcttctgtgcccttcgttaatcgcggccgacaagcccattgacacgcgga

SEQ ID NO: 248756 - DNA, 293 bp, Glycine max
tatcgcgccacctgtacaacagaaatcctacaacatcaccttcttcttagaagaacattacccccaaataactgcgagaataaactaaaagtataattcatgcacaacacgtcattaagagtaagcagaaaaacatttgctttacaaattacagagcccaacacacaatacaaaggataatacctaccatgtccatcaatatcaacatcattggaaggaaaatgaagcacatacaaatcatcataaaaagttgcacctctcatcatctactgctggaaatgatccatgccccc

SEQ ID NO: 248757 - DNA, 382 bp, Glycine max
gctttttcttaagctgttgctacaacctttttctccccctttggcaacatcaaaaagccaaagaacttggaaatcaacacagttataacaatggagtagcaagatataagtatcagagtagtaaatacaataagccaaactcataatcaagaaataatcaaaccaaaattcaaagatcataatatgtcaacaaccacaaaatatccaagactgaaatttaagaacacaagataaataagcaaagtacttagcataataatgtaaattctaagaaactaaaagccaaaatacacggcttataaaagataaatattcagaatctaaaatctaagaagacggaggaggtggtggaagatcgaaactttgacgaatgtattcgaca

SEQ ID NO: 248758 - DNA, 431 bp, Glycine max
  unsure (1)..(431): unsure at all n locations
agccttttaatggtaacaatgaaaatcattagcccagctaggtaacaaaatatctcataaaaaaattgccaaatttgtctctctttctcaataggatccctaaagaatcttatccactcatatgggaaagagcataggccccaaggacttatctgtgacgtactccgcatgcttcctaagatacaacaacaggagtgtcacgaaaactgaagcaacaaaatctagcaagcgaaaaataaatccaagaaaaaagaaaagagaagaatttcgtaaagtaggtgtggaatgaagtgtttagcatatagggcattcttagatcaaattatttaatgttacgtaataatgagaatttcgggtaggctctgagtttcaaaaataaattaaaaaagtacaccanaataatttactaaatcacaatataatataactta

SEQ ID NO: 248759 - DNA, 290 bp, Glycine max
  unsure (1)..(290): unsure at all n locations
atttgcacccctttntttactaagagcaccccctttctattttttggtaatctttttccggaacgctacgaaactttacgaaattccgaacgatacttatttttcttccgcaaggttacgaatccttacggattatgcatttactctttctttagtttttcttgaaggagttacggaaacttgcggattgcgcaaaaacacctcttttcgatttccgccacattacggaatttaacggattgcgcaagcctgcttccttttgatttttgacaggcctcggacttcattca

SEQ ID NO: 248760 - DNA, 365 bp, Glycine max
  unsure (1)..(365): unsure at all n locations
tgtacaagggnccattcaactgtaccccattccaccatattcttgtggctatgattgtggattaaacgacagtattctgaaaaacacccgacttttgaaataatgcaccttatccaaacaagataatgaaagaataaagcattttgtgccaaaagaagatacagtatttgcatgggccacacaatttatttacgtgattttttacaacaaagacatatggagctggtgtttcagcatatggcctaatctatctatagcttatggttttgcactctagccaatacaacgatgaaccaaaatacacagaaggccaaatggattnttttaactagcagaaatcctaaacattgttgcacatagcatgg

SEQ ID NO: 248761 - DNA, 359 bp, Glycine max
  unsure (1)..(359): unsure at all n locations
tagtggggtaaaaacctaaacaactttcaaatcatcaaaagtgttagtggtcaaaaatctgatcntttgcacaacaagatatatagggactgtttagcacgaaacaacctctagacctcactttttgtggctaaatagctctccctcacttcaagtgtttcactcttctttaggtcactctttttcctctcaagagtttccctctttttctcactctcaagagttttgctcactttttctttttctttttcttttttctcttgaagaatttttctctcattttcttttgatcctcacacacttcttgtggactcaatggcttgagcacaatctttctgtcttggtgcatgaaagagatc

SEQ ID NO: 248762 - DNA, 389 bp, Glycine max
acatatggatcaacctgatccgcataatttttacggatcaacttgatccatatggtctactcatgctcatccagctttatggaacaacatgatccgtatgactcatagggatcaacctgatccatatgactcattcggatcaacttgagggaatgggatttttgcccatttagttaaaaagccgcgcgcaccaacaataatgctaggtgcacctagaatacccttagaaaaaagggtatataatagagacccatttagctcttaggttgagagaaatgggctatgggcttgtacaagtacattaagaaaagggggggaaactctaaaacggtttagcgaatttataaattacataaaagtaaattttattccataatactatatttctc

SEQ ID NO: 248763 - DNA, 333 bp, Glycine max
cccccccccgaagagatggcacctcaagcccccccgcggctttgactgaccggaccaacacgctgagctgaactccctacaaattttaaacaatcaaaaaaactgtgaaccaggaaagaaccaaacaaaaattaacaatataaacataacaaacattgacccagtaaacatcctaacaactaaaaaaaatcaaaaccacaaaacaaaacaatagtcatttcaaacaacccaaacaaaaaagtgcccggaacacaaacaaattgccaaaataaaaaagggaatttcacaaaaatgaaaaataacaacaaaaaattcgaaaacaacaccaaaaac

SEQ ID NO: 248764 - DNA, 417 bp, Glycine max
  unsure (1)..(417): unsure at all n locations
ctgcagccttagctgttaactacacttttatttactatttctaattgttcctgctataaagcaaccggttgctatgttcatgttttaatgtcgagttgcggtttgagtttgaaaagtgaacgaatgtgtttagctttctgaaccaaaggttacggaggccttggtatgttgtagttgttgtatggcactatatcacatgaatgctntttagtttgcagcctactgcgtttggaaggggttgatgcaatcctaccccgcaaggacattggatagaagactccaagaagaatgggccagagatgaaagagaaggccctagggttntcaggagccttaggatagatttcgagcccatgggctaagtatgagcccgcttatctttgtacataatagattaaggtttcattatttttttttg

SEQ ID NO: 248765 - DNA, 415 bp, Glycine max
  unsure (1)..(415): unsure at all n locations
gcttgacccatcccgacccaacccggttatattctgtcagtgagaacctgtgatgtacctaagcaggcgagctcctggcagtcaacagataanaggaaaacaagaccacaaagcaaggaggcttgtggtggctggccacctgtgaattttgtgtaatatgtgagatatggcctctggtaatcgattaccaagggtgggtaatcgattacaaggcttaaaaatgaagacagggggctaagatggtctctggtaatcgattaccaggggatgtaatcgattaccaggcttgaaaacgaggtcaggaagcctctggtaatcgattaccaaggggtgtaatcgattaccaggcttataaagggaactgggagttgatggaagcctctggtaatcgattaccagcctgtgtaatcgatta

SEQ ID NO: 248766 - DNA, 387 bp, Glycine max
tccttcttccttggcttattccctagaggatggagcctcccctctcctcttctcctttgccttcctttgcatctccatggggtaaaatcaccattgaaggacctcattgaagctcaaagatccaacctccatagaagctccacaagcaagcttccatcatgacccatctaattaatcttgatttggaatctgctttggcaagtatatattttatagttgaatggtcagtgtgcacaatgatctttgatcctacaagatatgatcaaaactttttgaaggcataaaccactgctaacatctccttctccactactacacagttgatttgggcttcatttagcattttgttggcatagtagatagcatgaaatattccactcctctttt

SEQ ID NO: 248767 - DNA, 417 bp, Glycine max
  unsure (1)..(417): unsure at all n locations
gcttgcatttggaattgcgaaagccccattctatcattaggattagtaccagacatttcaaacactcaatctatatgcaacaagacaattatagttgctgcttgaataccttacgcactcaagtgtatcacacaattatggcttttctctaatgaaacactcttgccttttaccactctaattccccttgagttcttaagcaattcaagagattatggccacaacaaagaacaattcaccaatatgtgctttgacaggctagaccacgaataggttatccgagacaaaggctaacaatgtttttacgcacaattgacggaaactcaattcacaatttatgaattcgggtaacaatccttcatgcaaccaatatattaccttaaagagtgtttntttttaagtcttcaagcatgaaca

SEQ ID NO: 248768 - DNA, 382 bp, Glycine max
acacacatactattttctattaccagagaagtctttcagaaaatattctcaatagtcacatctctttacttgattcttgaaagggtgtcaaaggcctatatatgtgtgacttgggacacgaatatgctaagagtttctcaaaacaaaaaggtcttatcctcttaaaaagcaaaaccagtttatcctcttagaaattccttggccaaaacactggtgattcaataaggaattatttgagtgctcaaattgttcaatctatctctttcaagagagatttcttcttcttttcttcttcttcattctgaaaagggattaagagaccgagggtctcttgttgtgaaagaattctaaacacaaaggaagggttgtccttgtgtgttta

SEQ ID NO: 248769 - DNA, 305 bp, Glycine max
  unsure (1)..(305): unsure at all n locations
acctggaaaataatgtatcacaccctattactggaatcttaacgcccccatcattaccttctttccgcttttctttcttctttacttccttctttccctttttcaaagaaaccaacattttcgcgccaccaccgtcgaccgngctgtccaaccccttcttaatcttctttcttctcttctccctctcttcccctttgccttcttccctttctcccctttntccccttggtcttagctgttgtaagtaattgttgcggtgttgtttgaaaaaaaaaaaagacccaaaagagactatgctcatggac

SEQ ID NO: 248770 - DNA, 374 bp, Glycine max
  unsure (1)..(374): unsure at all n locations
tcaacttctatcatcacatgggttattcccttgttttaatttaanggagataccacagcatgatcaataagttcctcacgcacttttttattttcatccctgaccacattgtcgaaagcaactttctccaaattgacaacaagatgataaccagtttgtgattaccactgcttcctacgggtgcaccggagtgacaagaatgccatttggtccccacccaactcgaaatgacttacccataaacagaccagcatcaactatattgtgagcatagtttccagatactggagtttcatgtttgagatctagcttaaaacctcgtgattttatcgtcctaagaggcatgcccttatgctgctgaaccatcaaaattc

SEQ ID NO: 248771 - DNA, 416 bp, Glycine max
  unsure (1)..(416): unsure at all n locations
attaactcactntaacctgcatttaccatataatccagatgtaaccttccaactctcaaagcctcactctttttccactcataacactacattctcactttctaaccctaggttaactctatccttcatttctaacagttttccataagcaatttcagcacataaacatcacaagcatcatcataaaaaacctaaaactgaatgggtaagcttaactcatccaaacatggcaagttcaacatgctttcaacaagtgtcttcacaaataactatcatgaagcagaaaactagcaaaactacccatcatatctcccaaaaccccatacccacgaaaatcaagagggaaagaagtccacccaaacctgaaatttcgaagtcccacacgtagagacgcgcttcacgactccgaaaatgcc

SEQ ID NO: 248772 - DNA, 435 bp, Glycine max
  unsure (1)..(435): unsure at all n locations
gctagctttgagccaaaatcctgactcaccattaaccttgacccagggtgagaatgtcaatccttacccttggaagcaaaaaagaagagaaagaaaatctccaatcaaaggaaaaaagagaaggaaaattcccaatcaaagaaaaagcaaaaaaaggagagaaggaaaatttccaatcaaaggaaaaaaggaagcacggaaattcccaatcaaagagtgggagaaagaaaaaagaaaagaaagaaaattcccaaccgaagaatgggagaaagtaaaaaagggaaggaaagaaagttcctgattaaagaaacagaagaaatgtgcagaaaggtcttttgaccagacaatatctgaacaatacaaaattgtcaccaaatgaacaaaaagaaggaagggaaaccacgacctanagtgatcttctccctttaattacca

SEQ ID NO: 248773 - DNA, 373 bp, Glycine max
ttatttaaatgttctattgcaaaatatatttttaaataaaatcataaatgttttattaaattaaaccttaaaattatgtttatatcatataaataaagaattgattcttatagagcctcatatacacgcttgttcttaaacccgagagtttacatatacttgcgagaggtccataaactcgactcgtaaactcaactagtatattcttaggagttcagttcatataaaaatgataacaaaatatctataaataacttatcaattaaatagttaaacaatatgataaaaaatactaaatcataaatttcacaatactcaaataacccagtctagtaatatatcactactacataataacttccaaatgttatag

SEQ ID NO: 248774 - DNA, 412 bp, Glycine max
  unsure (1)..(412): unsure at all n locations
gcttcttgcgtagccgctcttggtgcttattaaaatccaaaaacaaatcccccttattactaactattttgaattctttagttcttgaatgtacaaccttcaaattgttgctcgttcccctctttgttttctgcaaaaaagaaaatcaatatcaaagaaaacatggatgaagtcctaaggattccatgtacatgtgtatttctgaagatatagtatttatattccatcaagcatacattgactattgattacatgtaatagactttttataacatggttgtcccaaatcacaattaaaaagcacaacaaccaatctttcggagtcctttagttaatttgtcttgtctccttctgtggaggagttttgtttaataatattatacttttgccttccaaanaaaacttatgactg

SEQ ID NO: 248775 - DNA, 220 bp, Glycine max
actgggatcaatcaaagtggatttagatggggtagggctctattgatacgtcattacctacaattcgaattgcctaaacacctttgatatgtgggtttgtgtgtgtgtgaattcattagggaatttcattgtaagtaaattatatcaacataggaaaatttgacatgattcttcataaaataatgatttcatcaattggtcaaaactatgttgagcaata

SEQ ID NO: 248776 - DNA, 362 bp, Glycine max
  unsure (1)..(362): unsure at all n locations
gagaaagagagaggggggagcaccaaattgaaggaagaaaaagggagagaagttgaactttgagttgtgtctcacaagactctcattcatcaaaggtacaacaagtgttacacatgcttctatttatagactaagtagcttcctagaaaagcttttttgagaaaacttccttgagaagctacacccctctcataactaagctcacatccttgagaagcttccttaagaagattcctaaagaagctagagcttagctacacatacctctctaatagctaagctcacctccttgagatgagaagctagagcttagctacacaccctctatatatatctaagctcaccccatgataaanaacatg

SEQ ID NO: 248777 - DNA, 295 bp, Glycine max
cgagaccttcgaaattgaacaatggaagctcttgagcacttcaaatgaacataactctttcctatgatgttcgattcaagcgcataaaatatctagatgttcgagattgcacaacggaatcctttgagcatttcaaatggtcaaagctcttcactcggatgtccgactcaggcgcataatatatcgagacgttcgaaatcgaacaatggaagctcttgagcaatgtcaatgatcataacttttaactcggatgtccgactcacgcgcataatatatccagacattcgaaattgaa

SEQ ID NO: 248778 - DNA, 416 bp, Glycine max
ggacctatctcgatgggtcgatccacaaccccacaatcattgagcttggaaggcgtaagggcttaagtgtattgatagagttgaacctatgaatttatcttggttagatggtacaatttcctaccaagaacttagcatggaggagtaagtgcttaagtactgtcataagctaggtctcaaagacttacctcggtcaaataatccatagtacaacaagtacttatctagataggcataagtgcttaagctttctagatcaattgttccttagtaacatgagatttactttgatgagtttgacaccctaccccaacatgcatataaatgaaaaaacaacataaaatgcggaatctaattaaagtcacatttattcaatacaactgtaagtaaatccacatggataaaaggtccacatt

SEQ ID NO: 248779 - DNA, 314 bp, Glycine max
  unsure (1)..(314): unsure at all n locations
catggagtggtatttccttctctaacttgaatcctacctcccacacaattgatgtcacattagacagagacaagttaatctatggcatcattatgaagatggatatgaatgtggggtacctcatctcccaccaaatctttattactgcacaacatggttcatcctgacttggattccctgccttgatcacagctctatgcaaggcccgaggagtccaatcagattctagatctttggaaagcctgagccctaccattaactnggcatacattaagaagaactgttggaatctagatgatccaacaatgacattt

SEQ ID NO: 248780 - DNA, 397 bp, Glycine max
  unsure (1)..(397): unsure at all n locations
agagtttgagagatttttctatgtgaagacctgtatagaaccgagctngaagaggaagccattctgagagcttgagatgagtttgtgagtgattgtgaggttctagaggtggaggagacatcctcaccacttgtatttcttcaatccttcctctttctcttctctttgtgggaaaggaagcttcccagttatggagagctaaatcctctgttggttcatccttgtaggtacttgatgtaaatacctgtatatctagttaatggaatgatgttctgtgtgttcattgtgctatcaaaacttcattctaccatgctcttgccttgatcatgtagatgcatgtgtctttaggatcattcaacagtggaaactggtcagattcttagaactggataggacg

SEQ ID NO: 248781 - DNA, 305 bp, Glycine max
ctagctgtaccatcattttaactattcttggactatctgcaaactctcatatatatatatatactcacacacctacgctgacgatccttatatgtgcatagatacatactcatcacctatcaggggccggagagtgttttaaggtgtacacaatcatacaatcacatcccaccatgtctgataatgttatagactttacacatacttattttcacgtcctcccaacggtgatatatgattggatgaccatataaaacttgtttacattatccatgcagaggttttatatgaggactatggcatat

SEQ ID NO: 248782 - DNA, 373 bp, Glycine max
tattttgcaacaataacaatgcaagggtgaatctactcgatttggtgctgataaaaaaaacctcaaaagcctcaaaatggaaggttgttctaaccttggagggtttgttctttgttcgtctagtctttctaccctttggttgtctaatttatactctttgtctaaaatggagataacttttctggcattctttattatcttgcgagatgtgataaatttcttaatttgatatatccctttgatcttgtattctagttcctatctccatccaaatctggattctagttcctatctaatcaattgatcacatttccaatagtctacagtgtcctaattttctgtctctgtttaacagtttaactaacattaacaa

SEQ ID NO: 248783 - DNA, 399 bp, Glycine max
gctaggatttccttttagtagggaatctttccttcctaagatggatccaaacccagtcccccttattaagaactagctcctttcttcctctattgcccttagttgaatacacctttgtttggttctctaattgggtcttaaccctctcatgcaacttctttacaaactctgacctagattccccatctttatgtataaaagaagtgtcaagtgggaggggaatgaggtctaagggtgttaagggattgaacccatacacaacctcaaaaggggattgcttggtggttctatgaacccccctattgtaggcaaattctacatgaggaagatactcatcccaagacttatggttgccttttagaagatcccttataagagtggataaagacctattcacta

SEQ ID NO: 248784 - DNA, 377 bp, Glycine max
  unsure (1)..(377): unsure at all n locations
tcagcagcaaaatcaaccacagcagaacaattatgacctttccaacaacaaatacaacccttgatggaggaatcaccctaatctcagatggtccagccctcagcaacaacaaaagcagcctgctccttccttccaaaatgctgctggcccaagcagaccatacattcctccaccaatccaacaacagcaacaaccccagaaacagccaacaattgaggcccctccacaaccttccctcgaagaacttgtgaggcaaatgactatgcagaacatgcagtttcagcaagagaccagagcctncattcagagcttaaccaatcagatgggacanatggctacccaattgaataacaacagtcccataattctgacaagct

SEQ ID NO: 248785 - DNA, 357 bp, Glycine max
tgattgtcaacttctcaatgactcacacatgatgatacttacatggagacacttcactcaacttccttataggtcaaaaccctgcgtaggtagccctatttgaaacctcgacaatctgcttcagctgctttcagtatcaatgactatcgccacaaaccaacatgagacttttcaccaagttttgttctcactcacgctttttaggaaactctccaaagagcacccatcccataactactccaagccaacaccttaactatggaatcttaataatacgctaccgaaagtaaatcatcttgttgtataagtagacaaataatcgcttaagtcatatcattgacagtctatactataaac

SEQ ID NO: 248786 - DNA, 455 bp, Glycine max
  unsure (1)..(455): unsure at all n locations
tgcaagcttcanaccacagcaacacagaatctaggattcaataacccttaattcaatgggttctctaggtttgaaaagtgaaatttataatgagggtaaattgaagacactctcacctcacacaagtccataacatcaatctaaacttgcccaaactggatttacacctaaagttcccaccaaatcaaaattgactcttcaacacctaattttgccctagaaatggctcttggttcactttggtcatttgtttttctctctagctcagcctaacctttctcacatgtcctaaatgacatttcaagctagtattaactcactttaacctccatctaccacagaattcagacttagccttccaactctcaaagtctcactctgtttccactcataacatcacattctcactctctaaccttgggttagttctaccctctgtctctaacaaatttcta

SEQ ID NO: 248787 - DNA, 494 bp, Glycine max
  unsure (1)..(494): unsure at all n locations
gcgactgcagctgcagcttatangcactttgaataacagaatattattttggaacttcanagcagaaacaaacctgctgtcntctcagcttttcattttcctcttccaaacgtgaactttgtgctccagttcagttgtgtaagcctgtttatagttatcattcaggttaaggatatttactaaggggaaccgcttgaaactaanaaactataacatggccttcaaaagaaagataacactcacctgtttccttgctcttgaacgagcagcagattcccgattcttgatcatcctcttctgcctcctctcaacagtcttctctatcatgtcctctggcgtgcccncatttctccaggtcttctagtatctgacaagggtcccataacaggtgaagagagtgcacctgaccatctgcatacggaacatctgatgcacaccagctccatgtgtacggctgcctatattttgcctgtatgtaaatccattaaccttgt

SEQ ID NO: 248788 - DNA, 363 bp, Glycine max
  unsure (1)..(363): unsure at all n locations
cttctcattatctactcttgatcagcagttggagctcttcaatactccactataaccagacctgaagtaagttttgctgtaacaaagtctgtcaattcatggccaaccctcttgaatctcactggacagcagtgaaaagaattctcaggtatctcanaggctctttacacccgggcctacttctcaaagctgctactcctggaattcccattcccattaaagtcctttgtgatgcagactgagcttctgaccctgatgatcgcagatctacttcaggagctgctatttantttggccctaatcttattttaagaaacaacagattgttgcaagatcaagtactgaggctgagtatcanagtct

SEQ ID NO: 248789 - DNA, 389 bp, Glycine max
  unsure (1)..(389): unsure at all n locations
tgacctgtctggtgtatacttgtctgtctcactgcatgcgccggcccaagacattcgttgccagataatgcctgctgctcgtgctttcccttgggaaaactcatggattcactgcaagactatcaaagtaaaaggtcattcatgctttctctcaacaatntctctcatnttttaagccattaatattaatattaatatttcatccttaattatagtctgcagaanatatttattgaatacataatgcttgatggggtgaacgacgaaaagcaccatgctcaccaattgggaaaactgtcaagagacatttcaagtggtaaatactcaacagcttcttccttctctatcaatatcaatgtctcttcaagcattatgctctgccccataat

SEQ ID NO: 248790 - DNA, 119 bp, Glycine max
ccaatcggcctacagtatgtggccccctccttaatatacatcagaaatatggggtgctgctgtaggacacctcattttttttttttgtagaaacttgtcaaatgttgggttgcaactat

SEQ ID NO: 248791 - DNA, 321 bp, Glycine max
  unsure (1)..(321): unsure at all n locations
gtgtgtgtagctaagctctagcttctcaaggaagttttctcaaagaagcttctcaaggaagtttctcaagaaagcttctcaaggaagctacctagtctataaatagaagcatgtgtaacacttgttgtaactttgatgaaagagagtcttgtgagacataactcanagttcaacttctctctctttttcttccgtcaattttgtgctcccccctctctctntctctccttcttttttttcctccattgaagcatcctctccaagcttcttatccaaggctcatcttggtggtgaagctccttcttccatggcttattccct

SEQ ID NO: 248792 - DNA, 142 bp, Glycine max
aaccacaaaagcagaagctacacatgatgcttaaccactcaagaacaaagcaaccaataacaagtgttaaccatcatatacgcagaaacaacaaagttaaccatcaacaaaagaaactaaacacaatgcttaaccactataa

SEQ ID NO: 248793 - DNA, 414 bp, Glycine max
  unsure (1)..(414): unsure at all n locations
cacctgcggcatgcaagctttagccttctcctccaagcagcttcttattatcccaaccaccccattntctattttcttcaaatggcctagctcttattccgagatcttgacgtgaatttgatccatccgctgtttttgttctcgtaagctggctagttctaggttcttgactttgacatgatagaacctctttctaaaggagggcacttggtccgaccccatgtttgtgggaatgacaatttcgatgactgatacttccacaccctatcatagaggaggtatgatgaatgcatcagggcatgtttatgctatgcatgacaaatgcgtttatctatggacacaagagctcanaagaccatatcttcttacccacaatgcattgggtatcatgtttcatttgcagtcattaccatg

SEQ ID NO: 248794 - DNA, 137 bp, Glycine max
ttgtttggctaagcgcaattagtttctgccaagctcatttctttgcggccagcactacggttcctggagctaaacgccaatcatggcggctaagctgaattccttgcggcaatgtaagcgctaagtgatcccttatc

SEQ ID NO: 248795 - DNA, 444 bp, Glycine max
gctccttctctccttctcccatcactcatattctcctttcttcaagctcttatccatgcttcctatggtggtcagcttcttcttgactcatcttctccttgaagtggcgtctccaaccatctttcttccttctccattctactaccattcatcttcaagaagcaagagacttcattgatgaaaaagattcaaggcctacaagctccacatggagctacatcatgtggtatcacagcatcttcatctaggtgatgttcttttgcttcctcaatctttttgttcgggcaattcactgtaattccttatgattcatctattctccatgatatctccattgctcgtccttcattcctaggccacaattatatatctactatgaacatgctttgattgattatgtctatcattttagcataacttttggtgaccttaaactaaattctc

SEQ ID NO: 248796 - DNA, 403 bp, Glycine max
  unsure (1)..(403): unsure at all n locations
tgatattgggagacacagtgaaggcttgccaaaggtccaaaagggagttgccgaacaattgggcaagaccaaagaaaacatgtaggccatcattgaccaatacaaggagaagctaagtctagcggcaacccatgaacaaaggctagaggacgagtatgcaaaagtattagtcctacaagtagaaagggaagcaagagagagagtaatcgattcattacacagagaagggatgatatgaatggataagttcaccttcaccttgaatgggagtcaagagcttncgagaatgctagccaaagccaacgcgatggtggatgtatactcgacctccgaggaagttcacgagctcctcaattattgtcagcacatgatcaatctgatggcccacatagttaggaatcgc

SEQ ID NO: 248797 - DNA, 300 bp, Glycine max
  unsure (1)..(300): unsure at all n locations
tagctctcgctccatttctttagatgttggagaagctcaaagattttctcacctcttgcatggagtgaccacttcactctgataacctgcaatgaaacacaacttgtaagaaaatactgtataatggatttggcccatataaattgttattaaaaacataaaattaacctaagatggagaatttggctcactttggtattgcttgtgcttttcacagctattntccaaactgaaagattaaaattacacaaataagtatgttatggaatgtcactattattaaaatgtatctttccatgt

SEQ ID NO: 248798 - DNA, 51 bp, Glycine max
tctctacgatcctccactattattacgtctgttcacttcaaaatggatcct

SEQ ID NO: 248799 - DNA, 242 bp, Glycine max
  unsure (1)..(242): unsure at all n locations
tctacacgacactgagaaactgcgcaatgaagaggtgagaaagaaggagaaacccatgctgtgactgccttcctatacggcccaagtttccaccaaacccaacaatgtcattactcagtcaataacaaacttcttcttacccaccacccagttattcacaaaaggcatccctaaatcaaccacaaagcctgtctaccgcacttncaatgacgaagacacctttagcacaaaccaaaaaacac

SEQ ID NO: 248800 - DNA, 370 bp, Glycine max
  unsure (1)..(370): unsure at all n locations
ctgctgaaggctttatgaggctgatcttttatcttaatgacgccttcatgggatttccacatggagggtacggaagacaaagaaagaggagaggaggccaccactaggaataccttggaaaagagcttcacacaaaatggcctggataaaactggaaggatcttnctgacgaaagaagaagaagaagaagaggggagccaatgaagataaaaggaaaattgacttgatggttaaaatttattataagtacacaggtaatacttattaaccagacttcttgaaatctaaaacttttaacttttgaactctgaagtaactaatccacccttatacactactctgaagtctgaaatctaaaacaactactccc

SEQ ID NO: 248801 - DNA, 433 bp, Glycine max
  unsure (1)..(433): unsure at all n locations
atgacatacacaacgtcatctatggtgatgctactctcacgcaatattggtgctacacgaattttctacaacagccaaataacaatcaaaacccctcagctttactgatcatctgattatatattacaataaagcaaaaagtcaactataagaagaccattataagaagtaaggttttcaggagtttagactatgcagtgcacctaanatggactcagctcctggctctaattaataaatggctattaaataggtagctaatttccatgaatatttcagataaattgaacagccacaccttctaacaactatggttttccagaaacaatctctctctagcaataacatgtttacaattcatgcatagctgtaactcctgcaataacactaataacatagtatcacatcagatgttgtatataatataataact

SEQ ID NO: 248802 - DNA, 382 bp, Glycine max
ctacaataattacaatggtggaaatcagtacgttagcgctggcattggccgtggtgcggtggcggttggaattttaatcgtggtggttgcaatggtggctgtggcagaggtcgatttgctcatttccagtgtcaaatctgtcataaatatggtcatgaggcttcttattgtcatcataggcacaatgatgactatgttcctactcagcctatggattatcccagccagtatcctgatcaaaatcagtctcagatctctactaaccccaatcagaaccagtaccaaagtcagagtcagaaccttaattcctatcaaacacagcagtctaatcagtctcagttcaatcaatactcagcattctcctcaagcctatctgataagt

SEQ ID NO: 248803 - DNA, 280 bp, Glycine max
  unsure (1)..(280): unsure at all n locations
ttccgccccggagtacgacagtcaacgctttatgagcgttgtacatcancagcgcttcaagccatcaagggatggtcgtttctccgggagcgacgcgtccagctcagggacgacgagtatactgatttccacgaggaaatagggcgccggcggtgggcaccactggttacttccactggccaagttgatccacaaatagtccttgagttttacgccaatgcttggccaacagaggaaggcgtgcgtgacatgaggtcctgggttaagggtcagtggatcc

SEQ ID NO: 248804 - DNA, 322 bp, Glycine max
  unsure (1)..(322): unsure at all n locations
tctgtatgggggtcaacagaggagcacaaaccacaaacccttgcgacaggtaaaaatttttgattcaaggccagctgggttaccaagttgaccaacgcatccagtttgccttcaagcttcttagtttcagatgatgcagatgggtttgtagctacctcatgcactcctctaatgactatggcatcatttctggcgctaaactgctgggagtnggaggccatcttctcaattaaatttctggcttcagcaagagtcatgtctccaagggctccaccactggcagcatctatcatacttctctccatnatactgagtccttcat

SEQ ID NO: 248805 - DNA, 391 bp, Glycine max
  unsure (1)..(391): unsure at all n locations
atcttcatctcgcgtactttcggtattattctcctttgttttaaagagtttcgaccgatcgcttaagccgtaacctcacttaatgaatgataaaaatgaatttcaacggatcgtttgtattgtaatctcatttaatcatcgttaaaataaaattcaaccaatcgttcacgttgtaacctcggctattcaaaaaataagtaagttccaaccggatattttactttgaaagttctctctttaaatgagtgggaaataaatagtgaaactaagctanatcactcacaaatcactttgtcgtcaaaagcatttaaaccgttcaagccaacgccttaatggcctcttactttatcggtaaatacactttcaagataaatcacctcacatacttact

SEQ ID NO: 248806 - DNA, 368 bp, Glycine max
  unsure (1)..(368): unsure at all n locations
agctcgcctcanagaggtccaggaagttaattctgttctaagaactanttccgccccggagtatgacagtcaccgctttaagagcgttgtacaccaccacgcttcgaagccatcaagggatggtcgtttctccgggagcgacgcgtccagctcagggacgacgagtatactgattttcatgaggaaatagggcgccggcggtgggcaccactgattactcctatggccaagtttgatccagaaatagtccttgaatcttatgccaatgcttggccaacagaggagggcgtgcgtgacatgagatcctgtgttaggggtcagtggatcccgttcgatgccgacgctatcanccagctcctgcgatatcc

SEQ ID NO: 248807 - DNA, 422 bp, Glycine max
  unsure (1)..(422): unsure at all n locations
tcacctgaggcatgcaagcntgtggatatggagcacccgttatatgtggtactatgtggcgatcgggcgatggtgcaaatcaactctcccacatcctcaaatcaaacatgaaccaccatccccagttgcccaccttcaactgagctcacgtactcctacataacccttatcctcattcctctcagcaccgggtccccatcaacccctccaagcttccgtaatatcccagcaatccaattccaactatcatgaactaccctaaacccagaaaatagggcagaggcagaatactctgcccaaaacaccttcacatattacaactttccttactcaaataccccagtaacattctctttgttccgaatcgttaaccgttggatcgactngaaaattttactggaagtcctactacataagcctac

SEQ ID NO: 248808 - DNA, 329 bp, Glycine max
agtcacctgcggcatgcaagccttggttggtgaagcacaaagccattgctttttaatatggcaattaggaagagtcatatgcaaaactttcgtcgtggctaacacacatgcaaaatcatttcctggatcatatcttcaaatactacatgacgattttattgttgagaacatggttagtcgtgaacaccgtccgtttcatagagtgttttggacttttggtcaatgtaaggaggctttcaacgtttgtaagccaacatacaagttgatggcacacatttgtaccgaaaataccgagggaccctcttaatggccacatcacaacatgaaaa

SEQ ID NO: 248809 - DNA, 396 bp, Glycine max
atattcgctcccttatcttaaaccttaagcttatctttatttttaaaagggtctgctgcaaagcttgacgcatatatactaattatgctcccttatcttaaaccctaaacttatttttatctttaaaacgatcttgcaatataacttcagctttgagaacccacatatgtattctttgcatgggaaaggacaatttatctttgtttaaaggagacagcaagcagtgcattcttaattttactttcagcgcttacatgacatgttaccacttcattagtattgaccacattgcgttaaacgatctgacatcttgacatgatacaatccaactactcataataactctttttttaatcttacctttacactggacttcatattggatttttccttttt

SEQ ID NO: 248810 - DNA, 377 bp, Glycine max
  unsure (1)..(377): unsure at all n locations
atctcgcaccaatattgaaagtttggagaggacaaccattatggaactatgagtaatgaccataacattcttaaagaaaccaaattcctagatatacctcaaaatccaaactagtacaagtatgtcacaataaccttcaactaaacacatgttcttttttccaaaaccaagtgcaaagtttttattttattttttaatttgtccgcctcatagggtgttacgttaatttttcgtccacatggttattaacaaaatatggagtaataagaatagatattaaaatctaattatatttttggtgtattgattatgcattaattatactcattaataaacataataaatatttcngtttaaaatatttattaaattttaca

SEQ ID NO: 248811 - DNA, 329 bp, Glycine max
  unsure (1)..(329): unsure at all n locations
agaactttgctcagtaattgcaagatgcaagggaatgtataagttgcagaaaaggcattcattcgttattgcagttggaccctcaagattcttctgcttacgttcttttagcaaacgtatatgctaacgtanggatgtggggtgagggtgcaaaaataagaagtataatgaagaactgtaagttaaagaaggagccaggttgtagctggattgaggtcagagatgaggtacacacatttcttgttggtgacaaggcacatccaagatctgaagagatatatgagcaaactcatttacttgtggatgagatgaagtgggctggatatgtt

SEQ ID NO: 248812 - DNA, 358 bp, Glycine max
gcttcttttctctgccacttttcatccacaatctgtttgggtaatagaggtagtgcataagtctctatccatccttgtaagaggctcttctgaaaagcaactataatcttgggatgagtatcttcctcatgtagaatttgcctacaatatggggttcaaagaaccaccaaacaatcccctttagaggttgtctatggattcaatcctctaacacctttataccttattcccttcccacatgacacttcttttatacataaagaaagggaatctaggtaagagtttgtaaataagttgcatgagagggttaggaaccaaatagagaaccaaacaaaggtttatgcagctaaaggcaata

SEQ ID NO: 248813 - DNA, 376 bp, Glycine max
  unsure (1)..(376): unsure at all n locations
atacttcgacaacatttcatagagatgaaagactcgagaatatgtgtgctatgcatgaaaatgtaatgatgagattgagatgcccgaagaaacatcattttctagttaaccacgcattaggtaccatgctcaatcattttgttctgttgtttttttttagaaatgggtttatgatcccaacatggttggctcatggtacctaacacatgcaactaagaatgtagtctgaattttcacgcttcctttnttttgtttttgtnttgcagaggaaaatgcaaggatcatgcctgagtaaacatgaaaacaaatggtatgcaaaaacatgttaaatgcagatgcatggtgatgaagtgactctatgcaaatgcaatgcatg

SEQ ID NO: 248814 - DNA, 343 bp, Glycine max
  unsure (1)..(343): unsure at all n locations
atgagctgattattttgctagtttattgcattgtcattgtgaacttgtttctttatcaccatacttagttactataaacatgttcctgaaatacttgttcttttgaatntcttgcttgcaaaatgaattcttgtgatgtcattagatgtgatttttcactttgagtcatattagctaggcccataaagtttgttcgtggtcacttatattgataccatccttggtgttacatttctttgagtcatattaagagtttcagaagttgaatacagtaaagatgaaaaatgcttgcctctatttcttgggctcgtttggaggctcacgctcaacattaagttcattt

SEQ ID NO: 248815 - DNA, 191 bp, Glycine max
  unsure (1)..(191): unsure at all n locations
ctttttccggaacgatacgaaactttactaaatttcgtaacgatacttatttcccttccgcanagctacgaatccttacggattatgtatttactcttttttagctctcgaagaagttatcaaaactcacggattgcgcaaaaatacctcttttcgacttccgcctcattacggaaattcacggatcgtgc

SEQ ID NO: 248816 - DNA, 309 bp, Glycine max
  unsure (1)..(309): unsure at all n locations
aacttggagtcatatcctgaattctaaagggttttattgtaaacttatgtaaaggatccatcgccatattcccttcattcgtgaggaacaacctaagaccatctagaatcccagggaaagggactgtatcacgttaaccgaaataaacttaataagcaaatccacttattaaggggattgtccaaagcaatcacttttgctttgatgaagctgttgcactgaattactaattantaatttgaagaaatcccaaaatagacatcacatgctaatcattctttnaacatatacattccttcttcttttctc

SEQ ID NO: 248817 - DNA, 462 bp, Glycine max
  unsure (1)..(462): unsure at all n locations
ttgaaaattgtttactatattttaatcacctcgtgaaaacattttctggcaacttatactactagaaaattaatcattgtaaaatataattaaataataacaaaattattatcacatcatcatttaacaccaacattttatggcaaaaaaccaaaatatcgaacaaagacttcaggaactaaaactagtcaattttttgttaagagcctaaaatgaaaactcaaaaaaaattatgaaccaaaaacacaattaacctgattnttttntaagccatgtttgacaagacatttcaattagcttctaagtttttactagctaanaaacttattttgatgttagtaaataatttttttaagtaacttctggcattnttcacatggtacttcaagtagatctttaaaatgctagcttacaacataaactttatattcatttcttttgccttgatattaataaatttta

SEQ ID NO: 248818 - DNA, 409 bp, Glycine max
  unsure (1)..(409): unsure at all n locations
agcttaaggcctgttgtcgtattcattatatattattgtttcanaagttgttcttttatcaagtccatgcaaaaacatctggatgcattcggtatttggaaagcccttcattgctcttattctcaatgttttttttaaaaaaatccttttgttgtgttttgatccacaaataagtttaaaaaatattggttgttgattctttccaaaacatgttatgttcaagaaaaattttctgtntgagtcccaaaaagagttataatctataactaaactaacaaaatatcaaagcagacataaactagtcaaaataaactagcgtaagtttttcaaacaaaaaatccataacaataaataaggtaataaagtatcgcaaattaataccaagtgatgaataaacatatagacaagt

SEQ ID NO: 248819 - DNA, 307 bp, Glycine max
tgtatagctcgcactaagacaccatagttctgcataatatggtgctacgtcgcatatacaacacaccccttgtactgatattattactatatatattacaatcttacttttgctgatcaaaaaaagaaatgctagtttgacccgtatgaaacaaataccgcatgaaagttattgtaagcaacccatggtgaaaatcaatccaagatcacaccattatctgtcctgtgaatagtagcttagctagatgcagcttttctctaaaggatagcgttatatatccattatcacatcaagctggggtagaaaa

SEQ ID NO: 248820 - DNA, 397 bp, Glycine max
  unsure (1)..(397): unsure at all n locations
tgcctttcttcatggctattcataggaggaagtttataaaatggggacaagaaaacattagctttcttgctcggtaagttatgaaaaggagtaactataatcactctatctatngttgacaatctaatgagactaaagacatggagattatagaagatgtggtgcatatagccaattaattacaactgtgcacaagcataaaatttcaacttaagatagttactatgtaccttttctaatgtagccttctctaggaagcgagaaactagtttccaaacactcacaananaccatggcatgtgtaacatatagcattntgctaaacgttctgcgtagtaagcctgaagttaacccataacccgcaaaaagtaaatatatgctctatttacttttcaat

SEQ ID NO: 248821 - DNA, 155 bp, Glycine max
tcctgtgtgtgctggtgccatatggactcaaactcacaggctgtgtgcttcataacccaccaagccattttcaactcggttcgatgtggggaccttcgaaggctgaatgagcacctgaagaacaaaggtgaacagggggtttcttacgtgatgtc

SEQ ID NO: 248822 - DNA, 465 bp, Glycine max
  unsure (1)..(465): unsure at all n locations
tgcaagctagagtccctagtaattattggtatattttgtncncnaagcgaatattagttgttaaatttcaattgaattatgttatatgatacacactgttaaagtagttgcattactattagactctcttatacattaattggtttatatgaactgggagaatgattatataattagaaaaacaattaaggataaaattttctaggtgagatttaaatctaacatgaaagatgaaattagaaagcttgaccattgtgtcaattaatgtcattggtatattgaaatatgacttataataaatgaatatatgctaataattgaaatatgacttatacactgtgtgtntaaagtgttgttgtttaatttttcacttctgagaattattatgatcttatttagtgaatttacaataaaagctaaatatatatnttttgtactgttagtacatactgtcatatacaatat

SEQ ID NO: 248823 - DNA, 185 bp, Glycine max
tcttctttaatgagccgagattcccctttaatcgctggctatgcacacctcgtcatcattctaaagcctgcattccacaataggttcttccctcctatcttcttggcacacctcttgaagcgctggccatgaagtcagactcacagaggcgtacaacaacctactctactctggcccttcattat

SEQ ID NO: 248824 - DNA, 377 bp, Glycine max
tgcagcttgtaaagaacttagaataaatcaagatctttcttgttcgtacatcgttcgcgtgtatgacatccactccacaaaggttgaagtagaggagaccttcaatccattacgcaacgtggcggacaaaaatgggcaattaacttgaatggtcattattgtcaatgcggaaggtattctgcgcttcactatccatgttcacatattattgcagcttgtggttacgtgagcctgaactactaccaatatataaatgttgtttatacaaatgagcacatcttacaagcttactccccacaatggtggcctcttgggaatgaagtggctattccttcttctaatgatgcatggacactttatcctgacccaactacaat

SEQ ID NO: 248825 - DNA, 320 bp, Glycine max
  unsure (1)..(320): unsure at all n locations
aatgctactcttaaaacaaaaatggcatacaacctcctccaataaaataaacatcaatgtaaatntagagcaaactcatgcacatacttccttacgaacattcattcgcacaagatattcttctaactaagaaaaatgcacccatgcacaatcaaggcaccttcgttacctagattatntatatgtactctcaaggtgtatttgctacctacatcacatgcacttcctttngctaaattacatacatgcatactcaaagcattttggctaccaaagaatgcatacgtgcacattctagtatttctaatacctatacatat

SEQ ID NO: 248826 - DNA, 301 bp, Glycine max
atcaacttgatcatatatcttgattttcttggaatcttggcttgaatgaacttaaaagcacttgatcctttagcatcatcaagacatcaaaacatcttgcttctacataggagtcatttgacttaatccatcaattgaaaaatccttcaactatttctcgtccttggaaaattctttttgcaagaatcagttgcttcttcctcactacgaggttgtgaaaacaagacaacaattggtacctctaagccctacactggggcaatgaaaggcactatgcataaacctcaagcgagcctagggg

SEQ ID NO: 248827 - DNA, 361 bp, Glycine max
tggcattaatactcgtaattcgtgagaagttaatggaacctggtgttttaccaagaactggcgtagtctcagtggtagagatgaaccaatataactttgagtctggtatttcttcgctttctctctatgttcaactgaccttaagtctgaattgattgtttagtcgtttgagaatatcttgtgttttgcaaacttgttttctcatcatctgagagttcttatttcaaaatatgttatttgttctttttaagggtttcttcttagatgaaacactctgttattttaagaaaaggttttaaaattacactaaaatcacaattcaacctcttcctttcttatgatatatgtctttacacatact

SEQ ID NO: 248828 - DNA, 445 bp, Glycine max
  unsure (1)..(445): unsure at all n locations
catgcaagcttcatctctccctactgtatcatttatattatataatgaataaagagaaggtaattgcggtatccccatatagatcacaatcatagaaaattaagacgtagaagaanaacaattatggcatataaagagtaaagagctaaaaaaacacatttgtatttgttcatctggggtaagcaaaatcaataaaaattatcaaaaattctttttttttcactaactcgtagttggggtagccagaccagaaggaaataaaaataaaaaaacaaaaaactttacgccctttataggataacttttgccatanaagtagtttaactaggataccataaaagaagtgaatttcatttatgattctnggttttccagtgaacagtaatatttgtggtagcaagacagaacaaagctagagaaaaagtgatgatggaaaatgaacaat

SEQ ID NO: 248829 - DNA, 116 bp, Glycine max
ctggcattgattataatatgtgaacgagctaagatgcgtacactgacttcataatttgataagcggttaataaattgaagaatcctctttccttctattgaagtacatttcatttc

SEQ ID NO: 248830 - DNA, 211 bp, Glycine max
  unsure (1)..(211): unsure at all n locations
actcttatgcctanaaatctcaaacagacttgaaccagagaagaaaactccagcactccttcaaaagacaatctgaaacttcttccattacttcatcaaacgatgaagaagagatgtcttatgatgttcttcttcagaactctcaaatgatttctcttctgtgcaaaaagtataaagaaaaggtcaaagcatttatttgtgaaaatattga

SEQ ID NO: 248831 - DNA, 302 bp, Glycine max
  unsure (1)..(302): unsure at all n locations
agtaggtgctccttaaacctnncattaattttttctttaccttctcttccattgttgtttctcatttttctccatgtatctcctcacatgtcttgttctaaatgctgttaacatgtttctttagagtttccactaattaaacttgctatagaaactaatttgattttctatggttcaaatttcttgttcttgttcttgaaccatgaattgtgttgagtttaagttcctctgagttttgtcttgttattttttgtggctgaaacctaaaccataaaattcttacaaaaaatattaaagtagaa

SEQ ID NO: 248832 - DNA, 433 bp, Glycine max
  unsure (1)..(433): unsure at all n locations
catgcaagctnttaacacttgtctacacagaaatttatttgtatgttaaatcccaattattcacataaaatggaagaatgtagagagaacaatcaacaattcctactaatttaatcccaaaatatacctatacatagtagttatcaatcatcaaaattaaaagctacacaaacaatcacaacaaataaatgcttttaaaaatggtgacaatctaaaacttcataaaatcttgataattaatcatagcaattgccactgtattgtggaacaacttgtgatcaatagacttggttgtatcaaaaagaatattttgactctaaattagaaataatcattgctcaatatgatgatacccaaactaaaatttattaagaaaattgatattctaatatactatagtcgcacaatacaatcaaatacatgatgcaccaaa

SEQ ID NO: 248833 - DNA, 69 bp, Glycine max
  unsure (1)..(69): unsure at all n locations
aatcaaaaaatgcgaanaatgatgaccctatggctgcaaactcgtcaatccgtgggtatggcttttgaa

SEQ ID NO: 248834 - DNA, 185 bp, Glycine max
  unsure (1)..(185): unsure at all n locations
agcggaaccgatgctacaacccgcaataaacttgggccgagacaggaacgcgacgggtttcaatcggaggtatagtcctcaagcctacccttatggttngcctncggacttcactcctcgtaccgctccagacgatttgagccaagcccctaccttcgaggggagcttcctcctcatgccgacta

SEQ ID NO: 248835 - DNA, 430 bp, Glycine max
  unsure (1)..(430): unsure at all n locations
atgtagaagtatgcatggcacaactttattatngttcttcaacacatacaagtgagcttgtaacaaatcttctacacgtggagtgatacatgcagtcctcttgaacccttaccgcccactctgtcgtcatggcgagacttaagaaggcatataggtttagccttttcaatgtagtctgaacaaaattcaatggcttcttctgcaatgtacctttcaacaatagatgcttccaaacgatgtagattctttgtataccttttaagatcttcatgtatcgctcaatcgggtacatccaccacaaataaacaagaccacaacacttgatttctctgaccaaatgaacaattaagtgaatcatgatgtcaaagaaagcaagaggaaaatacatctccaactggcacagtataattaccgcctcattttcaggtca

SEQ ID NO: 248836 - DNA, 210 bp, Glycine max
  unsure (1)..(210): unsure at all n locations
acatcatgcaaatttcgttcacggattgaattgaaaactcaatagccgacatcgtcgtgaagtagccccgactgatatttttcagctgacattgagcaatttttttttaaaaacgctcgttggccgataatatnttttttacggtagaggaaatttcttgttttggtgttgcataaaaaaattacaatgtaggtcgactatgtttttttg

SEQ ID NO: 248837 - DNA, 364 bp, Glycine max
  unsure (1)..(364): unsure at all n locations
tcacacctctaaacctcaccaacccatgacctaagcctcaccgacctgttctctaattattccttcaagcaccctcataaatcccttcatgaaatcattcagtttccatcttttgccaggacaaaacacaaatttgatggatactaaattatntttaccaattgataagaaccttagacattgtgtttcaatgtatggcctttgtgcacccacataaatcgcaagggtcttatcagttggtatatagcttttcaccatgcctcaggttctcagctacaaatgaacagcatgggtggtgatgctggcattgtattattngcttaggaccagtcaaagggcgagtgcatggccaacttggatggat

SEQ ID NO: 248838 - DNA, 66 bp, Glycine max
atcttttgccactcccttctagagaatgaggaaaagccccttacaaagatatgatcttcttggaca

SEQ ID NO: 248839 - DNA, 347 bp, Glycine max
  unsure (1)..(347): unsure at all n locations
tgagacttgggatgagtttgtgagtgattgtgaggtcttacaggtggaggagacatccccactacttgtatntctgcaatctttcatcattctcttcttttgttgaaaggaagcttcccagttatggaaagctaaatcctctgttgaatcttccttgtaggtacttgatgtaaatatctttctatctatctaatgatagtttgtgtgttctctgtgctatcagtatttcattctagtatgctcttaccttgatcacatagatgcacgcttngttagggtcattcaacaatggaaactggtctgattcttanaacttgataggacagggctagtttgtcgtactatca

SEQ ID NO: 248840 - DNA, 378 bp, Glycine max
  unsure (1)..(378): unsure at all n locations
tgatttctttggaaagaaccttttcatgaacaaagtgtaagttattttgatatgtttggtttaagtttcgatagagaaatagtgatgggaacatttattaaactgtaaaataaattgatcgaacatagagaagcttgcgacatgtatggaggttttcgcctccgaaatatcagggggtagccttccacaacgaagcacttaagattacagtctagccagtctgaaccgcaacggcaaaaggcgccagagacttgaggcaagagagaaagcagagcaagatcaatcccgctcagataccaagctgaagactagaatatgtaccttcctacgctatattttataatcaatcatgtcgannataaattaacagctatagta

SEQ ID NO: 248841 - DNA, 453 bp, Glycine max
  unsure (1)..(453): unsure at all n locations
acctgcggcatgcaagctcgactcgtcaattattatttcaattgtatttgtttaatggttagcaataaaaggtaacaagaaataatatagcttanaaaagaatactatctataatgattntatttgatcacaaatttggtatccttagtgtgctataaatagagctttgggttgcacgttgaaacaatcccaatatcacttctctattctcattctttcacttgtcaaagtttttgacgaatagaggatacatgtagagtcttcacactattgaagaatttttatgtttcaagagctcatcaataggtacatttcttaatatgtcatctgtttataatataacttaaatacaaaatagatccttttattctcaatgtgtgatttttgacaccttttttcttcaatagagcaaaagtganatgatgctgatgaattgtggagtaataatgcact

SEQ ID NO: 248842 - DNA, 450 bp, Glycine max
  unsure (1)..(450): unsure at all n locations
gtgacctgcggcatgcaagcttccttganaagaatcctagagaatttatatcttagctacacacacccctctaatagctaagctcacctccttgagatgaaaagctagagcttagctcacacacccctataatagctaatctcacccccatgtcagaatacatgaaaatacaaacaagtccctactacaaagactactcaaaatgtcctaaaatacatggctaaaaccctatactactagaatggccaaaatacaaggcccaaaagaaggaaaaacctattataatatttacaaagaataatggacccaaccttggcccatgggcaaagaaatctaccctgaagttcatgagaaccctagggccttctttagcagctctagcacaatcctcttggagtcttctatccaatacccttggggggtaggaatgcatcatcccctccccttgga

SEQ ID NO: 248843 - DNA, 299 bp, Glycine max
aaacttgcttgaatactgagtccacatgattgtttaatagcatataataactagtcattttgttgatatacctgaaccagaaccctctgtgttgttgagcaaactctacttataactctttacctattttggaaataagactactaacattacatagataaaaaaatatgaaaactacaaactttttgacatgcagacctttcccgaacttacttcagaatgtgaaatcaaactgagttgatgacacgtctgttacattattagaaattaaaggatttaagcttcttatcatagacatt

SEQ ID NO: 248844 - DNA, 305 bp, Glycine max
  unsure (1)..(305): unsure at all n locations
tgcggcatgcaagcttctttgagaaaactttcttggttatctatagcttanctacacacacccctctcataactaagctcacctccttgagaagcttccttgagaagattctaaagaagctagagcttagctacacacacctttctaatagctaagctcatgcacggtgcccctcattgccccagtgtaaggcttcgaggtaccaatcattgtctttcgtcatgaccttgtagcagggaacctattgggtgagaacttctaatctgcccctaggttcgcttaaggtttatgcatggtgcctttca

SEQ ID NO: 248845 - DNA, 238 bp, Glycine max
  unsure (1)..(238): unsure at all n locations
tgctgcaaacatctacaatatatctttctaacctcaacagtaaaattagccacaacagaacaattatgacctctccagcaacaagtacaatccaggtggaggaatcatcccaaccttaaatggtcgaatncttcacaacagcaacaacaacaacaacaacagccttattttcagaatgctgctggcccaagcagaccatacgttcatccaccaatccaacagcaacagccctagaaac

SEQ ID NO: 248846 - DNA, 324 bp, Glycine max
  unsure (1)..(324): unsure at all n locations
agctntaaaggcaattcctttcttctttctattattctcctcatgtagattcaatctcatcaattccatttcatgttcatgtaactatccaaacaaagtagcagagacatgttagaaagatctcttgattcagcaatggccattacctttggttgccattccctgcttaaacatctcacaactttattgacaagatcttcatttggaaatattttttctaaggatgcaagatgatttactatatgtgtgaatctctttcgcatgtcatgtgtggtttcattacgattcattctaaataattcatattcatgagttaaagtattt

SEQ ID NO: 248847 - DNA, 205 bp, Glycine max
  unsure (1)..(205): unsure at all n locations
ccccgacacaacgtcaacgaatgttgcaccctagatacaaaggcttctttgaatcactttgtaatgtatcatacatacgggcatgtgcttgctgaaaagactcttgtccaacgccacaaatcatagcctncaacgatctcctatttctacatcaaatgcttagattggcgctcactatgcatgtctatcatttaccatgccatat

SEQ ID NO: 248848 - DNA, 393 bp, Glycine max
  unsure (1)..(393): unsure at all n locations
tgattcattccttgaaagtgttggctaaatcttttatttttaaagaacaacactcatctcanagagttcatcatttccaagccaaatacacatttatactttntaaatatatttttttattccttaaccagtatccttatgaacaaggaggatgaggcaaaagagtgagggttgaaagaaatccaagcatgtcatgccagctcctggtcctcattggatcctctttgttccatttcgactgtcggctntgtcactagcaccgaattctatcattctgtataactggccagatttttgttttggtttggtttgatggcnaaaataaaatacttttattaatcagcaatagaaatatagcagagggctgcaaatattcaattaagctcgaataat

SEQ ID NO: 248849 - DNA, 296 bp, Glycine max
  unsure (1)..(296): unsure at all n locations
taggcgctccttaaacctccattaattntcaactntaccttctcctacattgttgttctaggaattggtcactgtgaattttgagctgaaacttttacttcattttctagacatctgtacaaaaaaaaaaaagaaccaagtgattcggataaaaggaaaaaaaataagaaaaatcatacaaattggcaagaaaatcaatgtccaaaaaagtgaaagggaagtgtgcttgttgctctggctcaaaaattattctttaattagtgcctattctagaccaatcttaattctaaaatttc

SEQ ID NO: 248850 - DNA, 449 bp, Glycine max
  unsure (1)..(449): unsure at all n locations
tcacctgaggcatgcaagctntcacgctctcttcttcttcttctaatctccatctacctttgtagtctctgctctacatctgagcatcgtgttcgtcgcactcgagcatcgtcacaagttctgcttcttctccttcgccaccatacctaggtatgtttcgtctccttctcgctgtcttcttctccatctaagctttcttgctctctntgttgtccatttaccttgaagttgtttgttctccatctgagaatcattttgtctaagctcgagcatcgtgttcgtcgcactcgagcatcgtgacaactctgtgcttcttctccttcgccaccatacctaggtatgtttcgtctccttcgcgttgtcttctccttctcgctggcttcttctccttctaagctttcttgctctctntgttgtccattaccttgaagctgtctgttctccatcta

SEQ ID NO: 248851 - DNA, 356 bp, Glycine max
  unsure (1)..(356): unsure at all n locations
ttcatttatntcatctcaagcaagtaagtaccatcttcattncaaattacctttccattgtggtatcttggagctttatttgttatgttctttgcaattttgtgagacaaatngtttgtgaatccgtgactcgaatgcttgattaggggctgcgatggatggccctaggcctatccttgatcctattgtagattggcatgtcgtattgttctccattcctcattnttacatgcttgaacatgcgcccaccaaccgttcgatgaaatgcctcaataaccatttcatgttttgtcttggaatntaagtgtgaaatgagtttatgcatgtatagccatcatttagaatgtgtgagtaac

SEQ ID NO: 248852 - DNA, 321 bp, Glycine max
ccatgttggcactaatctgtaaccttatcacaagacaatgagatgcactgcatagctcttccccttttttctctttggattcatatattgcacatttgaattaataaactatagagaagtgaatttgatctctctcccttatttcagttattaagtctactctcacatcagatgtcctctttatgtgattcctccgcatatcatctatctatatgttatatggatgtttactactactatatggcgagagcgaatgtatctttccctatcgagtaatgaagttcccaaacatgatcaaatgtgcactactctcctaaaccc

SEQ ID NO: 248853 - DNA, 220 bp, Glycine max
ctgcagctaaatttattatactcatgaaatttttttaaacttcattgttgggcaagataacctataaattttattttttaaattaaatataaatactgctgcaaaacattacatttccatgcgttgaaattattatcaggtatggtggaaaataaaatcactgagaaattatcttcaagtaccacattcaacaacaccatatggcatacaaatgtttgac

SEQ ID NO: 248854 - DNA, 290 bp, Glycine max
gaaagagagaggggggagcacgaaattgaaggaagaaaaaaggagagaagttgaactttgagttggtctcacaagactctcattcatcaaagttacaaaagtgttacacatgctcttatttatagactaggtggcttccttgagaagctttcttgagaaaacttccttgagaagtttctttgagaaaacttccttgagaaactagagcttagctacacacacccctctcataactaagctcacctccttgagaagcttccttaagaagattcctaaagaagctagagctt

SEQ ID NO: 248855 - DNA, 325 bp, Glycine max
  unsure (1)..(325): unsure at all n locations
ccccccnaacacgacccanacggagagaacccggctgaanactggaccgcggacgacaccccgcctacacagaaganngcgccacgaagcacgctgatgacgaacacacgtctgttaatattgttccaccactcgagtgagcacgtccttctgcccatccgttcgtggatcatacgccgagcttatgcgaaccttccccgcagtgaccttaaacaattcctgccataagtggcatatgaacaacgggcattgacctgacactaactacacggcatccatggatttcgtcatgatgccatcaacacaatgcacctgtgtacccgcg

SEQ ID NO: 248856 - DNA, 406 bp, Glycine max
  unsure (1)..(406): unsure at all n locations
gaggatgcagtttgtgttttacatggatgttggttcaaggtggtgaattgttggctgtgaccaaaatccatatgaaagtttattctgttatttttttgttttgtcctctgcttatataagagaagaatgtcctgtatttttaagaaataagcttccacttatatattgcattagtaataaaaagctttctatttttctctcccgtggatgtagccttactcaaggtgaaccacgtaaatctgtttgtgtgttctttcttattttttctctctttcaccttgctgcaaaactctctgtgtatgacatagctnntatgtagttctggtggtgtttttcttgttngctcttcatcattttcacaacatcttangtaccatatatcatactggtatatatatatatatat

SEQ ID NO: 248857 - DNA, 382 bp, Glycine max
gtcgcctgcggctgcagctttaacttatacagaagatgctttataccacttgttagacaagtggcctcagatatcttaagaagggggggttgaattaagatattccaactacttccccaattaaaaatctatttcactttcttttcaagttataaattcccttaacaatgaacttcttaaatattaattcacataaaacaatttgaatatgaatataaagcaataataaacaaaggagattaagggaagagaaagtgcaaactcggattatactggtcggcccacccttgtcctatgtcagtcccaagcaaccgttgagagtcactatctgtaattcttttacatttaaaacacaagacatcttctttggttaaattctttc

SEQ ID NO: 248858 - DNA, 399 bp, Glycine max
  unsure (1)..(399): unsure at all n locations
agcttatttcctctaacggagaagataatatttatctgttattaanaataaagaaatattattataaaagttaatgaatcttaattggtaaactaaggcacaaaatccttcatccacattgaaattgtcttgactagttagagcctctccaaattgggcctagtagactgatttggcccaattcctgcttttgagacgtactttcccattttttgagaaccttgtcctcaaggttacaaaggagtttgattttgtattcttcttcaactccaaggaggctaacaaataagtatttttattgcctgcatgcaagatcctctctttcttctctttttgatagacggatgaaaatacaggtgtcgacgtataatgatcttctgtgcaaatgttgatcatata

SEQ ID NO: 248859 - DNA, 382 bp, Glycine max
  unsure (1)..(382): unsure at all n locations
tatcaaacnnggaatcatagttctactaagacatgtttgagtgtttgggaaaaagagaggttctgaaaggcgggaaggaaaaacgaatttgagagcatgatagagcgtaaagacatatggtaaatgtaaaactgacctagtatatctctacttagaactattatactctcaacctattatttactctatttttctttattatattattttataaaaataaactatattttactcccaatcaaatgaataaattaaatattcattntattttataagaacatataattattttatttaccttacaatcattattttaattaataacaatatcttctcttatttattttaatacgaacatctcattattttcctacactctatt

SEQ ID NO: 248860 - DNA, 182 bp, Glycine max
  unsure (1)..(182): unsure at all n locations
tgttttctttgtgcatgggcataatgccatcactctatgtctagcaatgatnttattaagatgtccctacctttgagttctactaaaaattatcctctctcgagcgactaatctctaaaactgatgcatataaaaccttcatgtatttctactaaagagtaccctctttaagcgccaaaccc

SEQ ID NO: 248861 - DNA, 250 bp, Glycine max
  unsure (1)..(250): unsure at all n locations
gccacaggccccnggccccccccccccagccctacctatacctgaanccccccggcacgcgcgactgaaaccaaaatgcttaccaganggaaaaccgaaacgacggagaaagtcgcaaataatcgaaagggaggataaaaaccaaccaggcaatgagatagccaggaaaaaatgcggacccaagaaggaaacactaaagacaaaaaacgagggagggaccaaccacatatggacaagcgacccgaacaga

SEQ ID NO: 248862 - DNA, 506 bp, Glycine max
  unsure (1)..(506): unsure at all n locations
gtcgcctgcggcatgcaagccttatataattatatatataaaaacaaagtttgatttgatttaaatnnttttcttgagactggtttacttcagatgaaacaacacttactaaaacaaatatttcttcgtatgcatataattaatttaggtcagttcaaatgaaagagagcctatatattgaatcactttattcagaaaaaagttcgctcccacagctgattgtgcttgctcagacctggaaacaaattggatccactcaatggtcccctaattccattgttgtgcgtaaacattagagaaaagtgttcgtttctataaataaaaacaagaaaaggagcagtgattgtgttttggtgtattttaaacccaaagaatgatctcacattaagccagccattaaaatngaatcattctggcatttgtcgaaagcttctntcactagtggtgactagtggtagtgtagtagctaccatatgaacgcctttaatctactacttgtagatcac

SEQ ID NO: 248863 - DNA, 347 bp, Glycine max
tactcacattctccatttggatttatgtatggtcctataggccctgcacaaagaaatgtgtcaagtaagcacaaaaatccaaaaataagccacaattattaattaagcttaatcattcgcctaagaccaaaactaagttaaactaagaaaataaggatcaaagatatgttcattgagataagaagaatagaaaaatattaaactacaaatgctcaatcaataatttcatattctctatgtttccaatcaaaaaggggagtgagtataagaacatcgttaggagaaatatcaaatgggagtaagcatatcaagtcgcatatgcttatcaagaagctaacacaaaagcc

SEQ ID NO: 248864 - DNA, 280 bp, Glycine max
  unsure (1)..(280): unsure at all n locations
ctgctgacacgggagagggttgtgtaagagcttgggtttgagtgggggcccttgtggttgaacgggcgttcttttgtggacaacaagcttaattgatgttacgcatattggtangtgttgtgaggggttcgctggagtttccgtcacataagagtccaagtcatggtgtgggcatacctttccttctttgcccacttgctcaaatctttgctgttgtaccgcggggaacatatcaactttcttttaagccacttgatctctgctgaatctaactacaact

SEQ ID NO: 248865 - DNA, 332 bp, Glycine max
agcttggtaatcgatacacgcatactggaattttattattcataggagttttcagaaaacattctcaacagtcacatctttttgtgtggttcttgaatggctatcatagcctatatatgtgtgacttgagacacgaatttcataagagtttttcagaacaaaaaggtcttatcctcttatagaacaaaaaggtcttattcaaattgttctatttgaatcaatatttaagaaattcattattaagggaatttataacttgaatagaaagttaaatagaatttttaattagggaaataagttgtaatatcttaattcaaccccccccccttctt

SEQ ID NO: 248866 - DNA, 294 bp, Glycine max
tattaatgaataaccgggtagggtcgggtcgggtctgcccaacttctaccgcggacaacaaccaaacacaattccgccatttcgccactttcggcaccccgccacgaccgccatgactatggtgggcgccatcccaaacccgcaaggccaccgcttttcgtgggcgttttttgaaatccccacgagaaaccgcatggccgcatttaacaacctgggacacgaattccattggaataatggatgcggtaacacctgaggtcattattatttgtgaccatgaatatacacaccccc

SEQ ID NO: 248867 - DNA, 400 bp, Glycine max
  unsure (1)..(400): unsure at all n locations
gacctgcgagcatgcaagctcttcanaacatcgagtagcatattaagttttacacaatcattgccaaagagttttactctttggtaatcgattaccagaaggtagtaatcgattccagtagctagcattgttttcaaaactgatttacaaagctgtaatcgattaccatgaatatgtaatcgattaccaatgttttaaaacgttagatttcaaatttcaggagtcacaacttgtgtttaaacattttcaaatcattttaaacttgtataatcgattacacaatacttgtaatcgattaccagtgtttctaaatgttttgattttcaaatttaaacatgaagagtcacatctgttgacgtgtaatcgattacaccttgatggtnatcgattaccagtgact

SEQ ID NO: 248868 - DNA, 119 bp, Glycine max
ccacccccccccccaaacaaactccccctagaactcctggaactccacaaacaaccaacacccccccccaactaacccctctggagaagcaagccacccccccccaaaaacaacccccc

SEQ ID NO: 248869 - DNA, 314 bp, Glycine max
ggattggaaaggggagaacgacagttttataacaggaaagactgtgcacgtggctcactcacaaaaaaagaaaggtttctaattcaaaggttaactaaaattgaaagaaacattttaaaaacttaaaataaaacttctaaaatataatgttttaaaacacaataacatgaaatatgatggataaaaagcaacgctaagccaataatccttcatactaatacactctttctctttgctgaagcttctacgttcatgacgttgcttaatttggtggcgggtgtggaataaaataacacataacaacactttcccta

SEQ ID NO: 248870 - DNA, 118 bp, Glycine max
  unsure (1)..(118): unsure at all n locations
cccccgacaacaacaccgtacacacacccccccccccccgccctatgtgatgcccccccccncnccccgccccnccncccccccacagccagcttattacacacgccgcccagcccca

SEQ ID NO: 248871 - DNA, 339 bp, Glycine max
agcttgtagcacatgcgaaccacaatatctttatttcttatatccgatcgagtcccgtaatatatcaagacgctctaaattgaaaacagaagctctgagaagttcaaacgacacatagtttttactcggatgtccaattgtgtcccgtagtatatcaagacgctcgtaattgaaaacggaagcttcgtacaaattccaaaggcaataaatttttactctgacgtctgattgagtcccataatatatctagatgctcgtaattgaaaacggaagctcgttggaaattcaaaccataataaccttttactcggatgtccgattgagtcccgcagtatatcg

SEQ ID NO: 248872 - DNA, 279 bp, Glycine max
  unsure (1)..(279): unsure at all n locations
acatatttcatataagaggagaattcttatataaaactctctctcgatatacacttattntttaagtatgattgaatatgttagcaaattgcatcattaatatattataagataatatataataataatttgctatcgcacttatacttaaaaacacgtatgtaccttagcaaattctactagcatttgctaatgtataattctttttaatgtgagagtattaacaagttacaccattggtatattaatgtaagcaatggttttaaaatcagtctacta

SEQ ID NO: 248873 - DNA, 340 bp, Glycine max
  unsure (1)..(340): unsure at all n locations
tcacaatgggtggatntattcacttaagtcttgtctaatgcttatgacgttggatcatttaatgcttacattaaaagcacatatttcccgtgcagaatgaccactatgattgactttcgtatagagttcttcaacaaaaaaaccactttcccactaatcagagcatatatgcacaacaaagtgtgcctttcgatggagtctgacaaattttagaatttaagcttcatttattcttcatgtgattcgacaaatcctaggagaatgttctacaaagcacatctcataccaagattatgaaatgaagcttaaatgctacttcaaatgtggatcagatcatact

SEQ ID NO: 248874 - DNA, 325 bp, Glycine max
  unsure (1)..(325): unsure at all n locations
ctttgatagccctcttgagccttgtttccctttccttgttttgaagctcactacaagcttaagtgaaaaaccatgatattaccatatccttaagggaatttggagctgtggaattgttttgggaataagtgtggagggtttttgtttcattggacaacttgttttgttggccatgcttcatgatgtattttgggccatacttgatgtacattgtatattggttaaatgttggacatgctgaatgaaatgttgtttctcaaaggcaaaacaaaaaanaaaatttctaacaaaaaaaaaaaaagaaaagcaataaagttgagtgaat

SEQ ID NO: 248875 - DNA, 385 bp, Glycine max
  unsure (1)..(385): unsure at all n locations
agtcacctgcggcatgcaagcttctttgtagacctcgatcggtcatcttttcattccgatgtcgaccgtcattnntttcgatccatttcagtgaatgaatatttttgccgagatgggctatgttntcctggccgaataaatgggaaaatgccagtttcggccgaaacgaaaagtcggttgggctcgcacaaaaaaacctagccgacctacattntaaattttttatgcaacaccaaaacaagaaaacttcctgtgccgtaaaaaaaaaaaaaacattacatgacagcgagcgttttgaaaaacaaaattgcgcaacgtcggctgaaaaatatcagtcggggctctttcacgaccgatgtcggctattgagttttcaattcaatcc

SEQ ID NO: 248876 - DNA, 395 bp, Glycine max
  unsure (1)..(395): unsure at all n locations
gtctangaatggagtgcagggatttantccttattatgctgtaatcataatgcaactttttagactcaaattgttgagggatcaaggacgaagtttaaataaagttacgcccattcactcgagggatcttggtttggataatcttttagcataagaacattaagataacgttaaatagagaaaaatacatagcaacatcaaagtagattcagctgaacgacccaacgctntttacttgtctgtttttacttctcaatctctagatattttaaattatggttaattagggtttcatacaaaaaanaacttaacatttacttgctctatacaaatagttgctcatagaatctgtattntttgagtgaaacaagttccctgtggatatgaatactcga

SEQ ID NO: 248877 - DNA, 308 bp, Glycine max
  unsure (1)..(308): unsure at all n locations
cccacttggccttggtcctctcttccttggccttctcttccaccttatgtntgttcgatctcgctcaactactgagacaaactctttttggaccttagacaagtcttcaattcgtctttcaagatcatgccttccactcgtgactggtatctttcttctctctgaagtttaagctcactgttattgcctcacaaagctcctcggaacttgtttcggtcgtgttctttcttccaggccctcttggtttttgctccaggccttggcagggctgtgttgattctctaattcgcattctcctttcgatctga

SEQ ID NO: 248878 - DNA, 250 bp, Glycine max
  unsure (1)..(250): unsure at all n locations
aagttattgtcgtttgaattggctgagagcatcaaccttcaattcgagcgtctcgatatatgacgggactcaatcagacatccgagtaaaaagatattgtcgtctgtaatggctcagagcttctacattctatttcgagcgtctcgatatatgacgggactcaatcangcatccgatgtaaaagttattgtcggttgaattggctgagagctcaacattcaatntcgagcgtctcgatatgttacgggac

SEQ ID NO: 248879 - DNA, 346 bp, Glycine max
  unsure (1)..(346): unsure at all n locations
ctctgangccaaggaaaaagggtacccacaacaaaacatagcaatgacttctttctttctgttgactattctagttttctactgtataaaatatcaaataataatatttatttcttatttaaaaaaggtatttatttgcctctcgagaaacgatcatgtttgatttaaaaatgagtcagatcctagaatgaatattagtattttactatggtaaaacatgtaatccgagtctaactatnttttcatatttttataaataaaaataataataaaagttagtgaatgatttataaaataactattatacaaataaaataataatttatgaatataattataatcttat

SEQ ID NO: 248880 - DNA, 429 bp, Glycine max
  unsure (1)..(429): unsure at all n locations
agctaganatagaacaacggaagcttttgattattaaatggtcataacttttcacacggatgtccgattctggcaaatcacatatcaagacactcgaattgaacaatggaagctcttgagaatttcaaatggtcataactcttcacacggatgttagattaaggcgcatcacatatagagacgctcgaaaatgaacaacggaagctctggggaaattcaaatggtcataacttttcacactgaggtcttattctggcttataatatattgatatcctcgaaattaaacatcggaagctctcgagaaattcaaatggtcataacttttcacacggatgtccgattcaggcgcataatatgtcgagacgctcgaaatngaacaacggaagctcttgagaaaatcaaatggtcatactcttcacacggatgt

SEQ ID NO: 248881 - DNA, 405 bp, Glycine max
  unsure (1)..(405): unsure at all n locations
agcttgaatcggacctcagtgtganatagtatgactcatntcaatctctcgagagctttcgttgttcaatgtcgagcatctcgacatgttatgcgctcgatcggacatccgtgtgaaaagttatgaccatttgagtttctcgagagcttncgtggttcaatttcgagcatctcgtcatattatgtgcccgaatctgaccttcgtgtgaaaagttatgaccatttgaatctctcgagagcttccgatgtttaatttcgagcgtctcaatatattgtaagcctgaatcggagctcagtgtgaaaagttatgaccattttgatttctcgagagcttccttgggtcaattccgagcatctcgacatattatgtgcccgaatctgaccttcgtgtgaaaagttatgacca

SEQ ID NO: 248882 - DNA, 155 bp, Glycine max
  unsure (1)..(155): unsure at all n locations
cccccccccccctgtctgctgacccaccnnccncccgcggnccccctgacacactttttctcttaaggcgcaggcaatctacatgtataaatgtacagaacctacctgccaataggagctctaaagccacttctgaaatgctcttgacccacaac

SEQ ID NO: 248883 - DNA, 424 bp, Glycine max
agtcacctgaggcatgcaagcttctatttcaatgtcgaccatgttgatttatacgggactcaatcggacatccgagtaaaacgttattgtcaatttacatttctaggatttttcatttcaatttcgagcgtgtcgatacataatgggacataattggacatccgagtaaaaagttattgccgtttgaatctgataccagctctcgttttcaattcggatctcctcgatatattacgggactcaatcggacatccgaataaaacgttattgtcatttacaatttctcagagcttctattctcaatctcgagcatcacgatatattacaggactaaatctgacatccgagtaaaaaattattgtcgttcgaacttgctgagcgcttctgtttcaattctcagcgtctcatggacaccggacttaat

SEQ ID NO: 248884 - DNA, 470 bp, Glycine max
  unsure (1)..(470): unsure at all n locations
cattgtggacacttgcgatgtctactcccggcaactttctggatacatgagtagcagaacaagtggtagcattttgtaattaccactgacaaaaaaaaaatgtataagctcttcaccccaaaaagaaaagtcattttttcgttctattcaaattaaaaatttgtaaacagactagcaagtgactaaaacatgtgcacaccccttagatacttctccataagcacttatagaagaaaataaaaaagaaataagcttctctcaaagctaattttaacttctatataagctaatggaaaagctnggttcatttagtttctccaaaagctgaatttgacttngtgcataagcaaatttgggttatgggagaaatnttttcatttaccttcttatttcttctctatgagggtgttagaataagttataaaacaaacctatattaacagtgccagagcagcatcataaattgaatt

SEQ ID NO: 248885 - DNA, 299 bp, Glycine max
  unsure (1)..(299): unsure at all n locations
atgaagagcccatggttgatacatggacggagatgaaaaagatcatgacgacgccgtatgtgcccgctagttactcaaggcactctgaaattcaagctccataaactaaccccacgcaacaagggggttgacgagtatttcaaggaaatggatgtgcctcatgattcacgcaaatattgagaagatgacgacggaactatcgctccatttttaatggttgactatgatatccngataatgtgagctgccgagttgttgaatggatatttgtttacaaaccatccagtgggcacaattaa

SEQ ID NO: 248886 - DNA, 103 bp, Glycine max
  unsure (1)..(103): unsure at all n locations
acaacacgcagccccccacccgccctgactaactgaccccnccacgccccccaaaaagaaagggcattcccagccccagagcacaccaaaccaaaaccccccc

SEQ ID NO: 248887 - DNA, 443 bp, Glycine max
  unsure (1)..(443): unsure at all n locations
agcttctactntncttctctatagcttcctcttctgtcatcctagtcatatccatttcatattctcttaatttcccaaacaacttagcatatgtaatggaggtaagatctttggacttagagattgtcgtgacctttggttgccatgttctattgacggactttagtatctttacattaagctcttcttcctcaaacactttttccagggtccttaatatgattcactatatgagtaaacttcttttgagcatctccaattatttctccttgttgcatctagaaagtctcatactcttgaattacagaattcttccttgggttgcgacctgtaagaatcacgaacaagcgaagcctgagtgcgagattgtgttgtgagaaaattgtgagtaagtgaagcatgagtgcaaggttataacatgagagaatcctctagtgagtgaa

SEQ ID NO: 248888 - DNA, 422 bp, Glycine max
  unsure (1)..(422): unsure at all n locations
attctcaataattataacgggatgttctatctagttatgtgtaaggatctttatcctgtcaaataattctaaattacttttacatatgaattttaaaataattatttcaagaattagcaaattgtaattatatgacaattcgttattgaatgtcactggaaattaattntaattatttctatcaatatcataactccaattntcttaaaatgtgtatcattatggtctactgcaaaaataaaccttaataagttatccttaaaccaaaacacaatttgacatcaaattaatctaaaataatcatccagttgaacgattagttntaggcatagatgattaacgctaagtttgtttaaatctaanataagcagttctaacataagtggtcttcacaaaagtggttatttattaactagatacga

SEQ ID NO: 248889 - DNA, 313 bp, Glycine max
catcttgcattgcctcgtctatgcgtctgggctcacaatttaagatcaatgcagcattaccactatgatgagtccatatcttttttccacttactgagggtgaaccaatgggactatgttaaaagacacttatctcatcggaacgattctctagttacatgggcctttggaagcatagaaatgcatgtgttttatctggaaaataaacaacgctgactcacatgttggccattgttagacgggtgcacaactataccaatgatgttgttcccagctctgaaccacaacgagtaatatacaaatatgtaagact

SEQ ID NO: 248890 - DNA, 449 bp, Glycine max
  unsure (1)..(449): unsure at all n locations
gatgaatgtgaaacttgtgagacacacttcanagttcaacttctctctctctctttctccccttcaatttcatgcccccccccccctccctctcattcttttcctccattgaggcttacttagattgggaaataagggtaaagcaacaatttaaaaggaagtctacttcaaaatcttatggctctcactcttatacaaagaaagaccaaggtcaaggcatcttatggatgacaccttctaagcccaaagatgataaaaggaacgcaatagaaaaacaaccccttaaggctagtatgcaagagaatactagctctataaagtgatttaaatgtcttggaagaggaaacattacttctcaatgccccaccaagaacaccatgattatgaagggctaagacannttatagtatcaagatgaagctactacttcacctttctctagtgaaagt

SEQ ID NO: 248891 - DNA, 306 bp, Glycine max
  unsure (1)..(306): unsure at all n locations
ggaaccttcacctgacgaagacactaacaaaaacttatcttctgcttcttggacaaagnatgacaagctaggggcaagtaaattctcttcccatcagaccttggatgcaactgtgatcgtatccccatctcacctagatcttgacaggtatttgagccatccttcgtcttgccttgaatgttaagaagtgtcccaatcacactgtcacatacatttctctccacatgcataacatcaatacaatgtctaacgtctagatcagaccagtatggaagatcaaagaaaatggacctcttcttccatatg

SEQ ID NO: 248892 - DNA, 402 bp, Glycine max
  unsure (1)..(402): unsure at all n locations
atagatggagctgattntgagcaactaaaccttttgctcaaagtacctagatagtacacattccccttgtaatttggatctccaataacatttaaatatatttcattatcattaacagaagtagcagtgttaggggaaccctgtgtgaaccaaggttttaaaaatctattnttagaattagctcacatttgaattaatgggtgggccagttccacaacttataggtgtgcaggtcttacattctggattagaagatagaacactagtagccaacaattagatagtggtaataatgcatagctaacgtttattgccatggaaggatatntgaaggatcatttggctctggagattcacaacgatgaagagaagagaagacgagaggataacaactgtgtggag

SEQ ID NO: 248893 - DNA, 401 bp, Glycine max
  unsure (1)..(401): unsure at all n locations
tgcagctgcaagctgtactcgctatgtgaccagcagnggtgtttgctatgtatgtcatgacctaacttcatgtaagtaatattgttgttggagcagcctatgaatttcttctacgaatgattggcaaccttagaagatgtacacagtggaaaagtgaaaaatttatcccctcgcaagtgtttctatgtatacgttcattagtttctacttcactttattacctcttttcctacttggtttcttttatgattttagacaaatctttatgctaggattttcaataaaagagtcttaagaggaaatccgaccttatcatatggggagggttctaatcacaagtatcggttaatattggctgatatgccttattactttcctttctcggagatgctgctgcaaat

SEQ ID NO: 248894 - DNA, 361 bp, Glycine max
aatttgcatctgtcgccagactctgtggtttatgctcctctgccaaccaccacacagacctttgcccttctgtgcaacaatctgaagcaattgaacagcctgaagcttatgctgcaaacatctacaacagacctcttcaacctcagcagcaaaatcagccacaacagaaaaattatgacctctccagcaacaggtacaatctcgggtggaggaatcatcccaaccttagatggtcgaatccttcacaacagcaacaacaacaacaatagccttattttcagaatggtgctggcccaagcagaacatacgcttctccactatatcagcagcaacaatagcaacagccccagaaacagcaaac

SEQ ID NO: 248895 - DNA, 392 bp, Glycine max
gcaagcttctagagtaagtaggcgcgctgtacaaatgctcttatatgacaatatgcagtaccattctgggggaccctttttatgagcattttgagaaccatcagaatattcattctcatgtttactgagaatgaatccatactcaatgaattcttctgatgaagttcaaattgatatctcatcctggtgtagttcagctttgtcactcttaacacttattcatagcttcaaatattctaaaagtaattactttagaaagacttagtagaaacttagttattggtgctgtagtgttctatccaaggtcaggttgagtggtataccttaagttttattctaatgtctacataatgcttctatggaatgtccacaatcaacacttgcatttctta

SEQ ID NO: 248896 - DNA, 315 bp, Glycine max
  unsure (1)..(315): unsure at all n locations
gacacgtcattgttacttccatgaatattgatattgtatcatgcttaattatatgcattttcttattctgatcattgtgtgttgcgtgattatttcttccatgcacgtacatgattcctatttgttgtgagagtgaaatgatgggcagcaacaccaactgaggtggagctatatttcctttctttatctttatctttgctagtctgctatactagttttattttatatgttcgagtcttaaatgtgtaacacatagaaatagaaacgtttgctaatcgcttangaattccttgctgtttcatggcattccttttg

SEQ ID NO: 248897 - DNA, 289 bp, Glycine max
  unsure (1)..(289): unsure at all n locations
tattcgttgaccacagagtggtacttggagatatgtcgctggcgttaagagaccttggggacatcaggtggggtgctatttcncataaccaagctagaccaatccccactcaacctcggcatagttcgtatttgagaacctgtgacgtacctcacaggcgagcttctggcagtacaccgatataagaacaaagaccacanagcaaggaggctcgtgtgctggctggccagctatggatcttgagtgatatctggaatatggcctctggtcatcgattaaaaagggtgtg

SEQ ID NO: 248898 - DNA, 452 bp, Glycine max
  unsure (1)..(452): unsure at all n locations
acgtcaagaacggccgaaaccttcgcgaaattcttcacggaaaacgttacggaaacgtttcggaagcgcctccgcttagattttcttcacggaaacaatttttccaagcaaattccaaagagagagaagtgcctaaggggctcaacccttttcttcttcactctctccctatttataccaaacaacgggaggtggttgccgcccagctcgnccaggcgagccaggttgcttcctccagaagcaacagccttctggaggaatattctggagggcccaagtgggcctgcgtgctatttgcacccccatttttactaagtacaccccnctctgcttctctttggtgattctttttcgtacagctacggaaacttacgaatttcgtacgatacttgtttcttttcgtactgtaccgaactctgcgatacataatatnccttttgacttacgatgta

SEQ ID NO: 248899 - DNA, 381 bp, Glycine max
  unsure (1)..(381): unsure at all n locations
tagcggcttctccaatgtttctatgaaggactccgtnacatggagagaagtatgatatatgctgccagtggtggagcccttggagacatgacccctgctcgagcnccaaatttaactgagaagatggcttcacacttcccagacatttatgccagaagtgatgctattgtcacttaaagagtgcatgaagtacccacaaattcatcttcatcacccgagactaagaagctcgaaggctaactacatgccttggtaacctggtacccaactggcctgaataaaaattgcaccgtcgcagactctgggttatgctcttaccaccacaacataccttgcttttgtggaaatatgagaattgacacctgagctatgctcaacatt

SEQ ID NO: 248900 - DNA, 477 bp, Glycine max
  unsure (1)..(477): unsure at all n locations
gctaataaggcatttacaactagattatattacttctgatttcttgaagcaagtgtttatgggatatattacatccagtccaataatattttaaaaaataaaatagttaattctatctttatcttatatctttgaagattttactgatggctgcacaagttaccttngtaagcttgataaggcatttcacaactacatcagagaacttctgatttctggaagcaagggactcatttgatgctggtgaaggccacctgtatgaatctagtggccgcaaaagattgatcaagacaacaaaggatgaagtcctatctgcattattctgtattgacaaacactacttactaaaatagctgcaccggaatgttcttcagcatatatactgacatctgctgaatgcctgaacgacggggagagagacacacacagagttcctaccacaatcttagcataatacatttaaggctctaacaattg

SEQ ID NO: 248901 - DNA, 305 bp, Glycine max
tattgagatggaaggaatgatttctcttgtgtatcattgcacagcttgtacaattatttatatacacaaaatctaaatccatctcttaagaaagtcgatgaaaagctgtatattttccaatatgagatcccaatgatttgattctacggtgatttctttctgagaagattatgaagacatacaatctgctttgtagttcgcctgtatcctaacattgccaaactcgcaatcaccaaaacttcatgtcaccctttttctttctggtgggactcttcttacacacacccacacacacacagatgctt

SEQ ID NO: 248902 - DNA, 306 bp, Glycine max
aaaagtcgtgactcttagaagaatctcataaacaagtcacttgaagaaatgtgactcttataaatgtatatttcaaaatcagtcactagtaatccattaccatcaaggcgtgatcgactacacatcaacatatatgattcttccttttgaattttgacaattaacacgcttacaagatctcgtaatccgataccagtattgcgtaatcgattacacacgtttaaaatactctaacactgtctcaactaagctataactcttaaaattcgaaatcttaacattttaaaacactggtaatcgatacta

SEQ ID NO: 248903 - DNA, 478 bp, Glycine max
  unsure (1)..(478): unsure at all n locations
agcttgcttctacactttatatatgctcaaaactcnttaaccactctattacccccaccaaggatatccaacaaggacattgcaccccccatgtacatacacaacatacaatgtatgaaacatggacaccatcaatgcactgaccgtggattactaaagattctaagccatctccctccaaagatgcttaaaactctttaaccactctatctccccaccagggatatcaacaaggtcattgcacccnccatgtacatacacaacatacaacgtatgaaacatgggcaccatcaatgcactgaccgcggataataaaagattctaagtcatccccctccagggatgagtaaaactctctaaccattatattcccnccaccacggatatccaacaagggtactgcaccctccatgacatacacaacataacatcatcacagtgcattttcaacatcatcaacatttcatctcaacatcat

SEQ ID NO: 248904 - DNA, 343 bp, Glycine max
  unsure (1)..(343): unsure at all n locations
agctatacatgtntcccttgatgagtctaatgccattcttccaaggaaggattttttagatgatatttcagattccttagaagatacacatattcatggaaatgactctaaagaaaaagatgaaggaagcaatgaagattctcgagataatggagttagagccaataatgaacttccaagagaatggaaagcctcaagagatcatccnctcgacaacattattggtgatatatcaaaaggggtaacaactagacattctcttaaagattatgcaataatatggctctngtatctatgattgaacctcaaaatataaaagagccactagtgataataaccggat

SEQ ID NO: 248905 - DNA, 281 bp, Glycine max
tcgagtttattgaaacaagttgttcaatagactgcaaaaccttctcttttttgtctttattacgattgaataatgcaccaagtttattgttattgctgatgtgcatagatgttgacagggctgatatttggtcttttgggattaccgcacttgagttggctcatggccatgcaccattttaaaatatcctcaatgaacgtatctacatcccgtggttgttcgagacaatgtctagacacatgttacattggaccgatgaagttatgtgaataatttgaata

SEQ ID NO: 248906 - DNA, 465 bp, Glycine max
  unsure (1)..(465): unsure at all n locations
gcttctttgagaaaaacttcttgagaagctagtgcttagctacacactctctctctcataactaagctcaccttcttgagaagcttccttaagaagattccttaagaagctagagcttagctacacatacctctctaatagctaagctcacctccttgagatgagaagctagagcttagctacaccccccctataatagctaagctcacccccatgacaaaaaacatgaaaataacaaaaaaaagtccttattacaaagacaactcaaaatgccccgaaatacaaggctaaaaccctatactactagaatggccaaaatacaaggcctggacgaaggaataacctattctaatatttacaaagataagcgggctcatacttagcccatgggctcaaaatctaccctaaggctcatgagaaccctanggccttntcttggatctctagcccaatctacttggagtc

SEQ ID NO: 248907 - DNA, 477 bp, Glycine max
  unsure (1)..(477): unsure at all n locations
cgttccaattaatttcacaatggtgtattctattacaagaatttggtaatcgattaccagtttgtttgaacattgaaattcaaattcaattgtgaagagtcacatcctttcacaaaattgatttgtgtcatcgattacaatgatttggtaatcgattaccagtgataagttttgaataaaaatcaaaagatgtaactcttcaaatggttttcaagtttttctaaaggttataactcttctaatggttttcttgaccagacatgaagagtctataaaagcaagaccttgacttgcattttaaaaattcattcataacaattattacaatcctttacaatctttgaatctctctgaacatcttcttcttattcttcctttgccaaaagctctctaaagttttctggttctccaaaccttgaaaacaaaagtgtgttattcatctttntcattcctttctctctttgcaaanagaattcg

SEQ ID NO: 248908 - DNA, 372 bp, Glycine max
gtgctcgcgactggtccatttcttcccttcgcaactcgagttcgctattgctaccccatagagctcggcgaaatttatcccggccatactcttccttgcgagccctcttggtctcttgttcaagggctcttgcggtaattgcattctcttcccgtaacccggcacactccttccaaaatgtgtgttgcggccaacttgaacttttcctcggctaatttcgcctttcctaactcgcttatgagagcttggacttcttcgtcctcttccggtgcttcaaaactttcttcgctgacgactcttaacttggtgagccaatctaaacctcgtatatgaaacttcagccattcatgatagccaccaatgatgccatta

SEQ ID NO: 248909 - DNA, 435 bp, Glycine max
  unsure (1)..(435): unsure at all n locations
atagcaaaagtggttagtagaggaaaacaatgtaagttaactgtgagtaacgtgattctagtgcatatatgatttacctaagcagttcacaataacatgcatcatgaagttctgaaatgaactataactagcacatagtaattcaaactgataggtttgacaaacattgatgcattacttattgatgcctcttgaaattgttacagctcgaaaacgagcaatgactaatctaatggcttactccatcttttatggttgttgttgttattcttgttgcataagaaggaaactgcgtaactcattttgtnttggagggagggttgttaattgaggttattgaagagaggctntgatcatcatacaactacacaagggcgcaacaagaatttaatatccgactcatatttcaaaatatattactgggttaattataaa

SEQ ID NO: 248910 - DNA, 139 bp, Glycine max
tgccttcctctatcttcagattgcggatgcctctaacagctcctttgtcaatgattctcttcatgcctcttaagtgcagatgtccaaatcttcgatgccatattctgacttcatcttctttggaggatagacatgtgga

SEQ ID NO: 248911 - DNA, 303 bp, Glycine max
  unsure (1)..(303): unsure at all n locations
atccattccttctgttgagcagcttctggagagggtagcctggcttacggcccaaccttctctttacagggaagatgaaggtcccacagcccatgtaccacaacatgtagaggatgagtcatccgaggccaccattctaaagccattcatcgtagaggaggacgcacgtgagacacaggttagacatgaagttgctgccactcctgagagatctcttaagggcacttcacagccccctgcaccagcggtggacctatcntngcctcagcatgcagtagacccctcacttctatctagagatcc

SEQ ID NO: 248912 - DNA, 312 bp, Glycine max
  unsure (1)..(312): unsure at all n locations
ggatgatggcgaactcatctggcgaccatcaagagcacacncacgtggtgtcctctcttgctccagagacttcaggtgcggctctcgcgatgaagcacaatcctggcatatccctcgattggaccgcacaagaacaagccattctcgaagatggactctccaaggttggttcttacttttgctcttaattctggttgtgtctgatttgagtgtctttttcttcctctggagatctgcgtgcttcttctttttgggtgtgggccatatgtaattgcccacacttatctttgtgtcttatgtggtgtcatgtgt

SEQ ID NO: 248913 - DNA, 346 bp, Glycine max
  unsure (1)..(346): unsure at all n locations
gggagcctatccaatccttggttcggactctcagccacttatgatagcccgcgatgatcccattactggcttccctaagctctctgtcctttcttcacgccgcatnccatgccttgcgaactccttggagtacccttgcattggggtcactgaacacccgtgtaatgaaaggcgtgatgctttcgtctaatggcgctcctctcatggggtagccaagctgtcttatggcgaggacgggattataattaatacaaccccatgttctcatctagggaacatttggacatccttcgcatgaagatacaatcctgattcttccttccttctagcgaggggaaccaataac

SEQ ID NO: 248914 - DNA, 366 bp, Glycine max
  unsure (1)..(366): unsure at all n locations
aatgcctctaacagcacctttcgcaatgattctcttcatgcctcttcagtgcacatgtccaaatctttgctgcnatattctgactccatcttcttctcaggatagacatgtggaggagtaactggttctttgcggtgctcatacgtaacagttgttctttgatctgctgcccttcattagaactctcctcttctcactttgtaccaacattctgactctgtgacacttacattgaatccttcatcacacaactgactgatgctgatcaagtctcgagtcacgtccttcaccagcactactttgtcagactacgaagtccatcatggactagctttcccattccgtgctctttcctttagagccatc

SEQ ID NO: 248915 - DNA, 309 bp, Glycine max
  unsure (1)..(309): unsure at all n locations
accccatgagcatggctgncaaactctacagtcaactcgtagactcttaccagtttaagagtttacttggtccctgcgagtaaacttggatgccaactcattttgtgcagacacggagcagactcgtgtaaactcatgagtctggcccaagtcacatgagttcagctggaaatctttttngtaatacgacatcgctttgtgcccactgctccactctggttcacggatatttcttgtttgatctctgtctctgccctgttcttcattcacggtgagtttgagagtgcgagaccagataacatgcgacac

SEQ ID NO: 248916 - DNA, 215 bp, Glycine max
cgagctcctgtcagtcaacacataaaaggaaaacaagaccacacagcaacgaggcttgtggtggctggccaactgtgaattctgtgtaatatgtggactggggcctctggtaatcgattaccaagggtgggtaatcgactacaaggcttaaaattgacgacaggaggctaagatggtctctggtaatcgattaccaaggggtgtaatcgattacc

SEQ ID NO: 248917 - DNA, 338 bp, Glycine max
  unsure (1)..(338): unsure at all n locations
tccncctcattaagaactagctccttcttctctctattgnccttagttgaatacacctttgtttggttctctatttgggtcttaaccctctcatgccacttctttaccaactctgacctaaaattcccttctttatgtataaaagaagtgtcaagtgggacgggaatgaggtctaatggtgttaacggattgaacccatagacaacctcacaaggcgattgcttggtggttctatgacaccccctattgtacgcaaattctacatgacgaagatactcatcccaagacttatggctgccctttacaagagcccttatcagagtggataaagacctatt

SEQ ID NO: 248918 - DNA, 296 bp, Glycine max
ttatgtctatggcactcttgcacatatttgcttcattgctgagatccccatcaactttaacattcttcagttcatcaactggtgcaattccagtcactgctctaacgtgaagaactttggcaaaagtgcgagccaatctgctcttgcttggtgtcactgctgatggcttaacagattccatctgcagaaacattacaatgttgcaaatgaaggtgaaaatagtgaagtattcaagtgtttaaaaagacaaacaagggcaataaagccataacaatggtgaccatgatgagtatgtt

SEQ ID NO: 248919 - DNA, 327 bp, Glycine max
  unsure (1)..(327): unsure at all n locations
gcaaaaccaacaacaacagaataattatgacctttcaagcaatagatacaatccaggttggaggaatcatccaaatctgagatgggcaagtcctccacaacaactgatgcaatcctaccccgtaagggcattggatagaaaactccaagtagattgngccagagatgcaagagaaggccctagggttcttatgagccttanggtagatttcgggcccatgggctaagtacgagcccacttatctttgtaaatattagattaaggtttcattatttttgggccttgtatctagggctccataatgtaggtagggtaccctagaaatat

SEQ ID NO: 248920 - DNA, 249 bp, Glycine max
tcggcacattcgtgatccgtatgagcatatagattgtcgatccgcatgaatttgttttttttctttctatataccaattgacaatctctattgggcctaatcgaacttgtgtctcttgcattattaatagaacactcaaaacaactgaactattagactcattatgttattaataaataatatatctatgtataacactaaaatttctaatttatatttaatgtacatgtaaatttatataactaaatt

SEQ ID NO: 248921 - DNA, 259 bp, Glycine max
  unsure (1)..(259): unsure at all n locations
agcttcttgagaagactctatctcttcaaaccattttgaaaaggcatgaagggcctatatatatgtntgtgtctgacttcaaaaagcaagagagagatattccaatagaacttcattgccaaatgctctctcaacaactcttgggcaaacacttgcaaatatatagtcttacaaagatagtggaaaatntcaactgggtttctcgaggattggatccccacctctctctctcactctcccccatccctcctcctcctcc

SEQ ID NO: 248922 - DNA, 412 bp, Glycine max
  unsure (1)..(412): unsure at all n locations
ccgcccattcccttcaccaccactcccaaccaacgacactcatcctcttataccagtgttcgcgttagacctcataatcaccgtcacaaatccaatttcataaacaacagattgagcccactacaaaacattatcgcgggtagcaaacacctacaatgcaatccacacaagtgtactccttactgcattcatcacacctaggtctctgtcggtaacaataacttcacggagggcatcacgcgctagaaaaagaccctggaattgttctagaccccacaccatattattcacacgctctatctncaaataggccaaactagcagagaatgtactccccgtcggtgcacaccacacaactcaacaatacgagcctgccatgttcgttcatacgactatctatacaaatccaaat

SEQ ID NO: 248923 - DNA, 321 bp, Glycine max
  unsure (1)..(321): unsure at all n locations
gaatatgtctactttaccaaacacaaccaccaaagagacattgcctaaacgcagacagaaggtacatatggcctaaaacctcacaatctgagctaaatgaatggcaattatattatagatgaatcctctgcaattgacactgattcactgaacaggaaacttaccttcatncctcttcacactctccaatgtgcacaagctccatggttgggccaatcgtctccatagccacagttctagtgaagtggtgattgcgacgcgccatccctcccatagcgaaacacgtacgcatcttcacgacgtggctggtgggggccaaag

SEQ ID NO: 248924 - DNA, 212 bp, Glycine max
ccgcaggaccacagccagcaccccacaggacaaaaagagacgagaaccatcaaccccccacgaacccacacactccacgacccctacacgaagcaacacaacaaatacacaatcgccggacgacccaaagcccactcacaaaaaacaaagaccaaaaccccagccccccaaaaacacaggaaacaaccctccatcacgccaaccaacccccc

SEQ ID NO: 248925 - DNA, 359 bp, Glycine max
  unsure (1)..(359): unsure at all n locations
catactctattaaaactattggntnttacgacacactaaccacatcggtgcttctaaaccaatgtggtataataagcagtgacaacttggtaattataaagttagcaaacaaagacggtgatgtacaaacccatctttgaattgtggaatcatgacttcgatgatcttggtttcatgaaactcgtcattgttggcgcaacattatagtcacgtgccttgaacaacactcatgtgactcgaacaacactctcatgacctttgaatactgagttgcgtgccctagccttcgtcactcttttcgcatcgccactcagctctccccttctcagtcatcatgactctgacttacggtggtcata

SEQ ID NO: 248926 - DNA, 401 bp, Glycine max
  unsure (1)..(401): unsure at all n locations
gcttaagttgcaacctaacacgcacacagacgccattaattatctaaganaatattcaccacaaatcatactcatatcccctgagtttttctataattcgaaaacaccctcacgtgttaatgtaatttgctcaaatattaaaatacacaaactttctctcttatctgattttctctttatctctctttttttcccatcatatattcgcatcacttatcacatctatcactctctctctcttcctagcttctcctatctctgtgttcctcgcagccatacaccttaaaattatgggctctaaatatctccgggttcaaaagtctattacaatcgacatggtaagcacctacctantatggaaagcagccctactcgaaaaacgtgatgcattatcatatact

SEQ ID NO: 248927 - DNA, 310 bp, Glycine max
  unsure (1)..(310): unsure at all n locations
gcttagatgaccgcntgataaataaatccgaaagttcttctctgtgattgcaaactcgatcctcttgatatctgtcaaattgattctcttagagtatcatatcatagtataaataatacaccaaaaaattaatataaacaacgaattgctaattctgcgggctgtgatttgtgaaacaacgttgtactattaaatatgcatggtgcacgtggttgctgcgcaatgccatcaaacatatcaagtacaaggtgatcaaaacgaattctttgatgatcgagaagactgccgacaggcattgcactatgccgat

SEQ ID NO: 248928 - DNA, 234 bp, Glycine max
tacaaaaatcaacgacagcgtgtggatgaatgaaaggaatgtgtctgtatatgaacgcaacggctcctcatcggtgtttttctccctgccttcagctctacgttttcttctttatctacacatccccatcttgtctctccaattactcacttcaacaccactccaccctgagttcttgcaatctccacccaagcatgactaagtgactatgcgctcagcgtcgtctccatggct

SEQ ID NO: 248929 - DNA, 339 bp, Glycine max
ccccattgtttctcctcccagcctcactacaaagtcgggttttgttatgatctttgtgatccaagtgccaccctttatatagattatttccttacctctttcacaccaactaatcattttggtaaatatgctttcaaccacactaaaatgcgcaagcacttcctatctagctggcagctggtctctttcttgtagctgccttaacttaattgttttctaataaaaacctaacaattcatcaactaaaacagaagatatttccaattaattctttattctaaagtgctacttttcaataagataaaaaatggaaaatatatatgctaagaaaagtacaat

SEQ ID NO: 248930 - DNA, 239 bp, Glycine max
ttctgacaggcttgaatgcaatcaaggtttaccacacaagaattccatatcaataaacttagggtcgataatggaacgagatgagacaagattggagtaccgcttctgctgttcatcggaagaaaacactggggaagaggacaatgagggtggaattggtgctgtggatgccctagtgccttcagaacgatgagctcttgaagccgaagcggaggcggaagaaccctttcgttctttga

SEQ ID NO: 248931 - DNA, 263 bp, Glycine max
cttgaactagcttaatggcgatgatactcgtcactttgttattatgctagctattcaaaatgagccaaaagttttgaataaaaatcactattaacacaagctacatcctaaatggagcacagacaaaatagtgttttgatttacattatggcatgatttacacaaaaatggtggaaatctcgaacttaactttaacaaaccaaataaacaactaaatgaactagtgttaatcatcgagcataatgattatattttaacatatc

SEQ ID NO: 248932 - DNA, 425 bp, Glycine max
tctgagtcacctgcggcatgcaagctagcttgtggggcttctatggaggctggatctattagcttcaatggggtcctttaatggtgattttccaccatgaagatgcaccggaagacaaaggacaagatgtgagaggaggcgccatccattaaggaataagccatggaagaaggagcttcaccaccaagatgagccttggataagaagcttggaaggatgccttaatggaggaaaagaaagagggagagaaagagagaggggggagcacgaaattgaaggaagaaaaaggaagagaagttgaactttgagttatgtctcacaagactctcattcatccaagttacaacaagtgtttcacatgcttctatatatagactacgtagcttccttgagaagctctcttgagaaaacttccttgagaagct

SEQ ID NO: 248933 - DNA, 408 bp, Glycine max
  unsure (1)..(408): unsure at all n locations
tactcaagctctctgaatatcaatatctgcaacacaatatttatattgttattcatgacacgaactaatcaaactaatgaatctaatgcttatatactctacttgccaacccttaatgactgtgacaccctctaccccgacatatatataaatgaataacatataatggtgaacaaaatcacatgagtaaaaggcttacatccacctcaattaccaaataacactcattaacaacatattcggctcacaataacgccgtcaaacattacaaaacatatttgctaaatcagcgatgtgacatacaatacactaacatcatacacatcacataaaaacctatatcccaatatcacactctatcacagcgtcgtgtcncgacgttcttcagcacaatattccttaaagcac

SEQ ID NO: 248934 - DNA, 470 bp, Glycine max
  unsure (1)..(470): unsure at all n locations
agctttgaactaaataatcattagaacaagcgtgcatatattacacatgctatcttgataccattgaatgaattattaaaatgatacatctgataaggtcttgtctcatttgcatgagagctttaggagtcaatctcttaactaagagtccccacttcactctctaataggtagattctataagaagtgtgtcataataaactctttagtacatgcatgctataagtccattaagaacaaatgtttagccttccacttttatttactttatggtctaaatacttttaaacccttgggatgcatatttattgttaagtgcttacaataattttgaaaaatntctttcgtatagatcacatctacacaaatttataaaatataaaaccatctcatattccattcatgtataccaaaattagtttgatactcccttccgcctctatataaagccaaattaaagtacggctaat

SEQ ID NO: 248935 - DNA, 448 bp, Glycine max
attcttttgttcctgaatgtacaaccttcaaattgtcgctcgttcccctctatcttttctgcaaaaaagacaatcaatatcaaagaaaacatggatgaagtcctaaggatgccatgtacatgtgtatttctgaagatatagtatttatattccatcaaacatacattgactgttgattacatgtaatacaatttttataacatggttgccccaaatcacaaaagcacaactaccaatctttcagagtcctttggttacattgtcttgtctccttatgtggtggggttttgcttaataatattatacttttgccttccaaaataaacttatgactgactctcttttcattaatcctactttcgatgttattggataaaagatcatgggttctccacctgcttcccactccctctctctctcttctctcctacttccgacgcattggctt

SEQ ID NO: 248936 - DNA, 240 bp, Glycine max
gtcagcctaagcactaggaacaattccacttcgcttcatattctcatacatctgaaacccttccctttgaagtccttgcttgaaaaacccattcattaacacactataagtatgcgggttgggaaccaaacccaacctattcatcttgcaaaacaaattctgtcgcagtataacatttccatacttggacacccataatcaaagtagtgtatataaaacattctgagacaaccaaacttt

SEQ ID NO: 248937 - DNA, 251 bp, Glycine max
cctcaaatccagctgcttcttgctcaccttttccctcagaaaatgaaatctagtctcaacatgttttgatcttccacgtgctaccggatccatggccaaactgatagaagacttgtcgtccacatacaatctaactggcctctgaatttccaccttcaattatccaagcaagaagcccaacccacaaggctggacatgtagcatagcaagatgctatgtactctgcctcacatgaggacaaagccaccact

SEQ ID NO: 248938 - DNA, 376 bp, Glycine max
taattacacaattatctttgagacaatgactaatttattcagtagtctctgctttaatcgactaccatgtgatataatttaacacttctctttctataagcgtttcagaagtgaacaagaacactttaatcgatcactttgagtatctaattgactaccattgctctgagctcatttaagggtttgggaagaccaccttaatcaattacaaagataatctaattgattactccattgaattaatcgattaccttgcagacttaatcgataaaagcggataaacctgtttctctataataaccacttgtgtgtcttctaacaatcttgaaaaacaatgaaaaagcttataatgagctaaaccatgtgttgtatcact

SEQ ID NO: 248939 - DNA, 213 bp, Glycine max
  unsure (1)..(213): unsure at all n locations
acaaaacagtcgttaaatgccttgattttacaaagcaaactataaatctttagaatttatcttaccttggtaatttcaacaagttgatctactccactctcaccancgaatagaggctaacaacaacagaaattattataattattgcataaatatgaatntaaatatagccgaatcaacctattaaaagccaatacctgccagcatagtcac

SEQ ID NO: 248940 - DNA, 328 bp, Glycine max
caagccaaagaactcggaaatcaacacagttataacaatggagtagcaagatataagtatcacagtattaaatccaataagccaaactcataatcaaggaaataatcaaaccagaattcaaataacataaaatgtcaacaacccacaaaatatccaagactgaaacacaagaaaaataagcaaagtacttagcataataatgtaaattctaagaaactaaaagccaaaatacacggcttataaaagataaataagcagaatctaaaatctaagaagacgaaggacgtggtggaagaacaaaactctgacgaatgtatccgacatcctc

SEQ ID NO: 248941 - DNA, 380 bp, Glycine max
  unsure (1)..(380): unsure at all n locations
gggctcctcctctgcgtccacgctcttgcgactgttccaccctctcgatgatagctcctcacggttcgctatccagtgatttgaggaaggccaccatccttgctcttcactattcatagttggctccatccagaatcggggtctgtcantggcctccttctttctccatgttcatcagaatctatctccctagatctcactcagtgatttcgagtgcccgctctgataccaattgaaattctgataccaatgccagatgtcgtacaggatgtcacgacatcacgctctagaacatgcagactatatttgagagtatgaacagactaaacaggtaaataacacacgagaactgtaactcagttcggtgcaacgtcacctac

SEQ ID NO: 248942 - DNA, 375 bp, Glycine max
aaatgtttgtaaaccataagatatagaacataagcaagactcccactaaactaagatactatcaggaattacacccatatgaacagtgtgctcatgaaaaatctttaagtgtcaaacatttagtaagtggataagctagtatggaatgagtccctatatgttttatatagatctgtattttctgaattctttatttaacaataaaatactttatgtcaaaaaacttttacttggttgaatcctcaataagaccgctaagatattgtcccaataaacatatgatgactacttaatgttggcaacaacaggcaagccagttacaataatttacgagtcataaattctagtatggtgtctcatagcaaaaaatattaa

SEQ ID NO: 248943 - DNA, 424 bp, Glycine max
  unsure (1)..(424): unsure at all n locations
agcnttgatgcaacatctggagaggcttatgatttatcgagattatgcgctccatgagaggtnggatcaaatggagaatagagatcataatgaagaacaaatgatgagaagacggaatgatggtgttcctacacaataccgaattgatggtattaaactcaacattcctcggctaggttttttcgttcgagctcaaccgaagttgtgtttccgccgacaccggcatgtgttcatttgattggcaaggaaaacatcatccaacctcggcaaaaacaaatgcaggatacaccgatactgatctgaataaatgctagccgacgtctgccggataaatgaccgatcgatgttataattgaagcactaccgattacgctgacngaacattctctaatagatatactcacatattattcagggattgata

SEQ ID NO: 248944 - DNA, 278 bp, Glycine max
  unsure (1)..(278): unsure at all n locations
gtgggaacgtgctcacatatatggggcaattttggtttgctttcttgcttgatcacgtcgaattacgggtttgtatgggatggccctacgcctataatgcatcttggaacaatgggacattgtccccgttctcttgctattgacgcctaaacgcgcgcccactaagtgttcggtgaaatgcctnaatgacattagcgcgtgacttttgtaaggaaacaactcatggggcattttggcttgtacatattttctattcttggaatatgtattcattcccg

SEQ ID NO: 248945 - DNA, 359 bp, Glycine max
  unsure (1)..(359): unsure at all n locations
gatagtgtatgaagcctgtgccaaggtaggcaaaccaaatatagttctcaacacanaaatgcagtaacatcatagagagtcctagaactactgcacatagacttgtttggcccacccaaaacacttagcctgtgtgggtagagatatggatttgtgatagttgatgcattctctagattcacatggttttatttctttctcataaggataagtctttcgaagcatttagaaagttttataagacagttcaaaatgaaaaacacaattgaaaatagtctctgtacaagtgatcatggcggagattcgaaaaanaatttctttaaaaccttctttgatgaagatggtatcccctataaatt

SEQ ID NO: 248946 - DNA, 331 bp, Glycine max
  unsure (1)..(331): unsure at all n locations
cctacaaagtccttcggattcattttatgtgtttatttctatatgcgatgagatgaaatgaaaaggctaggacttgtgttaattgcttataatggaatgagcataaacacttgagcttgagtgaaacaatgactgtgtgactttggttgatgatccttccttgatatctgtcattctcaatagcttatttcagttgtgactctaatgcatatgttcctatctttgaaaagttgcatatttgtgaaaagcaattgattgaagcattccatgatattcatttcatatgattgatctttttctgtgaaacanacaccattctgattgaccactg

SEQ ID NO: 248947 - DNA, 418 bp, Glycine max
agcttgagaatgttgaatttggcctcaaattattatgaaagtttgatacaaatgtaataaagcatcaccaagcaaaatatttatagtaagaaccatttatcaaacaaaataaattataaaccatcataagataaggcatatcaaagtatgaatgttgtatgaataaaagccaagaaaaatgatattagaaacaaaaacaaataatatgcagaaagtgtactacacgattaacacttattttagacacttgtaaccaccaataaatgaatctgccaccaaagtagtactcatccataaatgcagtccaagaccttaaagacaaatattaatttcacccattatgtcacaacttaagcttccatcacatcactcctatagtggaagatatattttctactttggctgctttatactatac

SEQ ID NO: 248948 - DNA, 237 bp, Glycine max
actcttggactaagcacgacgaagactctggaagaagatgagctctacacgtttgctaagtgcaccacttcatctcactaagcgcaccacttcaattcatccgctaagcgagaaaggtgcgctaagccaaaaatcactaacgtgcactaagcggtccataagtgggctaagtgcacgagcacgaacaaagccacctatttaagcctaaaatcagatttagaacaggagtttggacta

SEQ ID NO: 248949 - DNA, 368 bp, Glycine max
  unsure (1)..(368): unsure at all n locations
catggaagattcgcaagatgtggaacaacaatgacgtatccaaatggaacaattcctcacacagggtgctcaccgaaaagaaagatacagacaaaagcttcataatatgctatgaatgcaagacacctggacatttcaagacacgaagaaatactaccagaccaaggaaaagaaatgtctcatgagcacctagaagatctgaactacacctcttctaataaatatgtagaagaaacaaacctatgccagatggtagacataatctctgaagaatccgattcagaccanacgggtaacggaaatcttaatgatcctgaatctcttataaaggcttatcatgaactactatcaaacttatccattcttgc

SEQ ID NO: 248950 - DNA, 337 bp, Glycine max
  unsure (1)..(337): unsure at all n locations
agctcttatgtcgncataaatctcatgtagtactatgctatgtgnagaaatagatcctgcatggtaatggtgcacagttaattggtgcttgactacttgaaaggggtactctacgacaaggaaacatgacaatccctatgtatggctntagggatcttagcccccgaatggaatatggctttagggtgtattttctattttgcgcttacactttttacactctatcttaattacaaaaaaatcctattctatctctattttctctactttcttcctctaaaccaaatacacattgattatttcctttctcccttcttggactgcaagtgagacccct

SEQ ID NO: 248951 - DNA, 383 bp, Glycine max
  unsure (1)..(383): unsure at all n locations
cacaacatatacaattctgaatccattattgaatataaggcacctaccacatacctgccaactacgggtttgacggtctttgcaaatctcacccatgttgttggatcaagaccatacttcaccgtaggatcagatatttttctgaccttcattgtcaccatagacaacattagaagtcaatgaccacttacattgcctctatctaactgcgactgttgacatcaccctnttttntgcatcctcacgtccacggatgtcaaacttgcactcgacaacaaaacgtgttatgtaacagtaagtaaatgactcctttaaaactaanttacaaacaaaatcataagcatgcgtgtatttataaccctctaccaacatatcttnccata

SEQ ID NO: 248952 - DNA, 411 bp, Glycine max
  unsure (1)..(411): unsure at all n locations
tgcaagcttgtctcaacgtntatgcgagacagagactttcatgttatccatcttcagcaagtaccaagaagaattaaatctatccatggcccatgagcacaaagtggcggatgagtatgcccgagtgtatgcggaaaaggaggctagaggaagggtgatcgactcgttacatcaagaggcaacaatgtggatggaccgatttgctcttactctgaacgggagtcaagaaacttcccgattgctggccaaggccaaagcaatggcgaacacctactccgccctcgaggagatccacggacttctcagctattgtcagcatatgatagacttaatggccnatataattaggaaccgctaggaagttcgtattgtcactcacatcttgactagttataaactctctaaataaaa

SEQ ID NO: 248953 - DNA, 340 bp, Glycine max
accattagctaaaagagtttgaaaaacgtttcaaactgaatttacaacgttccaaatattttcaaaagggtgtaatccattacaatgttttggtaatcgattaccagtgcccttgaacgttgaaattcaaatttaaatgtgaaaagtcacatcctttcactcaaaagctttgtgtaatcgattacacttatttggtaatcgattaccagtgtttgtttctgaaaaatctaaagatgtaactcttcaaaaaggttctgactttctcaaatgggtttaagcttttctacaattataactcttatgaatggtcttcttgaccagacataaagagtctataaaa

SEQ ID NO: 248954 - DNA, 318 bp, Glycine max
tctctaacaatccaccgcatctttatctttgatgatgccaaacttgaattgccattcgagtgcatgtggagagtcttgagagtacacattcttctttaaaaacatacaagtttttgaacactaagagaagtgtccaaacatatcatcatcaccattacgtagagctgtatatgaatgtatgtatgccatgcactacttcttcctaatgcaatgctaaggcaatgtttctcccattttggaaaacaggccaaaaagcacaactactcatagagaaaaatagacaacatatcatctgaaaggcgaaagatcatacattca

SEQ ID NO: 248955 - DNA, 263 bp, Glycine max
actgtctccctaactaaaaacctatttaactctttactccagttatgaactcccttaatgacaatcttcttaaatattaattcacatgaaacccttcgaatatcaatatatagccactctaaactaaggagattaacggaagagaaaatgcaaactcacttttatactggttcggccacacccttgtgcctacgtccagtccccacagcacccgcttgagagtctcactatcttcgaaattccctttacacgctctacacaca

SEQ ID NO: 248956 - DNA, 307 bp, Glycine max
catccggacgtgaaggagacatcctcaccacttgtatttttgcaatctttcatcttgttcttctctttgttataaagaactcttcctcgctatgcgaaagctaaatcctctgttggatcttccctgtacgtacctgatgcaaatatatttctatctatttaatgatgtctagcgtgttctctgtgctatctgcttttcacttcactatgcctctaccttgatcacgtaaatgcatgctctgttacggtcattccacagtggaaactggtctgattctaaagttcttgatactacccggctaagttgt

SEQ ID NO: 248957 - DNA, 263 bp, Glycine max
atcaaatgtaataaaaaaaataaagcataaaatatggtctcaataataaaaagaaatccttgtcaagttacaagataaatttaaagagttataataatataaacatatattttaccacctaaagtaaaacagaacaaaacaaaatcagcaatattttacaactcgcggatatatatgcttttaaacctcacatccacacaccccttcttttcaagttagaaagaaacacattttgataaaagacgaatcaatttatttttcct

SEQ ID NO: 248958 - DNA, 275 bp, Glycine max
ggagactttataatatgccagaataaaatgttgtgtcttgaatcttaacccaatgatatttactttcctcactgcatatcaaaactgatatctttatttggcatggtgttccttcacttccccataataagcatttcttcattatgtaatagcttgaagctgggcaactcaaattgaagtcgagattgcaagaggaggaacaagctaaagcagcattgatgggaagaattcagcgactaaccaaattaatcttagtttctacaaacaatgcaatg

SEQ ID NO: 248959 - DNA, 242 bp, Glycine max
  unsure (1)..(242): unsure at all n locations
gcgacccgtccagctcacggacgatgagtatgccgatttcagcgggagatagttcgccggcggtgggcatcactggttacccncatggccacattcgacccagacatagtcctcgaattntatgctaatgctcggcctacggaggagggcgtgcgacatatgagatcctgcgtgaggggtcagtggatccccttcgatgcggatgctattagccagctcctacgatatcctttactactgga

SEQ ID NO: 248960 - DNA, 295 bp, Glycine max
tgattgattaaatattggttctaacaacaagttgtgatacgatccttggaaagataatcttttcacaactctattcttttgtgtgatttagaaccaattcaccccggtcttggcttgtgagttccatcatcttttttaattggtattagagcttcatcttgaaagttgctcaagatcacaatcttttaaaacaaatcactttcaaagagggtatatctctcaaccgaccttcattatttgagggagaacatcttttgttctggcacaaaagaatgaaaatttttattcaatcaat

SEQ ID NO: 248961 - DNA, 183 bp, Glycine max
  unsure (1)..(183): unsure at all n locations
gccctctctaccccacgcctgagagaccatacaagtntcctaacgatctctaattatgtgggccatcaagtctatcatatgctgacaatagccgagaagcccatgaatctctctcggggcggagtacgtgtctgccatcgccttggccttggctaacaatcggggaagttcttgactcccgtt

SEQ ID NO: 248962 - DNA, 63 bp, Glycine max
tcttaagaaagcttctgactgaagatatcataggaaagcctgtttaggaagctacctagtctg

SEQ ID NO: 248963 - DNA, 238 bp, Glycine max
  unsure (1)..(238): unsure at all n locations
tgactttntggacacgtcgctcctttatatttatacaatctgatactttaaactcgggacggataatgatgtcacgcactagacatagatccgccacatccgagaacggataattgccaacgccttctaccgctctcagcctctctctaagtagatcaatctttcccttgtcttttganagggaaccagttccttaacacgtgccgaaggagaccggacgtggcggactaatgttggt

SEQ ID NO: 248964 - DNA, 160 bp, Glycine max
  unsure (1)..(160): unsure at all n locations
atttgagaattacttaaaattagtgagaacaactgtttccgtgaagaaaatccaagccgaggcgcttccataatgcttncgagacgttctcgtgggtgatttcgcgaagaattgcaaccgtcctttcaccgttttggttcgttcttcgatctcaaccggt

SEQ ID NO: 248965 - DNA, 92 bp, Glycine max
ccagaaacctaaacaccaatctctctttcacacccctcttgccaatcctaacacgcacacgtacaaagagagaattacagcactacaagcca

SEQ ID NO: 248966 - DNA, 424 bp, Glycine max
gcccaatcattagtttctctagttttctctcgaaacatatgttccaattcaaatttgtcaaattgagctaataacttagatgcatatgaaaagaattctggtaaattactcttgatgcattaaatttatgagctaatcgatcgatgactaactcgaaatcctctctaatcagaacgtgtgttgcacctaaattcaataacgtttctaaaacaagaattaaagccccatattctggttcattgctggaacacacaagttgtatttccaaaaggattgtcatacgtgtattatctgtagaaataaaacgacacacatcctgcaccatgcatgttcactcattgaaaatatatatatcaggttgatcctattacatcaatattctagttgaagacatcaagaatctctacattggcttatacttatg

SEQ ID NO: 248967 - DNA, 352 bp, Glycine max
  unsure (1)..(352): unsure at all n locations
acctcgagatttgtggattctgagaagcctggaagctcattcaccaatacacaccaacggagttaacattctttaattcccagattctgcaacaaaataagagatgacgcgtcagattaagctgttaattaagctctgctgaattgagagacatatgtcaaaggaagaaacatatttactttcacttcatgccataatttttccactctgctacatgacaagtctaatataacaagcttctcagcagacaattgctctggcaagcatgtcacacggtaatgcatncaatgaagatatcttaactcatttggcacacattgaagcccttgtggaagagaacgagaattattac

SEQ ID NO: 248968 - DNA, 296 bp, Glycine max
  unsure (1)..(296): unsure at all n locations
tatgctgacaatagccgagaagcccactgaatctcttccggggtggagtacgtgtttgccattgccttggcctttggctaacaagccgngaagttctcgactcccgttcaaggtaagagcaaaccggtccatccacatggttgcctnttggtgtaaagagtcgatcaccctctctctaccctctntttccgcatatatntgagcatactcatccgcgactctatgctcgtgggccgcggctagacctaactcttcttggtactcggcgatgatagctaacatgttggtctctgtct

SEQ ID NO: 248969 - DNA, 175 bp, Glycine max
  unsure (1)..(175): unsure at all n locations
acgccaaagctgagggaccatacgcagccctgtgctgaccatcctcaagagataaccaagcttgcaaaggtgaaagctnaggtttctgaagctaacggtgtcatgatggacaatattgaacacgtccacatgcactactcacctgcattcaccttacgacgacaatatcatacaa

SEQ ID NO: 248970 - DNA, 322 bp, Glycine max
acccacgccggcgtcgaacagacggcatgggcatctccttcctttctttctgcgcctgttgcctcgattcttttggcgtctacgtttgtggaggacacgtcatcaaactttgctctctttacatccacctcgattctttccccgcgaaacaccacactcgcacagctggacggcatgtaacccactagcctctcactagacaacaccggcagagcgcctaccatcatggtgatcatccttctctaaccatgggaggagctactcgcgccgcaactcctccctcgtggcatatccttaacgcgtcacccctttttgacatatc

SEQ ID NO: 248971 - DNA, 317 bp, Glycine max
  unsure (1)..(317): unsure at all n locations
tggtcaactgcaataataacctcacacggcctcttgtttgtttgcgttcacaagtttacatagtgttgcttatgagctttttactctattttcttggctcattgttctaatgaaacactgcacgcccaaacgcctcacttgaagaattggtcgattctatacgtgttgctccaatggacaacgctgaagatgctcttctgccttctgaagaaaacgtagcaatgtaaccatattactaatctttggatgaacacaatataacattattcgccttcactctntgtaaatttttccttcaattatctactataatccat

SEQ ID NO: 248972 - DNA, 280 bp, Glycine max
tgcataaacactcctaatcatcattgtcgcatgtgtttcatggaaataatgtaggacatctcctctatcccccaaccgctggccaaatcctgacatgtatcatgaccagccgttctacaagccttgagccaaaatcctaactcaccataatccttaccctcggaagaaaacacagagagaaggaaaatccccaatccaagacagggagaagacacaaaaaaacgaagagagaattcccactccccgaaagggagaagacccccaacagaaagaaaattcc

SEQ ID NO: 248973 - DNA, 367 bp, Glycine max
tgatgatgctcaagaagaatctaacaacgctgcttcaaatgataagcatttgcttcaagaataattcaagattgcttcaacaaacaaagccttgtttcaagattcactaaagaccaagccttgccttataacaaagtgctttcaagacatgcaacgctctggtaatcgattaccaggaagcgtaatcgattaccacaagacacggtcgagaaatagctgttgaaaaaggttctgaatttgaattttcaacatgtcatcgattaccatatgtctgtaatcgattaccagcaacgaaactttggaaattaaattcaaagtcataaccttcaattataactgtgtatcgatacaccacattgaatcgata

SEQ ID NO: 248974 - DNA, 332 bp, Glycine max
  unsure (1)..(332): unsure at all n locations
agcttgttgacacgcggagatatacgtcatcttttacgctcacaagatctgtcatactcaaatttgagtcacgctgacgggcggaaatacccgagtggttatccgtataaacattcttttttgttgtctgtaagacgaanagcctgatagcaagcagagactaacgtcgttttctgcgcccttcgtcaatcgcggccgacaagtcccgttgacacgcggagatttacgtcatcttncgcgcacacaagatctgtcatactgacatttgagtcacgttgacgggcggaaatacccacatggttatccgtataaactttcttttttgctgtctg

SEQ ID NO: 248975 - DNA, 309 bp, Glycine max
ccatggaacaaagagcttcaccaccaagatgggccttggataacaagctcgcaacgatgtttcaatggacgaaaagaccgagggagagaaacagagacgggggagcacgaaattgaaggaagacaaagggagagaagttgaactttgagttgtgtctcacaagactctcattcatcaaagttaccacaagctctacacatgcttctatttatagactacgctagcttcttgacaacctttcttgagaaaacttccttgagaagcttctttgagaaaactttcttgagaagctagagcttatctacacac

SEQ ID NO: 248976 - DNA, 208 bp, Glycine max
tgaactcccgcccgagtgggtatataggaatccaaatccgccgaatcactcatgttatgatctcctacatcctaggtcttcccgttccttcatctggcttatgttctccacgtagcattcacactgaatgactctatgaaattacgtcgctacttccacatggcacgggtaacgtaggagacatctctatttgtcccggcgggaatcc

SEQ ID NO: 248977 - DNA, 325 bp, Glycine max
  unsure (1)..(325): unsure at all n locations
gaaaacaatattgagacaattatgaattccattgagttntccttacttgatcaaacaaccaaaaattcagttatttcaactacattaaatgatctttcacaatggtcaagattatccagtttatggccgcttctctatggtactagttgttgcttcattgacattgcttcattaatacgatcacgattcgactttgatcngtatggactagtaccacgatcgagtcctcggcaagcagacctaattttaactgcgggcacagtcactatgacaatggcctcttctttagttcgatatatgaacaaatgcccaacctaaatatgta

SEQ ID NO: 248978 - DNA, 263 bp, Glycine max
caagattcatcctctcttcaaaatgttataatgcaactcaccagggcatctgagagctgacttggccaagtttcacgaacagaatccagagatctgaacagacaactctcaataagaagacagccaagaaggcctacattacttacgaagacaacaatatggactcatctgaagatcagaaaataaagttgtaaacctaagtctgatggccgagaattatgacagcgatgaagaggtaacatcttcctgacagaacttatcta

SEQ ID NO: 248979 - DNA, 322 bp, Glycine max
  unsure (1)..(322): unsure at all n locations
gacctcatttctaccaactacaaatcctaagaaaactatattatctacacaaaaggtacacttctctatattggcatagatagtgttcttcctaagaactataagaacttgccttagatgtnctaagtgatcatctaggctcctactatacactaaaatatcatccaaataaaaaactacaaatctacctatgaaatcccttaagacatgatgcataagcctcataaaagtgttttgtgcattagtgagcccaaaaggcatcactagcccttcatacaaaccacacttggtcttgagagcggggtttcactcatcatcctct

SEQ ID NO: 248980 - DNA, 456 bp, Glycine max
  unsure (1)..(456): unsure at all n locations
agctctgagaggaagagcacactctagaaaagtatgttgtcngacaagtgttacaggatcgagaccagagagcaattaatcaaagagaaatgaggaaccttagcagaaaaatcaatatagaaagatcacatctagacaagaaagaggaagcttcaagaggaagaacacacaactagaatagattactttcgatcggttaattatcttatttttgttatgattattctgaaactattgattttgcaactacactttcaagttgatttacctcacagttgttaattatgttatttcttagacttgaattctagttatcttgaaaattagcttaaaattttctaatttaactcaaagttgatttactcacctttactatggagtcggttcatttttcttcttctcctttcagcatccatttattattgggtaagcccatgcatgtgtttgtaagtcaac

SEQ ID NO: 248981 - DNA, 146 bp, Glycine max
  unsure (1)..(146): unsure at all n locations
gagagataatgaaaggaattatttaaattttctcttgaaaatgaacaacaatacaccgtgcaatcatgggttggttgttagaaaatcaatttcaggtgttagacacatntcaatctaatcattctctcaaaacacagtgaacaaca

SEQ ID NO: 248982 - DNA, 265 bp, Glycine max
caaaaacatacaaagtgttcacattagaggtagcgacacgcctacaaggtaccttaacatcctgatgcaaatactgcaataactatttaaacttattatgcaaataccttactatcacgatgccgatactgccctatgatgtacaacagccatcataaatatcatctcacataccacactctgaacaagtcttctagttcttaatctcccactatgatcaataataattctccaacgtcaccattagaacgcatattcaaaatac

SEQ ID NO: 248983 - DNA, 269 bp, Glycine max
gatacaaagatgatgatctaacaatcaagactgagttcaagattgaatcccgtacactccaaggatccagacgaaagctgaattcaagaatccagaatcaagtttccagattcacgttccacgaatcaagatccagattccagattccagattctagactccagaatccagagaagacttaatcccgatacgtattaaaaagttttttcaaaaactgagtagcacatgacattttctccaaactttctaccacagaggttctactctct

SEQ ID NO: 248984 - DNA, 140 bp, Glycine max
gaaaaccctcaaaatcggaggggagagagcgtatattggataatcactaaacaatcataaactaaatcctctaagaaaatgacgacacatgaagaagcggccaactcatgaattacactacccattacccaaattcggta

SEQ ID NO: 248985 - DNA, 336 bp, Glycine max
gagaagctagagcttagttacacaccgcctctaataactaagctcacctccttgagaagggtccttgagaaactctccttgagaagccttcttgaaaaactctcttgagaagctctcttgagaatattcctagagaagttagagcttacgtacacacacccctctaatagctaacttcaccctcttgagatgagaagctagaagttagctatacacctcctataatagctaagttcactcccatgccaaaatacatgagaatacaaaaacattcctactacacagactactcaaaatgccctaaaatacaaggctaatactctatactaataaaat

SEQ ID NO: 248986 - DNA, 318 bp, Glycine max
  unsure (1)..(318): unsure at all n locations
ctgacattctaacttgtttcaacgttgcgtaacttttaattcntttcttatcgataaatgcttacgagtctacttacatgatctacttgatttgaacgctcactcataatgagatcatgattctctatcttcctaaatattcattatagacttaatttatggtgtcatctttaacttaccatcacttatgactatcacccaaaanattatcacccagattatattacctattacttctcatcaaactatctctgactcgaataagcctcacttgttaaaaaaatcctaaatcaaccaccatcaagtattcatcatata

SEQ ID NO: 248987 - DNA, 397 bp, Glycine max
  unsure (1)..(397): unsure at all n locations
agctntgcgagattcctcacggaaaacgttactgttacgttncggaagcgcctcggcttagattttcttcacggaaacaatctttccaagcaaattccaaagagagagaagtgcctaacaggctgggatccttttcttcttcattttctcccctatctatagcaaaatacgggagatgcttgccgcccagctcgcccaggcgagctcagctcgcccaggcgagcagggtttgcttctccagaagcaaccgccttctggaggaatcttctggagggcccaaatgggcctgtgtgctatttgcacccccacttctacttactacactcccccctgtcttttcttgtgatccttctttctttaagttcccgacacttacgaagttctgtaccgtcctttt

SEQ ID NO: 248988 - DNA, 285 bp, Glycine max
  unsure (1)..(285): unsure at all n locations
ctgagagaccatacacagtttcttaacgatttctaattatgtgggccattaaacctatcatatgctgacaatagccgagaagcctatgaatctcctctgaggcggagtangtgtctgccatacacatggccctggctaacaatcagngaagttattgactccccgtccaggtaagagcaaaccgatccatccatatggttgcctcttgctgtaaagagtccatcacacttcctctatcctcttcttacgcatatacttgggcatactcatccgcgattctatgct

SEQ ID NO: 248989 - DNA, 407 bp, Glycine max
  unsure (1)..(407): unsure at all n locations
agctnnganatcatattaaaatctgcgcttattctcttactcaatcccaccaattgacttgtaaggttaagattgctcaagctctatatgctctatctaagtcatatctctagatgatgttggactaaacacactccttctacgctgtactttaggcaactccctaagacgttgcaattaaggaggctttcttatccctccctctcctcattctcaaggctatatacgctcggaacatggcaatgtgggaggcccaacaataaatctaggatagactctaatatggctcagggtctatctcaactccatacaattgactntaaaaaatcacttncgaaattgatgactgtccacgccttataagaattacactggctatatctcacatcgatgcgggatcttaatgc

SEQ ID NO: 248990 - DNA, 344 bp, Glycine max
  unsure (1)..(344): unsure at all n locations
tgcaagctctgttgcgcactttggtggatgagagataagaagaacaccgctgcgtgagagagagagagagcttctgaattttcctttggctgagtgaggagagagaacagcttctggttttaaaaagggttntctcctttcccattattttatttaagctatgccacatgtctccatctgagtggagcaaaagggcccactttctcttttgattgtgacccatactccgccacaaaaagtgagaaaaatctgacctttgaaacgctcaaatcctgcctccggttgcatgtcgcttctctggttccagttcctcccgtttctctgcgtccgtcggcgccagcttt

SEQ ID NO: 248991 - DNA, 355 bp, Glycine max
  unsure (1)..(355): unsure at all n locations
ctaagctggtcgagtctacccgtgagatgttgattattatattgaacgaagaacgtcgcagaacccgtcgagaccttctctgaagattctttacggacaacacttacggaacacgtttcgcgaagccgtctcgcgcttcacatttctcttcaccggaaaccaactttttccaagcacatctgaaagagagagaagtgcgcctaacgggctgaaccctctttcacttcactttctccncctatttatagaaaattgggggagaagcttgccatccagctcgcgcaggcgagcacggttgcttcctctcaaagccacagccttctggacgaatctattggagggcgcaagtgggcct

SEQ ID NO: 248992 - DNA, 354 bp, Glycine max
  unsure (1)..(354): unsure at all n locations
gctcaccagagcaaatcgacgacgtgttccacgacatgagctcctctgaagagctcacgagtcgcgacgcctattaaggacaaattggaacctaagaaggtttcgccgtcgttgtcgctgtcttcgccgacaattactataacttataaaaatcttctaattaattaacncgccagcgccgtgcattataaaaaccctaacatcgatgcgtttcgcatctgttgggaatttaagggtttgcctctactgatccttagtcttcacgtcactgtcgtacatggggggtctctctttcagctctatcgcacgacccatagtcctgtacaacttccctttctggtccttttttctcat

SEQ ID NO: 248993 - DNA, 255 bp, Glycine max
tactaagcttagcaacacactgggagagcgtaaggtagaattgtatcattgttggcacgcgacggcctgcatggtggaagggattctgtactgctatgattatctggggaaaatcacacggttccatgtgtggcgcgacgtgtgggacgagttcacagggttggagaacggcttgcccacccttctgtgtggcgctaccatgactgatttcggtgcgaaattgtctctggtttgggagtgtcacgggaatgggca

SEQ ID NO: 248994 - DNA, 123 bp, Glycine max
ccactcctgatcaaacatatgtcagcaagtaatatgcatacatcattatgtatatgtgagggatgctaaaacttgttattataatacacaatgtactcttagaattgctttacatatgtctat

SEQ ID NO: 248995 - DNA, 189 bp, Glycine max
gcttaacattaacttgagcggtcgtatatatacactaattagacatccgagaaaagtattgcgtttgatttgctcacacttcacattaatttcgagcgttcaaatagaccgactcatacaatccgagtacagatattgcctattaatggtcaagctttacttcatttgacgctcgattatgaccggact

SEQ ID NO: 248996 - DNA, 106 bp, Glycine max
cttctgcaatttttctgctgagtgaagagagagagagttgctttttgcgttttaaacgctctttcctcttttcttattattttattcaagctatgccacatgtctt

SEQ ID NO: 248997 - DNA, 423 bp, Glycine max
  unsure (1)..(423): unsure at all n locations
acatggattnganggggcctatgcaggttgaaagccttggaggaaagaggtatgcctatgttgttgtggatgatttctccacatttacctgcgtcaactttatcagagagaaatcagaaacctttgaagtattcaaagagttgagtctaagactctaaagagaaaaggactgtgtcatcaagagaatcaggagtgaccatggcagagagtttgaaaacagcaggttcactgaattctgcacatctgaaggcatcactcatgagttctctgcagccattacaccacaacagaatggcatagttgaaagggaaaacaggaccttgcaagaggctgctagggtcatgcttcatgccaaagaacttccctataatctctgggcagaagccatgaacacagcatgctacattcacaacagagtcacac

SEQ ID NO: 248998 - DNA, 191 bp, Glycine max
tgatgatgacaaccacctgcaggtgaggagcaacaacacagaacatatctatttgcatatagtttactcccccttggctttgaatgattgcttatatgagacagttgaagcattcatatttttcatatgtaaaccaatcgtctcataaacaatagcaacattttcttactattctatcttttatctttctc

SEQ ID NO: 248999 - DNA, 365 bp, Glycine max
cctaagtcacctgacgctgcaagctttgagagtatacactactctacagttctcttttacgttctacacaattctacattatgttaaaaagctctgaaatcttctagaacctctccaattaaggaggaatcccaacaagtttgtactttgtttttagtaatgcccataaaaaaacatattcttaatctagaatttcgcaattgcaactatatatttttaaatcttatgaacttctatatattccaagatatatcatatttatatatttttagaagactggaatcgtcatataatataatatgtacattgttaaacactaatcataatctctaacagggtctatataactagcgatgatcttgagc

SEQ ID NO: 249000 - DNA, 285 bp, Glycine max
  unsure (1)..(285): unsure at all n locations
accccacttataactaccactgcacctgactccgaatgtatccttacaaatattaacacacacgtttgaaggatgaaatgttattgccgaattatctgcaattatattcgacgcttgacagcgtaactttgtggaaaagttgaatttatctgtataaatctcttgaggcgaaaatgaaattaataaaccaatgtctttggngggtggatgacccgatcaaacagaaccattcatccatctatctcgatgctcgcagatttatctacccctctgtcatattgacac

SEQ ID NO: 249001 - DNA, 323 bp, Glycine max
  unsure (1)..(323): unsure at all n locations
agctcgacaagccagcttttttaagtaataatattaataataataactattatctataccatttctatggaattataaatgacaggatgaagtggcataaagtgcttacagagttcacttgcatgtgacaaaatttcaaaaagaacaagactcaagttaaaagaataatgcaacccgattaatacttccaaagaaaagaatatgttgtgaagacattctcagacaatgtaaatattcttatttggctatactagtataaaacatctctcatccatatacttttntaatattatgctctttttttcatcttctttcgatatacc

SEQ ID NO: 249002 - DNA, 500 bp, Glycine max
  unsure (1)..(500): unsure at all n locations
atctctgagtcacctgcggcatgcaacttgncncatatgctaagtttcttatttattccttattatggcctatgattgaaactacattgtttgcaaaacaaatacatcatactactagttctttatgtaaccacgacgtaaagaaataaggctcaaagacaaatcttggtgtagtccaatggttatagaaaaaaaatcattctagccttattttatctagagcgaatgcttctctcaagaactaacttctttatctacatctagttgagatgcaacgactcttgcttatttgattctttattcaagccatacatagcattacttttaagcaatgatctaacattaacactatgaaaaccttattaattcatgacatannaagtggctaaactttatattgcgtgttgactacctaagactaccttccctactttacattacgctaaattctacatggattcttatctttatgaacttgagtgacactgcaagaacacact

SEQ ID NO: 249003 - DNA, 215 bp, Glycine max
ctggaggaatcttctggagggcccaagtgggcctggttgctatttgcacccccatttttactaaatacacccccttggccctttttggtgattcctcttttcgtaaaggtaccgaaacttaccgattttgccacgatacttggtttctttcccgaattttacggaaccttggccgatacataaacattcccttttttgacttaccgaatggtacc

SEQ ID NO: 249004 - DNA, 353 bp, Glycine max
aggcaatttatgttatgcaccataaacatagtgatctttccatttattcggagggtctttgcaggtacagagatcaaaccaccttctaccatcttattttcaaacagagcaatgctaataatatactttttaacacattgttattgggttgatattcacgagttccacaaaatgatgtgggttctgctccttatttagcagtctccaatccatatttagtggactccacatgaatcttacccaataataaagcatgttgaaaagactatgtcaagagtgtgttgctagcatttagataacaaatagcaaagcttactccctctttccctcatggactccattgattaaaaccc

SEQ ID NO: 249005 - DNA, 246 bp, Glycine max
  unsure (1)..(246): unsure at all n locations
tctcatttgaccttgcnacaagatcactgcttcagaggatcatatatcccacatctgatgatcatatatctggcttattagttaaagtggaagagaataatcagctagcaaattgaaactagtggacacgatccatcattgcgtatgctatcttttttgggcggagcaaagatacgaaagccacacaatcaagtgcatttagtctgtacggtttgacgactacttctttaatcgcctgatatgcta

SEQ ID NO: 249006 - DNA, 487 bp, Glycine max
  unsure (1)..(487): unsure at all n locations
gtcacctgcggcatgcagctngacgcacatcggcgcgtgatttttttcttcacaangtttgaagnacaggagagcttcaaccctataaagcaacgtggcggacaaaagtggacagtaaacttgaatggtcgtcattgtcaatgccgaaggtattctgcgcttcactatccatgtttacacattattgcagcttgtggttacgtgagcatgaactactaccaatatatagatgttgttatacaaacgagcacatcttanaagcttacttcgcacaatggtggcctcttgggaatgaagcagctattcctccttctgatgacgcatggacactctatcctgacccaactacaattcgtgcgagaggtccggccaaatcaacaacgataagacatgagatggatcgngtccaaccatctgacaccaaccaaatgtctagatgggagcgaanggctaaacgcgtcctgtcaatgcatctgacgtggagtgt

SEQ ID NO: 249007 - DNA, 324 bp, Glycine max
  unsure (1)..(324): unsure at all n locations
tatgtcgcgtgggtcacgacaccttgaggacgtcacgtggggtgctattgcccaaaaccaatcttgaccaattccgacccaacccgggcattatcagtcagtgagaacctgtgatgtatctaaacaggcgagctcctggcagtcagcaaataaaaggaacaacaaccacatagcaaggaggcttgcggtggctggccanctgagaactatgattgatatgtgggttatggcctctggtacttgattaccaagggtaggtaatcgattacaatgcttaaaattgaatacatgaggctaagatggtctctggtaatctattaccac

SEQ ID NO: 249008 - DNA, 274 bp, Glycine max
agaaaggaggagaagacggaatgatactgttcctagacaaaaccgaattgatggtattaaactcaacattcctccctttaaaggaaagaatgatccggaggcctacgttgagtgggagatgaaaatagagcatgttttctcatgcaacaactatgaggaggaccacaagtgaagcttgccgcacggagttttccactatgctcttgtgtggggaacaagctcaaaaggagagagcccaaatgaagagccctggttgatcatggccgagataaaa

SEQ ID NO: 249009 - DNA, 361 bp, Glycine max
  unsure (1)..(361): unsure at all n locations
cgcggcgtgcaagctggaaagcaaaaatgatctaaagcacatttttaanaatngtaaaattggtagttattcttagagaatgatcgaaaacaataattaaaatatttaaaaatgttagtcagtgattataaagattgaaaacctattttaaaaaaaatctagattttgttagtctcttttagagaatggttgaaaataaacattaaaatatctaaaaatgttagttagttaacataataatcgaatacgtattttctaaaacattagaaatcgttagttatttttagagaatgatcgacaagaataattaacatatttaaaaatgctagtggtgaaaattaagattgacaacgtatctttt

SEQ ID NO: 249010 - DNA, 441 bp, Glycine max
  unsure (1)..(441): unsure at all n locations
agcttctacttagagggccatacttatgtggttattatngaaatnggccatgtccattttaccttaattcccaagcttgataacctgtgctcccaagaacctataaagttggcttgcctttgcttgtgtttttattatatattgtggttcatttgtctttaaaactaaaaacaccatgtagctntgatcaacctgcggntgtatactatttattgttttttggttttatcttccatgtctaatatttggtagctccaaaaacaggtatagttgaaccttatttcaactctgtaaataccaaaaaagctagctcttattaaaaaaaaattaggaattctgcatccgttctgacaagaccgatgtcgaatgcctcggcattctacatcggttctcagaggccaccgtcttagaattctctggcattctacatcaatcgttaag

SEQ ID NO: 249011 - DNA, 373 bp, Glycine max
catgcgcgaatcagagtctaagggtgttgtttaattataacaacaatgccctttgtacccgctaatatcaaggattagatctttcacagctcgggatgtcaacatatccatcaagcatattgtctgtgaaatgtatttttgcacggatcttctcgccaagacaggatctccaattaatgaatattgttcttcaaatttggacacaatgtccgatccatctgaattgtgatgtgcaaagtttacttctagcttatttcttgggagtaatttctctaagactgagatagcctgttgctttctttgctactttttgtctgctctcttttcctcaatcattaaaaaaaagacatccatcaatgtatattatacattc

SEQ ID NO: 249012 - DNA, 176 bp, Glycine max
  unsure (1)..(176): unsure at all n locations
cttctcggatcggaaacaggctccgaagatccatgtgaagaacgagatgaagcggttgagtgtgacgatcaaaccgaggcatgagaatatgagtagtgtgaggtagcacccatcaacaacacttctgcatgtaataactatacttggcattgtcgngcctcttttttttctttttg

SEQ ID NO: 249013 - DNA, 89 bp, Glycine max
cccccccctccactcgcactgtataaatataaaaaaatgaagggatgtgtctgcaccaataaatacgaaccaccacagagagatttttt

SEQ ID NO: 249014 - DNA, 262 bp, Glycine max
  unsure (1)..(262): unsure at all n locations
ggatgtcattgctgtcttttggttggcttctgctgctgcttatctcaataattggttggttgggcctctctattgngctgctcaaggcactatgttctgggcttctgttgttcttggtcatgattggtactaactaataacctattttctcttcttcattatgttaaaattnggatgtagctgtatttcgagtgcagaattngtttcaacactgtacttgatcgggttgttgttgtttgtgtgttcagtggcatggagcttt

SEQ ID NO: 249015 - DNA, 179 bp, Glycine max
cttttggtcaataattatgtgacacttgttaattctcaaggcttcatgccttcacttcctctttacatttcatcttctctggtgatgagcatcacttatcatataacaaagaaactatatcacacgaattctctcgtctacaaacatgttgaacatgttcttaacgcacatcgcttgca

SEQ ID NO: 249016 - DNA, 428 bp, Glycine max
  unsure (1)..(428): unsure at all n locations
cttcacaagacacttgtncatgatgtgaccgttgggatcggtgacaagatgtctagagtgtgctanaaacttccgttcccgagagcatctcttatntaagcatttcagcctttgctttcgtgtagcttaagagaaacgtcatttcttcttctttctttcttccacagacatttctaaagttcacagaactttctccatcacccacatccaccattagccaccacaaactatcactattcttcattgaaaaccacaccgagaggaacccttcaccgaagcgaatcttcaactgggcttgcggtccggtagagaacaaaacactaatctgaccttttgtttcttcgaggaaccatggtctatgcttgttcttgtagttcattatctttgatctttctgacttggaacgcattgatgtctatgcttctttg

SEQ ID NO: 249017 - DNA, 212 bp, Glycine max
actggacttaacttcagtagatgcactcgctgaagcagattgagacacttccttactatttgatcgagaagcagactcattatatttcttggcaggatgatctactggtgcatcatcctcatcatagaggtcaaaaactacagtctttttctgtatctgcgaactaacgaagataaaatatacatgtgctgataatataaaatatataagat

SEQ ID NO: 249018 - DNA, 396 bp, Glycine max
  unsure (1)..(396): unsure at all n locations
gtcacctgaggcatgcaagctattaaaacaagcatactanaacaatatacatgtaacacctaatagtttatacaaaaaatattgcttcacaacgctntatattaatntattntagaaatacacatcactttctttaaccgttacttataaataataaaaacaactttctatactatctttttacaaaacaaaatgtgatagttggaaaatgctaaatagttgcatgaaattaaaataaatgcaaatgtagagtaattcaatttctatacataaataaaatgaaactcgcagtgtcacagagaaatatatggataccacccataatagtgtgataataaacaaaatacatcttcatcccttctacaacanaatacatgatgcaagctccattggagc

SEQ ID NO: 249019 - DNA, 259 bp, Glycine max
ctcggcttggttggaggtcactcaactatggtatcttgggacaagcaagccaagtaccctctctcttataaacactctaagaggtaactacttgctctggctatgcgatgattactatgcaagagatgacctaaaataacctgagaagagtcattgctattgaatgaagattcgaactaagacttctgggataagtgctcttagcattttaaaaaatatttgactctcaaagtgaagtggtgaaacctgacccataaca

SEQ ID NO: 249020 - DNA, 359 bp, Glycine max
  unsure (1)..(359): unsure at all n locations
catgactaagcttaagcatatgtggatctaggcttaagcatagtcgcctgtcaaatttcctttggtgcatctcaaacttgattcatgaaccacatgagctaaagttgcattaaaaattgagctcattatataaatgagttgaacttcagctgcatataattcgacttgttagattcatgaatagactngatttatatatatatatatatatatatatatatatatatatacactccatttcgcgttggtttgactctgaatgacatgtcgaagtggcaagatttacttcacaaaaggtttagtgacattctgttgtatgtgggatggattgttgttgatggtgaaacttggatccttga

SEQ ID NO: 249021 - DNA, 310 bp, Glycine max
  unsure (1)..(310): unsure at all n locations
cgagctcactgatgtggcccatgactcaagtctcttaaacacccctccatacaatatatctatggcatacacatggggcccgtcactaatgaaaaatgggacagggctgccaatgttaaaacagatatgctaagccttctattccatcctcactcaagagacagcataaaaccaccaaactgccacaaatagccatctacattgacacaaaagaaaaatcccggactaaacanagtgaactactggaggaaataccaaatgaacaaagcacaagggtgagacagaccgacctctgtttttgagagggggg

SEQ ID NO: 249022 - DNA, 87 bp, Glycine max
aaaataaaacgaacggagcatatagaaaattttttttttagagacaagagggaagagagattaatgatccaaaaattacgggaaaat

SEQ ID NO: 249023 - DNA, 402 bp, Glycine max
  unsure (1)..(402): unsure at all n locations
gatgagtcgagtcacatcactgcttcgtctactgccaaacatatttaggattattgatgtccttgctactctcagtttcaccttaacnaagatgtcatggaccatgttgaatatctaaattgattcaaccccatatcctgcgtaaaaattcgcaatacttcgactgtacatcattcgcatgcatccatgcttcttcattggtgcatcgctcatcgcatttcttccttgaaaatacaataaaatacaatgaacttatcaaaaagaaaaggaaacgctttacggcgtccttaccgaactcgtgctatagctagagtaatgggtgaagcagacaatgtgcaagagaagatgaagggccgaaatggaggccataaaagagcacatggcacaatgatgaaggcatga

SEQ ID NO: 249024 - DNA, 310 bp, Glycine max
  unsure (1)..(310): unsure at all n locations
acgagtcacatgtcttntgtgtgaacttgacgtgccagggccctgcatgggcccgtgtgcggcggtgttntgagttggctgtgcacgtggatggtgtgacagtctttgacgatgacaatgggtactgttcacccgtgataaaagcacaaagatccaaatgggatgccttgagccggagggagagaagatcaatgtgaccctggccgaagatgtgtcatgcatcgtgtgcatgaacttcacacaccacgggcccctgcatatggtcgcgtgcaccggtggtttgagttggctggcatgtggatgacgcgat

SEQ ID NO: 249025 - DNA, 401 bp, Glycine max
acagatttctgattcatggctcgctgagttactaagttcaaccatgcatctagttggccttccagcttcttagtctcagatgatgcagctgagtttgtagctacctcatgcagtcctctaatgactatggcatcatttctggcgctaaattgctgagagttggaagccatcttctcattatatatcttgctttagcaagagtcatgtttccaagggctccaccactggagcatctatcatacttctcttcatatactgagtccttcataaaattatggagaaaaagtgctctgacatctgtgggagggaactggacatagttttaaatcgtccatactaacaggctcttcactgagtgttaatactgaatatttcctatggtgtggctcagcaggaaagtt

SEQ ID NO: 249026 - DNA, 158 bp, Glycine max
  unsure (1)..(158): unsure at all n locations
ctacaatgctcaatggaatgccccacgggccctctatgataagcacatgttgcgttcgagtcgtattctcggaataatggacgttgaggaaccttggctggggtatggcaaccatcgaattatcgagtagatatgggagcaatncagcataggacact

SEQ ID NO: 249027 - DNA, 394 bp, Glycine max
  unsure (1)..(394): unsure at all n locations
accttgacttgatcaaacctttcgccgttttgatttgtccccatcatttacctaaaaaaggggtggatcaagactccgacatgaatgatgcaatgcatatgcatgacacggaaagaaaacaaaacaaaggggtaactcacacatacgagaccgcacagatccacatttaatgctcacgtttgggcatgatgacgcctcancgtagtattaaaaagttacgtattactcttaagacaccanatatcactagcanaactataaactagtgctattcaccanaaatgcatgaaaacaaaatggcgcggagcgtgtntgctctttgctcctattnggaacatataggacaacatctaggggtctctaataactaccctcaacaattcataactcacat

SEQ ID NO: 249028 - DNA, 343 bp, Glycine max
aatcacacaattacattccacaccttcacattaatcatgtgtgaaaaacaacacatctcatgtacaacacaacatctcacgctcacacaattcattacacatcatcacataacaagtcacaaatatcattacacatgtgttatgcaatagatacactaagactcaatcttatatgcaatgtggtatcatgttaatgaaaaacctcatccggcgcctaggagtacatgacaagacacactacacactggtaagtcacgtcactcttactaggtataatcatacggagaaccagtcaggtcactctatcttgcaagaacgctccaaccgtattggatcaacataa

SEQ ID NO: 249029 - DNA, 308 bp, Glycine max
  unsure (1)..(308): unsure at all n locations
aacaggagaataagaaaaaaaaaaagagaggaatgtgtgctgaaacanaaaaaaaaaggaaagaaaaaagagaagaggtgttgttaaaaaaaaaaaagggggaagaaagaaaaaaaaaagaaagaaagagaaaggagggaggaagaagaggagagagaagcgagagggaggaaaaaaaagaggaagagaaggaggaaaataaagaaagaaaagaagaagagagagggaggaaaagaaagaagaagaaagaggaggaatgaaaaaagaagaagggacagagaaaaggagggaaagaaggaagaagagaa

SEQ ID NO: 249030 - DNA, 444 bp, Glycine max
ttctccgaagctgactatggccttatgactaacagtcacgctcacgactgtgagaagtatcatactgggagacggtcatagagtgatgtctgaaggtgtttgtaggggagtcacaatcgcacttggaacccacaattttgtgattgatgcgtcggtcttacagttaggaggattggatgtggttttgcgggtgtcatggttgagcacgtttgggacagtggtgatggattgcaccgattcatctatgcaattctggcataaggatgaaatggaaccttgcagggccaagtggagacagctgaacagggtttctgactccttctggaaacagacaagaagttagtaatgagggggtggccctatgtgaagatgaacgcggaagacatattacaaggaattgaaggtcctggctatttcacaatttcacgacaatacattcccctg

SEQ ID NO: 249031 - DNA, 224 bp, Glycine max
  unsure (1)..(224): unsure at all n locations
caagcgctcataatctgtgtgagcatgtgtacactctttccanagatcataacatttttcagtgaggttatcctgaagctcattgagttcttttaactgtgtttgttgaactctcaatttaccttccaaaatgtgaaagcccttcatcaaagtatctcatgttgtggaaaaattttctttttctagacaaagcttctttctcaatgttccataagcttcactat

SEQ ID NO: 249032 - DNA, 226 bp, Glycine max
cagtataattccgatatggctcccgatcgcactcagctacagaatatggttaagaaggaagatgagacctttatagagtacgcatagcggtggagagaactggcagcacaagtggcccctcccatggtcgaaagggagatgattatcatgatggtggacaccctgctacgtgtttactgtgagaagttggtaggctacatgccttctagcttcgcggacttggtat

SEQ ID NO: 249033 - DNA, 501 bp, Glycine max
  unsure (1)..(501): unsure at all n locations
gcgatctctgagtcacctgcggcatgcaagctngaacaagttanggaagtgaggagttgtctgtcttgcttatctatgtagcacccagntagtatcatgtagaaaaccttagagtgaaactggttagaatccttgaacctaagtgatagttatgagtcaagtatatcgaagtaaggaacatcgtgttgagggaagagacctagatccgaagataggtaaatcatgtattctcgagagtcacatgtggactacgattggcagagcattggagtcttgaaacttatacctctnttcttgattcgtcccatttttcaaaaaaaagtcagccattgtggccaatcgtgtttccttgtgtctgtttgttcgtttcaaattctcatcagtgcctcctatgatattacccaactccaaatagtatgtcattcatattctagtatcattgagatgtcattatcgtgagacatagagaanacatgacttatgaaatactatcattgacgt

SEQ ID NO: 249034 - DNA, 67 bp, Glycine max
caccccaagagagatggaggataaaaaaaaaagaagaaatatctcgtgcaccaccaaaaacaaaaaa

SEQ ID NO: 249035 - DNA, 192 bp, Glycine max
ataatatataacactaaatatatcttctatagtaacaatacatcaaacaatatatactagttagtatataatgatgtcgcaacctaccctcttgcgggcgagcgaggcgaggctctcgggagcgttcttcaaaggagaataatgtgcggagtcgccaccaacgtttatttgtggaaaacgctggaaaaactg

SEQ ID NO: 249036 - DNA, 99 bp, Glycine max
cccacaagaaggaataataaaaaagaaagaaatgtctctgcccctaaaaaacaacacacaaccggaggttttttaaaaaaaaaaacggtcgaacaaaac

SEQ ID NO: 249037 - DNA, 290 bp, Glycine max
  unsure (1)..(290): unsure at all n locations
acctccaactgagctcacgtactcncacgtagcccatctccttgtttctctcaacaccgggtgcccatcaatcctctcaagcttccacaacatccaagccaaacaacgttcaaacagcacaagctatcacagccaagcatcacagagcataggcagataactctgctcacacatcaacccaaatcacagcttntctcacgtaaagaccacagtaacaattccttcgatccacttcgttaacccgtggatcgactccaanaatttactgggaagctatagtgtataagcct

SEQ ID NO: 249038 - DNA, 430 bp, Glycine max
  unsure (1)..(430): unsure at all n locations
tatggataaaagtgtctctagaatatgtccattggatttaataatgaaatatgtgcaatttcaggtgaaaaagatgctaagtcatgaagttccaaaagtgacagttgagctcagctcatcagtgggctaagtgcgcatccatcgctaagcgcagctttagcacgcttagcgtgactgatcgaggccatacccgaatgaaataaacattataaatgcagtatttaggaagtgatcctacgtcgtctccaatgagcaatgttcaaccaaatgttataacagatatagtgaacagttatgaattggggggggtgtctgttttgtaataaacagcangcaattcaattaagaaatacagaataaaacatgtngttcccttgattacaagcagtctcttatctatgtacgagaattatccctatagttcaacact

SEQ ID NO: 249039 - DNA, 216 bp, Glycine max
ctgctaaagtcagaaacagcgcgagactattcttctagacacgcacgttagacgtgtcccacacgttcaaccataaggatgcgttctccaagcaccgtcactaggagacagtatctgattcaggagaataggcgccgcgggcaccatggtctccatgcaattatcaaaatatcttgattacccatgctgcaacaagagggtcgtacagaactggta

SEQ ID NO: 249040 - DNA, 218 bp, Glycine max
  unsure (1)..(218): unsure at all n locations
cattggcatattctttntcccctctttattgacatgaatttcctggccctttttacaaacaaaatcgagcagggcaacaaaacacaaactcgagcgtcaaaatgaaatctaaactttatatcaagtaaaacaacgataattaaagagtgcccgttgaaagagtaaaaggaacgtacctttaggataacatgttcgactcgggagaaactatgacacct

SEQ ID NO: 249041 - DNA, 340 bp, Glycine max
  unsure (1)..(340): unsure at all n locations
agcttctggttccgagagcatntcttatttaagcactgtagccttttctttcgtgtagctcaagaaaaacgncatttcttcttctttctttcttccaaagccatttctaaagtcccaagcactttctccatcacccacagccaccattagccaccacaaaccatcgttgttctccattgaaaccncacactgagaggaacccttcaaccgaagcagaatcttccaacttggctggcggtttcggtagagaatgaaaccctaatctgacctttcattntctttcgagggaaccactggtctacgcttgtttcttgatagattcatcttgcctttgcatctt

SEQ ID NO: 249042 - DNA, 335 bp, Glycine max
  unsure (1)..(335): unsure at all n locations
taagagtagtgtcccactggtaaaactaactttccacaattttgccttcgcaggaaatggccccgaggaagcttgcctcanagaggtccaggaaagacaaggcagccgaaggaactagttccgctccggagtatgacagtcaccgctttaggagcgctgtacaccagcagcgcttcgaggccatcaagggatggtcgtttctccgggagcgacgcgtncagctcagggacgacgagtatacttgatttcacgaggatatagggcgccggcggtggcatcactggtactccatggccaagttgtccacaaatagccttgagtttatcccaatgctt

SEQ ID NO: 249043 - DNA, 311 bp, Glycine max
  unsure (1)..(311): unsure at all n locations
ccttctagcatatttttgcatcacaacgatgatactgctgtgttggtcaaattgtctatattgggctagtataccactagttgaattaatgaaatatggaaacaaggcaaactaagtcttgagcttttttggtttntttattactaaccactagttttttatctactgttatgctttatgttaatgtaacatctgaattgctgtaaacattgttacttattattttggctcggatctgctttgtctgtgagtctatgatgggctcttaaatgtcaagcagaaaactaacttgctaacctcatgtatccaaa

SEQ ID NO: 249044 - DNA, 209 bp, Glycine max
taacgaccggcacgcgcaaaaggcaaaaaacagagacacggcagaagaccacgcgacgcccgccgaaaacggggaccacccgccagacacaaccaccgcagcgaagaacacaaccccctaaaccggggaagcgaacccaaagacgcccagactgcaaaacgcagagcccggaacaacaccacgggcacgaggaggacggaaaaaccccc

SEQ ID NO: 249045 - DNA, 370 bp, Glycine max
  unsure (1)..(370): unsure at all n locations
tcttaagcactgagctcagctttgctgaatctttgtggggtttttttttgctaagggcttgacatggaggcggagacagcttgtggtgattacgatggctttgggtaactgngtgggggaaggaggagcgttgttattgactgactaatgacattgttgggtctggtgggaaacttgctcgtataggaatggcagtcacagcatgggttctcctcttttcacctcttatttgccactttttagagtctagacgagataaattgctcttttgaccactgatctttactgcgaaaccaatccgaagctttatgggcgagccaccatttttatagatagatcgaaatgtgttaccacaccacatcgctccctt

SEQ ID NO: 249046 - DNA, 262 bp, Glycine max
  unsure (1)..(262): unsure at all n locations
tatttatagattctataaacttnttatactacacacttctcaaatcggaactgacaatgataagctcatgaaatctaacctattaaatacctaaatactntgtacggcttatcgttaagagagtaatagcaggcctaaggtgaagccatggatgaattaatccttgtgccaccaaatgaaagcccttcccactatttattgtgcgacgcatatggaaatctactattgggctgccctacattccgaaatgttcctattttta

SEQ ID NO: 249047 - DNA, 208 bp, Glycine max
  unsure (1)..(208): unsure at all n locations
ctaccatcacgattatcgtctcccttccattatttgggggaccacctgngccgccagatccctccaccttttgggcgtgttctttgaatgatcccgtcccctttttgcacatgttctgtagttgcatcctatctgaaaccactatcaaaatgtactgatactgcctaacaaaggcaaccattaggtcctttcaagaatggactcggga

SEQ ID NO: 249048 - DNA, 410 bp, Glycine max
  unsure (1)..(410): unsure at all n locations
tcatataagtctcatacaattaatataaaacctatatcctaatgtcacatcctatcagagcgtggtgttcccgtgtcctctagcatgaggtttttcatagtcatccacctattcatctgctcncccgaacacaagntcaagatcatcacaggatccaaacacaacaacacacagggagtgagttatcacattcctacgctatagagaaacacgacaattaaatatacatattatataaatgagataccacttgcttaaacatagctcacgtaacttcaccacttcatcattcagaattcacttttcaatatcaatcacattacacaagaatcgacacttcgacaagattaaaacacatcaatacacgctatgcatagtatgctagactcatctattgcatgtgtccatgt

SEQ ID NO: 249049 - DNA, 343 bp, Glycine max
  unsure (1)..(343): unsure at all n locations
cgctctgttcaagctctctattacctanattgtaatctaggacttctatcagatactatgctagatggtacaccatgtaacttgacaacctcacttatatacaaggggtgtaacttttctaaggaacaactgatattaatgggaatgaagtgagcagactctgtcaatctgtcaacaataacccagatagaatctanacctctaggggttctaggtagtcctaccacacaatccatggaaatactgtcccacttccactgnggtatctctaagggttgaacttccctaacgtctctgatgttctatcttagccttctgacaaactangcatgcatacacaaac

SEQ ID NO: 249050 - DNA, 177 bp, Glycine max
taaaaaaaaaaaaaggagagaggaaaaaacacaaaagaaaaaggaaggaagaagaggagagacaaggcgacaaagcaagaaggggagaagagaagaagagaaaacaagacgaaaggaaagaggggagaggcagacgaagacagcaaaaagagaggaaagaagaaagaagaaggaaag

SEQ ID NO: 249051 - DNA, 163 bp, Glycine max
tctttaagagtctcggtgttggtgaacacaaatactacacaagagtttatccctcaaagaggtctctgacaagtgttaacggcttgacaagtgtaccaaatgtccaagtagtaaagactcaaatatctgagtggcgaatttatatggactttattttgtactt

SEQ ID NO: 249052 - DNA, 210 bp, Glycine max
gaagagggaaaaaaagggagagaatcttaaaaaaagagagggagaggaaagaagaaaaggaaagaggagaagggaaaggaagaagaaggacgagggggaaagaaggaagcggacacgggaggaagagaaagaggaaagaagggcagagaagaagagaaggggagggagaaggggaagaaaaagaaaggaagagagggaaaagagcggaga

SEQ ID NO: 249053 - DNA, 331 bp, Glycine max
  unsure (1)..(331): unsure at all n locations
gatgaagtgtttgaattgagctatctataatgtgatatcacattatattccttacaaggtgaaatataataaatcacactacaggggggttgaatacgcgtagacacaatataaaactcttttgaaagggaagatgtctataataaacaagtttataaaaccctctccagtgactaanagcggattgtagtccaatgatgtataaaacattatttntagtgaacaccttgtttgcagaacgtaccaatgatggactttgaaatactttaataagctaaaaaagagcaataacaatactttattctatactggttcactcaacccgacgtac

SEQ ID NO: 249054 - DNA, 259 bp, Glycine max
  unsure (1)..(259): unsure at all n locations
catacaatgtatgtcattttgacatatcttggttaggacttgatggcctaatacaggcctaagttgagggggctgacaaaaccccaattgttttggaaatggcgatgaacgcactaagcgtgccttgctgcgctaagcgagttcatcactctntgatgaatatctggatttccagatgaactcactaagtcggccctatcccactaagctgagtcatcttctttgatgaatgattgactgttatgaactcctaagcgta

SEQ ID NO: 249055 - DNA, 171 bp, Glycine max
aaggaaaattaaaaaaaaagaggaatgtggctgaaccaagtgaaacaagaaaaacaaaaaagagtctttttaaacaaaaggagggaagggaaaggaccaaaaggaaaaaggaaggcagagaagagagagaaagaaaacaagcgagaaagaggaggaaaagaaaagagaaag

SEQ ID NO: 249056 - DNA, 355 bp, Glycine max
  unsure (1)..(355): unsure at all n locations
gaccttgactcgatagaacctcttnttaagtgaaggcgcctaactcgaccccatgtgttactaaagtgaaacaaaacccagtgcgaatcacaactccgacatctatcatgggtggaatggatgaatgcatgaagaaatacatatgacacagatgctatttatgaatacgagagcccggganaattgccccttcttatatacaatgtttgggcagcatggcacccgacgtatgtatttaataaggcgacacggaccctccatcggtttgaaaagtgaggggatcagacggacccatcatgatgctatgcaaaggccaacacggtatgatatatacggcatatcacaacaatataac

SEQ ID NO: 249057 - DNA, 181 bp, Glycine max
  unsure (1)..(181): unsure at all n locations
aagcagctcaattcgactaacaagaatcaaaactttatcacatgatcattcacggacgaaattatggtctaacagggtcctctgcatgatccacgggaaaacttctggattgttgggttngaagttccaagcttggtagttgctgctaaacacgacatcttcaaggataaacatgtcaatt

SEQ ID NO: 249058 - DNA, 115 bp, Glycine max
ctgaggactcgcggaaggaggggaaatcacttccattaatagcccccactgcaggggttaggaatgaataatcccctatactgctctgggaagaccgggatcatgccctggagtg

SEQ ID NO: 249059 - DNA, 421 bp, Glycine max
  unsure (1)..(421): unsure at all n locations
aatattatctggnnagagaataatcatacaacaactaatatcatgttatatacaataattcaaaattaatatgattaggaagaaactaataaaataatttatcaaacacaagttcttaaatcatttcattaaattcttctctaaaatacatttctaccatntcactgttgttttatgccatcaattttttgtctctttttacttgaatggcgatatatattttgacatctgacaatcgcattccctactcgtctacttaagtggttgagtgcatggatctaattgcattcacttgaaaaattaaatgtcaaatataactttatttctacacttttacttcgacaaataatagaaaatgagatatatattatcgcaatatacaagacgatttggctaaaaaaaaatgaaaatgtattatttt

SEQ ID NO: 249060 - DNA, 213 bp, Glycine max
gaagctcactacaagccttaagtgacaaaccatgatattaccatatccttaatgaattttggagctctggaattgtcttgggaataagtgagcggggttcttgtttcattggacaacttgttttgttggctatgcttcatgatgtattttgcgccatacttgatgtacattgtatattggttaaatgttggacatgctgaatgaaatgttgtt

SEQ ID NO: 249061 - DNA, 399 bp, Glycine max
  unsure (1)..(399): unsure at all n locations
agctntctaattaataataaaaattaaaaatgagtcaaaatatcttgttgaacataacttttaaataatatttcaaaacacactaaaagttattaaaaaaatttatttatcaaataaacttttcaaataataaaaaaaaaaactagaaacaaaactggcataccttatctgacatagcctaaaaaatcttatattggtttcaacgaatatcatacgtcacatacacacacatatatctatatatatatatataatgcagcaactttccttgcatgtgtgggagcatttgacttttatatcatataatactgagttagttagaggtgcgatcgatattttatcatggagtttatatgattttcattggctataacagttatgtagcatatataagtctga

SEQ ID NO: 249062 - DNA, 399 bp, Glycine max
agcttgtggctcccctctctcattcgacctatatggactgtgaactcctccatcccattttgcagaattgctctccttagctcgtgttaagtttcaaatgaagtctttaggctacacgaaattctataagttgggtgataaaatttgaaaaatcttaaaagaattggaaacaaaatttgcaatcatgcttttattattttcttttgttattactggatctgggttgagaaattggggtctttccctttggattgggcccatgttcgaacccagactgctttttatttcttggtaattttttttttattgccattagtcattactttattttagtgtaattggttttgtgaatgttatgttgggatgcttgggtcatggaagctgctcaagatgtgtact

SEQ ID NO: 249063 - DNA, 391 bp, Glycine max
  unsure (1)..(391): unsure at all n locations
tctgcctccagagagatgaaagaatattgatctatgagtacatgccttacaagagcttaaacttctacctanttgttggcttttgttttatcttctgtccaggtaaagatgttagcatgtagcatattaacaaggcaaccttactttaaaacagattcagctagaaagaatttgctagagtgagaaaaacagttgaacatcattggaggaattgctcaataacttctataccttcccaagtattcaagactaaaagtgatacatcaggacctaaaggcaagcaatatattgcttgatcacgagatgaatataaaatatctgactttggcatggcttcgaatatttggagtaagagtattagaagaaaacacaaagagttgttggtacattg

SEQ ID NO: 249064 - DNA, 340 bp, Glycine max
  unsure (1)..(340): unsure at all n locations
aaaagggttcagcctcttaggcacttttctctctctcgaaattgctgagataaaatatttccgtgaagaaaatccaagccgaggcgcttccgtaacgtttccgtgagtaattacgggaagattctcgaccgttcatcaagagttatcggtcgttcttcgttttcttcagtcttcaacgggtaagtacctcaaaccgagcttttcaattcattctatgtacccggggtggtccacattntgtttcatgtatttttattctcggtttcatttgctttttatacccccttttgacgtgcttaagccatttatttaagtcatttctcgctcactactaaaataa

SEQ ID NO: 249065 - DNA, 311 bp, Glycine max
tagatgtaaggcgattgtagactcccttctaggagaacataaaccaaaaacaacctcttcactctaagaagccatggcttatatctcgaaggcataataatattattgttggtttacagaatataaggcccccaatttatgcctcatatgaagcttgaaatatgaagtgcaatccctctcctgagctgagtgaaaaaattgcaccacaaggttcttattaatagcctaagtggcacaccaaattggaagtgaatttggatgttattcaaatatcacttggtatataatttaaatttgtggagccaaacttt

SEQ ID NO: 249066 - DNA, 392 bp, Glycine max
  unsure (1)..(392): unsure at all n locations
agcttgcttctacaaagaataattatgtccttggaaaagttaaattntagtgacccctatataacactcctcccatgagttagaatcagaaccacatgatcgtgggcttatgtttcagttttaagatagataattcagaaccacaagaataattaggtccttgttttagttgttttgtttgcaattgatacacatctttgatatttgattattatcatatgttgtacattgtattgactgtgctactgcatatcccatgcatgaaaaacgtgcctataatatggttaaatatcataattgattgattaatctcatacttccttacaagaggtatgcaataatagcattttgccaccaagaaaatttgcttcaacatcaataaattatgaatt

SEQ ID NO: 249067 - DNA, 294 bp, Glycine max
agcttggctttatagtacatacacaatatacatcatcacaatgacttttttaacatcaacaaaatgtcatctccaggtcattgtcaacatcaacatcatctcatctcaatgtcattctcaacatcaacattatcttatctcaatgtcattccaacatccacatcattttatctcaatgtcattctcaaacatcacatcatctcatcttcatgaccttatcaaccaccaccaccttcttctttttcaccttaatattaataaccaactgatctcgtttcatattatcataacccc

SEQ ID NO: 249068 - DNA, 391 bp, Glycine max
agcatgacttatttgcttaatgagttaggttatgcccaagccttaaacgggttgagccatatgccctcaatggatgacctgacctacttccacccctaattatcaataatattttattaaatgcctgtttacgcttatatacttacttaaacttatgggccttgtataaataaggttaggtgagtagactttcatattaaatcaaatctttaaataaacaagattttttctaatggtaagaacatatttaatagtggatcttgaagtagaattttgacctcaagatctgatcttggcaagatctactgctagagctagatcaagatctcctgtgtgtaggatgggttcttccataagaaccatgaaggtttaaatcattctaaaaaaatca

SEQ ID NO: 249069 - DNA, 372 bp, Glycine max
agcttgcttctacatatacttcaagaaaggggaaatgatccttttaatgctttagagcgcataaatgataatgcatatataattgatttactacttgactatggtgtgaacaacacttttaatgttattgacttgactctttgtgatgtatgtacctttgacatcaattcaagggtgaattattacctaaaaagagggaatgatagaggactatccaaggaggaagagtttggtttgggtgagctcaacatggatggaccaatcactagagcaagaagtaagagatttcaagaagagcttgatgagagactaaatattttcatggaggaaagaaaagaagaagtgaaactcataaattttagccaactttta

SEQ ID NO: 249070 - DNA, 373 bp, Glycine max
agcttcttacaagagattaagaaatttctgactaaaaattttgagatgaaagatcttgggaaagccagttttgtattaggaatcaagatactaagagatcactctcaaagtatcctaaggttgtcacaagagagttatatcgataaggtcctagatagatttgacatgaaagatagtaaatcaggagataccccgatagctaaaggagacaaatttagtttcaaacaatgccccaataatggccttgaaaaaatagagatgcaaaagattccttatgcatcagtagtaggaagtctaatgtacactcaagcttgcactcgccccgatataacatttgtagtaagagttctgggaagaaatttgactaatcctg

SEQ ID NO: 249071 - DNA, 398 bp, Glycine max
agcttgcatgattcacattctcctcctttttcaagcaaattcttcttgacatcatcaaaatcttcatgatttacattctccccccttttgatgatgacaaccacctgtaggttaggagcaacaacaaagaaaaaatatctatttgcatatagtttactcccccttggttttgcaatgtttgcttatatgagacaatggaagatttcatatttttcatatataaaaagttgtctcataaagaatagataatttttccttactattttatcttttatctttctctccccctttgtcaacatcaaaaacaaatcatgaatagagaggagaaaaatgttaccacttgttgtaatgtataaaaatcaagtgataccaaaacgcattaaaacaaactattttgc

SEQ ID NO: 249072 - DNA, 398 bp, Glycine max
agcttcaccttttggacctcctcatagatgttgcatgagaaatcttgctctattttcatctcccactccaagtaggcctccggatcattctttcctttaaagggaggaatgttgagtttaataccatcaattcggttttgtctaggaacaccatcattccctcttctcctcctttcttcttcatatatgaactctgctctccatatgatccaacctctcatggagcgcatcatctcgttgtttcattaacctctccatatgttgcatcaaagcttgcatttggaattgcgaaagcccccctccatcattaggatttgttcctgccatctcaaacaaacaaatcaaacgtaacaagacaattatagttgttgtttgaatacctcgcccactcaagtgta

SEQ ID NO: 249073 - DNA, 382 bp, Glycine max
agcctgatttcttcccctgcataaaccatatttctatagaaaccttgaattataatttaagagcttgactcacccgtgaataaatatttcttactaaccttttgttttacacataaagcacatgaagaatggaactgctttattcaatagcttcgggtgctttatgtattggagcataggtggcagttctcagttatcacaaaaccaacaactagggttattcataaagtattcatatttttgtctcaagcgaataagacatcaaaagtcatattttttacacattcaaggacaaaatatcaatttttcatctttcactgccctaattgttagcgcctaccaattccataacgaaaatgagtatctatccaaacaaaaagtg

SEQ ID NO: 249074 - DNA, 396 bp, Glycine max
agcttaacatgtagagattggaacacatcatctatagtattccaataggtatgtgttcagctctgtaagctaaggaggttgaagtataacttctcaatgattcttttgaaaaattgcatttgcaggtgcaagatagaaaaggactacctatataagcatgaagtttatccgcttcaagaagctgggacttggctttgatatgcttatgaaggatagggacacaggctagtaaactagtgtcgagcaagagtaatgttataaactattgtgcatattatcttcatgtattcattatgaatagaaagggttcaatccttagtgacaccctgatatttcaatatctgaaatgtgtaatttgctaagatgaaattcaatcgtcacaatattttatctatg

SEQ ID NO: 249075 - DNA, 387 bp, Glycine max
  unsure (1)..(387): unsure at all n locations
agcttgtgactctnggaaatttctttataactagtcacttaaaaagttgtgactttngaaaaaatcttcagaaacaagtcacttgaagaattgtgacttttggaaatttattcttcgaaatcagtcactggtaatcgattaccattaaggtgaaatcgattacacatcaacagatttgactcttcattttaaattttgaaaattaaaacgtttagaagctctggtaatcgattacacaagtttaaaatgatttgaaaatgattaaacacaagttgtaactcttgaaatttaaaatcttaacattttaaaacactggtaatcgattactaccttctagtaatcgattaccagagagtaaaactctttggtaatgattttgtgaaaact

SEQ ID NO: 249076 - DNA, 390 bp, Glycine max
agcttagggttcgatttttttttgtgcattttattaaataaaagttgtgtttagctttttagagtgttggagagtgagccctttcaatccgtgctatttgccactgagcatcaactctcattgctctactgtgccatgtacacagagagagagagagaaagcaaagcaggaagcattgctttttcttgcttgtttgacatctttattcctccctttcactgtttgcgcgaaaaaacgcagaccccacaattgcagaaaagcttagcattatatgctcttcctcacctttatcccactcatcatgactaaagaaatatcaaatatgtatgcatgcaaactgcactatcttccccgcttgtgtaaaacttatttaatgaaatgtacaatatg

SEQ ID NO: 249077 - DNA, 394 bp, Glycine max
agctggcacgaaatgctcaaaggaacaagggctcaaatcttgaagtctaaagcttcaaagaataaaagcaaaattttggaacaaaaaaataagagctttgcatgaaaatgatggacaaatatgaagaaaagagaggtttaagagtttcttaccaaagctttgagagaagaagtctcaagaacactagtatggtgcttacaagaagaaggaaatggtggcctatcctcccatgaagatctcatgcgagaggaagaagaatgaggttccaggtttttcatttgtgaaagaaatgatgagttaatgacctaaggctagtgttaagctcaattgacaagcatgaatgatccctttgatggccatggttaacgtgcacaagggtgccataaatgggtgc

SEQ ID NO: 249078 - DNA, 390 bp, Glycine max
  unsure (1)..(390): unsure at all n locations
agcttttttttagaaacaaatatgttcagaattgtttatatttttgtttatgaattttatgccctatgtttagcgctttttttgggctgtttttttttttaaaaaaaaattaattcgtggtgttggaatggaaagtgttttttgaagagataactcaaaaccttgtgattttcctctaaatagattntgtgtggtgctttggctaaatgaggcttcgaagccctttttcaagagaaaagtgggaggatataatcaatcaatgtattttgattgaaattttgagaccattttgtattatttggatgcgggggttggcggttttcatattttgatcacccagaatgagggttttatattttactgtttcacacctactgtgaactcggagaa

SEQ ID NO: 249079 - DNA, 377 bp, Glycine max
  unsure (1)..(377): unsure at all n locations
agctttcttcgtgctatattcttgcgaagcttacatttggaaagttagttttaccagtgggacactactcttaaaacaaaaatggcatacaacctcctcccataaatacaaacatcaatgtaaatttagagcaagcttatgcgcatatttccttacgaacgttcacttgcacaagacatcctattaactaagaaaaacgcacccatatacaatcaaggcagcttccttacctagattatttacatgtacttccaaggtgtatttgttatttacatcacacacgtctccttggctaaatntacatacatgcatactcaaagcactttggggtaccaaaaattgcacatgtgcacatctgggtatttctaatacctata

SEQ ID NO: 249080 - DNA, 372 bp, Glycine max
gctttttgtgtaattataaaaattttttttatactgtggacgtaatcacgttaaactttgtatttttttctttctttctttcctttatatatttctcttttattgttctatactaacagaaatacctttactcctcaatgtctgtctccgatctcatcccatgaaataatatatgaatgtttgcatgacatgcctgcaaagtaagcaaaatatatgaatgtcgagagagtgatgttgatatgaatgggaggtgcgatggtagacaaaggtgaggaagaaagttcgagaaaggaaatcagttttaagaataattaatgttgtgtatgtgataggatatgacaattgtagaatgtgtgagacttggaattggaa

SEQ ID NO: 249081 - DNA, 402 bp, Glycine max
  unsure (1)..(402): unsure at all n locations
gcttgattttgtgagggagaaactgggcattcactaagctttacttttattacattctaacaacatatatatatacacactgaggggagagacagctggacaagacaagacacactgttgttcttctaccacaaagattaacaagagaaatctactctagagatacatataattataacccataattataacactccccctcaagctggagcatatagatcgtatgcaccaagcttggaacatataaactgaatcctatgcctccttaagggcttggtcaaaatatcttgtgggctgatcattagaggtaatgaactcaatgacaatctctttggacagtagctnctcccgaataaagtgacaatcaatctctatgtgcttggtcctctcatggaagactgg

SEQ ID NO: 249082 - DNA, 399 bp, Glycine max
  unsure (1)..(399): unsure at all n locations
agcttagcccaagaggggatggaccttctcttttctttgagaggatcaataataatgcctataggttggacctcccaagagagtatggagtcagcaccacttttaatatttctgatttaattccttttgcaggtggagctgatatagaggaggaggaaccaacagatttgaggtcaaatcctcttcaagggggaggggatgatgcaatcctccctaggaaaggaccagntaccagagccatgagcaagaggctccaagaggattgggctagagttgataaagaaggccttagggttctcatgaaccttagggtagatttttgagcccatgggccaaggttgggtccactcttctttgtaaatagtagaataggttgttttcttattttgggccttgtat

SEQ ID NO: 249083 - DNA, 394 bp, Glycine max
  unsure (1)..(394): unsure at all n locations
catgcaagcttacaatnataactactatgacatgcctatcttaacttgcattctttaaaaaatatttcttctagggacctttcaccttcatatgtaatgttattctccttaagccacatgatatcattaatattaggaggtgaggacccctcaacgaaaaatgggtttgcttcaatctgcacccaactataagcatggttgttttataacttcctcgctctttcatcaaaaccctgattctatggacatccttccatttgccagcagcagcatatatattagacagcataacatacgctccagaattaaaaggatccaaattcaaaattcttctagctgccagttcccctaattccacgtttaaatgaacactacaggctgcaagcacagcacc

SEQ ID NO: 249084 - DNA, 405 bp, Glycine max
caagcttgtgtaatcgattacactaatttggttatctattaccagtgactgtttctgaaaaaatcaaaagatgtaactcttcaaaaaaggttttgactttttcaaattggttttaagtttttctaaaagttataactcttctaaatggtcttcttgaccagacatgaagagtctataaaagcaaggctttgttttacattcaatcttgaacacatattcatacaatcctttacaagtcttgaatctctttgaacttcttcttcttctttgtaccaaaagctttctgaagttttctggttttccaaaccttgaaaacttgtgctattcatcttttcattctcttctccctttgccaaaaagaattcgccaaggactaaccgcttgaattctttttgtgtctctctt

SEQ ID NO: 249085 - DNA, 392 bp, Glycine max
gctttgtcctcagatccctcttggtagactatacttagacccttcaacattatggtaacagcatacttaaaaccaaaacttaatccgttaatccctcttgtaagaccaagattcaattctacttcattccagttctaaagcaacaatacatttcccaatgctaaagtcacctcactatgcacacaaatggggtatcataccaagagcatacaaaatttaagccctgaaagaagcatttaccctaggaacacaaacaattagatattaaagcgactacctcatttgttcattagaaatcccgaacaagggtgtttatccatccattacagaagaaaccctaacataatgagattaaaaacctatgtatctctgcaaagctgctcctcttgctg

SEQ ID NO: 249086 - DNA, 388 bp, Glycine max
  unsure (1)..(388): unsure at all n locations
agcttctcatgcattngactatgctcanaatgggaagaaatttattgactctatctcataatagatacgagatctctggtgcctatataaaagcatgaagaaaagataggaagaagtctaacgaatatattggacaaaaccttctctctgatacaatcattctagacaatgtgcttttacattgcaaagatattgtaatcacactaaactttcatatccttactctataagtagattgttggaatattttcaaacattatttatgaaagtcatgactgtgttaaagaatacttacgttttcaatttaaagagaagattgtttgttgtaatcataagtgattaggagaatactctttacaatcttgttttaattagtgaaaccttcaca

SEQ ID NO: 249087 - DNA, 380 bp, Glycine max
  unsure (1)..(380): unsure at all n locations
ggatcttaagtcaccgcggctgcagcttaaaaatctggatattatgtttttattttgaagttatttnaataatgtgtaattatttgcaagcctttgttcatgggtggacaggccttacaaataattacctgattcccttctagttttttgaagttagaataaaattctaatctatagtttaagtttaagcttaagttagtagatgaagcaagcaaatacacttatttattttaaaactattgctgtatgattaattatttttaattctggccatgtaggtatatcatgaattcaatcattacagtgttgtattcaacggaagagtatatgaagacaatgacggtgtaataattgaaggctgtaaaaaggcgattcatatt

SEQ ID NO: 249088 - DNA, 380 bp, Glycine max
cggctgcaaccgaagagacgttctattatcttttggatatgaaataatacaccgcgtgtgcggtttatacaaccactgcaacgaaccacctgacagtagtaccaaaaatagctaattgaactaatattcacaggagagaagtgaacgttgttactctactacaaaaaagaaaccgcatattatattatgcaccccgatttcatcattaacaacaaaaggttgatacgaaatctcggtctggtgagaccatcttgaaacctaaataaaaacaacggaactaaacgaccaccccgagatataactatctatacgcacatatacgtatatatacacatacatatacatatattccacgacgctcacattttcacaaatagact

SEQ ID NO: 249089 - DNA, 377 bp, Glycine max
agcttctcccccaatttcctataaatagggggagaagtgaagtgaaaaagggttctggcccttaggcacttctctctctttcgaatttgctgggaaaaattgtttccgtgaagaaaatccaagtcgaggcgcttccgaaacgtttccgtaacgttttcgtgaggaatttcgcgaaggtttcgaccgttctttgacgttcttcatcgttcttcgatcttcaatgggtaagtaccttgaaccaagcttttcgattcattctatgtacccgtggtggtccacattgggtttcatgtatttttattctcgtttcatttactttttatacccctttttgacgtgcttaagccattttatttaagtcatttctcgcttaacct

SEQ ID NO: 249090 - DNA, 382 bp, Glycine max
agcttctaaacattatacatctcgttcatttacaaatatacttactacacaaaaaaccaacaagataaattatccataacagcattagggaaaaatattatcatttttctcttggttggataataaacacatttcttgttacttcacaattttaaagtcttgatatggatatggacaaacagacacactacaatacaaactctagaatatcctattctttctcatgctcaattgtataattttaccttgatcttgtattgctatcagaagttccaaataaaattgtatgaggcatttttaccccctatttcctcaattttcaaatgcttaaaaattagtccccaacacaattggtatataaagaagacttaaaaaattaaaa

SEQ ID NO: 249091 - DNA, 391 bp, Glycine max
gcattcaatatcctgatgagggtgtttcatattttctcaagactggactaatacatttgctgcccaagtttcatggtcttgtaggtgaagatcctcataagcatcttaaggagttccatattgtttgttccaccatgaagacccctgatgtccaagaagatcatatctttctaaaggcttttcctcattctctggagggaatggcaaaagattggctatactaccttgctcccatgtccattttcagctgggatgaccttaagagggtgttcttggagaaatgcttccctacatctaggaccactgccatcagaaaagacatttcaggcatcaggcaacttagtggagaaagcatgtatgagtattgggaaagattcaagaaattgtgtgc

SEQ ID NO: 249092 - DNA, 394 bp, Glycine max
  unsure (1)..(394): unsure at all n locations
agctngttagaactatcatcacatgacgctttattggcatagaataagttgctttctaggcaacttgagattttaacagaaacacttggtaggttggcaactaaactgtctattggtcaacctacacattcttctattttgcaggttacaagttgtaccatctatggtaaggctcatgaaacaggccaatgtattctcattgaagaaaacactcaagaatttcactatatgggaaatcaacagagacaaggatatactcaaggaggattctcaggcttccaacagggtccttataaccaacaaggacagtggagatcacaccctggcaatcaattcgacaaggaccagggtggaccttccaacaggccaattcaataagggcctaacatctttc

SEQ ID NO: 249093 - DNA, 394 bp, Glycine max
agcttatggtatccctcttcagcctttgttttccatcaatctttttgtttgtgaataccacgtgtggcttaatgaaaaaacaatactttgatgttcttggattcaaggggagtctaagaagtgggcgagaaatggccttgagaatacttgtatagtcaggagtgatgagttagaatacttgttttagatcagtctgattaggggaaccctttacaatttatgaaggaaaattgaacgtaacttaatttgagtgaaccagtataaaccaagtgtttctacttctctcttaagctttaacttgtatttctttaagtcctttttgacgcacattatgaaacaagtgttcttcgaaaaagctcttaagaaaactctattttatcactcattggacgac

SEQ ID NO: 249094 - DNA, 420 bp, Glycine max
  unsure (1)..(420): unsure at all n locations
acctgcggcatgcaagctnttccgctctacatccttccctactttttattatgaaggtttctctagagcctttctgcagcagaaaaaactatgcaatgttaaaacttgcaatctttcctcctctttcgttgttcaagaagatgaagaagataacactcgcgttcatgacgtgattgaagtaaaggaatcgtcaaagccgcaaccagaacctcaagtgacctatattcagcatagagttcaagaaatcgtagaagaggaaccagagagagaactaaaagttgacgtggaagcggaggagacactacaggcaatgaaggaccccatggagatggattcccaagtgaagaagagttctagccatgatttgaaggggtggttttgtgttgttgcgtcgattttcaagaagaagcgaaagattaa

SEQ ID NO: 249095 - DNA, 400 bp, Glycine max
  unsure (1)..(400): unsure at all n locations
agctttcatcaaatatatgcatgttttcatttatgcctttagtaaaccaatcatataataactaatcatatatgattgggtagagtacactcacatttttaaacattaaaaaaaacaattgtatgacttatgtaaatgaatgtngccaaaacaaatatataaacagaaaattacattagacgatgttaattaattctccttcattgtgatcattacggttagcatgaatgtcgtcagcttcttcttctccgacaatgttaggagtcatttgtatggacaaaggactaacataggtgtccatgtatgcatcaccatcttctacattaacactaatttttttgccctgtacaaccatgaaccacctttcatcacaaggatcttgcacataaaatacttgtct

SEQ ID NO: 249096 - DNA, 390 bp, Glycine max
  unsure (1)..(390): unsure at all n locations
agctttgagctntgagcttttcctactgttcttagtagcagtgntaggttttcttcgacttttcttcgataggaggatttgtgggttccagcaagcagtttccgacagtattgaaatgaatgtggggcaatgtgggtgtcgaccgagcggtttccgacagatctcaggtgggaggagaaagagaagagagagtgcagcagggttttcgagcgcgcaagttgtgaaatttcaacacgttttaacttattaacataacaacatcaacatcggttttttaaggataaccaatgttaggatgaatctgttaacatcggttttctaaaaaccgatgttaacatcaacaaggtaacatcggtttctcaaaaaatcgatgtttagttcaactcctta

SEQ ID NO: 249097 - DNA, 345 bp, Glycine max
  unsure (1)..(345): unsure at all n locations
actcatatcactcaactgganaatatcaccaacaaagaactactattagcaaattagcttggttattgaaaacaatctcgcttagctttctttgatcaaaggaagaattataagtatgagctgatttgagtatgacatacaaattaaccaccccatagtaggataataaggaataaccgcataatatatagttaatccttttttacgggtataaataagacaaagtctaagttgcctctaaataacaattctcagtaaaaacaaatatttttagagagggacaaaataattgagataaatatcaaactatctaacttgattcgttggtgacactaaaattcaaac

SEQ ID NO: 249098 - DNA, 357 bp, Glycine max
  unsure (1)..(357): unsure at all n locations
agcttgagatgagaaagtgtatataggtgaaatttcctgcttttattcgntgaccacagagtggtacctggagatatgtcgcgggggtcaggagaccttggggacgtcaggtggggtgctaatgcccaaaaccaagcttgaccaatcccgacccaacccggacatattcagtcagtgagaacctgtgatgtacctaaacaggcgagctcctgtcagtcaacagataaaaggaacaaagaccacaaagcaaggaggcttgtgtggtggctggccaactgtgaactttgattgatatatgggatatgggctctggtaatcgactaccaagggtgggtaatcgatacaaggcttaaaaat

SEQ ID NO: 249099 - DNA, 312 bp, Glycine max
  unsure (1)..(312): unsure at all n locations
gcagccaaagaggcccctcacagcgaccttataaccgcggagagcacnaatcggcaaaaaaggagagccccaggcccacgaaccacgcataatcggaatgccggaagcaacttggaagccaaagaaacacccgaaaaccagcggaatcaatggccggggccaaaagacaataatcggcgggaaaaacaaaaactccccacacaaaaccccatcttgaaaacatgtgatcaccaaaaaagagggggatattcccaacacgccaaaagaacagagctccgaagatgctggatacaccgaaacaccaaaaaaagc

SEQ ID NO: 249100 - DNA, 375 bp, Glycine max
  unsure (1)..(375): unsure at all n locations
agcttgcatgaattacattctccccctctctttagcaaattcttaattcttcttcacatcgncaaaatcttcatgatttacattctccccctttttgatgatgacaaccacctgtaggttaggagcaacaacaaagaaaaaatatctatttgcatatagtttactcccccttggttttggaatgattgcttatatgaaacagttgaagatttcatatttttcatatgtaaaccttattgtctcataaacaatagataatttttcttactattttatcttttatctttctctccccctttgtcaacatcaaaaacaaatcatgaatagagaagagaaagatgttaccacttgttgcaatgtatgagaatcaagtga

SEQ ID NO: 249101 - DNA, 380 bp, Glycine max
agctttggagtatccaattgccaattcgttttcttctttagtccagccttcttctggcttcaattcatccgtgggctttccttctgtgtccagcatcttgggatgttcccagcctttgatgacagctttccaggttctgctatccagtgatttgaggaaggccaccattcttgctttccagaattcatagttggttccatcaagaattggtggtctgttcactggtcctccttctttctccatgttcatcagaatttatctccctagatctcactcagtgatttcgagtgcctgctctgataccaattgaaattctgatactggggacagatgtcgtacaggatgtcacgacatcacgcttcagaacatgcagattatat

SEQ ID NO: 249102 - DNA, 407 bp, Glycine max
  unsure (1)..(407): unsure at all n locations
tgcaagcttatgctgttaacatatataatagaccctttcattagcaataccaacaacatcataataattatgaccttntaagtaacagatacaatccaggttggaggaatctccaaatctgaaatggacaagtcctccacaacaacaacagtctgtccctcctttccagaatgctactggtccaagcaagccatatgttcctcctccgatatagcagcagcagtcacaacaaagacaacaagcaactgaggctcctcctcaacctttcatagaagagttagtgaggcaaatgaccatccagaatatgcaatttcagcaaaagacaagagcctccattcagagtctgacaaatcagataaggtagatggctactcagttgaaccaagctcagccccaaaattctgaca

SEQ ID NO: 249103 - DNA, 400 bp, Glycine max
  unsure (1)..(400): unsure at all n locations
agcttgttagaagtcgtgatgtgaaattcatggatgaccaaactatcgaagacatngataaggtggagaagtctacacccaaggaagacaatggtgtggctgattttaaactagttcaaccgcctattcagaatcagaatactgatgttcagaatgatgttggtgtccagcaacctgaagatgaggtagatgtttttgctgatgatgatgatgaagaggagcatgacatgtcacaagatgaaaatcttggtgatgctaccgaaccaccttaagttcaaatcaggagatccaacaaggagagacaaccttctaagaggtattctactaatgagtatgtgatcctaacacatgatggaaaacctgagtgctttatagaggccatggaaagtgaagaaaagac

SEQ ID NO: 249104 - DNA, 384 bp, Glycine max
agcttgtaatcgattacacacatattgtaatttattaccagaagatattttcagaaaatattctcaacagtcacatcttttcatttgattcttgaatgaccatcaaaggcctatatatatgtgacttaagacacgaatttgcagagagttttgattgctcaaaaagttttatcctctcaaaagattaagagagttttttttgaattaaaaatatcttatcctctcaaagattccttggtcaaacacttgcatattcaataaggaattgcgattgatcttcattgtacaatctatctctttcaagagagatttcttcttctcttcttcttacttctgaaaagggattaagagaccgagggtctcttgttgtaaaggaattctaaa

SEQ ID NO: 249105 - DNA, 395 bp, Glycine max
agcttagcccttagatatcggtgacacaaattttttatgaacatgaatgatcttacaaaaaagagcattgcttgcgtaagattgcactcatttcccttattaattattaaaaataaatactaacgtattctattaatttcgggcaggaattttttcttcattggctaattatacctacatttaggtacttgtaatacacaatattcatgttccatcattaaccttactatatctaaagtttcaaatcaatcataggaaataaacattaacttgactgtttcaacttccatgcaaacactaatatagaattgtctcttgtgtgtttgcatgaacacactccattgaatactaatgaatcatttcatttgatgagtatattttcttacttcttgacc

SEQ ID NO: 249106 - DNA, 376 bp, Glycine max
agcttttcgcctggtttctctattagggtttttaatcgttagagagaatgagaagaaaatgtagcctccattttactatcaacgtgcgagacatatttatttatgtaaaaatattatttcataaatcccaacggtgagaatatgtgaaagtaggttctgaaggtgatgtccaaatttcacgacaatccaacggttgacaatttcataattgtagtattactaaaacatgttttgggtgtctacaggaaaatataaaacttagtgtgagagacatttcttccaccacatacattatcttgaaaattacaacggtgggtgtctgcaaaaataagttccaaaccacaagttcatgtttcatgatgatccaatggttaat

SEQ ID NO: 249107 - DNA, 385 bp, Glycine max
gcatgcaagcttgaataaatagttatctatttgcacttattgtaaagcatcaacatactcacagtaagatggatcacgctttgttgatttttggtttttggtcatcggtttcttctgtgcacctttagtgttgaccttttctggaggaggacacatagagttttgatcagggtaggcaatttcctggagtttactctttagagttactttgccacaacatcaagctccttaaattgcttgaatatggtttccatctcttccgttatggtcacttagggctcagataacccttggtctgaaaaaattagcctccgccaaaacatacggattgaatcaagtgggatggaccaagaacatatttcgatagctcacatgcacatggaag

SEQ ID NO: 249108 - DNA, 400 bp, Glycine max
  unsure (1)..(400): unsure at all n locations
agcttcggttttataaatacgagcgtnctcgatatattacgggactcaaccggacttcttaacgaaatgatattgtcggtataatttgcacagagctctcgttttaaatttcgagcgtctcgatatattacgggactcaatcggacttccgagtgaaatgttattgtcgttcaaatatgctacgagcttcgattttaaatttcgagcgtcacgatatattacgggactcaatcggacttccgagtgaaatgttattgtcgtaagaatttgctacgagctttgcgtttaaatttcgagcgtctcgatatattacgggactcaatcggacttccgagtgaaatgttattgtcgttagcatttgctgcgagctttggttttaaattttgagcgtctggatata

SEQ ID NO: 249109 - DNA, 404 bp, Glycine max
agctttaggagaaacacttaaactaaagttgttcctaaacaaataatcaatgagggagctccgccaagtgtccccatcgaaattgaaaaacctttattcaaacctttcaaagttagtgagaaggctaaacggaaaattagggaacttagaaaaactaaatccttaactgagggcgtaggtgacaatcatagtgaattactaaacaagattggtagtttacttaaggtcattccagatactccccaaacctcggaaaatacttccaaaatggtaacaagaagtacctccaaattaattaatgttataaatgaagatagtgaccaaacctcagataacacaactgagataggatcagtgtcagaaaagaatataaatccaattaattccaaacactggaaaacacc

SEQ ID NO: 249110 - DNA, 404 bp, Glycine max
gcttcaatgtagcaccacccaattgccaatttttagtgagggcacctgtcagtcatgtgagggcgaccatgatcaacacaaccgaataaactactacctaatactataatttaaagtgctttcttgtaacaaagaatgggtgcatttgaataataaggattacaaaagtatctcataaagaagtttactgcttctccataaattgtatttagtgaactacatgtaaagtatgccttgatacaaaaggggtctaggccagatttctagtcataggtaaattgaggtatgatctcaaatctcaaatgctcaattaggatgttccaacaatgttagcttataaaaaatattcaaccttgtatcaacctcatggccaaaatgcaatgtttcagctaaaaaattaacaa

SEQ ID NO: 249111 - DNA, 407 bp, Glycine max
cagcatgcaactgctctaaattacattgaggttgttttatgggaggtggttgtatgtcatttttgtattaagaatagtatcccactggtaaaactaactttccaaatgtttgccttcgcaggaaatggccccgaggaagcttgcctcaaagaggtccaggaaggacaaggcagcaaaaggaactagttccgctccggagtatgatagtcaccgctttaggagcgcggtacaccagcaacgcttctaagccatcaaggggtggtcgtttctccgggagcgacgcgtccagctcagggacgacgagtatactgatttccaggaggaaatagggcgccggcggtgggcaccactggttactcccatggccaagtttgatccacaaatagtccttgagtttatgccaatgc

SEQ ID NO: 249112 - DNA, 392 bp, Glycine max
agcttcccaccacccacaaagccaaaaaaaaacttttcccatttgcccatgattgtcctcacatgaatctgtagttcctaattgaaaatgcttatttattgagtgctttattaaaagaaagaaaggcacccaactaatactataaatttgttaattgcatttgcacccttaacaaaaaatgtaagaagtgtttccttcattactttgcaaaatctagatgaaatagagtgatatcatcattctaaggctctcaaatttcagtaaaattaactaaaaaattagttaaaaattataaaacaaaccaataactaaaaagttatttggaaaatggaaaacaaactgactgaaaattaaaaaattaacaagtatttaataaaattagatattgaaat

SEQ ID NO: 249113 - DNA, 390 bp, Glycine max
agcttgtttgcttaccgttttatacggggtgtttatatgacacaaactcaacaactttcactgtaaaagaaaggataaaaaaaaatgcttccttgaatgacggttggatataggccgagattgaaatcggcaatcgaaacacactaatttgttcgtccgatcaattcaatttttagaccgttgtccgatcaatattatctaaagcttctacacggagatttttatgagttactgatacactaatcaagtgaatgaacgttaaactcttatcatatttatggggaaataatcggatggtgcgcggactcacgggattcttgttgaagtgcaagatggaaggactcatatactccctgcgctttgccagaatctcgtcagcggtgggccccg

SEQ ID NO: 249114 - DNA, 391 bp, Glycine max
agcttctacttatgtggcagggcgggcttccttcactttcttgtccccaacgcgagctctgaccactgttcttccttcccgcgatgcttcttttcatgtccgcctgagtgggcttatagcctaaaccatacttcccacgatttccttgggtatttatcaggctagttatgccgccgttgttttttcctaaacccatcccgggttcataaccgttccccaacataactcgggccatcattaccgctgcatcggacagacaaggctgcccaaagagggagtccacggaggaaatgctgaccacctcaaaagactggaaagcagtttctaacgattcttctgcggcttccacataaggcatggaggatgggcagcttaccaagatatcttcctc

SEQ ID NO: 249115 - DNA, 376 bp, Glycine max
agcttgtccccaactctaaactcttatgtgagaaactctcatccgaaacaaatctattgtacaggccttcttcggaagttcagaatggtgaacaattcaattgccactggccattacaatcaagtgattatgatatgaaggcaatgtataaggatctagttcattcacggcctgtggatggggatgatcaggagaaacaagaatctgttatgtcagatatatcagcagcgtgtgggattacaattgcctcagattctaaagttgtagagcccgatatttttatttttgatgagttctgggaggggttcttcaattccacttcacatatcaggttttgtgggcaagaggatggacacaagaatcaatcagagaactc

SEQ ID NO: 249116 - DNA, 321 bp, Glycine max
ggctaacatatcgcctttgggtgacaaggaggctgttgtctaatctactgacaatgatgtccactctgtcaaaccccatcctacctatggggttatatgggagagggaggaaattgacgctgctccctctgaagaggagtcattccaccacctgggtggaatacatatgaagattaatatgactgacgccactgcatgggccaaaattaccgcttatatggccgaaaatagactaaatacggcctttgaggctgaatctcaacaaaatatggcagttgaagccataatcgaagatcttgaaaacaataaaacataggatcg

SEQ ID NO: 249117 - DNA, 377 bp, Glycine max
agctttataatcccaacttcttttcaaactatgtaaagaagaaattggattgagttgtgggaactgagatccaaatgggttaggttggatccattgatggattggaggcaattattatcaggaatatatgtgatataaaattacattaccttgtagtagtaattctgcgctagttctgtattaaaaactgcattatggcagttatcatagaaaatattagatccaacccactgatggattggaggcagttgttattattagaagtatatatgtgtgtgatataaaatcacttatcttgcattagtaatactgcattattctgtatgggaaactgcatgatggttgctattcatagaaaataactgatgacagttatg

SEQ ID NO: 249118 - DNA, 376 bp, Glycine max
agcttatcgccagcatgcacttagcccaacttgactactggaacataattgcattagtgagattggcttgctaagccttattctgaaacagagaagaaattacgcttagcgagcatgactcgcttatcgcatgaacagaatttaagaaaacaaaattgccttgggcttagcgagactgactcgcttagcccaggcttattcaagctaaagaagcatggtggcttaacgagactgactcgcttagccgccaatagaataccaaaagcctcaaacattctgacctaactaaactaactcgtttagcgcggcatgccgacttagcgagttcatacaaactcagaaattaaaactggaaatttaaacactcgccaagcct

SEQ ID NO: 249119 - DNA, 387 bp, Glycine max
gctcatggttatcgaagatcttcattttttgccttgttggtgaagattcactttgactttgggtagtgttttctttcgaagcagctttggtggttgaaaatggaatgtcttaggaggaattggccctaatcgaaaattgaaatgtgttgggacataaattactctattagcctaatggtacaatcttgtcaaccggagaaacttcaaaaatttctctcttgttttacttggttcagcatggtcaatattttccaaagttgaacttacctcaagagcatgattgttagtttcatcatcctaaacacaatgttagtatttcaaagttttttgtgccaaaaaaataaacaagtaaataatttgatacttatagaactcttggagtttgaa

SEQ ID NO: 249120 - DNA, 386 bp, Glycine max
cctttggcctcctcatgttgttgttgaaaaaactggtctattttcatcttccactccaagtaggcctccggaacattctttcctttaaaaggaggaatgttgagtttaacaccatcaattcggttttgtctaggaacaccaatattccctattcttctcctttcttctcattatgatctctattccaacctctcatggagcgcatcatctcgttgtctcattaacctctccaaatgttgcatcaaagcttgcatttggaattgcgaaagccccactccatcattaggattagtacctgacatcttttacaaacaaatcaaacgtaacaagacaattatagtggctgtttgaatacctcacccactcaagggtatcacacaattatg

SEQ ID NO: 249121 - DNA, 400 bp, Glycine max
aacttgctgaaggttagagcttggggaattaatggtgtgatattggtttcacccttcccccttttatgtattcatcgtcagaccatcgctcgcccaggtgagctggccactcgtcgaggcgagctaatattttttttaacaaaaaatcctttgcaaacgtgcgttattcattgttatatttcctctctaaaaatcctataattgcatatcaacttaggcgaattcaggatattgttcaagaaaacaaacatgtatgaaataggaaatcttaaaaagcaaagctagagatactaggctgcctcccaagagcgcttcttaaacatcattagctggacgcggggtggtgaacgattgatcatgggcctaccacctgttcatacctgcccctaaacttggacaa

SEQ ID NO: 249122 - DNA, 251 bp, Glycine max
aaatttcacggaaaagtatttcattattttgaacatcaatttttaatagggctatgtttaataaataaaaccatttatactctgatggtagaaagaaacctgaccaacacagcttaactgaaccaagtagaaataaaatcaaatattggcacaaaatcaatattgcaaaaagcatttgaaatgcgaataacttctaatattttatattcattctcttataaggcatataataaaaactcattttctatttt

SEQ ID NO: 249123 - DNA, 390 bp, Glycine max
gcttattttgcgctgctacagcctacaactcttagtcctcactcctcacattgctaaacctcttgctgggaaaaagctttgcaagcgaaccctaaaacttgttcatagaggttagctttatcatccattcacattctctcaatttgtctgtgtttctttttatttgctgcttggtgttagttaaagatatatattgtgttgattcagctgccgaacacaaatgcttgaaaagaggagtgaaggaggtcgttaaaagtataaggagaggtcataaagggtttgcctgctttctttctaactttttctttctcacaaaaacattagaaatgcttaccctaattttcttgtattgtgaatgcatattgtgtgtgattgctgggaacatatcac

SEQ ID NO: 249124 - DNA, 391 bp, Glycine max
cgcatgcaactcttggatttcacctacttttgagatgtttggaagaaaactttctggccaaaatgggtcatggtcactatacgatttctattgagcccatataaatatttgagatctactcctccaaccagtaaagttgggttcaccacaccttggctgtatgtattaaactgcctgctgtcattaccttgtaacagatgccaagagtgttctatgtaatccttcgatcttacaacaaaggaccaactgatttcccatacagctacagttaacaatcaaactaatataagcaaaatgcgttatatcatgttatgattatttgagactaatcttgaatattctaacatgatccatattatgaactgtgttgaacatttcctctggatttatg

SEQ ID NO: 249125 - DNA, 382 bp, Glycine max
agcttgcaatgctgcacatatacttaaggatttaaaataaaaccagcacacaatagcttctaacaaagagagagttactttggtggtgtgggaaactaatatggggaaattggaaaggaaaaatcataactacataaaacgaattaaaaggtgtcaagttttaaagttccaaaacaacagtcgggtaagatattttggtggagccaacattatcctttctactttgattcgtgtaattgttttaaaactttatccctaaaaaatatgaaatcattattttcagcgcctatcaaatcaatgaattttagttttagcctttaaaaaacaatagggttaactttcagcctctaaaaagtgaaacacattattttagtccctagca

SEQ ID NO: 249126 - DNA, 371 bp, Glycine max
  unsure (1)..(371): unsure at all n locations
agcttgagaagaggaaatgatgacaggngattcttcctgcttttattgctgaccacaaagggggacctgaagatatgtttcgggggtcaagagaccttgggacccacggggggtgctatgcccaaaccaacttgaccaattccgacccaacccggggcataacggacactgagaacctgtgatgtacctaatcaggagacgccctggccgaccacagataaaaggaaaacaagaccacaaacgcaaggaggcctagctggcggcntggcacaccctgcgaactattcgggtaatatcgtggagcggaggcctcctggtaatacgattaccaagggtgggtaaatcgaatacaaggcttaaaattgaggaca

SEQ ID NO: 249127 - DNA, 329 bp, Glycine max
  unsure (1)..(329): unsure at all n locations
cgcagctgcaactttttggacctttacagccgctatctcctttaagacacgcttgtgctcgagatggctnttattcccttgaagcagagctcatgatgccgccccacaaagctacacgaaattttctcggccatgctctttcttgcgagccctccaggattcttgtcaagggctcttgcggtagccgtattttctttctcgaactcggcacactcttccagatgaatgtagcactaactagttctttctttggcaaggcttgcttctcctagaccggatattagagctcggacatcttcatactcttctggagcttcaaagttctcttc

SEQ ID NO: 249128 - DNA, 376 bp, Glycine max
agcttgaggaatcttatgatacctctagagtattcactatcgctgttagactacacacatgagcccacttaaaggtaagggatgagtttctcatgcttagggattataataaacatattttaggatccctaaagatcaattctgggttgttttatgaaattcaattatgttcccatgcttttaatcatagaatgactgcgtttgataaaccaattgatgtctctatgtaaaattgttgtgaaaatgatgtgttttattcccttgtctcatgctttgaaaacttatctatgattataatatgtgtctttctcttgttccttgaacttataaattgtacatttgatttcttattatcgtgaattgagtgtgccttcac

SEQ ID NO: 249129 - DNA, 405 bp, Glycine max
agctttgatgcaacatttggagagggtaatgtatcaacaagatgatgcgctccatgagaggttggatcaaatggagaatagagatcataatgaaaaataaaggaggagaagagggaatgatggtgttcctaaacaaaaccgaattgatggtattaaactcaacattcctccatttaaaggaaagaatgatccggaggcctacgttgagtgggagatgaaaatagagcatgttttctcatgcaacaactatgaggaggaccacaaggtgaagcttgccgccacggagttttccgactatgctcttgtgtggtggaacaagctaccaaaggagagagcaagaaatgaagagccaatggttgatacatggacggagatgaaaaagatcatgaagaagcggtatgttcc

SEQ ID NO: 249130 - DNA, 405 bp, Glycine max
  unsure (1)..(405): unsure at all n locations
agcttcttgcgacttgccagctcagnttcgttcattactttcatggcaaaacaagtcctcgtgccacttaattcggctagatatacacttcctatgtctccacatcccaatttcttcaacaacctgaaatgtctcatttccaacaccccatcacggactcgaatggcttgaatcgcttcccatcttatatcatttgccttgtggggtttatacaaagcagtgctcaaactactggtgctgctctcatcgctaacgtcacttccagtactccctctacagatgctggtcttcctgctctcattaaattcacaggaattggtaacttctccactttcaactgatttatcaacactcacacattcactgccaccagtattggcaaaactttccttggcttctgaatag

SEQ ID NO: 249131 - DNA, 395 bp, Glycine max
gctgcagctgcccgagaagatccacgagaatgctacacctcttaagctggatatgcggttctaatgactcctctgccgcctccacataaggcataaaggatgggcaactcaccaagatgtcttcctcctttgaaaaaaaccagatgcccttccactacgaatttcaacttttggtggagtgtagagggaacaactcccactgagtggatccacggacggcccaacagacagatgtagggggggttaatatccattatttggaaggtaacttgacaggtgtgagggcctatctgtactgggagatcgatctctcccctaacctctcggcgggtgccgtcgaaggcactaaccaccattgaactcggctttatgtgggaagcattgaatggtaattt

SEQ ID NO: 249132 - DNA, 399 bp, Glycine max
  unsure (1)..(399): unsure at all n locations
agctntgaaaactctctggaacttggacctttctctctttagatttctctaaacatgcaaaagctttgataatttcccaaactcccctccaaaatctgatttcaggcttaaataggtggctttgtttgtgctagcacgcttagtgcaactatggaccgctcagcgtgcattagtggatttcggcttagcgcgtgcgtttctcacttattggatggactgaagtggtgcgcttaacgggatgacccttcgctcagcgcatatgcacaactcatccttcttccagattcttcctcgtaaccggggagtgttgtgctcagtggatggctcactaagccagaagattggcttagcgagcggatgaaaatcaacacttcacaaactttctaaattaacctaaaa

SEQ ID NO: 249133 - DNA, 382 bp, Glycine max
agctttaattgtaaggattgaaaatatacattgtataagagaggtgagatcatttaattcttctcatggagaggatgaagggtttgaccatgatgagggaggaatgaggaatgaaatgtataggaagagaagaaatcctataagatatggaggtatgaaaagagaagaagggattaatggagtgaaggtgaagatccatacttttaaagggacttgtgatccataagcgtatcttgagtgggagataaaggttgagcaagtctttgcttgttacaactataatgaagagaaaaagatcaaattggcctcactaaagtttgagggatatgctttattatggtggaaccaactgaggaatgatgttgggatgatgagaaggtat

SEQ ID NO: 249134 - DNA, 391 bp, Glycine max
agctctgaaaaatccttttacaagcaaagatttccaagggatgtaccctcccttgttctctttgacaccctattggatgtacccttcactagaactgatccacaagagatgtaccctctctggttctcagacaaacccaagtagatgtaccctctacttgtaccacaaaggatgcaccctccaatgtgttaagacaaagatctcaggctgttaaacctttgatactttgtgaatggggatacaaaagaattctcaggcggctagtcctttgaatactcttgtataaaggaatgggaagaatcaaaagaattctcagactgtgtccgtttgaattctttgacaagggagaagggagacacacaaaaattcaggcggttagtcctttgttctt

SEQ ID NO: 249135 - DNA, 381 bp, Glycine max
agctagggcttaacttatttaaactatcaattttaactattagcttgaatttgtttgcttaactaaacaaacttcataagcactaaattcaaatcatttacaatcctctgaaaaaccatttaaacaaaacaccacctgtagccaaacaaggctttgcagggtaactcttggaagacatattccttgtagatcaaacatgtagactaataaatgagacttgattactaagcatacactcatactctaaaataaggtaggtgccagcttgtgaacttaccttttttgtaagtaagctggtacacccttgctcttccaacagacagagttgaagcgtatgtaaacctttgatttggctcctctaaagtgaggatcgcgcatttt

SEQ ID NO: 249136 - DNA, 394 bp, Glycine max
agctttgaccttagatccttcttgttggactatacttagaccaattaacattattgtaacagcatatttaaaaccaaaacttaatccgtagatccctcttgtaagactaagtttcaatcctgctttattcaagttctaaggcaacaatacatttcccaatgctaaagtcacctaactatgcacacaaatgggtgatcagaccaagagcatacaaaatttaagcactaaaagaagcattgaacacaagaaacacaatcaattagatattaaagtaattacattagctgttctttagaaatccccaacaagggtgtttagccagccattacagaagagaccctaacaataatgagattacaaaacctaggtatcttttgcaaagctgctcctcttg

SEQ ID NO: 249137 - DNA, 381 bp, Glycine max
  unsure (1)..(381): unsure at all n locations
agctttaactttctcattaaacacatagtttcatttaattcctcaagccaccatttcaatttttctgaaataattgcttttacataataataaaacgtcttaatacaaatagcatcgtatctcagcatacatcttaacatcgaataattcgtttgtaatctccgaggagtgtgcttccaaactttgcataccctcctttngacactataactatgatcgggttcctttcgccagctcgtactatcgactagggagcgacatttgcaactgttgaggatgcgaagatcgaggagaaccttttcaaggtatccacttagatagatttggggttatggtacaacatgcggctatacatgcagttttttagattactgctcggag

SEQ ID NO: 249138 - DNA, 368 bp, Glycine max
agcttgtcccatattttattggagcaaatatgttcctccctgagagctccattttctctttctcagtcagatcaaaaaagccctggctcgccctaatcacctcatcccttagggtctccgaaacaccgcgattgattagctgcataaagtatacttcaaaattaacgagacagcaaaagttacatgcatgcatacggaaggaattaaactctaatatgcacgtggagaagtcagcgaaattaaagcatataatataaaaattcataatataaagtatgagggtaagtatattaataccatatagaaaccccaatcgcggcaagcattgcctaattgttggattgccttggatcgttcattgggattgg

SEQ ID NO: 249139 - DNA, 322 bp, Glycine max
cccctttgtaaatgcgctgcagctggcttagctcagagtagaggggattatttttatccggccaaaattgatggactaccaacaaaacattttgatcacaacttaattagtgaaaaactccatgactccagtcaagcttatgaggcacggaaacataggaaaaaatctatatataaaacctggatgatgacaattcttaggcccttcatacgcgcgagcaatttttgaagggccctgatgatcacattaatatattcgtatccaaaaactgggtgatattaaagttaaaagcaattgttatattcatatgaagaattatatt

SEQ ID NO: 249140 - DNA, 404 bp, Glycine max
  unsure (1)..(404): unsure at all n locations
ttacttaccttgcattntatagtttttagcatacaagtttaatttgaattctgtttgaaattatcaatcatacatgttctctcacaaatgttgtatttctgaacttaactcaggctaacattagttccctgtgttcgatactccgattcagccattttaatcttaaaatactggatgatccggtgtgctttccggcaatttagatttcccttgaatatatttgaacgaagaaaaattggaacaaaaagtaaccaccggggaaatccaacaaagtatttatggtgccatcgccggggaactaagctgttagtagagtttagtttagttgtgcaacattgttctattctggcttctttgattcatcgattcttttgactaacatagtagttatagcacattcattg

SEQ ID NO: 249141 - DNA, 285 bp, Glycine max
  unsure (1)..(285): unsure at all n locations
atattcatcgactaagacctctcttatatntacagtgttgtcttgtcctcaagcaaataaagaatagctcactggctctcaagtgacaataacatacaatgactatgtacaaaggtgtatgcaacacaagttactgattgcatgataaacgaatgaagcaaactgccctcatcacttgtctttcacaaagcatgcatttattcacagagaaaaataaaatgtaacctgtccaattagatgaagtatcgcataacacacatatcaacgaaagtagcttataccaca

SEQ ID NO: 249142 - DNA, 312 bp, Glycine max
  unsure (1)..(312): unsure at all n locations
cccataagaaccttgatgttcttaagctctatgaatcacacatgacatgaatcatgattgatgaggtatctggacctacctagccttggtgttgaaatttaactccctttgagtttggggtgaataatcanaaccaaaattcatccaattgtcacatatattaactaatatgttagtacaccagtgatgtaaatatgccatggagcttcatatatatatatatatatctatatagagagagagagagagagagaactaccttctataacataccaggctacttatgtatatgtgtatattatctaatactat

SEQ ID NO: 249143 - DNA, 323 bp, Glycine max
gaaattctagcaagaatattggtagcttcattggaatggtgaatttttggttctattgctaaattaaggagtatttgtaattgaaattcttgttaattgaaaggttgaaaccatgcttaatgttgaattctggccatgctaaggtggtccttcgaacatggacaaattatctgttaattgaaattctggcttcatcacaggtgagtagtgggttttgttgctgcctcttgggtagtggattctgtgctgtccttttgagaaactctacgaagttacgattcgatttacgatcgagtttcggaacctcacgatctacgtaaata

SEQ ID NO: 249144 - DNA, 324 bp, Glycine max
  unsure (1)..(324): unsure at all n locations
atatgagtgcgcgcaagggtgtatgctccacacttatagaacaagaatgttagctngcaatcagaaatgtcagtcagtagacatattgattgagaaagaatagcttgaaccataacccggtgagagtgtgaactcaattgttgagagaacgactatcatagagcaatgatntctgtatcaatctctgaattttagaatgaaatgcataaatgtggatatgatgaacgccattattgttttgacagccacttgaccaaaaagctcacctatntatcaatgataatatcatttgcacccatctgtgaactgaattgtaattgtcaa

SEQ ID NO: 249145 - DNA, 386 bp, Glycine max
gaggggggagcacgaaattgaagggaataaagagggagagaagtggaactttgaagtatgtctcataaaactctcattcatcaaagttacaaccagggttacacatgcttctatctatagactaggtagcttccttgagaagctttcttgagaaaacttccttgagaagcttctttgagaaaacttccttgagaagctagagcttagctaccacacccctctcataactaagctcacctccttgagaagcttccttaagaagattctacagaactagagcttagctaccatacctctctaatactaagctcacctctgagagagaaacagagctagctacccccctatatagctagctacccgtgacaaaactgagaacaaaaaaa

SEQ ID NO: 249146 - DNA, 210 bp, Glycine max
ggtggacttctttctctcttaaatttcgtcggtatggggtcttgggagatatgatgggtggtcttgttcgttctctgctgtgtaacgattatttgtgaacgaactcgttgaacgctctgtcaaattgccatgtttggatgagttacacatacccattctgcttcacggctttgtgatgatgtttatatgctgaaatcgcctatggaaact

SEQ ID NO: 249147 - DNA, 403 bp, Glycine max
  unsure (1)..(403): unsure at all n locations
agctatgctttcagtcagttccaggcttttttttgtgttttctggncgatcgcgcagctcgcgtggacggcacaccttaaagctttggaacgataatttcacttctcaaggacattattggttagcacttaataattgttcttcaacatattatgaaatattacatcaacccgcgaatcatttaatattatctttcttattttatattaaatctcacattgaatatttgttgatcaattatctagccgcgaaaatntatctatattttaaataacatatcgcattacacacacatatcattacaatatctagacaacagtgcaacccatcccatgaaaaagaatacttctcaattgagagtcaatctggaaaaatatgtttataaataatattgataattaag

SEQ ID NO: 249148 - DNA, 338 bp, Glycine max
  unsure (1)..(338): unsure at all n locations
acgagcatgtctcgaaatattattcattatcttagatttagctgcagctgctataacagagtaacaattcgagaacaaatctgcaaaatcataatctgagaacaaataaaatgtaatattgaagcacatggacaaaatatcaaaatacatcatgagtgaatagggcctaaccaaaacacatccaaaatataactcctaaataggaatatacacctcctaagttcatctactaaactatgactctatataatcctatgccgtgganggaggaaagaaacgagggaagaacaacaataaatntacattggaggataaatgtaaaanaagacaaattcaac

SEQ ID NO: 249149 - DNA, 364 bp, Glycine max
gatttctctctatatactcatttagtcttcctgacttcactttctatttctgatatgggccttacttggctagtgcatgctataaagcaattttgaatctgctcatacacataaggttgctttgattttaagctgggataaccatgttacaatttatttgatcaagtattttctttacacgtcatgtttggtatttgcttacttagtgatgattttctgcatgaaaagactatgcacacactttatctaaaaattattttctactgacgagactaagagtgagaaaataatagagaactaacgctcatcttggtcttgacagaggaaaaagtgcaaaatacaagcttcttcatttttgtgatgt

SEQ ID NO: 249150 - DNA, 278 bp, Glycine max
ctcctaactaacatgactagacttccactcatacgctctacttgaagattactgtatcctccttaatataatggccctaaaactacctctctaccaaatacacttggacaactacatacagctatgttttgaggttgcaacaatctcaagctcctatgtctcttatttaaaacaccagaatatctatagaccctacaaactattagtggggtgaagactatcatatatcatgacacacagggcgtggtacaccaaagcataccaatctctaatgaccg

SEQ ID NO: 249151 - DNA, 356 bp, Glycine max
  unsure (1)..(356): unsure at all n locations
atgtacctacctataagaaacagtctcactctcccaattttacaaaatcatattcatatatcattggggcatttcaccgagcactcggtgggcgtatgtttggacataaattgcaagaggatggggacaatgtggcatgccccattgcttagaaaacaacacaggcctaaggccttctcacaccaatccttaactcaacaaatcaagcattaaagcaacccagaactgcctcacgaatataagcacgttctcacaatttacagcaccaaaagatgaagaatacacatcaatgggaagctaanaactcaaggattgaatacttacctattggagtgagtaataacaccaaaaatgaa

SEQ ID NO: 249152 - DNA, 70 bp, Glycine max
cctcatgaaccttggttttatttctaaaagtttgtatctccattctttggaacaccttattcctcctccc

SEQ ID NO: 249153 - DNA, 294 bp, Glycine max
aggccagcaacccaaacacaaacacacactgggagtgagctaccacactcccaaacaaaatacggataaaccaaaacacaagccaagaaccataatcactcatagcataactcaactcaattcaatccacgtcacttcaccacttgatcattcaaaagccacacttcaattatcaatcacattacacatgaatcatacactcgagtcaagacaaaacaacactcaccaataccatcctatacaattcacaggcattatgccaaaattatatcgagactcaaatctatatgcacc

SEQ ID NO: 249154 - DNA, 382 bp, Glycine max
tgctatagggtggacctcgcagaagagtatggagtcaccaccacttttaacatttctgatttcactccttctgcaggtggagctgatattgaggaggatgaactaacacacttgaggtcacatcctcttcaacgggaacgggatgatgcaatccttcctacgaagggaccaatcactataatcatgagccacacgctccaacaagattgggctacacctgctgaacaacgccctacggttctcatgaaccttaaggtacatctctgagcccatgggccaacgctgggcccaattatctttgtccatatacactacgatgcattatattcgtcctcgattcaggctcatattgtcgtaggtacctaaaaactgaatttcaccc

SEQ ID NO: 249155 - DNA, 344 bp, Glycine max
  unsure (1)..(344): unsure at all n locations
ctacgattcaaaggattagattctaagagagcacaaatcctagacttatccaagtgatctttttaatacagttagcttgctcactagcttttcactttcatttgtttttgaccttattacatcagcacacattttctttgagttctttctttttcttctttnttttaacacacaacttatttgttgtgtgtgctgatgctttatctttntctctgcatcccaaacagttccactccccacaattggggtaaatttgccttaaaccatatgctctcctagaatctaaacaaggtatctggagataatcattcaggttcagggttcaattattgacaaactcattc

SEQ ID NO: 249156 - DNA, 265 bp, Glycine max
aagattgtagtcctcctttcattgccaacgtgtgagactaatttctctctacataaacattatctttcaaatcccaacgcgtagacggtgaaaaaatgagttggaaaagtgttgtccaaatctcacaataatccaacggctaatgattctggaatcatagtcttactgggataaatctgggtatatgcgggaaaagagacagctcaatgcgacggacatttattctatcacatacaatatcttgaaaatccccaccgtgaccata

SEQ ID NO: 249157 - DNA, 400 bp, Glycine max
  unsure (1)..(400): unsure at all n locations
tagcaaacaaacaaaccaatcttttattatataagagtaaaaaatcaagaatatttttgagttgcttaagagggacaaatacagcaaactagaagcaacaagtaacacatcacatacctttttctgacttgatcccggaggagtgcaaagcaatgtcngtgatgccggtgtcggaagagtggaggtggcatccatagttgatggttggagttagaatgttggaattaaaactggaaagaacccaagtgcaagtnagaagaagagtctcanaagtcaaaactcattaataaataaagcgtcatcatttgatgatcattgcattngatggcctatatattatgataactcatcgctcattaaagcactttcagtttttgaaagcttacattacatacatacg

SEQ ID NO: 249158 - DNA, 375 bp, Glycine max
  unsure (1)..(375): unsure at all n locations
ctggatctttgagcttctttgggtcctttaatggtgattctccaccatggagatgcagcggacgacaaagganaagaggtgagaggaggcgccatccattaaggaataagccatggaagaaggagcttcaccaccaagatgagccttggataagaagcttggagaggatgcttcaatggaggacaagaaagacggagagaaagagagaggggggagcacgaaattgaaggaagaaaaagggagagaagttgaactttgagttgtgtctcacaagaccctcattcatcaaagttacaacaagtgttacacatgcttctatttatagactaggcagcttccttgagaagctttcttgagaaaacttccttgagaagc

SEQ ID NO: 249159 - DNA, 352 bp, Glycine max
atctcgcaagcaattaacttagactagcgattgtttaaccaaattcagccgtaacacaattggcacgcccaatgggacaagtcaaatgtgtggttctgctttaaattattgttaaagttttattcagtgcttgtggtttatcgcactcttaattgttttgatcttgcatgcatttaacaaatgggaaatctgttccacacataacagaatttaaaactcgtacaacgatggctagaccacccccaagtaatcgaaacaatgaccttccaaatatggaggggcaaccaacgcagacatctgttagtaatgccaatatacattctggatatgagcaattctgacaaactgtggc

SEQ ID NO: 249160 - DNA, 193 bp, Glycine max
aaaaaataacttcttaaaatattacgagaaaaaacccccaataattaactcaactattcctatattattattatttcagggtacaatatattggacctgaataaaatgagtctcaaaataaatgtataatttacacgagtcatagccataattgaacctcaataaaaacgttcaaaataaggcatattaacga

SEQ ID NO: 249161 - DNA, 515 bp, Glycine max
  unsure (1)..(515): unsure at all n locations
gcctagcggatgatggcgatcgaacatttcctaatcgacatcatttctttgttattcatggatngaatagaataaacaatggtcggtgtcggtcgttatatggccccaactgatatctttcacccgaagttgcgcaatttcttttacaaacgctcgcctatgtgtttcttttgggagaggaagttctttcgtttggcgttcgctcaaaaatttacaacgtacgtccgctaggtttttccgtgcgagctcaaccgagggttcgttcggacagacatggcatgttgttcttctcatttaggaggcctagaaaacgttggcccatcccggccaaaacacaaaaaatatattatctacggagatcgactcgaaaaaatgatagctgacgtccgcatggatagatgaccgatctacgtcaacaaagatgcatattggatgccgccatncaacattccggatcgcatcatgcaacttcttaacgatcgatagaaactcattacgaatccgtcgtgaatgcc

SEQ ID NO: 249162 - DNA, 266 bp, Glycine max
  unsure (1)..(266): unsure at all n locations
atggttattcaattagnccttagatctaatgtatttaagagaaataaataaaaaaaaactctaatttattcttttggataagtcccatatattctggacttcgttctctttgcaactaaaaataattattattttgcactctgcagcgtctcagactatctggatatcagatggatgccattctgtgcacatgttcactgcaatggacatacaacatgctttgaacgacgctgatggaaatgattgcactgaaaagcttacgggat

SEQ ID NO: 249163 - DNA, 312 bp, Glycine max
cccttaggcacttgtctctcttttcgaattgcttaggaaaattgttccatgaagaaaatccaagccgacgcgcttccgtaacgtttccgtgagtgatttcgcgacaggtttcgactggtcttcggcgttcttcattcgttcttcatcgctcttcagtcttcaacgggtaagtacctcaaaccaagctttccaattcattctatgtacccgtggtggtccacatttgcgttcatgtatgtttattctcgtttcattcactttttataccccctcttgacgtgcttaagccattttatttaagtcatttctcgc

SEQ ID NO: 249164 - DNA, 328 bp, Glycine max
actgcgcacagccagtatccccatgcggaacaaaagccgattagctcgccaaacccttcgcgggcatatgtaaagataccgccgtcaagttcgggacgaatgcgcgtgaggatcaacatggcaaaggccagcaataaaatgccagcgccagtaataccccacccgatgagcagtgctgccgggctggcaactgccgccatattttgcggcagactgaaaacacccgcgcccagcattgagcttaataccagcgcggtgagtgcgctcagtcccagtttcttttccatcgatattcagtgattaaaacgtgataagaagaataaatatt

SEQ ID NO: 249165 - DNA, 390 bp, Glycine max
  unsure (1)..(390): unsure at all n locations
gcttaagaacaccctcctggcgtcngcactgctatctgctatgtgtttctccgttaacgcagcaactgaactgacaccggagcaagcggcagcggttaaacctcttgaccgtgtagtggttaccggtcgttttaatgctattggcgaagcggtgaaagccgtttctcgtcgcgcagataaagaaggtgccgcctctttttatgttgtcgacacttctgatcttggtaacagcggtaactggcgtgtggtcgctgacctctataaagccgatgctgaaaaagcagaagacacaagtaatcgcgtaattaacggtgttgtcgaactgccgaaagatcaggctgctctgattgaaccgtttgacacggtcaccgtccagggcttctatcgtag

SEQ ID NO: 249166 - DNA, 278 bp, Glycine max
  unsure (1)..(278): unsure at all n locations
ccaaccaacgtggcaaaacacaccacacgatcatcatgatggacggctcacatcctcacacaggtaacaccatgacttccaaattgagctctccaaactatcacgacatgcagagaacaatcaacgatttcaagccacacaatgccaagacacttcactntcacaacaaccacgcacttctcgccacatctatattaaagaaaacatgcaacgcgacgtcacatgaaccgaccacaatataaactgaacatcgacgacacaacaacactacaaaccac

SEQ ID NO: 249167 - DNA, 198 bp, Glycine max
gcaagccatcaatggggcaaaacacacccaatgattataatgatggatggctcaaattctcaccaaggtaaaatcatcactttcaaatgagctttcaaaactatcattgacatgtaagaagaatcaaggatttcattcacaccatgtcaaaaacctctagtttcaaaacaactacccatttcttgaacatattctata

SEQ ID NO: 249168 - DNA, 261 bp, Glycine max
tcaagtactggagtatgaatcacaacctagagaggactaggttactatgtccgactgatactatgcgacggcaagctaatacctttgtcttgtcaccgcgagttgtgtgaaacctactcgtgagacaacgtctgttcttaatctcctgattctacatcattcttagactattacgataactacatgacgcggcaatgatcaatgcctcttctcttcttattttcacccacttagccaaacagccacactttgatgataatc

SEQ ID NO: 249169 - DNA, 392 bp, Glycine max
tgtctaaccgcgaagtttgaccaccgctctttcttcccgcgatgcttctttttatatccgtctgagtgggtttatagcctaaaccatacttcccacgattttctttggcatttatcaagctagttatgccgcccgtgtctttgcctaaacccattccgggttcgtaaccggtttctaacataacacaggccatcattactgctgcatcgaacagggaagcttgcccagagaaggagtccacggaggaaatgcttaccacctcaaaagactggaaagcggtttctaatgactcctctgcggccttcacataaggcatagaggatgggcagctcacccagatgttcttcttgcctgatacgatgaccagatgcccttcactacgaattcaactt

SEQ ID NO: 249170 - DNA, 358 bp, Glycine max
  unsure (1)..(358): unsure at all n locations
atatatgtgtaatcgattacacagcgcanattttgaattcaaattctagtagctgttgtaaatcagttttggccactggtaattgattaccagagagtaaatctcttgaaaaagactttttaacttaaatttcttggccaaaacttttgctacttcaataggaattcccttcctatcttaatatactctttctaagactctagaaactgtcttgatcatccatcttgaatatctttgtcttgaataaagctttgagaaacatgtaacccctttggaagctcttcctttggcatcatcaaaacattcagctcgatcctttgttacatgaagtcgtcaacatctttttagatggatacat

SEQ ID NO: 249171 - DNA, 377 bp, Glycine max
  unsure (1)..(377): unsure at all n locations
catatcaaagtttaaatttactaaactaagttaggctcaatttcttgtcttaaagccctttttaattaattccaatgctttaatctctcataccctcaaggattaactcaggaaataagtttaaaaatccataagaatgcatgcatcaagaangtttatcgatagacttatcttaatacaatgcaagaaatttatctcaagtccaaacacatttacaatacttctcatttgttaaacaacttgaaatcatccaactagagatcaataagttgtaagcattaagaacaaagaagatcacttaatttcattaataaaggtggtgtcgaatataaagctcaattaaaaaggattcgcagggagtcatctacccctaaata

SEQ ID NO: 249172 - DNA, 296 bp, Glycine max
  unsure (1)..(296): unsure at all n locations
aacagtcaacctgcgatgcaacagaattacttcgacgatactttcctatanatatagtctggtgcgaagcgatagctttattgtgtcctgatcaactctctttcctaattagtatatagtactatatcagttcagaactccctttcaaatgtattatatactttgttaacgacatatcccacacctaccctactacgaagatcaaattccaccagacacgtttcacagcaatatacccgccccatatccaattctgctatgacataatatcatggtcaacaattattgtcatattg

SEQ ID NO: 249173 - DNA, 348 bp, Glycine max
aagactaagcccgttcttaattcagaatggcttctccacgaatagtggacactgcactattcaaaaaagctcaaaaaggatatttgcttattatacaaatctatgtagatggcataatctttggtgcaacctcaaaaaggatgtgcaaggagttttctaagctaatgaaaggtgaatttgaaatgaatatgatgagtgagctaaatttcttcctagggcttcaaattattcagaaagatgatggaatattcatccattaagagaaatacacaaaggatctacttaagaggtttagaatggatgaagccatacctatggctacccatacgcattcatctactatcattg

SEQ ID NO: 249174 - DNA, 333 bp, Glycine max
  unsure (1)..(333): unsure at all n locations
caatgaagaacgtcgaagaacggtcaaaacctttgcgaaattcttcacggaaaacgttacggaaacgtttccgaagcgcctccgcttaaattttcttcacggaaacaatctttccaagcaaatctcaaagagagagaagcgcctaaggggctgaaccctcttcttcttcacttcctcccctatctatagcaaaataggggagatggttgccgcccagctcgcccaggcgagccacgttgcttccttcacaagcaacagccttctggaggaatcttctggaggggccaagtgggcctcggtgctatctgcactcncatttttactaaatacacc

SEQ ID NO: 249175 - DNA, 417 bp, Glycine max
ttttttttggactttaaaaatatcttagaaacaagtcacttgaagaattgtgacttctggaaatgtatttttcgaaatcaatcactggcatcaacagatgtgactcttcattttgaattttgaaaattaaaacgtttaaaagctctggtaatcgattataagtattgtgtaatcgattacacaagtttaaaatgatttaaaactggttaaacataagttgtaacttaaaatttgaaatcttaacgttttaaaacattggtaatcgattactaccttctggcaatcgattaccagagagtaaaactctttggtaatgattttgtgaaaacttcttgtgctactcaatcgtttgaaaactttttagtacttatcttgattagtctactcttgattcttgaatcatgatcttgattattc

SEQ ID NO: 249176 - DNA, 384 bp, Glycine max
  unsure (1)..(384): unsure at all n locations
acaatcaaacttgttcagttcttcttaaagagaacaaagacaacgagatttatgaagtcagcggatgccatggataacaaactcctcctttcccttctactgatctctcaatggaagattcatctgacattttctgttctggaaatatccaagacgaagaagatgttacgatcacaaagtcaaccaagagttaaagacacatgtattctgtctaaacacagntaaaatccaaggcagtaatctttactattgcatagattagacattgagcttatctataataaatgtatctgtaaaggacagctctgtgacaaagtaaatgaatagtaattctactgttcttaactgaacgggttttgtctcgttatgtaaactctctctata

SEQ ID NO: 249177 - DNA, 387 bp, Glycine max
  unsure (1)..(387): unsure at all n locations
tctgcctctcaaaaaacgagcttacaatgtaattggtcctctccacaatatcatcaactataggcaacaacaacatggaaaaccatagatttaaaagcaagtatgattcaacaaaagccagacacaacaaaaagcgtatcacacaacaaaagctacatgttaatgctcaagatagtgtccatgcaagtgtcaatctaacctcatcccatactgaagatcattataaccaaccaaagacaccaccgcatagtgaccatgcaactgtcaatcgggctttacatgatgctaaagatcatngtaagctatcaaagataccatttctatatctttatattcaactcactatagttaattagattgatacaatatccatatatattttcgtat

SEQ ID NO: 249178 - DNA, 367 bp, Glycine max
catatatgtcactttacaaaacacataagcttgttatgaacaactttcttatttatgcattatgatatctatcattttgatgctcacaaccgtctaatgcaaatgcaatatatatgacaacaaataagttaatgtaaaaatgaagggaaaaggaggattccacacattgatttttatactatttcaccccaaccttggactacgtctagtcctcacccaaactaatgagatttccattaacacaatcaaccacttgttggataatttgtgttttgataacaactaagacatacatttatctatgtaatgatcttctgaacatgagaaaatgcacattgacattagtttcttataatcttatcaaaca

SEQ ID NO: 249179 - DNA, 289 bp, Glycine max
tcttcttcgctagttcatcgaacactttagcaggaaaccacttcttctcgcactagagcaggtctatgcagcacagcactcactttgatggcaatcgcggaattccagagcttaccttcattcattcatcatacgactcaatagatcccaggacaatgtttctaaaaaataaatccgagacacaaagcatcaaatgaaatcttaaatgtcatctttaatatcatatcagatcatcattctatctcgccatcgtccaaagtattagacgcatactcacagcacatgttct

SEQ ID NO: 249180 - DNA, 445 bp, Glycine max
gcctgccagcttgcaaaaaacccccaaattcaaaaactttttttaaattcggccacaaaatatctagccgcagaacaaaattctgatgccactcaccattaaattaaagaattgttttatggcaactcttaaggactgaccttctccaaagcttaagctattaaataaaaaggaccacttaccttctgtgaattaatcttgcaagaacccaaaggcttgaagtgtctggacaacgtatgtgcccaccttaccttctattgaaatttaacttgtgtttggatgaatggagttggcaaggatcaaaatccttgctacttggtcaaacatgttctgataccgtctcatgttaaggaaaatttctaccatgaatggtttttatatctaaaaataaagacaatgtccttttgtgtaacccttgaaaatttttatcgcatggtcctagaag

SEQ ID NO: 249181 - DNA, 305 bp, Glycine max
cccccgcgacatatctccaggtaccactctgtggcaaccaataaaagcagaagtttacccttctacacttccttatctcaagcttgtaggattatgggggacccatcacatgtggtactacgtggcggtcgggcgatggtgcacaaccaatattccacatccacaaatcgcgcataaacccaccatcctctggtgcccacctccaactgagctcacgtacttccacctagctcatatcctcattttcttaacaccgggtcgccatcaatccttccaagctttctcaacattcaagtaatacaaca

SEQ ID NO: 249182 - DNA, 367 bp, Glycine max
  unsure (1)..(367): unsure at all n locations
attgctccacgttgctgcatggaagggcaaaggtctgtatggtggtcancaaaagaacacaaaccacagacccttgcgacaggtacagatatctggttcaaggccagctgggttaccaagttaaccaatgcatccagtttgccttcaagctttttaagtttagatgatgcacctgagtttgtagctacctcatgcactcctctaatgactatagcatgatttctggcgctaaactgctgggagttggaagccatcttctcaattaaatntatggcttcaacaagggtcatgtctccaagggctccaccactggcagcatctatcatacttctctccatattactgagtccttcataaaaatattgga

SEQ ID NO: 249183 - DNA, 307 bp, Glycine max
gctgcatgatttacatcctccgcctctttgatgacgacaaccacctgttcgtgatgagcaataaccaacaccacatctatctgcatatagttcacctcccctcggctttaccatgatcgcttatatgacacaatcgaacatctcatattctcatattcaaaagtcgtctcataaacaatacataacttcttctcactattttatcttgtatctttctctcacgccttgcgaacatcaaacacaacatatgaatagagaggagcaagatgttaccactcgtcgcaatgtatgagaatcaagtgatatc

SEQ ID NO: 249184 - DNA, 349 bp, Glycine max
  unsure (1)..(349): unsure at all n locations
tcaaggattgttcttttatcaaatcatgcaaatatccgaacctattttggcattcgagaaattctttcatctgcctcaccctttagatgcacattcattctttctcaaaaatctttctatgtcctgatccgtgaattctcccaacagaaaactggcggtcattttttttctctaaaaagcacgctgactntcttagtttctttctcttagctttttttctttcaatcaatttctttcaagcaaacatttttttataacaggtttgtaacccgggaaaagtacgtaaccgagactacattttatctaaaggaatacaaggcgtgcgaatgaaaatacacaagcaccccct

SEQ ID NO: 249185 - DNA, 292 bp, Glycine max
tgcgtatggccggatttcttctctcgattgagtataagacacacgcatcttcatatgttccgccattcataactcgctctgctgcaacctcgcttaatccacgtaaaagaatacgtcatccctagtattacgaattaatcatttccactctcactgcgatcgtctctcacctgcaaacatggtaggttttaatcgtcgaccacgcgtctctaccatttgagtctctgatgatgccacggaactgggaaggggatttcacaccatgaaggcctgctggcctcttttgcccgag

SEQ ID NO: 249186 - DNA, 269 bp, Glycine max
gacaaaaacattcaatttttccatcatacgaacctttgaactagaatggaataaacacacgaataaggacgtaccccaatttttgagtgcggatccaataacatgattctgcatgagatatgggtgtgtttccccctactattgctttgggatggacaagttttttgggccttatgagtgagggagatttatacaagtctattagatctttagcttgtctaatgtcagaggaccccttttgagaaatgctgggaaatcctggaaccaca

SEQ ID NO: 249187 - DNA, 311 bp, Glycine max
actgtgaggtggcaaccattaaagcaggttttgtatgattcaagaaagggttaaagaacacaaatagtatatgcctaatcaaaaccgtcaaggtaattatggtaaatttggttacaatcaaaactaaaatcaacgccaaggtcaagggcaaggttggaagacacatcccagtaacacatacaagcaagatgaagggggtgcttctaataaacctcccaatttgtatgaaaaacaatcaagcttgaagacactctcactcaattcatgcaagtatctattttcaatcataaaagccctgaatttgtcataaa

SEQ ID NO: 249188 - DNA, 376 bp, Glycine max
cacatgtttaaattctatactctaaatgtatcatccaattattacaaaaatcaactcattcaaaaccaaatgtggactggtgtccaatgctagtaaaatagtattttcaaaaaggttttcaagttcaaacttgtgtgatagtgtatcaaaatcaccacaagaaaatattaattatataggtttggtgagaagtagaaatacttatgtttatactagttcattcaaatagagttatgtctagtttttctttacaaaccagtaaaggacttcattaatcaaaacttaattacaacaagtattttatccggtcactcctcggtacaacaatagtctctatgtcactactgacacacccctcaaacccccttaatctaat

SEQ ID NO: 249189 - DNA, 347 bp, Glycine max
ctgaggatgacactcggattgactaactctaactacggatcgaggtttagtaatttacgctacaacatccaacacaaaagtataattgattagagaaacatctttatatacatcaactggttcattagaaagacccaacatctttacctattgttgtcagtcttactgttaataacctagacgtagtttaattctgttctaaaacattaattatcaatgtctctttcaacaatgccttatctttgaatttaaccctgtctaagactagtatcttgagttcgatactcggattcatccactttaattttaaatacttgacgatccgtgcgctttccgaaaaccgattt

SEQ ID NO: 249190 - DNA, 255 bp, Glycine max
tttgttttaagaataatatcccactggtaaaactaactttccaaatgtttgccttcgcaggaaatggccccgaggaagcttgcctcaaagaggtccacgaaggacaaggcagcaaaaggaactatttccgctccggagtatgatagtcaccgctttaggagcgcggtacaccagcagcgcttcgaagccatcaaggggtggtcgtttctccgggagcgacgcgtccagctcagggacgacgagtatactgatttt

SEQ ID NO: 249191 - DNA, 399 bp, Glycine max
  unsure (1)..(399): unsure at all n locations
atatgagaatcctcattcttttggtgattcatcacaaactgctcttcaagctttttaattgactccatatagtctttctgatattttgatctctccttctgagaaaggaaaatgagtatcagaacattttccccaggaaatcatcagcatcaaatcaataacatattttgtcaatatgggcaatataatctcaaaagaccaagtgcgtgtttggtttggtgttgggaaattgactcttagtccaaaattgattntggatacattntcacatgtatntggtttcacgttgcagaagaattcagaattgattntgagttgaagcaactttgagtagcttctatgtcggatccaacaatttgtactgaattntactccctaagttgatttatatataacatc

SEQ ID NO: 249192 - DNA, 266 bp, Glycine max
aagtgaggctcttaggttgaggttgaggaccactctattcggtaataggtgtaatatgtaaaacgattatgattctgtgagagagagagagagagagagggagaagcacagtgcacagtgtacacagcacacagttgtatcgttttcggtgtatatagggatctgagatacaactttctgcaccacctctgataaaaacaaagattctacatacacacggaaagagggagaagccagggcattaaacacgattgattgatttgagt

SEQ ID NO: 249193 - DNA, 280 bp, Glycine max
gtgtggaccacctataatttttctagaatgatggccccttaaagatgtacagtggaaaggaaaaattatccctgcaagtgttctatgtatacttcattattctacttcattattacctttttctactggtttttttgatttagacaatttttgctggatttcataaagagcttaaaggaatcgactttatatggaggtctatacagattgtaaattggtgaatcttattatttcttttcgaatgtgtgcaaggtgattgttgtatgaacaatgcccagat

SEQ ID NO: 249194 - DNA, 284 bp, Glycine max
  unsure (1)..(284): unsure at all n locations
tttccatgatctgaccgctgggatctctgagaaaatgtctggagtgtgctagaagtttcttaataaagctcttggaggaagcctcttaatgaagcttctagagaaaactacatgaagctgcctcggtaaaaatgctgcccaacctacgttaaccgttggatcatctcgaaatcttgcttgcaactttacgagacacttatncatgatctgaccgttgngagctntgagaagatgtctggagtgtgctataagcttccgttcctgagagcatcttttatttaagc

SEQ ID NO: 249195 - DNA, 438 bp, Glycine max
  unsure (1)..(438): unsure at all n locations
tcagatcagatctagatgaaataatatctagatgagatcaaatctaaataatatctagataagataagatctaattttatagaataaattagtctaccctcttcaagtccaagcccaattctagattcaagcccaatgcttcattaattcctgaaattagattaacaacatcaaattagctgaatgggcccaaataataaaactgcctaattaattgacaattaagaccaatcaataattaaaatggtgcacaaagggtttataaaatagaagaaaatgatggcacatcaaacatgcaggggaaacaatatgctcagctgacaataaatcactcatagtgtataaaacctacacaggcaagtgttntattctatctccanacataacttgcacatgactctatttcgacatgacttctatcgaatacagataacgtcc

SEQ ID NO: 249196 - DNA, 306 bp, Glycine max
gcccctggcaaaattttcacgggggatttttttttttttactacacccgactttttaagatcagacccaagcaacacaaacgtgagattccttccttcagagttgtcccaatgtttaggcacaacaactcccgaggcggtggatttgctcattcacagcgcgcgcgcttgcgggatttaacaaacaaatagctatcgatacctaaaaagaattgtgagataacacaacccacgccaagatttgttcgttcgtgatgatggtcacccacaacgccacaggtgatgatcttctttattctatgccgaa

SEQ ID NO: 249197 - DNA, 378 bp, Glycine max
atcatggacaagcggcttgtgaagttgctaaccacatttcgagaagatccaatggttaaagaagtctgggtagcatttttaccgaggcagctccatgtatttttctctagaagcttcattaagaggcttcctctacaagcttcattaagaggcttctagcacactcgagacatcttctcaaagatcccaacggtaaaatcatggacaagtgtcttgtgaagtttaagaccaaatttctagaagatcaacggttaatgaaggctgggcatcgtttttaccgacgcagctgcatgtagctttctctagaagcttcattaagaggcttcctctagaactttctcgtggcttctttgagaagctttctcacaggcttctttg

SEQ ID NO: 249198 - DNA, 344 bp, Glycine max
  unsure (1)..(344): unsure at all n locations
acgagcatatgatcgcggacgagtatgcccaatatacacggacaaagaagctacacgaagggcgattgactctctacaccaagaggcaaccatgtggatggatcggttcgctcttatcttgaacgggagtcaagaacttcctcgattgttagccaacgctcacgcgatggcggacacctactccaccctcgaagatatccatgggcttctcggctattgcaccatatgatagacttaatggcccacataactagaaatcgctacgaaacttgtatggtctctcagaccctgactatataccacttgctctttgaaatanaacgagttggtcccatgtttctact

SEQ ID NO: 249199 - DNA, 360 bp, Glycine max
  unsure (1)..(360): unsure at all n locations
gctaaacattcaatttcgagcgtctctagatanntctggactcaatcaaacatccgagaaaaaagttattgtcgctcgaattggctcacaggctcaacaatcaatttcgagcgtctggctatattacgagactcaatcagacatccgagtaaaaagttattgtcgtttgaattggctgagagcttcaacattcaatttcgagcgtctcgatatgttaccgcactcaatcagacatccgagtaaaaagttattgtcgtttgaattggctcacaaattccacattcaatttcgagcgtctctatatgttacgggactcaatcagacatcccaggaaaaagatattgtcgtttgaattggctc

SEQ ID NO: 249200 - DNA, 366 bp, Glycine max
  unsure (1)..(366): unsure at all n locations
acatctcgactggctttcttatctgacattcactacagattctgccttcttctattntcagattgggaatgcctctaacagcacttctgtcaaggatcttcttcatgcctcttaagtgcagatgctcaaacctctgatgccatattctgacttcatcttctttggaggatagacatgtagaggagtagctggtttcttggcgtgtccatacgtaacaattgccctttgatctgctgcccttcattagaacttcactcttctcatttgtcaccaagcattctgactctgtgaagtctacattgaatccttcatcacacagctgactgatgctaatcaaggttgcagtcagtcccttcaccagcagta

SEQ ID NO: 249201 - DNA, 298 bp, Glycine max
  unsure (1)..(298): unsure at all n locations
atttgcctacaagttcttctagggaaggttgtggacgggtctcaactgttggttgtttttggggctgttgttgttgttggattggtggaggaatgtatggtctgcttgggccancagcattttggaaggaaggagcacgctactgttgttgctgttgagggctaaaccatctgaaattagggtgattcctccatccaaggttgtatctattgctggagaggtgataattgttctgctgaggttggttctgctgttgaggttgatgaggtctattgtaaatgtttgcaccataaacttc

SEQ ID NO: 249202 - DNA, 420 bp, Glycine max
  unsure (1)..(420): unsure at all n locations
gctgcanngctgctaacccatggaagctcctaattcttttattttnttagggngggccattcttggatggccttgattttctcagggtccactcggaccccatttctaccaactacaaaccctaagaaaactatatcatctacacaaaaggtacacttctctatatttgcatacagggtgcttttcctaacgactgaaagaacttgcctaagatgtcctaagtgatcatctaggctcctactgtacactaaaatatcatcaaaataaacaactacaaatctacctatggaatcccttaagacatgatgcataagccttgtgacgtccctgaataatgaccggattaatagtaataaattaaatagcagaaaccatcggaagttttttttccttttttttcgcactgtcattcatttcatg

SEQ ID NO: 249203 - DNA, 385 bp, Glycine max
  unsure (1)..(385): unsure at all n locations
ataaaccaccgagagcgcacataaattgacattggttgttccaataagtgttgtctcataatatntagtttgaacaaacttacctcctataaaaataaatacacgtgatttctgttttataaaaataaatacatgtgatcttaaaaaaaatataaataaaaatacacgttatatcttataaaaatgaaggtttagctatgttctttaaatcctcaaattatacctgtgtttttaatcatccaaataaatattatagatcttagtttctcaaattagaatttcttaactcttcttgttagaattcgaaggactaaaaagattttttaaaaattactgantaaaagatgcaatttatttgtagactaaaaattaacatctaatgtga

SEQ ID NO: 249204 - DNA, 219 bp, Glycine max
ctattacttgccctttggcacttagctttattattattaaatggcagcacacacacactcttattttataattacaagtttcttaacactttgatacatttgattgtgtgtgctgctttgctcttaccattccattcctttttacccaatagctcccccaaatttgggcaaattttccttgaaccagtctttctatgaatgatgctctcctacaaccta

SEQ ID NO: 249205 - DNA, 415 bp, Glycine max
  unsure (1)..(415): unsure at all n locations
gcatcaacaagaatcaagccaaggctattgtgcaagcaatcaatggggcaaaacacaccaaatgattatgatgatggctcaaattctcacaaaggtaaactcatcactttcaaattgagctntcaaaactatcatgacatgtagaggagaatcaaagatttcaagtcacaaaatgtcaaaaacttttattctcaaaacaaatacccatttctcgaacatatcctatgattcaaagaacaacatgcaaagtcgtacatgtgcacagaattgactccaaatattaaactaaatatccgacaaaactaacaacattaacaaattaacacaactaacaaattaacacatccaactaaactaacacacaccaaagaacacctcccgcgcgcccatacttaaacaacacacttgtctcaat

SEQ ID NO: 249206 - DNA, 353 bp, Glycine max
  unsure (1)..(353): unsure at all n locations
tttaaatatgacttgactaggaaatgggcacttgccgccgacaaggacggtgtggatgacattgtctgtgaaaaatacagcattatccaggagaaatgggcttagttttgtagacccgcacagacccctcatgggaggtatgtactttgtcattttagttgttttccataaaaaaaatcagttcttataattcattgtagtaatcattttcattaatgttcaatttttgcaggatgtgtggaaaaaggcacangccatccanaacaaaacactgccccccatgtgtngtctcgtgggggttattgaatattagaacacaagctcatggctgagaagacaaagaaaagactgga

SEQ ID NO: 249207 - DNA, 415 bp, Glycine max
  unsure (1)..(415): unsure at all n locations
ggtgtcacacttactactaacttgcctattgcgttgctactccatatttgactgtgctttcactgttgtacaccttgtgaaggttcttatgacttgtgattctgaaagacatgttgtctataactgttggtgtaatttggaatatttgtcatgcacactacctaaatcataatgtagcttatgcatgtttcttctcanaaatagttttcacaattaatttacaaaatgatttatattggagaactttatagttctaacatcatagtgatttttcatgatcacgatagaacatattaaatttgtacncttggactatctctggaggtgggtcgtcatgatcatagtgagtctgattatactctgttccttatatctagtgtaacaccggtgaaaactttggcttctacggttatat

SEQ ID NO: 249208 - DNA, 335 bp, Glycine max
cattacggggattttgatgaagatgaatatcgcctccccactggaaatgaaagcaaagcgacgctgatgcatgttccaaaagaacttgctgaaattgaaaacatggagaacacgttcaccaaactaactttatcagcactgcgtagcttggaagaaattaggggtagaagctcaactggtagcattctctcattgccctcttcgcataactacgctctgccactgcaagaggatcggaaaataaaatgactgcactagcgactgcaaccaaataggtcctcaggataacatagatcttctcgtgtttatcttcacatctatcttaatgtttatta

SEQ ID NO: 249209 - DNA, 391 bp, Glycine max
  unsure (1)..(391): unsure at all n locations
tggacaaanttgggcgcatagccacccagatccaaaatctcaacctcgaagtagcattgcattccatgatccttgcactatgcctcgacaagttcgcaaatagtttatgccaaaaaccactcactagcatggacgagttgcacaaaggagccaagggctacatccaaatggatgaaatgtccagattccggaatgaaatccgtcaagctggatgttctgcttccgacaagtgtaccggatcgcacaagtagtataaaacgggtagaaccgagtatcgaacactcggggaacttgtgttatttggtaagctatttcagcanatatgtgtctgatgtgtgtaaatgtacgtgtgagtatgaacaggtgtatagactatctatgcanaaagaaa

SEQ ID NO: 249210 - DNA, 425 bp, Glycine max
  unsure (1)..(425): unsure at all n locations
agagtatctctcttatcttagtgagagtgattctcctacattcttgagtgattcccgaacaccttggctgtatcaaaggactntcacaacctttgtgcggtgccctcgctggaaagagtgatcttttccttcctttcatcatcacccttgttctttcaaaccacaattccacacaatccacctctgcccagaattatctcgtggcataactcccattatacgcactcacattaagtgattcttgagcctaattgaatataaaacgaaccttcacctcgtttggaatacctcattggagccctgagcttcgtcattgcattttatattctgtccagcacactaanctacgtttacatcgcatctccatttatgcgagaacaccttttagaccacgaatcaccccattttccatctttctaatcatt

SEQ ID NO: 249211 - DNA, 361 bp, Glycine max
  unsure (1)..(361): unsure at all n locations
tttcatccattggtaagatacttgaagtaattgaacttatgcaggatcatacgagctttagtgaccaactgacagatttgttcactaaatctctcaagcagtctcgctntgattatatttgtaaaaagttaggtgcatatgacatatatgctcgagcttgatggaaaatgttaaatataggaattgatgtgattgaatgtaataggaaaattgggtatatctgaacatatctcatttttcttcgtttccttaattatcttatacctatgattataaataaatgataacaacacacatcttctctacacttctatacttacaaaaccagtcaccataagtacaagatcaactttcttttttc

SEQ ID NO: 249212 - DNA, 300 bp, Glycine max
cgcgaagcttgaagacgtgagctttgagaacattagtggcacttacaataccatgcatggagtaactctgtggcgcagctctgctcgccctagtgagaacattctgctagctaacattaatttgaactacacaaaccacgcagatatggagcaagaacgtctcatcgcaaacggcgtcttctatgatttacaagttgttaattctcaattctgatgacaaacatctctgggtcctcaaacgttgagaacggcacattgatcatggctagctctgaacacattgaaaacatggcttgcttt

SEQ ID NO: 249213 - DNA, 322 bp, Glycine max
agatgacatgtttaacccaaacagtcaacaattactatataattcacacaaaaactttctcactttataatagctactgcatatttgcttgagatgaaagaaaaccactaaggcaggttaagctatacatttcgaaaagatatatatgtcctttgattatgaaactcttaaagagtcaaatagcggcattattaaagctccaagttaagccgttcttcttgaaattggacccacaacagtctcaatggaccccctacaaagtactacaccacccatcttatatataccctcgaaaaagttaaggaaaggtcatcattactac

SEQ ID NO: 249214 - DNA, 325 bp, Glycine max
  unsure (1)..(325): unsure at all n locations
ctcgcgactggnccctttnttgccttcgcaactagagttcactattgctaccccatagagctccgcgaaatttgttccggccatactctttcttgcgagccctcttggtctcttgccaagggctcttgccggaatagcattctcttcccgtaacccggcacacttctttcgaacgtgtgtagcagccaactggaacttctccttggcgagtgttgcctatcctaactcgcttttgagagcatggacttcttcgtcctcttccggcgcttgaaaattctcttcgctgacgacttttaacttggcgagccaatctaaacctcgtatg

SEQ ID NO: 249215 - DNA, 431 bp, Glycine max
aaccgccgcctgccgccacatgggaacgcacaagttctttatttctgcctaggagggctacccatcatgctaccatctacctttaatgtcacccgccttaaaggaggtctcacccaacaaatccatctgctttgctcatgcaaattaacatgttccccaacacacaacttttagtataatgcacaagagactacacttgcgcatgtcactgagtagttgtccccatctcctcctcaaaatgcttttattcctagcccttcaaataacccacagcgtgatgggaatttgaatcccatgaatccacgtatgttgttgcacccagtctggcacttgagcatcaaccttaggcataatctatttatcacacttcctttgccaagtgccaaccaaagcattataatacttgttcactacaaataattataaatgat

SEQ ID NO: 249216 - DNA, 217 bp, Glycine max
tttagcattctacactagtataggatgctgatttcttaatattatgaaacttcagaactgacatgtggagttgagaattacaggataatatgtccgctatgagaatgactaaaatctcatatctccttaatattaaattgcatgtaaaatatattacaatttcatgaagttttattgacactaaaagtgagtaaatactacgatgaatacaatgtgt

SEQ ID NO: 249217 - DNA, 229 bp, Glycine max
  unsure (1)..(229): unsure at all n locations
cttcatcatctaaagctggccaaaatatgggaagtttgccaaatacatagtgacatccaaagcaaaggtattcactgttgtggcttcaaccacatgtatacaatcattaaattcctatacaataggtctacccataccaaaaccaaaagagtaaacctaacagtctgtactagatacacccacccccaaaaattatataaacctantctaaggagtcgtctgctatgat

SEQ ID NO: 249218 - DNA, 307 bp, Glycine max
aatctgtacctgttgcaagggtctcgggattgtgctcctctgctgaccaccatacagacctttgccctttcatgcaacaacctggagcaattgagcagcctgaagcttatgctgcaaacatttacaatagaccgtctcaacctcaacagcaaaatcatccacaatagaacaattacgacctctccagcaacagatacaaccctggatggaggaatcaccctaatctcagatggtctagcccttagcaacaatagcaacatcctactcctgtcttccaaaatgttgttggcccaagcagaccatacat

SEQ ID NO: 249219 - DNA, 377 bp, Glycine max
tataaaataaagaacaagccatcgaaagagggaaaaattaagatgcctatgcaatgagcagcaagaatgcacttcaagggaaggaatgaaactacttgtggaaaaggctcataaacaatctatcattcatcaagaatttgttccaagaacctaagggaaagcttcctcttttccctattccagaaacagaaccctggaatcaactcaccttaacagccaaattcttgaactagattacaatgtcttataagattagaataatacaaaataagtggctcaaaatacagcaactaccatgagtacttgacctatgataacccttcatgtttatttgtggtcaagtgaaggatattagtggtaagtataaaacaatcttt

SEQ ID NO: 249220 - DNA, 383 bp, Glycine max
  unsure (1)..(383): unsure at all n locations
ctacatcaatcaacaagatgtcatatactaacagaaaaataatgttaagcattacgattacgatcgcctctatattacttaacaacatgatatacatacagtgtaaatctcatttctatactaatggaatagtccattaacatgagatgatgcatgatgctcttaacatagacctacattctactctgttggaatcgaaagtaattccaagaatcgaaaaaaaaaggcttttctttcattgcccttaaattattcttatctattaatttctcgtgactaaacattatttgttattagatctaanacatgctacaaattgctttggctatcaacgatgacgttcatgatcttgaaacagctgatatacttgcatccacattgat

SEQ ID NO: 249221 - DNA, 321 bp, Glycine max
ctacatagttctttattagaccatgtctattttcttggatctctggtataatccattaccaagatatagtaattgattacattgttattgaaagtgttcccaaaagtgatcaataacactttaatcaattaaattaagattctaatcgattatattgttcttgaatgtttttcagattcggggaagaacacattaatcaattagatgggaaatataattgattactttctgagataattgatcgagcatttgtagtttaatatttttctattcttctaagctcaatggacatctctttgacccttattttctcaccttaac

SEQ ID NO: 249222 - DNA, 416 bp, Glycine max
tctttaagtatggcatatagatttgcttgggcttacttttcaaccttctatgtatgttgaactcactagcattgtttaccacagctttaggagttcaatattcacttaggatcaacatttcagccagcaattcaatcaccaaaactcatattcacaatagacacaatcataaggaaacctaaaagttcaagaaaacagtcacaatcaaagactctctaagaattctgcatgaacatgttaaggactaattaacatgaaagaattgactcacatcaaataataggctaaaagaatttcatacactcatgaacaaatgagttagacaaagaaacaagaaaataaaatctaacacaacctaagaaatcttatgtgacaagtttcatgactagacatgacttctatgacacaaactacat

SEQ ID NO: 249223 - DNA, 428 bp, Glycine max
atctacatcttagtatcactctatcttctgcaatattcttatcacatgaaaccacactatacagcgcatcatgtcctctcgttctcaccaaataggttattagacccagaggtctaagactgactttgtccacactctataactattctttatcatgctctgtatcctttctgtgtatgctagatcccatgagccaaggaaccaacacccactcatggacccccatcgcagatctactcagatggaattcgtcgaccatgtctcatatttccttgccctctcttttatgctttgccgtatcgtttgttctaaccatgtgccataaacatccttcatgaccatgatctctttgataactatataacggaacattccacctctcttgtacttgaaagtaactcactcattataacactacatgataattt

SEQ ID NO: 249224 - DNA, 373 bp, Glycine max
  unsure (1)..(373): unsure at all n locations
tgcagctcaagatcaatttcagcgtctgatagtgttattgttntcataanacatccgagaaaaaagttatggtcgtttgtattggctgacagcttcaactatcaatttccagcggctcgatatgttacgggacctaatcatacatccgaataaaaagctattgtcgtttgtattggcttaaagcttccactttcaatcttcaacgtctccatatgttacgggaactaatcagacatccgagtataaaagtattgccgtctgtattggctcagagcttcaacattcaatttcaagcgtctctatctgttccgggactcatacaaacatccgagtacaagctattgcctttgcattgctcagaggtcacatcaat

SEQ ID NO: 249225 - DNA, 394 bp, Glycine max
  unsure (1)..(394): unsure at all n locations
tgggtaaggaggtcctacaagtaagaaccataacatgatcacccattgaggtaaaagcatcaagctagtgatgttaaagaaacgcttnctgggaggcaacccaaaatgatcgaaatgaactaattcctattagaacagtcacaagattgtagaatgtgtattgattataggaagcttaatgaagacacaagaaaagaccactacccgcttcccttcatggatcaaatgcttgagagacttgcagggcaatctttctactattttttggatggatactcgggttacaaccagaatgcagtagatccctaagaccaagaanagacaactttcacatatccctntggtgtttntgcttatggccgcatgccattcggttatgtaatgcccccgctac

SEQ ID NO: 249226 - DNA, 350 bp, Glycine max
  unsure (1)..(350): unsure at all n locations
gaattttaacgttcaagggcactggtaatcgattaccanaacattgtaatcgattatagccttttgaaaataattggaacgttgtaaattctgttcgaaaactttttcaaactcattttgctactggtaatcgattacaacaatatggtaatcgattactagagagtaaaaactctctggtaaaggttctgtcaaaaactcatgtgctattcaaagttttgaaaaaacattctaatacttatcttgattgggtctcttcttcattcttgaatcttgatcttgattctcgagatcttgaatcttgattcttgattcttggacttcttcttgagtcttgaattcttcttgat

SEQ ID NO: 249227 - DNA, 301 bp, Glycine max
  unsure (1)..(301): unsure at all n locations
tacacctncattaattccttgctgtaccttctcttccatcgctctgtctctactttatcctccatgtatctcttcaaatgtcttgtgctaaatgtttctaacatgattctctacagtctgcaccgattaaacttgctatagaagctagatcttatcttctatgcgtcncacttctcgttcttggttcttgaaccatgaatcgtgttgagcctaggctcctctcagttttgccctgttattttttgtggctgacacctagaccatancaatcttacacacatattaaagtacaacacaacct

SEQ ID NO: 249228 - DNA, 167 bp, Glycine max
ctctctatttcgaacccagtgcaggttctaactaaaaaatcccccttggcatagtgctcccctctttttatctttaaaacattgcacaatcatatttttcgacaataattatgggctaaaactgcatgtatgctctgagtgcacatgcaacaatccaatgacttaaa

SEQ ID NO: 249229 - DNA, 261 bp, Glycine max
tgcctacaagattgacttgcctagtgagtataatggaagtggccctttcaatgtgtctgatctatctctttttgatgcagatggaggagccttggatttgaggaccaatccttttcaagaaagagggagtgatgaggacataaccaagggcaaggaccatgaagcacttgaaggtcccatgaccagaggcagacttatacaagcccaacacgtcatagagacaaggcgtggcatttgtatagctgccattgatgatgattg

SEQ ID NO: 249230 - DNA, 363 bp, Glycine max
gaaattttgagtggagaggtggtttattcaaaatagagttatctctttattcatggaggatttcctaatcttgagtgttaagacacttggctgttacagactctacacctttgggtgccctgtggaagaggacctctcttctttctcatccccttgccttcataccaattcagaaatccactctgccaaatattctggcatattcatttacgctcaattaggatcttggccaattcgactcaaagagacttactcgttgaatacctatttggagccgactcagcatgcattcttatttgtccccccataactcgtgacatccatctctttatgcagacactttagacccgattacccctattc

SEQ ID NO: 249231 - DNA, 357 bp, Glycine max
tcaataggtggcctggccaggagtccaaccttctcctttgggagggggtgaggcctatgcagcccacgagcctcaacaggaccaggagaacgacattccagagaccgcagagcctacacctcctaaggcattcactttaaagtctgatccagctgttgtataggttcaggaggatgttacagcattagagccctcttcagtagagccctcttcatcagagccctttatttttgaggctgatccagctatatctccttatcctgagccatctgcaccagtgccgaacctgcctctttcacaggatccatcatctgcacctgcactggacctgaatgagcatgcacacgatcattgata

SEQ ID NO: 249232 - DNA, 328 bp, Glycine max
  unsure (1)..(328): unsure at all n locations
ttcacttcttgtctcaacgcgagctctgaccactgttcttccttcccgcgatgcttcttttcatgtccgcctgagtgggcttatagcctaaaccatacttcccacgatttccttgggtttttatcaggctagttatgccgncattgtctttgcctaaacccatcccgggttcataaccgctccccaacataactcgggccatcattaccgccgcatcggacagacaaggtcgcccaaagagggagtccacggaggaaatgctgaccacctcaaaagactggagagcgggttctaacgattcttctgcggctttcacataaggcatgga

SEQ ID NO: 249233 - DNA, 332 bp, Glycine max
  unsure (1)..(332): unsure at all n locations
tttttactccgatgtctgagtgagtcccgtcatatatcgaaaagcttcaaattgaatggtgaagctctgagcaaattcaaacgaccataactttttactcggatgtctgattgagttccgtaatatatcggaaaccttgaaattgaatgtagaagctctgagcaaatcaaacgacaataactttttactcggatgtctgattgagtcnccgtaatatattgagatgctcgaaatggaataccgaacctctgagcaaatncaaacgacaataactttttactcggatgtctgattggagtccgtaatatatcgagatgctcgatattgaatgc

SEQ ID NO: 249234 - DNA, 261 bp, Glycine max
attatccaataccaacctacaagacaggtcctattattaatatttcactaccacatttttacttcattatttgaaaactacaaagaaaacttaatcaactttgtgcaatgcttggagcttgttcaaacatacaagattaccattatttttcagaaaaatattttaagaaagaatatttaccctctatagacattaaattcaatctttgataacactaaaacatagtagatatgaaaattcaaaaaaaacaacatttttcac

SEQ ID NO: 249235 - DNA, 146 bp, Glycine max
acaaacaaaatacccccccctacggcaggccccatatagtgccctaataataaaaacccaaatgaaacctagcggggaccactacaacataccactggtcccattcacgagtcccgccacaatcgcatatattataccctaaatat

SEQ ID NO: 249236 - DNA, 332 bp, Glycine max
attgaacaacaatggactcaaaccccatgtcagtgtctgagtgaacctcttcagtaatagggtctatatgatgaatgaagaagaaacacaaattgggcaataacttaccaaaagagaactgcaatcaaacaactcattgaaatccctctgccatgggaagatcctagtgaagggaattgttgaagcgaagccatcatgatttacagtttgataacagtgtccaacttgatgatgataagcattagcacgaagcttctattcatgttccaaactagcagaactcttggagcctgagtatttgtgtatcgttgacctactagagatgtgagctc

SEQ ID NO: 249237 - DNA, 427 bp, Glycine max
  unsure (1)..(427): unsure at all n locations
tccgacggcattgcacctccagcttcttgaaatatctttactctctcacatggctgtccttctcctccttggaacgcaccactggatatggtactttcgcaccttcattcaacactatttctctcttcctctatctacctcgctcgcttctactcctttctccattcatatcttctctcatatctctcaattcctccattctctctcctttctcctgctcttttttctctttcttcgccactaaacttcttttctcatgaccactatttgttcctctttttcctgattgctttcacctctcacatcatntttcctatcatcagtacctttcttttcagcaactttcttcttcgcgcatgaactactctcatcctcacctgcataacctcatactctctgcatccaactttgccatctgcttggattc

SEQ ID NO: 249238 - DNA, 362 bp, Glycine max
  unsure (1)..(362): unsure at all n locations
tccgccggcttaacgagcggccgcttagcgcaacactcattggcttagcccacagaagaatctggaagaagatgagttgtgccggtttgctaagcgcaccgcttcatcttactaagcgcaccgcttctagtcatccgctaagcgagaaaggcacttgctaagccaaaattcactaatatgcgctaagcggtccaaaatagcgcttagcgcaagagcacggacaaggccacctatttaagcctaanatcagattttgctgtgtgaagatctgcagagaccagagcttgaagaggaagctgttctgagaacttgagatgagtttgtgagtggttgtgagatcctacaggtgaaggagacatcct

SEQ ID NO: 249239 - DNA, 330 bp, Glycine max
  unsure (1)..(330): unsure at all n locations
tctgtacacttaattataatacccaactcgagattcaatgttaatatcgatcattgttggaaaacaatattataatctttaattccttacgtgtgaagacctaagctccttgattaaatgtcaatccctcacacatttgatagaggaagctntaagcttaatgacctacagataaccaataaccctcatcatattcctagctccaaagctaatgagtgttctagcacacatcaagataaaaagagagtatcttccaatcacaatctcatccctaaatcaagctattaaagtattctccaataaccaaccataacaaacattacgaataga

SEQ ID NO: 249240 - DNA, 229 bp, Glycine max
tggaaatgggaggagaaaaaaaacacttatgattttttcccgcactttgaagaaatagatgaagaagccttgaatccaaatgaattaactccaacacttttaccaactccttcaaccaatgaagcctcattatctttcgaagggagttcaagtgaaaggccaacaagaatgacaaatattcaagaaatatatgatgacaatgaagtataaatgacttgtttgttttttg

SEQ ID NO: 249241 - DNA, 307 bp, Glycine max
cgatgacaaacagctcttaggtcgatatatgacgatcacagaatgattgccctatgtctaacatgttcaccattgaatcatgaacacttcacggcctcagaggaaattcgatttcccgaatccagaatcaagattctaggtctaagcttcccagaatcaagatcaagactcatcgactctgactcacgatctcagaatcaagagaagacttactcaagataagtgccataccctaattccttctcgggaccatctatttggtgggatgtgacccctcgttgaccacttcgaggtactcggcccctat

SEQ ID NO: 249242 - DNA, 300 bp, Glycine max
  unsure (1)..(300): unsure at all n locations
tcagatggtagcttgtctccaatatgatgtatctcttgttccacacccataccaatctgaacaatagcatcaacgaaccagtagagggttttcatgccaaaatcatttttattatctcacaaaccatcatgtaattgcaattcatactacacaacaagttagttacctcgaggaactcgagaagaagatggaacttgtcaacaacagggtttatgggagcaattatgaccttttggtcnaaccaaaacaccacaatggtaccatgcaagnacttgttgcctcattaacctattcacaaaa

SEQ ID NO: 249243 - DNA, 350 bp, Glycine max
  unsure (1)..(350): unsure at all n locations
tctcaaacaaacaaatcacacataacacgacaattatagttgctgtttgaatacctcactcactcaagtgtatcacacaattatggcttttctctaatgaaaacactctttccttttaccactctaattccccttgagttcttaggcaatccaagagattatggccacaacaatgaacaattcaccaatatgtgtaaggtaccgctagagagacaaggaaaaggttaaccacaaaaaaggctaacaacttttttatgcacaaatgaaggaaataaaattcagaatntaggaattcaagtaacaatccttcatacaaccaatgtattaccttaaagaatattttttttaaa

SEQ ID NO: 249244 - DNA, 237 bp, Glycine max
aatttgttgaatagtatgaaattaacccatgggctggtaataatgtcttaacctttaagaaacaacttaagcaaaaccacataaagccatgccaaataatgaggtggctaaggtaaaaatgtcaaattactattgaaccacataagaacgatattgaaacccttacggtaaagagaattactatattgcagttaaacaatatatatttgatgatagctatgctgcaccggataattc

SEQ ID NO: 249245 - DNA, 370 bp, Glycine max
  unsure (1)..(370): unsure at all n locations
atggatgcaaattctcccttaactgattggatgcaactcgcccttggatgttgaggaagagattgtcacatgcccttcgtncgtgtacaaataatctgaagcggaaccatcttctagtgtattggatcaatctatacggattgaagaccttcctccaccaacttggaagtgtgttcaccctaagatatccaagcctacatccatagcagttctgcgcacaagtgtgtacaagatttcatccggagcttgcacagaagtggcgtgatatgatcgagatatcattggatggtgcacaagattgatgctcaatagattgaccnatcttctaataactctcttgcaccattcctacatacagnagcacatcaac

SEQ ID NO: 249246 - DNA, 391 bp, Glycine max
  unsure (1)..(391): unsure at all n locations
tacttatcacctctatcatatttaataattntcacatttatgtctaaataccactttaacttattgtagtaaatttctaaggcatccattgcctaagaaatcttgggcagtaagtagacataaccataacgtgaataaatatcaataatagtgataaagtatcattcctttccgaaagaactaacatcaaaaggtccacaaatatcagtatgcacaatttcaagaagctgagtgcttcttggagctcctttctttgtatgttctgtttgttttcctttaatacaacccacacaaatatttagatccgtaaaatctagataaggaagaaattcatttttttattaatctttcatcctttcttagaatggacctacacgttatgccacaaaaa

SEQ ID NO: 249247 - DNA, 401 bp, Glycine max
tgcaacatatttcttggcctacacgaattctatattttacagctttaatgtatgactcggttggccacaccttccacatgtaaaggcagccaatttcctctttagtctatgtcctgtgacattgtccttatccacagatctccttctattctttctgtggctctactttttggacccttctatgtggtggaacagggtgtgtatactatgtctgggcccaatattgtggtccttagactggttcaataagtcttattataagctcttattgtgagccactcatgacacatgtcctcaggcgctcaagtttactgaccacccactcgctatctgcttgttgttggtaactttctgcacaattatggtatgcttaatgttttatctgaaagagttctaactca

SEQ ID NO: 249248 - DNA, 282 bp, Glycine max
ttggttgttgcttgcttgaatcttgatttcaagtattggattgtcatcatcaaaaagggggaaaatgtacatgcaattggctttgatgttttgaagaagaacatgatgatgtgtgcaattgatgcaatgggcttttcagaataaattcagaccaccttcatgattacagtccaacatcagatgatcactaaatttaggacaggagtcctattgaatatcaaagttggccagtgataaaataaaaggtttcaagctttactcttgtatcgataccaagagtat

SEQ ID NO: 249249 - DNA, 411 bp, Glycine max
  unsure (1)..(411): unsure at all n locations
gaacagatatctgcatctgcacctgtttcagagtctgtggtctatgttctcttgcagatcaccatacagatctatgtacttcttttgcagcaatctggagtcaatgagcaacctgaatcttatgctacaaatatttataatggaccctctcagcaacaaaaccaataacaatagaataattatgatctctcaagcaacagatacacatcaggttggaagaatcatccaaatctgagatgggcaagttctccacaacaacaacaacatgtncctcccttccagaatgttgctggtgcaagcaagccatatgttcgctctccaatacatcaacaacaacaacaaagacaacaacccactgatggcgctcctaaccttccttagaagagtagtgaggcaatgaccatcctaata

SEQ ID NO: 249250 - DNA, 352 bp, Glycine max
  unsure (1)..(352): unsure at all n locations
aaattgataatgaggtaaatttgacgcanactctcatctcacacaagtctataacatcaatttaaacttgttcaactggattcacgcttacaatntcaccgaatcaaaattcgacttctctacccgcacatttaccctaganaatggctctttgctcattgatgtcattcgttgttctctctatcacagcccacactctctcataagtcccaaatggcatgtcaagctacgattaactcattctaacctccatttaccatagaatacagaattaaccttccaactgtcanagcctcactctttctccactcataacaccacattctcactttgtaaccctacgttaactcta

SEQ ID NO: 249251 - DNA, 356 bp, Glycine max
  unsure (1)..(356): unsure at all n locations
gcaagctntattccaaggcagcaatgtattgtttctttatattccttctctctctcttatgtattggatatatatatgtatcattctgaaaccaataaaggttaagagagaaagtgagaatattactcgaactcacctcagttcaagttggcatcaaagcaggtgtcgtttgccgcccgccgccgtcgtccaccgccgccgccgtcatttccggtggacatttctctgacgagattanggttaggctcgccttgaaaagcgtgactcagccctgngaagcgcgccgccacgcgccgtccttgtcccgtgcgatcttctgcgcgtgaagtccacgcgccaccgtctcggcaccggaa

SEQ ID NO: 249252 - DNA, 178 bp, Glycine max
gaaaattgatccgacggctatgcttccatgagagggcatacacctcaacaccgattatctcttcagacgacttcaaacggcaagccaactaccaaatctcaatcacaacgagaacgagaaggatgctaacactcgcgcaaatactgaaacatacccaagagacatgtctcaaactaca

SEQ ID NO: 249253 - DNA, 380 bp, Glycine max
  unsure (1)..(380): unsure at all n locations
gcgtcgaaaaagcataacaaaaatttctgtgattggtttaaagatacaatctttgcagatgaaaatgcttcaaaaacattaagaaaactagcagatgggcctaaaagaaatgttataacctggcaaggatacgacataaatagatattcattttacacaaaagcacaagatgacaaaagtacaatgcagaacaacggggtcaccctaagggctgaatctcaacactttgcaagtgtcaatgacgccaatccctgtgtagcttccatcccttactntgggctcattgatgaaatttgggagcttaattatgtgaaatttacagcatgtgttttcaaatgtaaatgggttgacaacaacaccggtgtgcgcccngatgatat

SEQ ID NO: 249254 - DNA, 423 bp, Glycine max
  unsure (1)..(423): unsure at all n locations
gctcgagtgccctactcacaacctaatatgtactaattaattctgatatctctgaaccttatgaactcttaattgcattattgcaatgcacaccatacacaaagactaataagccagaacaagatcaaactttngtcaatactgaggatcaaagctatatgatgtctgtcagtccctcatcaaacaggtataagcctaagctaaataaaattaagtccaacgaactagtattctaacaagttctccaagagtcatatactgttgcacagattgttggttgaatctcataaaaagggaaactagacttttagtctccaataaagaataaatatttcatagacagaatggatgcctcattgcatctacacacgtgcatcataacttcaaccctaactcaagttctttgaatgcagcangtatatg

SEQ ID NO: 249255 - DNA, 368 bp, Glycine max
  unsure (1)..(368): unsure at all n locations
caattggttgaccacaacaacgctagaggtggtaaaggacaacagtctttcaaataaacctattatgcgtgaataaacattattaactcaaaccaaggaagtgatngcataattcttagactaactaccttcaatgtacctgaacaaaatgatttccaaacacgtgaccgacacatatcatgcagtgcacagaagaatcgggtagtggttgacttctaagaggaaaaaatgtcatgctttgttttcgggacaacgacacaaggattacattataccgtgatgcaatgacatatcccatctccgttatatccatccacttgtccacactaacttgaatcaagcaaacatacacatctaagttatttaaa

SEQ ID NO: 249256 - DNA, 428 bp, Glycine max
  unsure (1)..(428): unsure at all n locations
gctcccatggctccatccctctctaatgataaccgcctgatggtagctatggtacacacacaaaagagattccatatatacacttctatgtcaattgacagatcaagaggtagcataatatctntaaaccacataattggcatttacataaagtttttcccttcttactctagccaaatccaaaaaaaatatataaaaactgctccaaattaagacccgagattcaccanagcttctaattattccgtttctgattaaactaacaattgagtaatgtaaaaatatcggcgcaactgtttccaagctaacacanatatcaggatatagatattntattttcactggtttaccttctatataactatgttactttccatcgttcttaataatgactttgcgaagtgaattctaagaatgcaaataatatg

SEQ ID NO: 249257 - DNA, 265 bp, Glycine max
cttttctgatggcttcttcccgttctaagcttcaattggagtcttgtcttttacagacttaattggacatctgttgagtatgtaaatagtaatgtagattgcttcagcccaaaatgtgttaggtagtcccttctccttgagcatcgatctagccatttccataactgtgtgaatctttctctcggacactctattttgttgaggagaatatgcgactgtaagttgtcgctcaatgccttcatcctcacaaaatctttcaaactca

SEQ ID NO: 249258 - DNA, 409 bp, Glycine max
  unsure (1)..(409): unsure at all n locations
actgtctattaacccttttatgacaaaccaggtgccataggtatagcaaattccctaacaaccaatcttgataagcgtaaatgtttagcatttttagctcacgtatatgaactgaatcttgttctttttcaacgaactataactcaaggaaatcaagaattctcatgaaatanaaaatttgtttggcattaatataattagtttagtcatagatataggcatatagcacactgcacgtcatctaatatgtctttaagacttctatggtaaaaaaatgaagtcgtttgaatgccataatggccagcctccaaaagtgaaaatagttaaataagtcctaaattgcnatgctgattgcatgtctgggttcaagtgttcaacttatcttaaagaagtatcaattatttttgcc

SEQ ID NO: 249259 - DNA, 300 bp, Glycine max
  unsure (1)..(300): unsure at all n locations
acctcacttaatcaattgttaaatgaattccgaccgatcggttgcattggaatctcatttaatcccctttaaaaaaaaattcaaccaatcgtttaagctttaacctcggttaatcataaaaaaggtaagtttcaaccagacatttacttngaaagntctctttaaatgaggtgagaaataaccatgtgaaactaaggctaaaatctactcacaaataaagatttgcccacagacaggtcatttgatacagtttcaaggtcaacgccctaacggtactctttactttngtcggttaaatga

SEQ ID NO: 249260 - DNA, 224 bp, Glycine max
  unsure (1)..(224): unsure at all n locations
atcgtaaggtgcttcacctttggggacttccagctatcacctatggtagaagaatttgaagaaatcctatgatgccctctanggggaaggaaaccctacctcttctcaaggttctatccctcattagctagaatttccaagatagtccacatctcagcgcaggaattagaccataggaagcaagtcgaaaatgtggtggttggaataccgagaaaatatttgga

SEQ ID NO: 249261 - DNA, 354 bp, Glycine max
  unsure (1)..(354): unsure at all n locations
ctgcagcttgagtgattcaaagagagctctgagtcttgttgtgtctttntcctttgcttcctactccttttataggcttaaaataggttaaaattcacgtgaccttgcactaagcccacccttctgggcttaatgggtatgatggtgattacgtgcttagcgcgacgacatttgggattagcgagtatcgcgctagcccaccctttncggattaatgagggattcgcgcaaagcgcgcctcttggacttcttcgtaggccttatttgcgctaagcttgtgctggccactgagcgagttggcgtctatgcctgtcttgtgcgctaagcgagttgtcttgatcttcacactttttt

SEQ ID NO: 249262 - DNA, 243 bp, Glycine max
tcaaatccagaggcttgtgatgtcaagtcataaatatctagacatcagatgcaaaagctgttaaagcgaaaaactggtagagtagtattagtggttatacagtcaagatctaataattgtttatttacgcctaactcaattctaaaaggtagttcacttatataatttatcttgactttattcttatccaatgtgaaacttggatcttttccaataaatatgcctttgtaatgatagcaacta

SEQ ID NO: 249263 - DNA, 306 bp, Glycine max
  unsure (1)..(306): unsure at all n locations
ttttctctcacctctttctnctttgtcttccattgcatctcatggtgtaaaatcaccaatgaaggacctcattgaagctcaaagatccagccttcatagaagcgccacaagcaagcttccatcaagtggaaatcagagcacaagagcttcaagtaggcgctccttaaacctccattaattattgtgctctatcttctcttccattgttggatcttcattcttctctatgtatctcctcacatttcttatgctaaatgttgttaacatgattctttagagtttccatcgattaaacttgctatagaa

SEQ ID NO: 249264 - DNA, 424 bp, Glycine max
  unsure (1)..(424): unsure at all n locations
gggagcgttgagaattatttataaatatgccacttattataaattgatttgataggatctgatttanggaaaacttaatatcctctaattatgtgtaattattactatccatctatataaatgagcatccagttgtgtactctgcacacgggtttcactcatttctcttggtttctcttattttacacgttaagaccgtgaaagtcttagcaccaaactacccccatcagaatggaaaaaagaaaaaaacataatttttacacataacatacaattcacacattatacagaatactcatagntttcctaggggggagcattaaaagcaacaagtatggctctgtggtagtttttgaattaagtaaatataaaaacgtgtcaaaataatttccaataataagaaataataattcacataaaaagt

SEQ ID NO: 249265 - DNA, 381 bp, Glycine max
  unsure (1)..(381): unsure at all n locations
tttgatgatgccaaagattgttaaaaagatttattcgaacaagattaaagaaatcaagaagattcaagagaagactcaagatatgcaagaacctcaagaaaagcatcaagataagtataaaaaaaactttctaagaaaagattgagtaacacaatttgtccaaaagaattcttcaaagataaatcttctaccagagtctttactctctgataatcgattatcacaaggcagtaatcgattaccaggagtccaaaatagttatataactggtttacaaagtagtaatcgattaccatgggcatgtaatcaattaccacatatttttaacgctgaatttcatatctcaagagtcacaacttgtgacaanatattttcaaatag

SEQ ID NO: 249266 - DNA, 338 bp, Glycine max
  unsure (1)..(338): unsure at all n locations
tcctctccaacttttngtttcctcctcttcctccccacccaccctatctgatccacccccccaacccccccctcccgctcgaagacgcgaactctttttttaccccacctccttaaactctcccactcatcaccgcctctaccttggaaggactcactgctattcctcccttagatataatgcgccctaagacgctcacttcctctacccacaaatcacactttggacaacttaccatacagtctatcagtcttaaacgtatgcaccacaactctcacatgctcctcatgcttctctctacgtctagaatacactaagatattatctatgaacaccac

SEQ ID NO: 249267 - DNA, 164 bp, Glycine max
gtcatatagtgcttagaatcttctctcaagctttgataagaagctcttcaatctcttcttttctaactcatttcatcatcattttcgtgcaaagcccttatgttcggttccaaatttattttcatcctttgaagcttgggacttcagacctgaacctttgctct

SEQ ID NO: 249268 - DNA, 216 bp, Glycine max
  unsure (1)..(216): unsure at all n locations
ttgctggncatcctcactctgtacaatcactttgccaatgccttatgcattcacagagccgtcatgtgcaaatttaattctgcttttcgccttagcataaacggaaactaaccactccttatgtctactcatatgatcggaacaacccttgtctagataccacaagttcacattctaattntcagtattggttgttgccatcaacaacaccttatc

SEQ ID NO: 249269 - DNA, 340 bp, Glycine max
aaaaagaaagaaactagctaaaatgtcttgttaaacactttctatattacatccaacaacacacatatttttcttttaaatgggacaaaaaaatagtctataatcattctcacaaacaaaaatattataacaattttacaaacatacatacatcttatacctttaaatatgtgaatcaactaatatgagattgcttaaacttaaggttatttttgacattactaactaaaaaacaagttgaaagttgtaaagccaactaaaagctacaaaattagttgatagctgaaaatttttaagttaacttattaacatataaatgctcataaaattatatgtaaat

SEQ ID NO: 249270 - DNA, 379 bp, Glycine max
  unsure (1)..(379): unsure at all n locations
catgcaagcttgcgccgncagcaccacatcctctgatgtctgtgcgagaataatcgccgccggggaggcacaaatggcagcagctgcgccacgactgataccaacgtttaccatcaccggaaatagggttgccatcagcaaaacacccagaccggttgcggaagagacggtcacagacatcagacaggcgacaaaataggcggcaatcatcagcaggtaaggggagttaatatactgcaatggttttgacgccagcttgaccaccatatcattcgcgccgatatgggtcatgtaagcggcacatcacacagcatcataatcatcatgccgaggtcgccgccgggctcattagtaaatatttaacgtattcaacgatatc

SEQ ID NO: 249271 - DNA, 236 bp, Glycine max
ataaattatctcgcgggtaaatagccatcttcatccttgaatgtgcaacgcactgaccaattcattcttgacagtgtcacgtaagctctttcattaccggacgagagttaccgcgatcatgaatttgccacactcttttcactctccgaaactaaaatttgaattctcatcttcgacaaacaaatctcccaattcttgttgagtgaactaacagacatcgcgattggcagacgatg

SEQ ID NO: 249272 - DNA, 316 bp, Glycine max
  unsure (1)..(316): unsure at all n locations
atgtgaacatatcacacattntcaaaataaaaaagatagtgcattcacattaacgacataataacagcattccagaaagaaaatataatggtggatttgcagtacaagattctctggaccacgctatatatacaagatgtatagctaggattgctcgtgaaaaatatggtggatggcaattagtttcaagcaaatcgattctccaaagactcacagctagattttccaataacacgaggcttatatgtaaactgatccatttctacctgacacgggcggatctatagtgtttaaagggagcatattttttttacat

SEQ ID NO: 249273 - DNA, 349 bp, Glycine max
  unsure (1)..(349): unsure at all n locations
agtttcatatattaatatttctggatcatctgagtacctattctctaacagttggagttatttgcaactgtagtcttccttctctgttgtacacgcctgcttgcaatgacgagcgttcgcgatgtgttaagaaccacctcctagcgcacgtcaaaattctgtantagctgttgagtgattgagttcaattgctgaaaactagatgcagggtaagaattgaatagcgacattgaaaatttaatgtgaggtgagatagcgctattgcacaaatgttaaattatgatgcacaaatgatcactcgattgctgatcgtgatatatatntgtgtacaatttatggataaagtttg

SEQ ID NO: 249274 - DNA, 188 bp, Glycine max
aacatacaaatgaggcaagaaggagctttcaaaagagaaagagccatggcttactctcttgctcacaaggaaaacttgcttgcttgcctgtgttgtcattgggtgaccatctctgctgaacttaaaaaattaattttgaagttagatgaactctaacttcccattaatttaaaattaaattaaatatg

SEQ ID NO: 249275 - DNA, 245 bp, Glycine max
gcctcgacaagctccgcactgaaaaatgaaatcccgacaccaatgccagatgtcgtacaggatgtcacgacatcacgcctcacaacatgcacgatatttctgagcgaatgaaccgactcaacaagctaatcacacacgagaattgttaacccagttcggtgcaacctcacctacatctgggggctaccaacgcagggaggaaatccactacaatagtgctagttaagggctaacagcactgttac

SEQ ID NO: 249276 - DNA, 141 bp, Glycine max
  unsure (1)..(141): unsure at all n locations
ccgcgcccaccccaccgccgaccgatcttcacgccccccccctgaccgccaaccccatctcacccacaccccaacctacccacacgccacccctgccactanccaatcaccctcaaacaacaccacagacggacaaacccc

SEQ ID NO: 249277 - DNA, 205 bp, Glycine max
  unsure (1)..(205): unsure at all n locations
gactatacaaaaaaccttcgctccttgttgctcgcctagaggcaatatacattttactctcatttgcctgtcatacaaaaatgagactatatcaaatggacgtaaaaaatgcattcctcaatggagtaatataagaagaagtctatgtagaacaacncactgggtntgaaagtaacacttttccacacatgtgttcacactctat

SEQ ID NO: 249278 - DNA, 226 bp, Glycine max
gtgctatcgcccaaaaccaagcttgaccaatcccgacccaacccgggcatagtcagtcagagagaacttgtgatgtacctaaacacgtgagctcctggcagtcaacatataataggaacaaagaacacaaagcaacgaggcttgtggtggctggccacctgtgaaacgtgattgatatgtgagatatggcctcttgtaatcgaataccaacggtgggtactcgata

SEQ ID NO: 249279 - DNA, 277 bp, Glycine max
  unsure (1)..(277): unsure at all n locations
ctaagagttctctcacgaggcggagtctgagcccatatttcataatgcacaacaccacactgctcaaaattaggatgttcacaattaccaaccacagaatgctcacacttaccattaactgaatgctccggatgctcaaaaggacaaaatgttcagggtaatcaagatgcacactatgcctaattaatctattaaatgttctatctatttcangatcaaagggttgtaactcccctggatcgcctctagtaatgcactatatgcaccaattcatgtg

SEQ ID NO: 249280 - DNA, 129 bp, Glycine max
aatagacctcccatctttaatggagtgggttaccactactggaaaacacccatgccaatctttatagaggcaatagatttaaatatttgggaagccatagaacaaggaccttatgtttcctttataata

SEQ ID NO: 249281 - DNA, 311 bp, Glycine max
  unsure (1)..(311): unsure at all n locations
atctctgagtcacctgcggcatgcaagcttggacactntaaatatgaatgtgcagatttatataagtccaacgacaagaagaagtactacaaatccaaagaaatgaaagatctcatgacaacctacgaggaggacttggcaacaactcgttgataggataacagaaactacatgtggaagagttcaccaaatgatttgaacaacttaatgaactttgtgatgatcaaaatgacaaaatatatgatctatggagagagagtgcacaagcacacaatgactattcaatcctaacacttctgggtaaagtaatg

SEQ ID NO: 249282 - DNA, 283 bp, Glycine max
  unsure (1)..(283): unsure at all n locations
tcatatctttctaaaggccttttctcactctctggagggagtggcaaaagattggctgcactaacttgcntccaggtccattaccagttgagatgaccttaagagggtgttcttggaaaaattcttccctgcatctacgaccactgccatcaaaaaagacatttcacgcatcacgaaacttagtggagagagcttgtatgagtactgggaaagattcagaanatatgtgcaagctcgtctcaccaccagatttctgagcaactccttctgcaatacttctatg

SEQ ID NO: 249283 - DNA, 324 bp, Glycine max
gagacactgactgatttattcaggagtctgtgctttaatcgattatcatgtgatataattgattacttctctttctacaattgttcataagtgaacaagaatactttaatcgactactttgagtatctaatcgattaccttgttcttgagttgctccaagatgtttggaagaacactctaattaattaaaaagataatctaattgatacctcattgaattaattgataccctgtagattaatcaattccgacaatttaattgtctctctataataactgtcgcacccaccttctggggaggcgatccagactcggggatgcgtg

SEQ ID NO: 249284 - DNA, 333 bp, Glycine max
  unsure (1)..(333): unsure at all n locations
caaatgaaaactactgccaagatattaccgaaagaatactctttagatataggagaaaaagtctttgtgtagttgattacttctctttgagtaaatccctaaccaaggcctttgtccattcgcaacttacaggttccaactctgtacttgcctaaattattcatcttcatgatcatacataaatcgactttacaactcatggttgataaagtctggatatttaactcatatatagcaatctgcaatatacaattatactagaaagtatttctacttatagatactatgtacataacattatangatatgtgtcactgctgcatacttcagata

SEQ ID NO: 249285 - DNA, 184 bp, Glycine max
  unsure (1)..(184): unsure at all n locations
ccccccccagccatacctgagctgacccccncacccgggcggcggaggaggggaaatggacgccgcccacaagaagaagcgggacaagccgcagacaaaacccggggcgcgaccaaaaggcaagcgccgaccagaccacaagcgccacgcacaaaaacgggaagaaaacgcaaaccgcaccccc

SEQ ID NO: 249286 - DNA, 303 bp, Glycine max
ggctacctgggagtacgtgagctcacatggaggtgggcaacaggggatgagggttatgccgcattgggatgtggaaacttgtgtgcaccatcgccgatgcccctagtccacatgtgatgggacccctaatcctcaagctgagatgaggaatgttgaaggtaaacttctgctttattttgaccacgagtggacctgtagatatgtccggggtacgagaccttgggacataggtgggggctattgcccaaaccagcttgacaatcccacccacccgggcatgtcggcagcgagacctgtgatgta

SEQ ID NO: 249287 - DNA, 271 bp, Glycine max
taaagaggagatagtcggactttgaactatgtctcacaacactcttattcatcaaagttaccataagttgcacacatgcttctatttatagagtaggtagccttccttgagaagctctctcgagaaacacttgctttgatacgcttctttgagacaacttcctttagacgctagagcttagctacacacacccctctcataactaagctcacctccttgagaagcttctttaagaagattcctaaagaagctagagctatctacacatacc

SEQ ID NO: 249288 - DNA, 366 bp, Glycine max
  unsure (1)..(366): unsure at all n locations
cccccccccccacgcatatctcataccncccnnccncnncggcggagcttcacacagaaaccacagttttttatcttgattcaacagtccacattctgtccatcaacaattcacccaactataacattgaagtgactttgatagttaagaatcaaacactattatttattcagcatccacacaaagtaactctagacaaaaaaacatttaatactactactcccacactaaggaaattattactaccttaaaccatcttttagaataattagcgtatatcatttatcagacacaagataaaatctaaaccatcatcagtctgaactcaaattttacaatatctatctacaaaagaaataaattcca

SEQ ID NO: 249289 - DNA, 187 bp, Glycine max
agttattgtcgcttaactttctctagagcttccgttttcaatttcgagcgtctagatatatgacaaggctcaatcgaacattcgagttaaaagtcattgtcgcttgacttttctgagagcttccgttctcaatttcgagcgtctcgatgtattatagggctcaatcggacatccgagttaaaagcta

SEQ ID NO: 249290 - DNA, 342 bp, Glycine max
catgcactcctctaaggacaataacatcatttcttgcattgaattgttgagagttggaacccatcttctcaatcaaattcctagcctcagcaggggtcatatcaccaagagctccaccactggcagcatcaatcatactcctctccatgttgctaagccccttatagaaatattgaagaaggagttgctcataaatctggtggtgaggacagcttgcacacaatttcttgaatctttcccagactcatacaagctctctccactaagttgcctaatgcctgaaatgtctttcctgatggcgatagtcctagatgcagggaagacattctcctacaacaccct

SEQ ID NO: 249291 - DNA, 266 bp, Glycine max
  unsure (1)..(266): unsure at all n locations
ccccccccccccccacgcggctgtgctcatgccncccnnnnanannccgggcgcgccacgaagaagagcagggtaacggcccacgaacgaaacggccccaccccaaaagcaacccagaccccggcaccgacacggacaacactaaaagccagcaactagacacaggaggcacgcccgccaaaaacaccaccccgaccccgcatcacaagggaatcacgcgaaaaacgcgcccccgccgccaaagagacgggaggcggaaacacccc

SEQ ID NO: 249292 - DNA, 283 bp, Glycine max
  unsure (1)..(283): unsure at all n locations
tcacatcatcttctaggggagcttacagcaacaaaacttcttctctctcttgttcttgagggttggtctaaaaaccttgaagcttaaaactgttggtaagcaagttnacccttnnnncgaggccttgtcattcctctttatcatctgaatcttctctcatcgtcttgagctnnnncnaaccttgcttcctactcaagagaactgcattcttggctgcacccttctctttcacgtggagactacaacaggtaacggggtntctccaactctcgacctctatgct

SEQ ID NO: 249293 - DNA, 333 bp, Glycine max
  unsure (1)..(333): unsure at all n locations
gcttaacgaataatgagctgtattttgcggtttcaaagnaacactgaagcaaaaatacctgtggggtgaacgggatctgtgatgatcatgtaagcaaccgaggctccaatactacgactcctggccagccatccaagtccaaatattgtcaatgccaaaactccaattgcagcacagcctatttgggccatgaacacattgtacttctgcacaatcacatgtgggtgatttagttcctcactaagaaatacaataatgagagagaattggaatgcatgaagattcgcatagcaataccatgttcttttttactgacataccaatagcatgcta

SEQ ID NO: 249294 - DNA, 294 bp, Glycine max
cttatgcctccctccccactggatgatcctcacaagcgcctctcaaacttgattgtcccacttgatgaagctgcacaagctgaggagatgaagcacagtactcctctccaggaggaacttctttcaccaaaatgggcccattaacgaaaacggcgagcttcatggtgaccaagcaatgaatcagtgcccgatgtcggctcgtaatgatacataatgctgtgcacaacaaatcttgtatgagaggcacatttctcatttactatgtatctatgtaggcaactcatgagatgatta

SEQ ID NO: 249295 - DNA, 308 bp, Glycine max
tgttgatgccttaactctagagaaggtgcagcaaatggtgctttctgcattatctaccttaggcatccagggtaagtctaatgatatattttcaccatggtttgttgattctggagcctccaatcatatgactggtgccttggaacatttaaacaatattcacacttataatggcactcaaaacatccagaatgctgatggtaatactctttcatcacggctgttggaatattactcctcctttccgatgtcttctagacttgttctaattaatttcgctgaccaatgtgatacaatgcaatattatt

SEQ ID NO: 249296 - DNA, 325 bp, Glycine max
attatagcacaatctactcaaaacacatcttgtattatttacattgaagtcaataaaacgttttgtagcaaaaaagaataccacacgcacagctgtcacatgtggatcagactctcttcccaaacatattctaaaaataagagatatcacatatctaataattcaatataatgaccatacatctctggatgttctagattcaacaaaacacatattcttaccaaaattgcaatatgctcgatggcactgagacaaagcatattcactcttagacgggaaaaaatcatataagttaacctcatatcacatcttaacccaaaatctt

SEQ ID NO: 249297 - DNA, 333 bp, Glycine max
  unsure (1)..(333): unsure at all n locations
tcatccatcctttcttggaaatctttctatatatcttttgtctacatacaaaactcttaaaacaccttgtgaatcttgaaatacaacacttaactcctaagtgatatatctgccgtaagacgatcatatcttagccattgtgtgaacttcncacaaatctcgttgatctgtttataaccaacaatgacttggtaggaccaaaaatactgagttgaagtcacacttggggtacaatctttctgtctttgtcatagctacaagtgacagtgaagaatactcatcactcttgaaacttagtgaaaatttagtgggttactaaacattgaactaccc

SEQ ID NO: 249298 - DNA, 251 bp, Glycine max
cgcctctcctgacctgcgtttcaacccttaatatgatttccttgctgggtgcaacgccggtaatggtggatgtcgaccgcgatacgctgatggtcacgcctgaagctatcgagtcagccattacgccacgcactaaagccatcattccggtgcattatgccggtgcgccagcagatattgacgccattcgcgccattggcgaacgttaccgcatccgagttatcgaagatgctgccatgccgccgtacgta

SEQ ID NO: 249299 - DNA, 265 bp, Glycine max
atcttgtcttatggttaacgctgtctctagaacatttccactcaaattaatgatgaaatttgcgcctttttaggtgaaaaagaggctaagttttgaattgcaaaaagcagcagttgggctaagtgcatatccactgctaagcgttgcttcaacgcgcttagtgctaacgagaatctggcagagcatcaacatcaatgccgcgtgctaagcacgagatcaatgcgctaagcgcagtacgtgccttcagccaaactaagctcgagat

SEQ ID NO: 249300 - DNA, 223 bp, Glycine max
  unsure (1)..(223): unsure at all n locations
atgaaagattaggaagtacaagtggtgaggatgtctccttcacctctagaaacctacaatcaactaaactctcatccaatactctccatgataactctctctttaatctctgctgtccctcaagatcttacaccagaagntctctctgacattcagccactcagatgaatgcttccaagaatagagaaaatgccaacaaatgagaaccccctttcatttctga

SEQ ID NO: 249301 - DNA, 297 bp, Glycine max
cgatgaagaagaaagtatttggtcacagataacatatgcagagagatggacacatatctataagctttcaatatggacaagatcggtcgtatatggaggactaacatccagagaagacaaaattgcttatgcataaattaattgaaggaaacacgccttaaagatgataggaaacaatggctaatggatctatgagtcgaatgctagaaacaagatattgactcactacttttatgaattgaattaaagctgaatgagaaacctcgactatttaaacaagaatttccgtcgtactaa

SEQ ID NO: 249302 - DNA, 327 bp, Glycine max
  unsure (1)..(327): unsure at all n locations
gcttaatcaagtctataagcctcctatatcgtccntccttgtcttgctttgttggttcgcgaggatatggcttctaacatgtaattgcttgtttagccttctcatgctagctgaatctttgccttaatcggctctcatgctatttctttaactatcatgtcctcctcttgtatgtcttnctccatctgtcatctacttccatgtcctttcttacttgctctttaactgctaacccgctctttgttgttaccacattgtagtcaacctctgtggcaatttctttatttaccccgtaactcctttattgacctttaagaattattacct

SEQ ID NO: 249303 - DNA, 354 bp, Glycine max
  unsure (1)..(354): unsure at all n locations
acacgagttgagttagctacggagccaaagagatcattgtntattataattattatgtgcaccgggtggcggggatgttaggtgccctgaacacattgctagatatatccaatatccaccaatctgttaaccaatatccatggaaatgagcaaactttcgcacattcgcatatgtgagaaattaactcaacattaatgaaatacatcctaattcacgttcagaacctttaataatataanggtagatcctacgtccttacatatagaacatatatcatcgtccatgctttagccaaccagttttcactctcaattattaataaatcatgggatctgctctcttttccataccat

SEQ ID NO: 249304 - DNA, 183 bp, Glycine max
  unsure (1)..(183): unsure at all n locations
acccccccnccanccccacccccccccccgaagctctttttttccaaccttccccaaaaaagcattcagtcttaaaatccaattaagaggcctctttcttatgcaaaggctaataagctatctacctgatgatccaaaacaaaatgtataaaaccaaacttgctgcatcttcaaggattaaca

SEQ ID NO: 249305 - DNA, 210 bp, Glycine max
  unsure (1)..(210): unsure at all n locations
tcacacctccaacacagaggaagaagacacccaccgacctcagtttgttgtcggcacaagtaacaaatatcacggggctgagcggtatgacccgcagcggtcgtgtatttgcgcnccccaacctaccaattcagcncacgaacgtcaaggggaaggcaaatgtagtggaagaacaagatgataaaacgcccctcactccgaatgaggata

SEQ ID NO: 249306 - DNA, 344 bp, Glycine max
  unsure (1)..(344): unsure at all n locations
agcaaaatcaaccacagcagaacaattatgacctttctagcaacagatacaaccctggatggaggaatcaccctaacctcagatggtccagccctcagcaacaacaacagcagcctgctccttcctttcaaaatgctgctggnccaagcagaacatacattcctccaccaatccaacaacagcaacaactccagaaacagccaacagttgaggcccctcacaaccttccctcgaagaacttgtgaggcanatgactatgcacaacatgcaatctcagcaagagaccacagcctccatttagagcttaaccaatcagatgggacaatnggctacccaattgaatc

SEQ ID NO: 249307 - DNA, 230 bp, Glycine max
agcttagctacacacaccgctctcttaactaagctcacctccttgagaagcttccttaagaagaatcctaacgaagctagagcttagatacacactcctcctctaatacgcgagctcacctccttgagatgagaagctagagcttaccgtcccaccctctataatagctaaggcgcaccccacgacaaaaacatgacaataaaaaaaaaatctctcactacagaaactac

SEQ ID NO: 249308 - DNA, 193 bp, Glycine max
gtcccaaaccacttgagactcgaggcccgccttgtttgaccccattataacccccgcttgggacttttaaagacgaatacaatcacactgttcttccatgacgactgggaaaaaatcctttgactacgagaaaaccatatggacagctcttgatcgggaagaacacgtggataatttttgtcgatgcgataaa

SEQ ID NO: 249309 - DNA, 300 bp, Glycine max
  unsure (1)..(300): unsure at all n locations
aacgtgagaaattggttgcctcaggatcattgtcactcaagtctgggtggcaagctttcatgcaattgtagtaggccttcttgatctgcgctggagtggcatctggaagctggtgaaatggaacaaccaatcattagtgattagacatacactatgatactaatatataccttgataatgttctctcatgtnccctaattatagcattatnttaactgccacaactactctagatataactttcatattacctattntaaaaaaatgataattgtctatcatataacaactcataatctg

SEQ ID NO: 249310 - DNA, 240 bp, Glycine max
  unsure (1)..(240): unsure at all n locations
ccattgccttcctcgcccagtattatgatccgcggctgacgtgcttcacctttggggacttncagctatcacctatggtagaaaaatctgaagagatcctacgatgccctctacggggaaggaaaccatacctcttctcaaggttctatccnttattagctagaatttctaagatagtccaaatctccgcgcaggaattaaaccacagaaagcaagttgaaaatggggtggttggaatac

SEQ ID NO: 249311 - DNA, 138 bp, Glycine max
  unsure (1)..(138): unsure at all n locations
ctatctagcccccccanccgccgccgacccggcggatttagcgagacaacaccccccagcacccaaccccaagaaaacgacgcgaacacaaggacagaccccggaaaccgcgcaaaaaaacaccgcgcaacgccaaac

SEQ ID NO: 249312 - DNA, 300 bp, Glycine max
gatccaagtgctctgatcatccatttgcatactcatgttttggcggcatactcaccattgcttatttctctacgaattctatcataactaagaaaacaccaaggcactcctataacactcgatccacaaaaatggataatgaagacggcgtgcacgaacggatgaaggccgatctatcggccttaaaagatcacatggcttccatctcggaggtcctgttaaaactccagaaaaccatacacgataaagccaccgcacccgccttcagtacagttagggaagccgagcccgcgctacagc

SEQ ID NO: 249313 - DNA, 191 bp, Glycine max
gagctgcatcaaaatactctgaagcattggcattgtgttctatgagatccacgaacgagagagttgttctatatattaattctgctcaatgccatctttcgctgaacaacctttggctgccataagtgatgctacccctgcactatgttttcatagacctgtcaatcgtcatgccaaaagcctctggagac

SEQ ID NO: 249314 - DNA, 159 bp, Glycine max
tgcaagcctggccttacctgacctattcgcacgcctaataattagtatcacttcgaacaacaatctgcgtcactactgattttgaatatgatcagcccgaacagacactgaccatcatacgttaatgccacatggcgatctccctcaagtccatccatg

SEQ ID NO: 249315 - DNA, 178 bp, Glycine max
ttctgaactgtttggctttgtattaataattaagcaaggaggattcttgaaaagacaagcccagccaaaacctggaggtaactattgaataacaaccgacaaatggctaacttgtttggcctgattagctgcttgctactagcaacattccatcttggctggactttctttcttctat

SEQ ID NO: 249316 - DNA, 340 bp, Glycine max
gacttcttctggaggatcttcattgtttcctttatcatttcctttggaattttgctcatgaatgttcatatgttctaaagaatctgcaatgtcatctagcatattctttcttgacaatatagcattaaattcatcaaaggtaacatgaatggattcctccatattcatagttctcttattatatatcctatatgctctgctttgaatgaatatcacaaaaaatgccttcatcacattttgcatcgaatttcctatatatctttacattattaagacaaagcacttgccaccaaaacatgtagatgagagatattacgtttctaccataaataactatatg

SEQ ID NO: 249317 - DNA, 284 bp, Glycine max
  unsure (1)..(284): unsure at all n locations
agcaccaagaagagtggggtctagccaccgcccacgagcatataatccnggatgagtatgcccaagtatatgccgaacaagaggctagaggaacggtgatcgactctttacaccaagaggcaaccatgtggatggatcggtttgctcttaccttgaacgggagtcaagaacttccccgactgtagccaagagcagagcgatggcagacacctactccgcctcngaagagattcatgggcttctcggctattgtcagcatatgatagacttaatggcccacataa

SEQ ID NO: 249318 - DNA, 268 bp, Glycine max
  unsure (1)..(268): unsure at all n locations
acctttgcgaaattcttcacggaaaacgttacggaaacgtttcggaagcgcctcggcttagattntcttcacggaaacgattttttcaagcaaattccaaagagagagaagtgccaaaggggctgaacccttttcttcttcacttcctcccctatttatagcaaaatacgggagggtggttgccgccagctcgcccaggcgagctcagctcgcccaggcgagccaggtcgctttctccacaagcaacagccttctggacgaatattct

SEQ ID NO: 249319 - DNA, 362 bp, Glycine max
  unsure (1)..(362): unsure at all n locations
ctgatatctcatataatcaattactgtgttgtttgagacaatgaccaatttantcaagagtctctactttgatcgattaccaagtggatgaatccattacttctttctcatttattggtcaaaagtgatcaagaacactctaattgattaccaagagcatctaatcgattacattgttcttgagttgttttttagatgttggatgaacactttaatctattacttagataatctactcgattactttgttaaaataatcgattaccttatagatttaatcaatttcggacaattataactatttctctataaacaccagcttgtattacatctcccatcagagacattatagatactcatcc

SEQ ID NO: 249320 - DNA, 360 bp, Glycine max
  unsure (1)..(360): unsure at all n locations
cccctctcttacatgacccttctttctactaaggggggtgacncttcttaggctgggtgattcttctcatctgaagggcctctatttatagacccatcttaatgttaaaaggggaagcaaatctctaatttacagataatatcttaataaaatctaaacaaatcctaaagataagataatatctttataaatataaacaataatcctagagatttgaaattacaaatttgaattgtgtccaacatcctctaccagactctgttccttgcccctcttggggctgattaaccgcctctttccctcttttcctttctctatatgcttgggttaatgggctattagtggctntacatttatgga

SEQ ID NO: 249321 - DNA, 237 bp, Glycine max
  unsure (1)..(237): unsure at all n locations
gagctcacaagtaaccatagccatagattgatattcagcttttgcactggactgagcgacaactgtctgtttcttgcttttccaagaaataagatttccttcaatgaagacacaatagcctgatgtagaccctttatccatgggacaaccagcccaatcagcatcacaatatcccgatagttgtgtattacccttgtcttcatacaataacccttgaccatgagctntntaacatat

SEQ ID NO: 249322 - DNA, 359 bp, Glycine max
  unsure (1)..(359): unsure at all n locations
atatctgtttggccttctaatggttaatggttgtttttacatggaaacacgttagacaaacttatgacctttctatctttntcatttaccaaacagatcatataatatacagcttgatagatattttcaattttatttactagttacaattaaaaactaatttctctaaattagaagttattaagaatataaatttgccggtcttatttcaattattatttcaacatatatagcgtgttgtacttctcttgctggcgttgtttaatgttgaagcgtttcattttgctgtaggaaatgatatctatgggaactgacacggtggcaattctgctggagtggatcttggctcggatggttct

SEQ ID NO: 249323 - DNA, 336 bp, Glycine max
tctaattctcatgccaatctactcaatgcttgccaaacacaaataaatcatacaaacatcgttctcacaacatggagagtaacaccctttaaacaatctcacataatcatatcaaaaattaatgaatccaaatcatatgtttcaaaatataacaaaacacagaacactcaattttatcaaccaattcgcatcagagcatcaattggcccgcaaacataataatcttgtgattataatcataaaggcagaattacaatacaataaacatttacaaaaaactccaatctgattctctaaggatccttacacgtgttcttttaagcggactcacgtgtg

SEQ ID NO: 249324 - DNA, 312 bp, Glycine max
  unsure (1)..(312): unsure at all n locations
acaaggaaaactattactattagcatacacatgcctaaggtttgttacgattcaattgccaacattgtaatgtcattcacacaataattttcaaaaagattaacatgaattcctctggataagtttcttgaattatntgtcttatcacaacacttcacatcagtgctaaactgctcaattacaaaataaataaataaggtgcatagctctagtgaaactagttacgtacagtcctgccctaatatagcagaggccaaatacacatgaattcataccacctatccttgctcgtctgccccttggatgggaatg

SEQ ID NO: 249325 - DNA, 270 bp, Glycine max
aagataacttatactgctctcataatgtaccgtcccactaacaaaacactatcatagaatatagcgcttacgccatccaagtcaagtcatttcgaacctcatcattactatcatacatccatatgtgtcaaagagaatgagaaacatgcctggtaatgcctaccccaacacaacattataagaaaacatgtgttctacacccaaccaaggcaacaaacgtttcatattccatgaaataccatggcttcctatggcggaacaatgatatta

SEQ ID NO: 249326 - DNA, 300 bp, Glycine max
  unsure (1)..(300): unsure at all n locations
actctcttagtgtagtcgacaactaacacaaatataacagaaagtaatgcttaagccaatccaatcaagccattctgaatctcatcattactatcatgcatctcacagagaacgagaatcacgcatcgtaatgcatagcacaacacaacattataagaaaacatgccttctaaagcccacccagcgaaaaatgtatntatatctgtgaactttttcacaatataacacatatataaaaacatggtggaacaatctgaccacatgcacaacaccattcacacattatctctgaaaatgagt

SEQ ID NO: 249327 - DNA, 411 bp, Glycine max
  unsure (1)..(411): unsure at all n locations
tgcaagcttcgagaattgtccacactcctcttccatttatgatttcaggcttaaataggtggccttgttggtgcttgcgtgcttagtgcagctctggctcgcttagcgtgcatgagtgaatttcagcttagcacccaacttctcggttagcagatgcatgcaagcagtgtgcttatcaagatgagctctcacttagcgcatgtgtccagctcatccttcttncagattcttcctcgcgctcagtctcaagagtggtgtgctcagtggatggctcgctaagccgacagattggcttagtgaaaagctaaaaatcagcacttcacaaacttgcctaattaacctgaaattgaaaggaaatgattattaaatacacaacatgggagtactaagtgattattacctatatctaac

SEQ ID NO: 249328 - DNA, 417 bp, Glycine max
  unsure (1)..(417): unsure at all n locations
tttaatagctgttgtaaatcagttntggccactggtaatcgattacatcctctggtaatcgattaccagagagtaaatctgttgaacaagactctttaacttcaaattcttggccaaacctttttctacttcaattggaattcccctcctatctaatataccctttctaagactagagactcgtcttgatcatccatcttgaatatctctaatttctttgtcttgaataaagctttgagacgcatgtgaaactctggcatcatcaaaacattcagcttgatcctttgtctacaatctccccctttttgatgaggacaatccctgaaatcaagacaagctatatacaagatgatagcacatttcacacaaccttttactccctatcttntggcatgtatgcctaacttacttaatgat

SEQ ID NO: 249329 - DNA, 321 bp, Glycine max
  unsure (1)..(321): unsure at all n locations
cctttgccttccgctgcatctccatggtgtaaaatcaccattgaaggacctcattgaagcctaaagatcaagcctccatagaagctccacaagcaagcttccatcaagtggcaatcagagcacaagagcttcaagtaggtgctccttaaacctccattaattggtctttgctataccttctcttccatcgtggctctttcattcttctccatgtatctcctcacatgtcttgtgctaacattttttaacatgattctttagaggttccaccgattaaacttgctatagaagccagatttgatcttctatggctcanacttc

SEQ ID NO: 249330 - DNA, 336 bp, Glycine max
  unsure (1)..(336): unsure at all n locations
acttcacctttctgacgagcttcgtggggaacctggacagggatgctancctactgttcatcttctaaacttcttggacgttggtcgggctgcgcatctncaatatgccagtgcatttgtcggggtttgcttcaatccctcagtgagtgatcatgaagccgagaaacttgccttcccctacacaaaagtatatctttcacggttgaggtgcatgtcgtatttgtggagctccacacagacttcttctatgtctgccacgtgttgggctacactctgagacttcatgaccatgtcaccgacatatactgatggaagcttgcctgcgaagcttctatg

SEQ ID NO: 249331 - DNA, 409 bp, Glycine max
  unsure (1)..(409): unsure at all n locations
gcaagcttgtgctgctacagtctagtgtgcaacattatatntgctacgataaatgtctcgtagccatgataatcgtacatatgccccatgacactgtactgttntagctctggcttcatttgcaccgacttcaagtaattccactaacatcaacaccgcttcatcgacataaagagtctcgaagctatggaagacgcctgtgatgggcatatgaagcanaaaggccacatcatcgagggtgatggtgacctctcccattggaagatggaaactgttagttttcttatgccacctctccgcaaactttcttncgtgagatgataacttcaattcacgatgttcctaanaaaaatanataactttaacaataataataaatacttattaaaatataatttattttaaacta

SEQ ID NO: 249332 - DNA, 370 bp, Glycine max
  unsure (1)..(370): unsure at all n locations
tgactgagaatgaagggntgcaccattacattgtcataccatctaaccacaacaaagaatttgatacaaagtcacactaaaccttgagttacactacatctacttaacacactaagtataaacattgcatgaagtatacatgcattcagtgtaaaactgacacatcgtggttgataagcatcgatgcctcacaatattactcaacatcacttagtcatacaacactcaagtatttatttaatgagtaacagcacaactttacattgtcaatataattttgcacacaataactaacaaacacatgtattcctaaactcaagctcgcataataaaccatatctaaagagcttctgtacaccccttactggat

SEQ ID NO: 249333 - DNA, 308 bp, Glycine max
gatcatttatacaactcttctaatgtagtggacaactaaaattaaaataatataatagacaatagtgcttaagccattcaagtcaagtcattttgaatctcatcattagtatcatgcatgtcacagataaggagaatcaggcatcctactgcataacacaacacaacattaaaagaaaacacgctctctaaagccaaccaaggtaaatatgtattcatatctcgcgaactctttcacaactataagacacatataaccatatataaaaacatggtggaacaatctcaccacatgaacaacatagacca

SEQ ID NO: 249334 - DNA, 381 bp, Glycine max
  unsure (1)..(381): unsure at all n locations
acatgaagctctaattaagatgttttctctgctgcatgggcataatgcaatcactctatgtctagcattgattttattaagatgtccctacctttgagttctactaaaaattatcctctctcaagcgactaatccctaaaactgatgcatataaaaccttcaatgtatntctactaaggattacccttnttcaagcgccaaacccctacagatgatgcaaggatgaagcatataatacatctgctggcactttatgcctnccaagccctaactaaaggggtttagcctctcattgtcatgagagacttctacactctatggggttgatatggatggaagaagatggatggatagacgaagaaaagacgatcatggcatata

SEQ ID NO: 249335 - DNA, 449 bp, Glycine max
  unsure (1)..(449): unsure at all n locations
agctntgatatctattacgaggatcccgcgggtttagcatagcgaaatataggttatncgatctgatgttatcaatggctcacgattatatattttgtaatctgtgtcttaccaaagtagctaatggggatatcattatacattagcacattacccactttttatttggagtacattctttcaatcttgaatatggtccacatgtggataacaacaactaaactatgttatgtaatgcatcgctcttattgaatgtgtttaaattattacgtatcgacttccaataaaatattgtatcttactaacacattaaatatgtggatagcatacatcgcacatttgaaagttctacattgtcaatgatcaatcaaaaatattcntttgtatgactttcaagatagctatcatcaacagtcacacacttatcatatatattcgagatgtgatac

SEQ ID NO: 249336 - DNA, 251 bp, Glycine max
tcacctagccaatggaatgtcattataggtacatgacccactctttattccatgtatgttccttcaatctgaaattgggttgagatctatagaaacaccaaaacctaactcacccatgttatgcactccatctatctaatgtgtctaaattatcagctcttaattcgagatataccattttatctaatgagtcttcacaagtctattgtatttctcaattaaacagaaacgcatcaatctatctcttattc

SEQ ID NO: 249337 - DNA, 143 bp, Glycine max
agctctatacatacccacaaatactattactaattttttaaggaatatagctcatctttaaaaaattacctaacgtgacactatgtctgccacgtcatcattctagtacctactgtcaggttacatctgctaagtgatgacgt

SEQ ID NO: 249338 - DNA, 465 bp, Glycine max
tgcaagctttccaaaaagagttgcaagagacatgttattgaaatctctcgattctgcaattgcaattacctttggttgtcattccctgcttaaacatcttagtactttgttaatgagatcctcgttaggaaatatctttcctaatgatgcaagatgattaactatatgtgtgaatctcttttgcatattctgtatggcttcattctgattcattctaaaaagttcatattcatgtgttagggtgtttattctagatctctttacatcagttgttccttcatgggttacttgcaatctatccccatatttcttttgcattcttacaatctgagactctaaagtattcatccatttctaatatagagggaattatattttcagcctttaagatatattggacccttcttctttcctcttcatcccattggttcctagggttttctatagttgcatttcctactacca

SEQ ID NO: 249339 - DNA, 386 bp, Glycine max
  unsure (1)..(386): unsure at all n locations
cgcgttgatgaagtacacatggagtacgtcttggatgaggtgcacaagggaatatgcacaatgcacaccggaggtcggagcatggcaaccagagtcatctatgtcgattactattggttgccctagaggacagattgtgcccagtatgtcaaaaaagcaaagaatgtcacgaattcagcaatgcccaccacgcacgcacncgaggtgctccacaacatcacttcttcttggccttttggcatgtacagaatagacatttcttggaccattcccatagccaaagaccaaatcaagttcctcctcgtcaccatggactacttcactaaatggatcgaagaccanactctcacaacaatcatggctcaaaaaggtctaagggttacatg

SEQ ID NO: 249340 - DNA, 212 bp, Glycine max
ccgcacccgaatcagataaacatgataatgcactaactacgaagtgatcttaggtcgtttcccaacgagcaatgataaaccacatgttcataatatacttgcagtaacagtaacgattgcgggggggtttgtttgttctgtgatttaagcgacgagaactagtaaactagaataccaacctaataatattaacaatgggttgtttcttctga

SEQ ID NO: 249341 - DNA, 448 bp, Glycine max
  unsure (1)..(448): unsure at all n locations
tggctacgtacgcttcttcttgactcatctttttcttgaagtgtgttctncaaccatctttgttccttctccattccactgccattcatctccaagaagcacaggactccattgatgaagaagatccaacgcctacaagctccacatggagctacatcaaaaggctacgcccttaaaagccaaaaattcatccaagtgccatcctcttctctaatttctgcatttcacttcattctcatctcagaaagaaccatgttctatctacatttcgtatcttatttaggttntattttatgaactctgcgtttcctttcaatgacacgcaattcacattcttgaatgattggatgaccctttgttcaaaacgtttgtgttctgaatcgaataagcttgctctgctcctctgttgttgcatttttatcttctcaaccctatttatcatgcctaa

SEQ ID NO: 249342 - DNA, 345 bp, Glycine max
gtctaccatcacgaatcatcgctccctttttcacatgttctgtagttgcatcctatccggaaccatatcagaatagtactgatactggctaacaaaggcaaccattatgtccttccaagagtggactccagaacgtttcacgttagtgtaccaggtaacagctaccccagtaagattttcttggaatgaatgtatcggcagttcctcatcatttgcgcatgcccccatcttccgataatacatctttagatggttcttgtggcaagtagtcccctcgtacttgtcaaagctccacacctttgaacttgggaatgaccatgcttgggtattatgaacaactcttct

SEQ ID NO: 249343 - DNA, 321 bp, Glycine max
tatacgccactaaatctatcatgtgcggacagcaattgactagcacatgaatctccttgggggccgtacacacttcggccatggcttttgctttggctaatagacgcgggaggtcttgactctcattcaaggccaaggcgaacctatccatccacatagtcgcttcttgatgcaatgcatcaatcaccctccctcttgcttctttttcggcgtacactcgtgcaaaatcctccgctagcttttcgtcatgggtcacagactggttcactcctctcttgtatctgcctatgatagcgagcatgctttgctctgtggcttcca

SEQ ID NO: 249344 - DNA, 312 bp, Glycine max
  unsure (1)..(312): unsure at all n locations
ctaagctcgctaagaagattctaaagaagctagagctcagctgcgacattcttctcttatagctaagctcacctccttgagatgagaagctagagcttatctacactccccctataatagctaagctcacccctatgccaaacaacatgaaaataccaataaagtccttactacaaagactactcaaactgccctaaaatacaacgctaaaactccatattactagaatggccaaaatacaacgcccaaacgaagganatacctattctaatatttacacagagaagcagactcatacttagcccatgggct

SEQ ID NO: 249345 - DNA, 396 bp, Glycine max
  unsure (1)..(396): unsure at all n locations
ttcctctaccgaaatttatatttatcggtctgntgttttacaaagaatcgcgcaatgtcggcagacaaatatcagtcgtggctatataaccaccgatgtcacgtatttctgttcaatccaatccctgaataatctttggatattgtccaatacgaaatgttcgatcggcgctatcacgtgatgcttgctttctaatataaacctgctggaccggtcatctttcctggccgacatcgactatcatcttttttatcagtgtccgtgaataactgtttttgcccgacgtggcttgatgttcttctcgcccagtaaatgagaacacgccactgtcggccgaaacacagcctccgttgagtctccactaacaaccctatccgacctacattgtaagttttg

SEQ ID NO: 249346 - DNA, 376 bp, Glycine max
  unsure (1)..(376): unsure at all n locations
caagcttgcttctacaagcttaactctctcattgtttttgagctcttgcggctaggctaagcgcgtcctgtgtgctaagcctgagggtcattctggtgaggttgagctangcgccccatgctgcactaagctcaggccctcttctgttttgaaaattgtaaacttaggctaagcccagcatgctgcactaagcctaatttgtagaacaaccatttntgtgtcttcaggctaagcgctcgtctatcgcacttagcccatgaataaatttgcataacgcgcgctaagcccaccatgctgcgctaagcgcccaattcagttttcaattttaattttctatttntgatgaaaataatcttgtttaaccctgtggtttgat

SEQ ID NO: 249347 - DNA, 314 bp, Glycine max
  unsure (1)..(314): unsure at all n locations
cgcaatgaggaactatcgcccgacgctaattccagaattcaccctacttccaatgacgtatgaggacctcttgccantcctcatcgccaaccaactggccgtaataactccgtggaagatcttccaaccccctttctcaaagtggtatgatcctaacgcaacttgcgcgtaccatggcgaaaacccgggccattccatcgaaaaatgcctggcccttaaatacaaggtccaacattcgatagactccggatggctcacatttcaagaggattagcccaatgtgaaaactaacccactcgccaatcatggagggg

SEQ ID NO: 249348 - DNA, 483 bp, Glycine max
ctgcgctgcagcttgaagaggaacttgttaaagcattatcatcagataactaagacatacaatgatgtgtatcgctagggacaaccttaaatctgaatgctagtcctttgcccaaaacatgatcaagctcttccgatatatctcttgcatcaaataatccatcctacgtaattagatctatacagccactaattaatttttaatataccacaacaatactatccatgcatgatgaatacagagatgtagtatcaatattctttaccttatcaatcattttctgcttaatctcagctgcagtctcctttatcagagcataacatccacgactccatagtgcaaaaattgcagactcatgaggttgaccaactatgacatccatgccaaacctataacacaaattggtgaatcaacagctacgcatataaataacaacactcactcgctgaagaaatgttattcgacatgtcaacaatgcaacta

SEQ ID NO: 249349 - DNA, 223 bp, Glycine max
  unsure (1)..(223): unsure at all n locations
tgatccccccccccccccccctatctgctgcccncccnccncccgcgncgccccccacccctccggcctttttttccgatctctctgcccaaagatctagaggacgccgataataatctaacataaatctataagatgattctacacagtccagatattatttatataatggcagcgccgataaaaaatgatttactattgccacgaacccgcggacgggatg

SEQ ID NO: 249350 - DNA, 300 bp, Glycine max
  unsure (1)..(300): unsure at all n locations
actatcataaggcataaacctagtaaaactacccatcatatctcccagacacccaatacccacgaaattatgtgagaaagaagtctacccaaacctgaaatntgaagtcccacaacgtagatgtgcgctctatgactccgaaaatggcttcctttcgcgatctggagcagaaatggtgtgtaaagggtggagcttcgatggagctctaatggtgaggaagacaaaaggaatagcaccgtgagagagacagggagaaaagcttctgaatctctgtgctgagggaggagagagaacgtggct

SEQ ID NO: 249351 - DNA, 267 bp, Glycine max
agtgctcaacttcgcgataacccaaattcatgaaccattatatgaaatagtattttcgcttcttgccacaatcctgagtgactacaagcatgacgagctccaatgaatgtgatgtcattatggatgacccctagcgcttccatctcttcacagttccaatgctgcctcctcatgaccatgcattgccaacccctatatcatggcatttcacattgaaacattacggtccatggccgcagcaagcagtgcatctatgtctccacactt

SEQ ID NO: 249352 - DNA, 417 bp, Glycine max
tctgtttatagttactccatattgtcgacaattaacttggggtcctgtcttcatgagttttaagtctaatgtgctaagttgtttcaagtttggtctttggcaagtgtgtacaaagatattcatgacccgctaattaataggaaagattcaacacctataggatatgaagaaacttttagcgtattgctaaattgctgatttcttaatatgatgaaagactaactcaatgatgtctactccaatatcaatgatatagagtcttgggaaattgagggcttttgcttaaaaaaattcaaatactgaaagttttatttccttaatatcttggttctataaagaatcccaataacaagaagagaagagacacttatcttcaaataattatattgtctcttacattgaagaactcacaataaa

SEQ ID NO: 249353 - DNA, 384 bp, Glycine max
  unsure (1)..(384): unsure at all n locations
taaactgatgacgtanataaatcatggtactatggtaggtcagcatacatgtcattacatttggaagaaattgctttaagcatgtcaagatagatcaccaacagaaaactgaagttaaattttcagtagaacactgctcaatttcatagcacaaatagtctgtttaatgatatatatggaaaggatataatatactatagaatagaacatttcatatttcttttaattggttgtgcattctataaacagtaatattcatacccaagtctatgatataatccaatccactctaacaattggntatacttatttattcattcaaccacatgacatgaccagcaacatctatccgaagccaatcaaagcaatacgcacttaaccata

SEQ ID NO: 249354 - DNA, 384 bp, Glycine max
  unsure (1)..(384): unsure at all n locations
gctctctagaaactcanatggccataactcttcacctagatgtccgattatggcgaatcacatatcgagacgctcaaaattgaacatcggaagcccttgagaaatcctaatggtcataacttttaactcggatgtccgattcaggcgcatcacatatcgagacgctcgaaaaggaacaccggaagctcttcagaaattcaaatggccataacctttcacactgaggtccgattaaggattataatatatcaagacgctcgaaattaaacatcgaaagctctcaagaaattcaattggtcatcacttcttacacggatgtccgattcgggcgcataatatatcgatacgctcgaaattagacatcggaagctctcgagaattcaa

SEQ ID NO: 249355 - DNA, 365 bp, Glycine max
ggagaatagagatcataatgaagaagaaaggaggacaaaagggaatgatggtgttccttacaaaaccgaattgatggtattaaactcaacattcctccatttaaaggaaagaatgatcccgaggcctacttggagtgggagatgaaaatagagcatgtcttctcatgccacacctatgacgaggaccagaacgtgaagcttgccgccacggacgttttcgactatgctcttgtgtggcggaacaagctacaaaaggagagagcacgaaatgaagagccaatggttgatacatggacggagatgacaaagatcatgaggaagcggtatgtgccggctagttactcaacggacttgaaattcaagct

SEQ ID NO: 249356 - DNA, 307 bp, Glycine max
  unsure (1)..(307): unsure at all n locations
aagtccatcagcatcaaagtctgaacacagtatcatgaactaacgcaccgcaatatggccaccgctcgaaccttggaacgacacaccaagaacgcctcgaaggaacaacacgcgccagcaaagctctgaggggctttatagggcagcaatacgaacctcacactcccaagaggtgaaaggaatcatcacgggtcaaaggcatgatcttgaaggacgagctanaggcttaccttaggccgaaaagaaatttcgccaccagttcagctagactgaagggaatatgtgggccgtcatccatgaatgcaaa

SEQ ID NO: 249357 - DNA, 426 bp, Glycine max
  unsure (1)..(426): unsure at all n locations
atgaggtaagattggagcaaactctcacctcacacaagtctataacatcaattcncacttgctcaaactggatntacacctaaaacttcaccgaatcacaatgtgacttctcaacactcaattttaccctaaaaatggctctctgctcactttagtcatttgttgttctctctagcacggcccacactttctataagtcctaaatgacatttcaagctacgattaactcactctaacctncaaattccactaaatccagacttggccttgcaactctcanaacctcactcttttttcactcataacaccatattctcactctctaacgctacggtaactctatcctctatctctaacagccttgcatacgcaatctcacacataaacatcacacgcatcatcataaaaaacctcaaactgaatggg

SEQ ID NO: 249358 - DNA, 265 bp, Glycine max
gctgcacctgagccaggtttttcgaaccttattcttttaactcaaacaccctgcgtgtaaataagtccattttaataaaataaccatttgcagataactagagtctgactgggattgtggcggcaccacccttcaaagaatctcccagaagagttacttgataacctggaacaaaaatcttagctgaagacctgcttaatctctaatatatctctctatcctaggatttagaatatcactaatatttgccggaatgtttagccct

SEQ ID NO: 249359 - DNA, 314 bp, Glycine max
tgccttcatctcgtgcttataaatcctggacgattcgtacacattgagtgtcatttcctccaactctacaagctgcagtctttgctattcaccggataaagattcatcaaaactgacgaatttgaggcgctagtaagccctacgctccattctcaccgacagaggacaagctctccaataaaccatctgaaacgggaataatccaatgggagtttcgaacgcagtactccaacttcacgggccacatctttctcgaggaagccatagtcttctccagaatcttctctaactttactttacgcctatctactaca

SEQ ID NO: 249360 - DNA, 276 bp, Glycine max
gcttcttatcaacttgaattaataattgacacctataaaaacactttataaaattaaatgacctgccactctttctttctgttccctactgctaaattaacacgcattaaaaaaattgggtcaaggtcaaccatcctataaaacaaatggggtcaaccaaatcaactccacctctttctaactacgttccccctcagcctccaagaatcattgactcattttatgagttagttggccggatccacatttaatgtgttatcaattatcatgtcctaa

SEQ ID NO: 249361 - DNA, 232 bp, Glycine max
  unsure (1)..(232): unsure at all n locations
atccttgngngcgaactctcagccacgtatgatagccgccgatgatccattactgcttccctaagctctctggtctttcttcacgccgcatcccatgcctccttggagtaccctcgcgtggtggtcactaaaaccccccgcgcgatgaaaggcgtgatgctctcgtctaatggcgctcctctcatggcgtagccaagctgtcttatggcgagaacgggattataattaatac

SEQ ID NO: 249362 - DNA, 414 bp, Glycine max
  unsure (1)..(414): unsure at all n locations
gcaagcttcttccattggttgcgacttccacacaattcttcttttcataatcaaggacccttgttgttgaacttctcgagtagctaagatagctcttggtgtaggattgtcaacttcatcaataatctccgtcccttgaggcaaagttgctacatcaaaatcactcttcaaagacttcttgagctatgacacatggaatacagggtgaatgcacgatgatggtgacaactataacttataggccatgggcccaatgtaggatttgatctgaaaaggaccataataatggggatatagcttgggacagatgcagcgtgctactaattgctgccttcggggtataagtntgacataaacccaatcccccacagagaaagagacatgatgatgatgtgaatctgcatactttttcat

SEQ ID NO: 249363 - DNA, 329 bp, Glycine max
  unsure (1)..(329): unsure at all n locations
ccccacaccgagaggaaccttcaaccgaagccggttcaaacttgcctcgcagtttcgattgagaatgaagccccgtctgaccttcgtgattntccttgaggtaaccgcgattctatgcttgttncttgttagctttagcttgtctttgcatcttttctaactctggaaccaccattgtatgtttcgcgcttcctttgaaaaaccctacagaaagagactntgtaaatgttatcttttcatgacatgggtgttattctgtgatcttcactgaaccncagtcacattggcatgatcgggaattaaaatgatgttcctttctaaatctgaac

SEQ ID NO: 249364 - DNA, 261 bp, Glycine max
cttcacaagacatttgtccatgatctgaccgttgggatatttgagaagatatctggagtgtgctctaaacttccattcccgagagcattctctattcaagcacttcagtctttgctttcgcgtcgcttaggaaaaacgcacattcttcttccttttttcttccaaatccatttctaaagttccaagaactttctctatacccacatgcaccattagccaccacaaaccatcatcgttctctatgaaaacccacaccgagag

SEQ ID NO: 249365 - DNA, 352 bp, Glycine max
  unsure (1)..(352): unsure at all n locations
ctagctgtgtatttggccatgtaatgacatctggatgatntattatttctctatttgcatggtttgattgaacaattatgaattatgttatatgactatgtggcttttatatatctgatatattcatgtttcttgctccacgattggcttatattctctaatgtatgtcttgtgaatgattaatagtatattattgtcttatacttgatacacactttggctctttgttgggatttcacaatgaaacccgcacatgcttgtgattgttgaacaaatatatataaaanagcgaaagaatgatggaagctctgctgtggagcttctatggacgctggatctttgagcttcaatg

SEQ ID NO: 249366 - DNA, 352 bp, Glycine max
tcggatgttctattatgcgcttattatatcgagacgcccgaaattgaacaatggaagctcttgagcaattcaaatggtcataacttttcactcggaggctcgattcaggcgcataatatatcgagacgctccaaattgaacaatggaagctctcgagcaattcaaatggtcaaagattttcactcggatgtccgattcacgcgcataatatatcgagacgttcgaaattgaacaatggaagctcttgagcaacttaaatggccataacttttcactaggatgcccgattcacgcacataatatatcgacacgctcgaaattaaacaacggaagcctttgagcaattccatga

SEQ ID NO: 249367 - DNA, 359 bp, Glycine max
cgcagctgccgctgacgcacggtgctgatgcaactattacagattctcaggaagctactcacctcatgaaggcaaatgcttctcatattacatctcatctaggatggcggacgattacatcactgctttccatcactgctagacacctggaagccactgaggctgcgtttgatgcattgttgctcattatgtcagaccaagcccacctgcttccagctaattatgtgctccgtgtagatgctgcaaacccgtttgctgaatctcgtgttggacaggtagaacgatcttgaatggtcctccatcttatgacacggtctgtccgttgttagagaagtggctaatgatgctcccaagcaccg

SEQ ID NO: 249368 - DNA, 278 bp, Glycine max
gaagattcaatactaatgcctgatcctttaccttctgcaacttcatcaaacaattctctttctacatcagctgtaagtactacgaactctggtcggctgggtgcctcctctgatggttcttcacttacagcatctggcagtggtttacatccaacatactacatgtatctactgccgaagaaactccacaacgaaaccatttatggccaggtggaaacctgtccacgtagcatgctcccgtgctagttataacttccaggatgacatggaggtcttct

SEQ ID NO: 249369 - DNA, 377 bp, Glycine max
  unsure (1)..(377): unsure at all n locations
tgcacgcttctcatgatggactctcagctaggacatttggtgttgcttttcaactcaagacttaaatggttccctggaaagcttaaattgaaatggtctggaccattcaccatcaagaaagtctgaccatatggagcagtggagctttgtgatcctcaatctaaagatcctaagaggacatgggtagtgaacggacaaaggttgaagcaatatcatggtggagctatggaaagattgaacattgttctacacttcaaaacagaataacaggatgatgcgtcaagctagtgacgttaanaaagcgcttactgggaggcaacccagnctttctttccctattctctntttcattcttatctctcgcatgtacttaggat

SEQ ID NO: 249370 - DNA, 368 bp, Glycine max
  unsure (1)..(368): unsure at all n locations
ggcattgggtgtgtggtaagcacgaacgccttgtggctgatttgtggatggcctctgtggatgattgggtgagagggactgttattacctgagtaatgacattgttgggctgatgggaaatttggccatgtacgaatggcagtcaccgcaagggtttctccctcattctcatccttttcatttgccccaatctttgcattcatcacagcacgatgataaaatttgcctcttttcagacncacttcgatcctttcgccagcgaagaccanatccgcanagcatgaaggtgcgtaccccaccacttttctcatagtaaaacactagcaatgtgtctactattatggtgatcatctccttctccgtcattg

SEQ ID NO: 249371 - DNA, 431 bp, Glycine max
tctttctgtctgtctctcgcaagaatgactgtcatatccagaatagtcaaacatgaaacttagacaaatagtcaagatattgaaatccaaattcttcttctgtgtagccaatcgacgagttacaccctgatatagataaatgtgagcaagatttgagtaccatcattatactagattagaagcattaatatcccttcagactatagagaacacaaagacatgatatgtatgtatgacacctacaattgcagaagcatctcgaccaagctgtgcaaactgaagacaatgccccttgattggcaagaaagaccagtggatacgactagtggaacagctagcagttggagagattccaatacttgttggtatttgagcctataaaaaacattgttgcttcactacaataaccaaaatatttaacctcctctact

SEQ ID NO: 249372 - DNA, 233 bp, Glycine max
actgagactgtcactagaaatcctccacattcatggtctcaatgtagaccgaatttgacccttctctttggataaatgaaccgcttgtctaatcactatgaacaacggtctttccacttgagatgtcatttccatcctgcgtctgtatgaactcccatatgctgaattaactgattttggtgatccgatatgttcgatacactctatgactacttcttgatagctgaagtgtc

SEQ ID NO: 249373 - DNA, 340 bp, Glycine max
ctcatagacgcacctcatgctcttaggacggctgccctctccggctcaacactctggcagtcttctcatagccacaagctctcaaaactctctagaactcggacctttctctctctacaaatctctaaacatgccaaagcctccagagttgcccaaactcccttccaacatctgattccaggctccaatacgcggctatgtttgtgctaccgcacttaccacgactatggaccgctcgacgtgcattactggatctacctcaccgcacgctctctgctcaccgatggactgaagcgggcgcttacaagacaccctccctcacgccatgccaactatcctc

SEQ ID NO: 249374 - DNA, 174 bp, Glycine max
gggggaagggcccacaaacaccccacccaaccaacaaacacacacacaaaagaacaaccagcgaacaaagaaacccccacaaacgacccacaaccaccccaccagacaccaaccacaaaccaccccaaacgccgcaaacaaaagcccacacccccaaaaccccgaaaaccaaaa

SEQ ID NO: 249375 - DNA, 307 bp, Glycine max
catttatcctgtaaaaccatactttatacaacataagaggatttcatacaatgttgttaagcaaaccaaagtgaccaatacgtggaagtgagcacgtactgtaagaatcccaactttgaaattaataatttcaaactgctctgtgatttgatgggggtatgggtttgtgcattaatgacaactactacgaattatgccccggctcacacgatcataagccactaacagaagcaatcttgcaatcttccacaggtaaaactaaatctctagcacttagtacctttactacaacaaaaagctcacaact

SEQ ID NO: 249376 - DNA, 241 bp, Glycine max
tccttatctcacaatccaaaatttctaaaatgattcagcgagagacaatcttacttgagaaggtggcggtgattgaaatgtccaaactctgctgagtgaataagctcggactctgaccagtgaagtacaaccctcttaatgaatgacaatgcaaagtcaaaaagatacgcccgtggggaacttataattagctaacatattctgccccattagataatgataatacttactgcatcattga

SEQ ID NO: 249377 - DNA, 346 bp, Glycine max
  unsure (1)..(346): unsure at all n locations
tccaatatctgccttgtgtttttctaaaacctccattaattgagactcctccctctttctcaaggagttgctgatgatcactggacttgcttcattctctccctacaacacatatttcaaatgctctagcagaatttttaacttcactttgtcctttcctgcagggatgtccttcttcaattcttcacacacaactttttcagaagaactttcttctaaaccttctaattcttcaggcagttctcgaattctctttntctctcttctgtcagacaatccatagtattggccaatgctttttttagggggatcgcataacattactctagcaccatgtcaccctatg

SEQ ID NO: 249378 - DNA, 245 bp, Glycine max
  unsure (1)..(245): unsure at all n locations
aacgctcgaatgcattcaaactgtcatcagaacacacactcatgcntatgaacttacggtctatgatacaacgagaggagaagaggcttgtgcaccgcatatgttgctcttctaatgagaaaactgacgatgacgaaatggaggaaggaattacactactctgaccctcataatgtcgctggactagtggcctcatatatcttacaaagggggggttgaattaagatatcacaacttatcttccc

SEQ ID NO: 249379 - DNA, 225 bp, Glycine max
  unsure (1)..(225): unsure at all n locations
catcctgaagacaatctctgtgtgagagatctgtgatctaacttcaaccctctccatgagagtgactcacttctgtattgtgctcaataacttgttctaatattagttagaagtgtgacaccatattatttagtagaagcccttttgtgatgagaggatttgttctctgtgcagtanaatcacaagcccatctgcaataaaacccaaaagtgtctagtaagcgtg

SEQ ID NO: 249380 - DNA, 255 bp, Glycine max
cattttttcctgttactttgcttctacaggacttaactactaagataacgttttggtgaggttattataaccgtcataattgcaactccttcaagtgagatgtgtcttcttcttccttccctttattatcttttcgtagacaaagtaatgcgaatgtgaactcgctttcctgacgctagttctggcttttcgaccacctcaccgccacaacattttctaatacttgaaacatgaatcggcctggcatttttattt

SEQ ID NO: 249381 - DNA, 378 bp, Glycine max
  unsure (1)..(378): unsure at all n locations
atatcctctanaactatgatacaatctgctcttcagattgcgataaatagtcatatctggttgtttctgaatacgtgctcttgaccgtaacgatcactctgttactcggtgttcatatggcctcatgagtcttttgccaagcctagcgaacagctatgtccaaccgatacgctcttcaatcaacatcatgatctttcttcgctctagagtcttacttatgacctctatggacatagatcttggcactccatatatctnctctcagcacctgagtctgtnagcatttattgatcacactaaccacatgaatcattatcatcacctccacattggccttgtcaatcgtgcactccatattattcaacattccatctctgt

SEQ ID NO: 249382 - DNA, 329 bp, Glycine max
tcccattttcaaagacagctgaacgcgaggcaactatttcttcattccatcacatatccagatgagtccctgagtgaaccgcctgaaagagtaacttgacgactcttacacaagccatgtgaactctattgagaatattccagctgattttctcatcgcgattcagaccgagtcaacaattgtagacacttctcctgtgggaaagattaagttgaagactcctgaagaagcaataaaactcattaacaatatggctactattgatcatgctatcttgcgtgatacaagtcctgtctccaccaagagaagcacggttaagctctcttcac

SEQ ID NO: 249383 - DNA, 222 bp, Glycine max
tattcactacggcagcatgaatggatgcttcgatattcatagctctttcattatatattcctatatgctctcgtttgtaatgaatactcaagaccaacacctccatcacattttgcatcaaattctcctagattatccttttcattattgagcacaaagcattcgccacccacgccatgtacatgagacatattacgtcttctaccattaaatcactcatat

SEQ ID NO: 249384 - DNA, 463 bp, Glycine max
  unsure (1)..(463): unsure at all n locations
gcaagcttctatacaggtntatgtggactgctcgctcatcatatcactcatacctccacctacaatattgcaaagcaggggagctagaggatcccttcgtctcaaactccttgtagggataaattccttacaagggctaccattaatcaaaactgatatacttgctgactggaggcaacctaatatccatcttctccattctgtgcagaaacccaacctaaacagcatgtaattcaaaaaagtccaagacaccgaatcatatgcctcttccaaatccaccttgaagatcatcactggcttcttacttntccttgctctctcaacacctcattgacgatcaagataccatggagaatatgccttcctttaatgaaggctgactgcctttcattacttatcccatccatgacagacctcaatctgttgaccacaacttggctatcactctatacatacactccta

SEQ ID NO: 249385 - DNA, 303 bp, Glycine max
cccacaaagacactgacaaaaacttatcttctcctttttggacaaagtatggcacactggcggccaacaaactttcttcccatcagaaccttggatgcacattgtgatcgcatgcccatatcagctagatcctgatcggtattcaagccatccttcgtcttgccttgaatgtcaacgagcatcccaatcacactgtaacacacatttttatcacatgcataacattaatacacatgtctaaccgccagaccagaccactatggaagatcaaagacaatggacctctctcttcatatgcgactc

SEQ ID NO: 249386 - DNA, 336 bp, Glycine max
  unsure (1)..(336): unsure at all n locations
tccttgtgttncgactctcagccacttatgatagccgccgatgatcccattactgctctccctaagctctctgtcctttcttcacgccgcatcccatgccttgcgaactccctggagtaccctcgcgttgcggccantaaaaccncgtgcgatgaaaggcgtgatgctttcgtctaatggccgctctctcatggtgtagccaagctgtcttatggcgacaaccgcgatataattaatacaaccccttgttcccatccacgtaacattcgcacatccttcgcatgaagacagaacctngattcttcctttcttctaccgacggcaccaactaacaga

SEQ ID NO: 249387 - DNA, 293 bp, Glycine max
  unsure (1)..(293): unsure at all n locations
gaaaaaggcatgaatattaggacatgtttgacaggctctttacaatttaaatctggcttccctatgaggaataccttgcacctaggtagcatggagaataccttctcacggtatgtatatatgtgaatatatgtagcacgaacatgccttgcgaagtgtgtgaatatatgcgatcaaaatacctcgccaagtgtgaatgaatcgcacacaatgcatcttaaaaatctgtatgtgtacgataggtggngtanaaatgcctgtcacaatatgtatatctcgggataggtagcata

SEQ ID NO: 249388 - DNA, 231 bp, Glycine max
  unsure (1)..(231): unsure at all n locations
ttccgctcctgagtatgacacgtcaccgctttacgagccgctgtacaccacgcagcgctttccaggccactcaaggccgtggccgtttctccgcgagcgacgcgtccagctcagggacgaccagtatactgatttcctggaggaaatacggcgccggcggtggacatcactggttactnccatggtcaagttcgatcacaaatagtccttgagtttatgccatgcttggca

SEQ ID NO: 249389 - DNA, 302 bp, Glycine max
  unsure (1)..(302): unsure at all n locations
ttaccgagtctttcctaactagatgattaagatgatgcatgtttatgtgtgcagtcttattgatgcaatcctaccccgcacggacattggatagaagactccaagtatattgggctacagatccaagggaaggccctacggttctcatgagccttanggtagatttcgagttcatgggctaagtatgaacccccttatgtttgtaaatattagaataggtgtatccttcggttgggcctcgtattgtggccattctagtaatataaggggttagccttgtactccaggcattttgagtagtc

SEQ ID NO: 249390 - DNA, 150 bp, Glycine max
  unsure (1)..(150): unsure at all n locations
gtggtttcaaatctgcacttatgcaaatnttgtgtgaaatgtgcaccacaatttgtataagtgcgaaaaagctagtgtatggctggtgtacaagggtgtaatatgggttataacactgctgcagatccacggtaaatgtgactatgtact

SEQ ID NO: 249391 - DNA, 252 bp, Glycine max
ggcccgcacatggggggaatattgaacatgcttggtacatatgtaaatatggagaattggatatacaaatatccagttgttacaccatatgctgcaaataggtattataatatatatgacatatacaactgtaaagtgactatgcaaccatcttttcattagtgctctcttttaaaaaatgtaattgtataaattaaccatactgtctgcggtgatttgtggataaaataattaaaacgatttaatattata

SEQ ID NO: 249392 - DNA, 242 bp, Glycine max
cctagccttttttcaatgcgaaaatgccccacaaatcccgagcttcaagttcgatgtccgagattccaagttcccgctcacgtctatgtcttacttccgaagcctccccgcttcatcttttgaccggggccaatggtcggtatttattgtcttattatacccttgcgctagccttttagcatttcctacacaaaaacatctaccgtgagctacgactcgtaatatccacccgctgctccctg

SEQ ID NO: 249393 - DNA, 322 bp, Glycine max
  unsure (1)..(322): unsure at all n locations
atgactatctnctccatttccttgtggttttcattcctggatctacacaataatntgagcgatccctcgaccttgcactgaaatcggtgtcgaatgataaaagcattctccatatgaaattacggtttgacaataggccatgtggcgttgtgttttaaatgacgcccatgttttagccttagtaagagtcaagggatcatggtggatgacgccacacagttcgtgcgggtntgtcagagtatgcctncatgctttnctggggagtgcttcccttatccttcttaaggtattggatcttttagttggtggtgaatgcttttat

SEQ ID NO: 249394 - DNA, 299 bp, Glycine max
cccccccgcacccgcaccgcaggggggctagggccaaatttaactccccccaaaacgcgcaccggggcgcacggaacactaacacgcgagaagggccaaaagcccaccacctcgcgagcaagccaacacgaaccacaccaggaagacaccaccccgaccgaggaacacggccacgggcgcacacaaggaaagccgagcccccccgaccagaaacccaaaacaaagggggcacactaacggaagcgaaaagccacacgggaggaacacccggcccccaggaaaacccacaaaggaaaaac

SEQ ID NO: 249395 - DNA, 322 bp, Glycine max
ctaaacttgtttgtaaatccatggcttgaatgattgattaggggctgcaatggatgcgcctacgcctatccttgatccaactatagattggcctgactcgtcttattcctcattttacatgctaaacatgtgcgcccaaccatccatacaatgcctcatgacattgatgtgttgtgtaaattaattggaaatgagttatgcatgttactatcattaaatggtgacacacttagttgtaattaaatcgcaacatgatatgctacaactaacttgttgaatgcaatgcggatacataatagtaaacgtcgctgataataatatg

SEQ ID NO: 249396 - DNA, 477 bp, Glycine max
  unsure (1)..(477): unsure at all n locations
agctcggagcatctgacttatatgctctagctttgtgnggagtgttgaaatcacatacattgtatgggtacttcttccacatattgcatgggtacttgttccaataaagaatagttattaatgtacctagttagtcacatattcatgtatctaagaattcacatgcatgtacataggtactagaacttcattaatattcttataaatctcacattgtatttactccctaagtctatataaatatagatcagctgggtgggttaagcactcaagcatttcacaacctctagtctcttcaataaatataatgatgagaaatgaaaacctcttcttaatctgtatacatgttaatgtttccaaatacggcaatgtcctctatggggatactattcatcgctggatactatgcatttaccttactgcaaattacttgctaaatatagaaacttgatttattgctcattccgagtactaata

SEQ ID NO: 249397 - DNA, 284 bp, Glycine max
  unsure (1)..(284): unsure at all n locations
cccttcgtgaccatgaagggctaaacaacccactgttggagagctttccaccaaactctcttgatgtaaagactcttactatncatctaacattattgctaccttcattgttccttcctgcgtctatttccatgtacttggtttgatcattcatctaaatgctatgttaacgtttaagcattgtgaaatgtagttaaccttagaacttggaagagcatctaaaatgcttcatcgctacggataatatgaggtagcttagttgaatatacgtctctataatcatg

SEQ ID NO: 249398 - DNA, 262 bp, Glycine max
cgttcatggaattgatcacagaaacgtcaccaaaccaccatggctcggattctctccttctttcttctctcactaactctaagtgaattctgaatacccaacgtgttgaacccttcatactcaaccctcctcccctatttataacaaacatagaggaggcgcttgccgccgagctcccccagccgagctggttgcttattggtgaagctctctaatgggccctgataggccccatgctgaaagaccacccccacgttgatca

SEQ ID NO: 249399 - DNA, 146 bp, Glycine max
gaatgtctgaaacaccatgtatgaaaatgatgacacttttggagaaattttaacaattgtgaaaatctttcacaaaatggtttctttacacatgaaggctttcttttcaaagaaaacaaattgcgcgtgcctaaatgttctactac

SEQ ID NO: 249400 - DNA, 315 bp, Glycine max
  unsure (1)..(315): unsure at all n locations
atttgaagcacactctcacctcacacaagtctataacatcaatttagacttgttcgaactggatttacacctaaaatctcaccgaatcaaagtttgactcttcaacacccaaatttcgtctagaaatggctctttgttcactttggtcatttgttcttctctctagcacagcctaacctttctcataagtcctaaatgacatttcaagctaggattaactcactctaacctncatttaccacagaattcagacttaaccttccaactctcaaagcctcactctntntcactcataacatcacactctcactttct

SEQ ID NO: 249401 - DNA, 306 bp, Glycine max
ctgtcatgtctaggactgtcaacattctaagactggccagctagtgtattggaatctgtccagtgattgtgttgagtgatagatcaagagacacaagctttggacatttagacacaaatgggggaacttctgtgagatagtcataggtgagattgagttcagttatggatgccatgcccttaaactgaaccgggtcacgattctccaaataatttgcgcctagatcaagaaaccatacattctgccaatcgctaagttgaactggtctttgatctacgagtgaattattattgagagaaagaactt

SEQ ID NO: 249402 - DNA, 322 bp, Glycine max
ctgcaatggtatatcgaaaggggctaaggatatcaagcttgcgccaagcaaagtcacacgagtggggacgttgtcaactacatggctattgatgtccagacggtatgggactactcttggtatcttcatgacatgtggatgctctctctgccgattgctcttgcccttgcaattctgtataagaatgctggaattgctgctattgcaacactgattgctacaataatttccatcgtcgtcactgttcctattgccgggtgcaagacaatatcaacaacactaatggctgctaagatgaaacgacgacaatacatctgatgcc

SEQ ID NO: 249403 - DNA, 276 bp, Glycine max
tacacagagaaatacactattttcttcacccgagctttggagaaccaaattcttgaccccctgctgtgcaataatagcttttcagttgaagaaaattaatgctcgttatacatggcagggcggatatttatgtattctagaattaactcttcaccaatctctactgctcgagaagtctctgcttttaaaatacatcccaacacaggtaatctgcgatttgatttcgctaaggcgcccacgaaaaaaatttgcttttaaacgatgcacattattggc

SEQ ID NO: 249404 - DNA, 414 bp, Glycine max
  unsure (1)..(414): unsure at all n locations
tgctataagagtttttctctctttttatttctnagnagnngaacgtttccctcacattgttgtctcaaacatacattcaattganaggtgagcatttgcttactacaccccattgtgagggcttgtgaagcccaatccaattataatttagagggggaggtgagcatttgcttactacaccccattgccacatcatatagtcacactttgtgcatgtccttcatgcttttcatgcctcatgacacctaagcacacttagtggagaatcttggaattgatcttggattagtgggctgaaccataactaaaattcactaatcataattagtgaaattctggctccaaagtttggctccacaaattcaatntcacattcaagtgaaatttgaatttccctccaatnttgtgtgacac

SEQ ID NO: 249405 - DNA, 482 bp, Glycine max
  unsure (1)..(482): unsure at all n locations
ctcatttctacaaacttgatagtctaaccgctctcctctggtgtcaacaagttgagccagttattaaatcccaccatcttcagcagtttgttgttaatctccaaattccaacgatctctctctgaagaagatcgtgaagggatcgaaaatcccgagtatgaaatgtgggagcagcaggatcaagttcttcttacgtggctgcaatcgatgcttgctatgtcggtcctttctcgagttcttggttcagctcattcacacgaagtctgggagcagattcacgattattttcatatgcaaatgcgagccactgngcgtcagctncgaactcacctctgaacgacgatgcttggcagaaagtcaatgcgtgagtacttgttgcatatcacggcgagtctccgatccctgcctcagttggaaccccatcatgcttatgagcatatcatctatcttcacgccttctgcaagatactcatcttgcatat

SEQ ID NO: 249406 - DNA, 305 bp, Glycine max
cgaataacctagtatgggctctgcaaatccgagaatactgtttgcaaggaagaatgcaattttcagtctcaaaatacaataattcatttagttaacaaaagaagatgagcatctaaaatctgtatagtgaaatatttctcacatatgttttctcttcttaactacgttgtgcacttcaaacactaccaatataatgcacatcacaactctgtaataagtagaaacaatgactactgaagctatattctttctttaagaacaaaatatgtaaaacacaacaataattctaggaaaaatgtattttg

SEQ ID NO: 249407 - DNA, 388 bp, Glycine max
  unsure (1)..(388): unsure at all n locations
agacaaatgtcttgtgttcgcgatatgcgaagatgatgtgccgtatactgtggatttggtacgaccatgcccctctgatttccagctgggaaattggcgagtggaggaacgccccggcatttacgcaacgagcataatgtaaacctttacggttttaaaagctctatagttgggcctaggctttagagtttttccttctgttaagggctctgtgtcttttgttcttgaatttataatacaaggatctttcttcatctgttcctggcctctacccattctcattcatttgcatgtttacttctttttctgaaacggcagatccgatgacgagtcctccgaaggtactaatacctgngacccgcctatcgacttcgagccagaaatgaat

SEQ ID NO: 249408 - DNA, 350 bp, Glycine max
catagaacacacccttaatttcccacaaacatagctaattctctcaactgctgctcgctctgcaattccattgcacatacttctgatggaaaaaggaggtatattatttgtgatataaaatgacacatcaaaccgatgaagagaaatgaagaaaattacatacccaagttaacaactttcacaaattaaacaatattccctcgtagacatattacatgagtatacctttgcaacatctagttttccaagctgcattgctagatcacatctgtagtcagggtcagtagctacttcaagagcatcttctatcatacttcgtgattgccgacaatgagccacattaccataaa

SEQ ID NO: 249409 - DNA, 368 bp, Glycine max
tctagcatcaagtcaagacaatgtgcagcacatggagtccacaatatttctggtctcgtgacttgtaaaattctacctataaagaccaaaatcaataaacttgtatgagtagcgtaacaattaaaagttataactacaaaaacaacttcattaagtatgattgaatctcacccgccaacacataattacttccattgtctgtcaccacttgaataacattctcttctccaatctcctcaacaaagctatccataagctcatagatcttttaaccatccttcatgtattcagaaacatccacactcctcacatattgtgttctcaacgaacaacttatcacaaagttaatcacaggtctattctttcta

SEQ ID NO: 249410 - DNA, 382 bp, Glycine max
  unsure (1)..(382): unsure at all n locations
ctcanacccagacggttgtactaaaaacccaattatgctcaattaacaatattttcagtgtactccttcatttctttgtattatttcattnttttaaaaaaatttaaattaatgtgggattgctggaaaatatttcttataatttaaaatttaaagttaaaaatattttttcttttatgagccttgttttagaaaataaaatgtcttttttttcaaaattagttcttttaatcttaaagctttcccctatcttttgtttccatatctctttcctatctcttgggacagttatagtttactgagtcacaatattttcttaacgttataagcctttgctctctaaggaaatantatcatgtaattctgttattactttatgaac

SEQ ID NO: 249411 - DNA, 293 bp, Glycine max
  unsure (1)..(293): unsure at all n locations
gtaaatcacgtttggccactggtaatcgattacatnctctggtaatcaattactagagagtaaattcttggccaaactttttgctacttcaatcggaattccctctctatctaatataccctttctaagactctatagactgtctcgatcatccatcttgaatatctttaattgctttgtcttgaataaagctctgagacgcatgtgatattttggcatcatcaaaacatcggcttgatcctttgtctacacctttatcatttacgaacaacgacctgagtgggtaaacgcac

SEQ ID NO: 249412 - DNA, 146 bp, Glycine max
ttcatatttccatctggccttcacatggatgactattctaatactgtgtttttttttacttatggccacaatatacccttttcattgatatatgaaaaacttgtcgtttacgttgcataatgattttgattagcattttattgatc

SEQ ID NO: 249413 - DNA, 390 bp, Glycine max
  unsure (1)..(390): unsure at all n locations
catgatacatgtcatggctcggtttggtttaaggataaaagggactgcccacattatttccatgacacacatgcaaaacatgatgatttggaaatcttatgcaaaactggtcatgcatgcgcctatgcaaacgctcaagtgtcaaatttttatggtcatgtgatgctagggctcaggattcatttcctctattttaaatcaacccaatgtttccaaaatatgttcttttatcgatttgtgcatttcttcaagtccatttcgggcgtccggggaaatttctacagcatttacnccttaggtgtagacacgtttttttcttcaaaaatcggctatgatcaatgacttttttttttttcaagaaacagtggaaatatctcttttcaaaacatg

SEQ ID NO: 249414 - DNA, 285 bp, Glycine max
  unsure (1)..(285): unsure at all n locations
tctgagagaccatacaagtttcctaacgatttctaattatgtgggccatcaagtctatnatatgctgacaatagccgagaagcccatgaatctcttcgggggcggagtaggtgtctgccatcgccttggcctcggctaacaatcggggaacgtcttgactcccgttcaggtaagagcaaaccgatccatccacatggtgcctctcggcgcaatgagcgatacccttccttacctctcttcgcgaacttggatactatcgcattctagtcggggcgggtaactaat

SEQ ID NO: 249415 - DNA, 342 bp, Glycine max
accttttaagagcatgtgtattagaacaaaaagggagctgggagtgttttctgttgccgatagagtccacctataacaatagttctcattctatcattggcatggctccatatgaagctctgtatcggacaaggtgtatgacactcctgtgtcggctagaacctggagagaacttccacttaggacctgaagtggtacaacaaaccactgagaaggtcaagttgatccaagagaggatgaagatcgctctgagtacgcaaaagagttatcaagataagaggaggacagacatggaattcgaggctggtgatcatgtattcttgagagtcacccctcggacta

SEQ ID NO: 249416 - DNA, 382 bp, Glycine max
gatggcgtctgctctcaccttttctcctttatcttctgatgcatctccatggtggaaaatcaccattgaaggacctcattgaagctcaaagatccagcctccataaaagcttcacaagcaagctctcatcattgttgcccctatcactaacattagatcagtttttacatttatgatacgtttctacactctctctttctcctaaacttgttctctcttgcttctctcccacaaccttctcttcttccacatacactcaaacttgttctagtaaaactacattctcaccgtcgggatttatgaaatagtatcttttacacaaagacatgcgcctcccacagagacagtgaaaatgaagctctgattccttcatctcttctct

SEQ ID NO: 249417 - DNA, 322 bp, Glycine max
  unsure (1)..(322): unsure at all n locations
cgcattgacacttgctcgagtgctgtataactatagcgatttcgctcttcaatgtcaacataatatccgttggttctcattgacttgncatactaacaacaataatttcttcatccttagtcagtcgatcaatgtatggactatcaactactgacttgaccaactcatgattgtgacctccacacattaacttcaccattcatncttccgcctcaaccacctggttcctcaccggcctaaatggacgtccacctcttctactgcccataactgttcttaccaaatctctcttcctaatgctatactgaccactcctttcaca

SEQ ID NO: 249418 - DNA, 411 bp, Glycine max
  unsure (1)..(411): unsure at all n locations
tctagcagcctgagagacctacaagtttcctagcggtttctaattatatgggccattaagtctatcatatcctgacaatagccgagaagcccatgaatttcttcgggggtggagtaggtgtccgccattgccttggccttggctaacaatcggngaagttcttgactcccgttcaaggtaagagcaaaccgatccatccacatggttgcctcttggtgtaaagagtcgatcacccttcctctagcctctttttccgcgtatacttgggcatactcgtccgcgaccctatactcgtgggccgcggctagacttaactcttcttggtacttggcgatgatagctagcatgttggtctccgtctccataaacgctgagacaagctccttttgaacttgacacgcaactaactct

SEQ ID NO: 249419 - DNA, 376 bp, Glycine max
atggatcgagttacatcgctgcttcgtctactgccaaacacatctaggattgttaatgtccttgttacttcccagttcaccttgacaaagatgtcatggaccatgtcgaaaatctaaattgattcaaccccatgttctacgtacaaatgcgcaatacttcaactgtgcatcattcacatacatccatgattttcattggttgcattgctcattgcattctttccttgaaagacaatgaacttaatcattgctataaaaaaaaacacgctttacggcgcccttaccgaacttgtgctatagctacagtaatgggtgaagtataggatgtgctagacgagatgaatgccgacatggaagcctgaaatggcacaatgat

SEQ ID NO: 249420 - DNA, 350 bp, Glycine max
  unsure (1)..(350): unsure at all n locations
catacaacacaagagcacgattgattagagaaatatatttntatgcatcagcttgtttgttagaaagacccaacatatctacctactcgtgtcattntatttaccttgcattttatagtttttggcatacaagtttagtttaaattctgtttgaaattatcacttatacatgttctctcaacaatgcttcgattctgaacttaattttggctaacatttgttctctgtgttcgatactcggattcatncgttctaattctaaataattgacgatctggtgcactttccggtaaacccctattgaaatttccttgagatataaatgaacaaaagagtaactgcaatgggga

SEQ ID NO: 249421 - DNA, 355 bp, Glycine max
gagatgtaagtttatggactaaatcccacacttcatgtctttatattgatttaattctttatgtgtacccaacaacaaatgctcatcatgcaaagcttcatctatgtttcttggttcaatctgagaaacaaaagccatgttattgcataaaatcctcaatctagagcgaggaagtagatacttcctttgatatctcaccaattatattgtccaaggagatgtctctttgagttatccattcccttgggaggtctttaagaggtgtggcagcgattctcttgctttgttccagatctttaacattggcttcatcttcaagtgtagcgcgcttatcctacaaacctgcatcttcatc

SEQ ID NO: 249422 - DNA, 427 bp, Glycine max
  unsure (1)..(427): unsure at all n locations
gagaaagagagaggcgggagaacgaaattgaaggaagaaaaagggagagaagttgaactttgagttgtgtctcacaagactctcattcatcaaaattacaacaagtgttacacatgcttctatttatagactaggtagcttccttgagaagctttcttgagaaaacttccttgagaagcttctttgagaaaacttccttgagaagctagagcttagctacacacacccatctaaaaactaagttaacctccttgagaagcttccttgagaagctagagcttagctacacacacccctctaataactaagttcaccttcttgagaagcttccttgagaagctagagcttagctacacacacccntntaataactaagtcacctccttgagaagagagctagagcttagctacacaccctcatatatct

SEQ ID NO: 249423 - DNA, 458 bp, Glycine max
cccgtaatcaaggaatggatatttttcgccatacttaacaacatctcatagggatgaatgactcgggcatactctaagcttatgcacggaaaatgtaattatgaaattgagatgcccgaagaaacaccatttcctagttaaccatgcattacgtaccatgttcaattattttgtttttaagtgaaacgggtttatgatcccaacatggttggctcctaacacatgaaactaagaatgtagtgtgaagtttcacgctctccccttctttgtttttgttctgtagacgaaaacgcaaggatgagcaaacatgacaacaaatggtatgcaatcttgcagatcaaaaagtttgttgaacgcatatgcatgatgatgccatgactcatgcaaaatgtgacgctggaatatgactaccgacaaatgcacgatatgtccattatgatgttatgaagagatgctta

SEQ ID NO: 249424 - DNA, 392 bp, Glycine max
  unsure (1)..(392): unsure at all n locations
gcattacttgaagagaacaaaaaggtacatgtttatcacattacataatttagagaccatcaggtactcaaactctaaatagactcttataactctttcaaccatggntgtgtagcttgttgcttgctntgaggcatctcaccacaagatatagctgcgcaactctatcattagtttgcatgtactcaatggcattgaaagaccattaacgatctattatgataataactcaccaattcatataaaatacatctattgtctaaccatataaaatacgctcattcgaataagaaatacatatcttatcacttttgtcanatgaccattctgctagatgttctatttcgacctttgattcttgtttgccaactacgaatgatatgtgattctga

SEQ ID NO: 249425 - DNA, 149 bp, Glycine max
  unsure (1)..(149): unsure at all n locations
gagccccccccccgcctatctcagcccccccancccgcggcccccgacccggagggtgttgccacaaccgccaccacaggagacgccaacggcgcaacaaaaagccagaacacgggaccaaaaaggcgggcaaacccaacacacgagaa

SEQ ID NO: 249426 - DNA, 277 bp, Glycine max
  unsure (1)..(277): unsure at all n locations
gccacaagccatataatgaatccatcgcacttttatattctcttcacatatacgcccacactgaccttcaagccaaaaacacaaaacaagcaaacacctgcttgatgtacancattctcaacattgattggttaatggaaattacactccacgaattatggatgcgttcaagctaaagctcagcttgcatattntaacattacatctctcgactcttgacatgatcttggacaactaacggacctcgttactacttacagaataccaggatatttca

SEQ ID NO: 249427 - DNA, 402 bp, Glycine max
ctgtctttgaaatgctacaaattacacaagctccaacggttaaagaaggctgggcagccgttttaccgacgaagccttctgtagttctctctacaagcttcatttagacgcttcctccagaagcttcattaagagacttctagcacactacaaacatcttctccaagatcccaacggtcagatcatggaaaggcgtcttttgaagttgcagaccaaatttagagaacatccaacggttaaacgaaggtgggcagcattcttaccgaggaagcttcatgtagctttctctagaagctccattaagaggcttcctccacaagcttcctcgtggttctttgacaagctctctaagacgcttctttgagaagctagatccttatctaatcacacctctctataact

SEQ ID NO: 249428 - DNA, 301 bp, Glycine max
ggcttagctaacatgatgcatattaagtacagaggagcatgcgctaagctgataaggactcacttagcgctcacattgtcgcaaggaattcagcttaccttccatgactggcgctcagcttcatggaccctcagctcggtcgtaccgaatttacatcggtgacaatacgtcatgcttagccaacgataagctatcacttaccgcataggctaaagcttagctgaattcacatcgaattgaagttggcttagctcatccttggccagcttatcagaccaaatcaccctcacatgcctgggtt

SEQ ID NO: 249429 - DNA, 337 bp, Glycine max
  unsure (1)..(337): unsure at all n locations
acgcacttctctctatttcgaatttgctaggaaaaatcgtttccgtgaagaaaattcaagccgaggcgcttccgacacgtttccgtgaggaatctcgcgaaagttttgaccgttcttcaacgctcttcattccgccttcatcattcttcgatcttcaatgggtaagtacctcgaaccaagcttttcgattcatctcatatcacccgggtggtccancttgcgtttcgtgtacttttattctcgcttcattcactttttataccccttttcgacgtgcctaagccatcttattaagccacttctccgttaacctaaaataaaataaattccaccgatc

SEQ ID NO: 249430 - DNA, 241 bp, Glycine max
  unsure (1)..(241): unsure at all n locations
actcttgcaaaggtgtagatctctgattcatggccagctgagttactaggttgaccaaggcatcaagccttcncttcagttttttattctcactagatgaagatgaatccgcggccacctcatggactcctctaacaataatagcatcatttcttgcactgaatcgttgggagttggacagcatcttctcaatccaattcctacgctcaccanggatcatatcaccatgagctctactact

SEQ ID NO: 249431 - DNA, 296 bp, Glycine max
ccaagaagaattagatgtagccatagcccacgagcacaacgtggcggaccagtatgcccgagtgtacgcggaaaaggcggctagacgaagggcaattgactcgttccatcaagaggcaacaatgtggatggatcgacttgctcttactttgaacgggagtcaagaactctctccattgctggccaaggccacagcaatggcggacacctactccgcccccgaggagatccacagatttcttagctcttgtcagcatatgatagacttaatggcccatataattaggaaccactacg

SEQ ID NO: 249432 - DNA, 320 bp, Glycine max
  unsure (1)..(320): unsure at all n locations
ctgtgcccacttcatcattcgcagagaaaaggccaaaggaacaggacaagagcaccaaagcactgagaaccacattgggatgacgacaccacacaatcaaattgaaacccatgttggtgtgatctggaggcaattctcacatcatggagacgccacanagtgagtgacgcaaaagggtagtgctagcggacgaataactaaacaataacgagaaatctttatcagtggggaatgtggtaatcatgagtcacgggctattatgtacttaaaaataatcacacaactgtcgacacaaaatntatgataccacgatgaattga

SEQ ID NO: 249433 - DNA, 438 bp, Glycine max
  unsure (1)..(438): unsure at all n locations
tctagtcaaggtctgagagaccatacaagttttctaccgatttctaattatgtgggccattaagtctacaatatgctgacaatagccgagaagcccatgaatttcttcaggggcggagtaagtgtccgccatcgccttggccttggctaacaagcggngaagttcttgactcccgttcaaggtaagagcaaaccgatccatccacatggttgcctcttggtgtaaagagtcgatcacccttcttctangcctcttttccgcgtatacttgggcatactcgtccgcgatcctatgctcgtgggccgtggctagacctaactcttcttggtacttggcgatgatagctaccatgttggtctcngtctcgcataaatgctgagacaagctccttttggaccttgaacacgcaactaactnctctttcacaaccatgctatg

SEQ ID NO: 249434 - DNA, 370 bp, Glycine max
  unsure (1)..(370): unsure at all n locations
cagcgcacattctgaattcaaattttagtacctgttgtaaatcagttntggccactggtaattgattaccagagagtaaatctcttgaaaaagactttttaacttaaatttcttggccaaaacttttgctacttcaataggaattcccttcctattctaatatactctttctaagactctagaaactgtcttgatcatccatcttgaatatctttgtcttgaataaagctttgagaaacatgtaaccctttggcaagctttccctttggcatcatcaaaacattcagcttgatcctttgtctacatgaagttgttcaacatctcctttagatggatacataaattgtgaccggtatatctaaatgatatt

SEQ ID NO: 249435 - DNA, 392 bp, Glycine max
cagcgaccatctgtaccattagcccttgaaggagccagagtgagcaatcaagaaatactctgctttttgctggttgcgcaaaacacgtgactactaatgctcgggtcaatctaataatgtcggacaagggtcttggtaaagcaactaccaaatgaattggctagattggagaatgagttgaggagcttcaccccaaataccatgttacttaaggagagagaacttcagattcaacaggtgagggcagactcaataaattgggttcttctgtcttaatttatgacaaatgctcttaaatagcactctcggttaaagaagagatcatttctttcattcattgccaacagccacttaacaagcacagataaaatattcaccacactgggaatata

SEQ ID NO: 249436 - DNA, 340 bp, Glycine max
  unsure (1)..(340): unsure at all n locations
ctagatatgactcttgcttccaaaacatgatcaaccaattgggtgacacccagtccactgtcatgacacaatccaaaagatcggtctatatttcttaatagcactctgatgtgaagactaatctaagctctaattgacggctggaacagtccaatcaacaattgtatttaaaaactcanaagtatgtatatccgatggtctatccacatttatatcggcagtatttggatatggataactaacctccaccaaattcaaatattcgaccctgatgctcacatntcttcccgcaacatagttgaactttatccaagcactgctacctgaattataatacttc

SEQ ID NO: 249437 - DNA, 249 bp, Glycine max
  unsure (1)..(249): unsure at all n locations
tactaacttgcctcgagcgtgcctgtatgtagatgacttgctcgtgacacgaaataatgacaccgaaactgccacctctaaacgagagatgatgagagaattccaaatgactgatttggacctcattntttatcttctcggaattgaattcaagagaactgatgacggagcgatcatgcactcacggaggtatgccagagatgtactgaacaacttcacaacggttgactgctattctgcacacacacc

SEQ ID NO: 249438 - DNA, 205 bp, Glycine max
aactaccttccgcccggagtacgaccgtcaccgctttatgagcgttgtacaccaccagcgtttcgaagccatcaagggatggtcgtttctccgagagcgacccgttcagctcatggaggacgactatactcgatttccacgacgaaatacggcctcggcggtgggcaccactggctactctcatcggccagcttgatccagaaat

SEQ ID NO: 249439 - DNA, 326 bp, Glycine max
  unsure (1)..(326): unsure at all n locations
acactctcacaattcctaaagtgttacatcaaaggttatttgaaaatatgggaagaacggttacctcatgttgagtctgcctataatagggtaaccaactctaccacttctttttctcctttcgaggttgtttatggctntaatcctttatctcctattgacttaattcccttacctaatgattcttctattttgagtaaggatgggctttctagacgcacttcttgtaacgatcttcatgaaagagtgagaaatacaattgagaagaagatggagcaatatgcacgttaagcaaacaaagcgagaaagtccatggtatttgaact

SEQ ID NO: 249440 - DNA, 378 bp, Glycine max
  unsure (1)..(378): unsure at all n locations
cttctcgctnctcangtcctaccgagcagatacggctgtattatttcattncancagncatacactcttgtctgcagatgccaccgcaactttgtaagcatgtgaacttgattgcactccttgtggtgaccggacactctacaagattgaacatgatgatcacaaaattcaacttcctaaacaaattgatgaaaacccaccttacatataatatgttatatatactcacatctgtctaccattcacatacaataaatgatcatgagttctatatgtatgataacataactatcacctactccacattaggaaaatatacttacaggatcgtcgcctcgccacttcagcatcgntggcaactcacaaccgactctgaat

SEQ ID NO: 249441 - DNA, 226 bp, Glycine max
  unsure (1)..(226): unsure at all n locations
gagaagctagagcttagctacacacacccctctaataactaagctcaccttcctgagaaagctntttgagaagatctcctaagaagctcccactccactacccacaccccctataataggtaagcccacccccatgccacaatacatgaaaataaaaaaaagttcctacgacaaagactactcaaaacgccctgaaatacaaggctaacaccctatactactagaa

SEQ ID NO: 249442 - DNA, 246 bp, Glycine max
gtccgactgattcttttgactactttattcaaagatattctgattatcttattattatctcgcgctttctcggtttaactgagattacagtgtgaacgatccggcggattttatttcaccagtgattaaactacactacaactcacatgatcggccgaaatctccttcataatctattacgtgagaaaacgacttcaataaaccgctaaagcacgttaccatggggtctgaacacacacctaaatg

SEQ ID NO: 249443 - DNA, 244 bp, Glycine max
  unsure (1)..(244): unsure at all n locations
ctcacctatagagtcattctttcttacctttaacatatctagctctctatccaactgtttttgcttaacagatggaaatgattctgagggggcttcttctacacccatcagcttgaaaattatgctancgtggttttccatctttggagctcttgctgacaaagaacgatcaaaaatgttgctgcacaagcaaacccttctggtgaatgtgattcaaaggtgttttgatgataacaatgatgac

SEQ ID NO: 249444 - DNA, 319 bp, Glycine max
aaagagcccgggtagtcgaagagaagttcaagtccatagccatcaaagtttgaaaagagtatgatgaactaagggacgtcaatatggccaccgctgaagccttggaatgagaaaccaagaagggccgaaaggaagaacaccaccacaacaagttttgaggggctttatagggcagcaatagtgagctcaagctccgaagaggtgaaaggaatcatcacgggtcaaaggcatgatctggaaggaccagctaaaggcttgccttatgtcgaaaagaaatttgtcccaacagttaaagcgagactgaagggaatatgtgggc

SEQ ID NO: 249445 - DNA, 450 bp, Glycine max
  unsure (1)..(450): unsure at all n locations
gatggcgcctcctctcacctcttctactttgtcttccgctgcatctccatggtggaaaaccaccattaaaggacctcattgaagctcaaagatccagcctncatagaagctccacaagcaagctctcatcaatgcacacacttgcatttatttgagaaggaattctcatgccatctatttacacttgagaggcaattccacatcatatattcattttgggaagcattcaaacgtgtgtacatttataaagcacttgaccacctattcaacatatacacattttattcgaagggtcctttctttagctacctcatctatacatatatgtacatggtaaataacatctttacgacactaggcaaacatcatggtgcagcccacaaatcagccgtcgcctacaggaaatcctatacaatgcctcactttatgcttcttgcttgaataaacctt

SEQ ID NO: 249446 - DNA, 342 bp, Glycine max
  unsure (1)..(342): unsure at all n locations
gaaaccgctttgttcttttttatacaaacctcttcgcctccgttataattattttatttcatgcttttcaaaacttatattgcctttccatctctccttccgttcgcgacgccaaagttgtcaccgaccccaacaccgcccgctccaagggttacggcttcgttaagctttctgatgaaaatgaacggaaccgcgccatgactgaaatgaacggngtttattgctccaccaggcccatgcgtattagtgctgctacgcccaagaaaaccaacggtgcttatggtgcacccgccgcgcctgtgccaaacctgtgattcggttcggcctatacttgctgtgttc

SEQ ID NO: 249447 - DNA, 336 bp, Glycine max
  unsure (1)..(336): unsure at all n locations
agctcacctccttaagaagagaagctagagcttagctacacacccntataatagctaagctcacccccatgacaaaatacatgacaatacaaaaaaaaaagtccctactacaaagactactcaaaatgccctgaaatacaaggataaaaccctatactactagaatggccaaaatacaaggcccaaaagacggaaaaaacctattctaatatttacaaagaagagtggatccaaccttgacccatgggctacaaaatctaccctaaggttcatgagaaccctagggcctactttagtagctctagcccacgcctctcggagtcttctatccaatac

SEQ ID NO: 249448 - DNA, 356 bp, Glycine max
  unsure (1)..(356): unsure at all n locations
ttactgattcgactgatcatagtagagagctagaaatagttcagagaagactaacagaaaaattggcagataaaaaatttctcctcgttttggatgacgtttggaacgaaagcacgcctaaatgggatgccgtgcacaatgctcttgtttgtggagctcaaggaagtaggatccttgtcacaacaagcagtgaagaagttgcttctaccatgcggtcaaaagaacacaggctggggcaattacaagaagattattgctggcaattgtttgcaaaacatgcattcagagatgaaaatgtntcacgagatccagtatgcccctggattggtatgaagaatgttaaaaaatgtaaagga

SEQ ID NO: 249449 - DNA, 281 bp, Glycine max
ttatctcttctattcagcttcacgcaaaatgatatattctcttgcactaatattcccaatttctaatattgcaatttcattcgcagagcaaatatggcacatgctcttatcatgagtttcgaaaagaatatcacaactaccaaaagaagcttctacatcgcgtgaaaaccggtatctacgacgggccccacaccgtctttgttccagatgtccttgtatgtcgacaacaacaacatcgtgcatcctacgacccgtctttgtaatgcaagaatacaacgtca

SEQ ID NO: 249450 - DNA, 378 bp, Glycine max
tccatcatagccttgctatattgacaccatatgcacacatacaatgtgcaaatgctttctatatgtagcactatgccgcgctaccgacctagtatcaacaattctttttagttgtcactcgccaatatgcatcacaaatcgtattaacatatatatgcccaacctaccacaaaaggctagttaaattattgagaactagctgtctagtcaatcgaacgctccatcaagtggaaaacgaaaaagaacctctatttgaccaggtctgtctccaagagtggatcataaaatagcaatttatgtacagtaaattactatgacatcccattataacgtggctgacaagccttgcttatcatacccacctaattaagcctccac

SEQ ID NO: 249451 - DNA, 339 bp, Glycine max
  unsure (1)..(339): unsure at all n locations
atatgtgtatcacgcgctcctctagcttcaaaacactcaacacttgttcttgcgctgaaggcatcctcctatatatgaaaatagtttgcttgagatgctcggcgagcagcaggtgtacccatctccttgggagcaatgtacaatctatgcatatctctggtgcatctggctcacatcacattattattggatagcatcgtgtataactgcatatggcctctcatatgtgctcagcatctgataaccttttaagagcgcgctcgtctttctcctatgcttaggtgagcccttatcctatactcttntcgactctccctgctctccttctaatagtatata

SEQ ID NO: 249452 - DNA, 299 bp, Glycine max
  unsure (1)..(299): unsure at all n locations
cgcgctccacttgctcactagcttctctcacgcttatagcaaggctcggctaccaaaattcatcgcgttctctacgattcaaacgcttatattctaacagagcaaaaatcntacacttatccccatggcctctttcatgcgcttagctcggccactacctcttcactctcatttgcttttgaccttgttacatcaccacactctattcttcgcttttcttttcttttttttaacatacaacttcattgttgngtgtgctgaagctttcgctatttctttgcattccaattagttccact

SEQ ID NO: 249453 - DNA, 348 bp, Glycine max
  unsure (1)..(348): unsure at all n locations
ctgcagcttagttatttattcttaagttgaccttgacatcatctaaggtccaatattgctaaagttggactaggtgatcaatgtctaacacgagagagagaagaaagagagtggaggagagaatattcaaaaataaaaaataatttaattcttaaaatatattaattgtgtgaatggattgaatatctatacataaaaactatatatggatgaacttgaatagatcttattagatgaatcatggatgaattgaattttttaaataaactttggtaaatctaaataaattaatagattattttaatccatttattcaattngattattataatgaaataatcttagtct

SEQ ID NO: 249454 - DNA, 340 bp, Glycine max
  unsure (1)..(340): unsure at all n locations
cgctgctgttaatgctctcggtaacatcacaaccaatcaagacagggttgttactttcattgtggagtcccatgctgtccccatcattgttcaggttctcggtgattcccctatgagggttcgtgtctctgttgccaatttggtctctgttatggccgagcaacatgaacttgctcgcgaggagttcgtccacggccaatgtcgctaggccccttgtgtccttgttgtccatggatatgggtactgtcctcactgaccccgtggccgaccgngccaccagcattcactcgcttgttctcaatttatccaatgttgtggaggcgaattcagatgggagtag

SEQ ID NO: 249455 - DNA, 488 bp, Glycine max
  unsure (1)..(488): unsure at all n locations
agctatattatgcgctctccgctcggcggggatttcttcttcggcgaaggcgagatagttgctggcagtgatattattgaccagccatccgaaaccttctaccgagatatcttgggccacgtgggcctcgttcaaaaccttcactagcagagcccgatgaggctcggagctcatgagtaactccaacagcgagaccctggccagggttttgttgtgttgttcgataaccttgaattcgctctgctgaattatatggaggaactcgctggcttcctctagtgatacctcctttctaccatcctttttctccggaagaccttctgccggaatatctttattcgaagcgtgnggtgcttccgcatcttgttcctccaccactttccctcttnccttgacgttcgcgggttggactggtaggtccggaggcgcgaacacacgaccgctancggtcacaccactcagtcccgtgatattcgtacattagctga

SEQ ID NO: 249456 - DNA, 409 bp, Glycine max
  unsure (1)..(409): unsure at all n locations
gtatttattacctatacttaatagaaaatacttataacattacaaaataaccataaatttggagagtttgatacaatttatacaagttttatacacaaaagttagttgttttcaccgactaacaatggactgtggcttgtaacgtggccaatggttagaagggccatgaaatttgaaacaaggatcttcaatgtagtgttgcatcaagttntttcacataattcttttcctttntcaatttctggattatattttctcttttttctttntttttttcatttgttcccattttcttgttgctttaacctaaagcattggctaagtaaaacttgatgcaatcatttgttgatttgagtgtaagggaatactaaacatagactctatttaacaaaatctcaacctcaatttg

SEQ ID NO: 249457 - DNA, 450 bp, Glycine max
actggactacttcacatggacttgatggtgcctatgcaagttgaaagccttggaggaaagaggtatgcctatgttgttgtggatgatttctccagatttacctgcgtcaactgtatcagagagaaatcagacacctttgaagtattcaaagagttgagtctaagacttcaaagagaaaaagactgtgtcatcaagagaatcacgagtgatcatggcagagagtttgaaaacagcaagtttactgaattctgcacatctgaaggcatcactcatgagttctctgcagccattacaccacaacaaaatggcatagttgaaaggaaaaacaggactctgcaagaggctgctatggtcatgcttcatgccaaagaacttccctataatctctgggctgaagccatgaacacagcatgctacattcacaacagagtcacactgagaagagggact

SEQ ID NO: 249458 - DNA, 324 bp, Glycine max
  unsure (1)..(324): unsure at all n locations
aagagacacacacctcggctgctccatccatcgtctcgaaattcaacggatgctatcattacaccttcttttgaaaacacgcancaatattaaatgcgtttgaaacaactacaacacttgatagaatgatgcttcaagtatctcattacttagtctcgacaccacgtatgtccacaacacacacttaaggctcttatagtctgctttacagcttgacgggcttangtcctactcggactcggccagtcctctaacttggcctccgtagttcatcacttggactcgcaacggtattgtatctagcattcaaccgagtccataact

SEQ ID NO: 249459 - DNA, 279 bp, Glycine max
cgggctcggcgggcacgctcaacacagtattttcgacacctactgcacgttgatctgatcaatgctgttatgggaatgttgcgaccatccttcaaaaccttattgatacattctgagaggttgcgtgccatgtggccatatcgacgtccttctctatcctaagccatcccccatttttcttctgaaatgagatcaatccatgttgctatggctagactcagttcaccgaaattttctagattttgatcaaaaatgtgcttgcaaggagtgtacgctgca

SEQ ID NO: 249460 - DNA, 367 bp, Glycine max
  unsure (1)..(367): unsure at all n locations
acacctattctgctattgcctaacgngatagaatcaccctataagcccatgtcaatgaggcttccatcatgaaggaggttacaaaanttttccctgtccctatgaccttgattgagttgctgaatactctcttattgatggataataagtcacaaataataacccacactctcacgaattcttccgctattctaaaaagctcatgccataagatttgacccctagcacagtgaggggagccatatacaaccatgagaaaccctattagtgatacaccatctttacttcatgggacatatgcttgaggcctaccacttatttccatattatatcataaacatattcctcaaaaacactgctttcacaa

SEQ ID NO: 249461 - DNA, 108 bp, Glycine max
ggggggggttgaattaacatattccaaactatttcctctaattaaaaatctattctactctttattccactatcaacttccttcatgaccatcttcttatatattaat

SEQ ID NO: 249462 - DNA, 324 bp, Glycine max
  unsure (1)..(324): unsure at all n locations
gcccgtgctgtgactgccattccaatacagccaagtttncaaccaacccaacaatgtcattactcagccaataacaaaccttcttcttacccaccgcccagttattcacaaaggccatccctaaaactaaccacaaagcctacctaccacacttccaatgacaaacaccacctttagcataaaccacaacaccaaccaagaaatgaattctgcagcgagaaagccttagaaatcaccccaattcagtggtctatgctgcattgctccatatctacttgtaattcaatggtagcataaccctaaccaacgaaacccatggggcat

SEQ ID NO: 249463 - DNA, 267 bp, Glycine max
tccttccttccaaatgctgctggcccaagcagaccatacatttctccaccaatccaacaacagcaacaaccccagaaacaaccaacagttgaggcccctccacaacctctcctcgaagaacttgtgaggcaaatgactatgcagaacatgcagtttcagcaagagaccagagcctccattcagagcttaaccaatcagatgggacaatcggctacccaattgaatcaacaacagtgccagaaatctgacaagctggcttctcaagct

SEQ ID NO: 249464 - DNA, 125 bp, Glycine max
cgggacatcaaatacgagtatgcgtaccacttggacgggattaaaaatcaaatatgatactttcaacacacaagttttgccactaatcgtgactatgaaaattgtaggattaaaaatcttatcat

SEQ ID NO: 249465 - DNA, 304 bp, Glycine max
  unsure (1)..(304): unsure at all n locations
acttcctagtcaaaaccaacatccaatttcatgacactagtgatcaaatataatcaaacattctgaatagaatgaaatcaccatanatgagtagaaaagactcacatatatatctatatacacacacatatatacatacatatatatcaaaagacatacataacgatacaaaaattacatccaatccctcgaataaactaactggctattgcgtagagcaccacgtccacaaaagacatcctgaacgaagagattcaccaccacttccttccttctatctctccctcagtgtgcgcttcttcct

SEQ ID NO: 249466 - DNA, 325 bp, Glycine max
cccaagtgggcctggttgctatttgcacctccattcttactaagtacacccacctgcctttcttttggtgattctttttcgtaaagttacagaaacttacaaatcttgaacgatacttgtcttctttccgtaatgttatggaaccttgcggattacataatcatcccctttttactcaccgaatgttacggaacctcactaattgtgcaacgactgcttcatttgatttccggtgtgtcaccgaaccttaccgatcgtgcatcaatattttcttttgtttccggatgttccgaatttcaacactgccaatgatgggtgcaagcat

SEQ ID NO: 249467 - DNA, 370 bp, Glycine max
ccacaacactgcaatcgattacagcccttctgaaaataattggaacattgcacattcaatttgacaactttctcaaaacaactttgctactggtaactcattacaacaatctggtaatccattaccagagagtaaaaactctttggtaaaaggttcctgtacaaactcatgtgctattcaacagcctgaaaaacttcttaatacctatcctgatcgagtcttctctctcattctgaatctcgatctggattcttgagatctcgaaccttgcatctcgattcctggctctagacttccttcttgagtcctcaatccttacgactcttatctcgaactctcgaatcgtccctgctgatctctgatctactcg

SEQ ID NO: 249468 - DNA, 301 bp, Glycine max
  unsure (1)..(301): unsure at all n locations
cactatgactcgncggcagcctaccctcattacaagcctagaaaatccttcggattcatttctgtgtgtccattactgtatgacacgagatctaacgcataggttggaactcgtgctggtcgtttatgatggaacaagccaaaaaagagcttgagcgacacaatgactgtgaggttctggctgatgatccttccctgatttctcatgcttactagcttatttcagntgtgactctaatactcgtgctcttatctttgagaaactgcatgcttgtgagaagtaattgattcaagcattcatg

SEQ ID NO: 249469 - DNA, 255 bp, Glycine max
  unsure (1)..(255): unsure at all n locations
ttgctgaacaaaatgtcacatagattgacaatctgtatgatccatacggattgctgatccgaatggtccataccgatatattttcgtatgaaccatacgtatcaccaatctgtatagatcacacagattgccaatccctatgactttnttacaatctctaatttattttttaatctgctctgcaatcgaattcctttgcatattagaaataattctagcacatttataactattgatctggcgatattattttat

SEQ ID NO: 249470 - DNA, 341 bp, Glycine max
aagttcttcacaacctttacagaacgtgctacgagtctgcatgccattacacttgaattcactggctggcgagactcctctggggcttcttcgctatcatcacaatcttggtcggcatcttcatctaccttattctctgaactaatcagcacatggtgtcttaagcctttctcaagcgcattgtttacttctggacagatgaaacagtgtcattttctattgcttgtattgacgctcatcagaatgataaaactcatatgacaagaaaatacatgcaactatgaccaagctacgcgataataacatcaaacacgattttatcaatatcgattggattgatc

SEQ ID NO: 249471 - DNA, 318 bp, Glycine max
gctttttgatatatccgtgagtgaaaatatggttgcagtggggtgggtggtctggaatgtttaacttttaaaagtgaagtgtgaaagacaagaattctagtgaataaactgagccgttgtttgctaaagtttgaatatataactattaaatgctattatgccagataacaatgactaactgtgtctgtattgtgtcactgaaaatattacagaaataaataagctttcgagttctgaaatgtctgcttggacattgcttcagctaatacttctctcttgatagtccttatattcataccttgtgatttattgctttat

SEQ ID NO: 249472 - DNA, 410 bp, Glycine max
  unsure (1)..(410): unsure at all n locations
aaagcatgactcacaaatgacagcgttggcataactgtgtgcaacatctacagccacagccacctcacctacatgaacaattcacagccgtacaatctatcaaatacaacaaccagttcaccaaacataaacaacaactgattggaattaaagtatcaaaatcaggttatcaattgttcgacacatccaaaccctatgaacaacaacaacaacacgaagccacctccattcatacatcatataatagctaacaattccaagcgtaagcagaaacacaaattcacgacaaatagagtgcggcgacaacattattaaccctccaattcatcatcgacaacacacattgcattccaatgaaaggagaaggaattagatgatatacctaacaatgttnctatgctgcatctctt

SEQ ID NO: 249473 - DNA, 383 bp, Glycine max
gtcccagtacattggatttggtacgaacatgccctcctgatttctagctgggaaattggcgagtggaggaacgccctggcatttacgcaacgagcataatgtaaacctttacggctttaaaagctctatagttgggcctaggctttacagctcttccttttgctaacgctttgcgtctcttgcttctgaatctataatacaaggatctttcttcatctgttcctacgtctctacccattctcattattttgcatgttcacttcttcttctgaaacggcagatccgatgacgagtctcctgaaggtactaatacctgggacctgctatcgactcgcagcagaatgaatacacggaagataatgaaccatgatgtgcgacttccc

SEQ ID NO: 249474 - DNA, 306 bp, Glycine max
  unsure (1)..(306): unsure at all n locations
acacaatgcgaccgaagtcaatctttcattacacttaatctcaataaatgttcagtattctgtcctttcctattaccatgtcgacagccaactggaataaaagaacagccaatgtccgaccagttgatacctactggaatacaagataagctacatcgcccggaataatcctgatatntctttatctcatcatcacccctttttatacccatttcatacaagatatttcgctacgctgttacaacagaatcttgaaattgcataatcccccacgtctcaacgcacacgtggaaaaagctctaagcg

SEQ ID NO: 249475 - DNA, 133 bp, Glycine max
  unsure (1)..(133): unsure at all n locations
ccccccccggcctgtgtctgacccccccncnccccaagccgccccgggggggtttttttcgcaccgccccaacggcggagcgaaggcgcataaaacaccctgggccacgttatgactactactcgagacccaa

SEQ ID NO: 249476 - DNA, 236 bp, Glycine max
  unsure (1)..(236): unsure at all n locations
ctaagctcgaccgtcgagtatcagagtcacctgtgttcatttttattctcacccctacctctaccgcacatctccgaagacnctttaacctgcctaccgcttcacgacaataacattatcacctacctgtcatatcggtgcaaagcgaatatttcgatgatgagctgagttcctgtacttgtcaacggaatgactgcttccgagacatgtatgggaatcttgggaaaattgaggca

SEQ ID NO: 249477 - DNA, 308 bp, Glycine max
atgctcctctgccgaacaccacacacacctttgcccttgtatgctgcaacttggagcaatcgaacagcccgaagcttatgctgcaaacatctacaatagacctctgcaacctcaccaccaaaatcacccacaccagaacaattatgacctcttccgcaataggtacaatcgcgggtggacgaatcatcccaacctttgatggtcgagtccttcacaacagcaaccacaacaacaacaaccttatttttagaatgctcgcgcgccaagcacaccatatgttccttcaccaatcccacaacaacaacaac

SEQ ID NO: 249478 - DNA, 294 bp, Glycine max
  unsure (1)..(294): unsure at all n locations
tcctcaatccaacagttggagctttctgactacagctttcaatgacaacctcctctcagctcggacaaactgcagaacctcacagatcttgtgctcaataacaacagttttgtcggacctatacatcctgacaatggcaacattagcagcttgganagctcttcctatttggtcactcctttacacgtaaaatttcgctggagatcggaacgctgnccagattgagcctcatctacctctatgacaaccagatctntggacctataccaacggacgtaacaaactgcccaagcc

SEQ ID NO: 249479 - DNA, 484 bp, Glycine max
  unsure (1)..(484): unsure at all n locations
gcttcgatgtctcttgctgctatgcttttgttatctaccactggcttccttccaccgtacctacatacatgcataaacggacccttcgtaagttttcatttcccttcccgtcttctgtgtttttgttacatctaaatatgcgatttttaacaccacatttcttcattctcccaaccgtcttttgcgttttttctttctgttttttttttccatttcgcttcctgtgttctttgtttggcagagaaggtggacgaacacactaaagctgcgattttgatgagtacggcggcgttttctttgttgctccaacgttaatgcccttcatttaccctccccgtcttctgcgttntctagtattccgatctgttgcggtttcttatgcttaaagctttcttgcatgcttttgcgttcgcagagaagctcgaacaacacactacagcttcaatttttttattttataagtaccggtgcatttatattgatg

SEQ ID NO: 249480 - DNA, 274 bp, Glycine max
  unsure (1)..(274): unsure at all n locations
attctatgtaaggactataaatgttaactaagaacatataaaaaataacacttacgttgagagattaaaaataaaatcttaaattaaagaactgaaatcattttttatctggaaaaaaatcgtgtgggggaaaatctaattttcccggtcaaaaaaggcaaaaaccataatcccaccacattcttttcccttatttctcttaaatatttntatggctccggagtcaaaagtctctggagcaactacgaagaaaaaaccagtgacatggaaacgt

SEQ ID NO: 249481 - DNA, 231 bp, Glycine max
tcctgcttgcatccactcacctgcccactgtatctcatgctcaaaattatgatgcggcctgtataatcgataaccgtgatcgaagccactctaaaagactatttcgacatctttgcttgctgcttctcaacattggatacacaattttcctttttctctctgcggctttgggatgatccctacgaatgtagcacattatggataaataccatctgctaaatacgacctcat

SEQ ID NO: 249482 - DNA, 332 bp, Glycine max
  unsure (1)..(332): unsure at all n locations
tcttccttgccgcgatgcttctctctatatcttcctgagtgggcttataacctaaaccatacttcccacgatttcctttggcattcatcacgctcgttatactgccgctgtcttcgtctaaacccatctccggctcgtaaccgctccccaacataactcacgcgctcattactgctgcattggacaggcaacgcttgccacacaaggagtccacggaggaaatgcttaccacctcacaagactggacagcggtttntaatgactcctctgccgcttccacataacgcatacaggatgggcagcctcacaagatgtcttcctccctgatacat

SEQ ID NO: 249483 - DNA, 371 bp, Glycine max
acaaagacactgacaaaaacttatcttcctctttttggacaaagtatggcaagctggggcaagtaaattctctctccatcagaccttggatgcaattgtgatcgtatccccatatcagctagatcttgacgggtattcaagccatccttcgtcttgccttgaatgttaaggagcgtcccaatcacactgtcacaaacatttttctccacatgcataacatcaatagaatgtgtaacgtctagatcagaccagtacggaagatcaaagaaaatggacctcttctctcatatgccactattacctttatcccttttttggatctttccaaatacattatccaggtgttgaacccgctgatatactttgtcacc

SEQ ID NO: 249484 - DNA, 342 bp, Glycine max
ctgcctctaaacatctctattacattcaatgatgaaatctgcgcattttcacgtgaaaaagaggctaagttttgaattgcaaaaagtagcagttgggctaagcgcatatccaccgctaagcgcagcttcaacgcgcttagtccaaaggagaatttggcagagcttcagcatcaaggccatgcgctaagcgtgagatcaatgcgctaagcacagcaagcgccttcagccagtgtaagcgcgagactggcgctaagcccaatttcacttactcgcgctaagcgcgaaggtggtgctaactgcaacatcgcgaattttgagcctatctaaagcctgtcttgtgta

SEQ ID NO: 249485 - DNA, 387 bp, Glycine max
  unsure (1)..(387): unsure at all n locations
ctactatcatngctattcatctctgtctcatcattgcaggtgccacttgagctgtcacgtctctccatcttttgggcatatcctttgaaagattcgtgcccctttttcacatgttctgtagttgcatcctatccacagccatatcacaattgtactgatactgtctaacgaaggcaaccattacgtccttccaagaatggactcgggaaggttccaagttagtgtactacgtaacaactacctccagtaagactctcttggaagacatgtatcagcagttcctcatctcttgcgtatgcctccatcttctgacaatacatccttagatggttcttggcgcaagtagccccctcgtacctatcacagtccgacaccttgaactttgga

SEQ ID NO: 249486 - DNA, 263 bp, Glycine max
gacaaatatgatgaccatggtctcctacatgccacatttctcgcatccaaaactcttatagctactgagacacaactcaacactcgcacatatatatttaccctcgccatatgcagaaaattcaacaaaaatgtatcatattacactgcacaaagaatgcggatacatatatgtcacaacctgctactctaggataaagatttgaagacgtttatctgacctgatccaattattcatacttcatagcaccaactccttcttta

SEQ ID NO: 249487 - DNA, 362 bp, Glycine max
  unsure (1)..(362): unsure at all n locations
cttggagganagaggtatcgctatgttgctgtggatgatctctccagacctacctgggtccactttatcagagagaaatcagacacctttgaagcattcaaggagttgagtctacgacttcaaagagaaaaagactgtgtcatcaagagaatcaggagtgaccatggcagagaatttgaaaacagcacgtctactgaatactgcacatctgaaggcctcactcatgagttctctgcagccattacaccacaacaaaatggcatagttgacaggaaaaaaacgactctgcaagaagctgctacggtcatgcctcatgccaaagaacttccctattatctctgggctgaagccatgaatacagc

SEQ ID NO: 249488 - DNA, 312 bp, Glycine max
gttactaatgtttctccttatggtacagctgacatcacaagcaactccacaaacaacagctctaaggtcaatggacaccgacttaagccattcctcacaaacccttctttagtggacgttgtggtggaagagactcccttactccaccctactcttcctccaccatgacttagggagtttttctctttctatctccttctttactcttatcacatctgtcacattctatttgatggcttaatcgctcttaatcctttaattgcgctacattgaggacaatgtgttgtttaagtatacgggaggggagcgtcc

SEQ ID NO: 249489 - DNA, 279 bp, Glycine max
aagatgaaaaccatcttgctggaaagtatttgaatgaatctcaaagactctttttattaccccattagaccagccatatttgttttgttgattttttcatttaaaagggtatgacccacaggtggctaggacctaccagcactaaaaggccggatttccgcttttttggtcgccgagagaaatcacgtctgttgacaacattaaacaacattgtgacccttcctagagctgacctccaaggatggtacgccatgagacattgtctttatgtgaaatgta

SEQ ID NO: 249490 - DNA, 94 bp, Glycine max
tgtgacatggacccttgctgctatgttaagaaatatactaatagctatgttatccttgccgtgtactgcgacgacatgtcgatcgcaggaccta

SEQ ID NO: 249491 - DNA, 326 bp, Glycine max
gccctgctcactctttatacccgccgtcgacgtgcttcagccatcttacttacgtcattcctcgctcaacttaaaaataaaataaatttccaccgaacgcttgaattgtattatccattaactccggttaaaataaatctcgaccgttcggtcgcgccgtaaccacgttggaaatcaaaacgaggtaaaaactaatataataactcaaaaaaacatcttttagtcaaataaagcgaacaatcaatcggacgttctttctctgtgggatctctcattcttaatcgaattgattaataactaaagtgaaactaatgctaacatcaact

SEQ ID NO: 249492 - DNA, 392 bp, Glycine max
agtcctattaacaacttccggttgcccatcggtttgtgggtgacaagtggttgataataacaatttattgcccaactttgttcacatagtccttcaaaaatgcaaatcatcaagcctaggtataggatgcctatatttaatggtgatgttattaaaggctttacaatcagaacacattgcgccatgttccatcctttttaaggaccaaaatcactgggacagcacaaggactcatactatcttttacccaacctttgctaatgagttcatccacttgtctttgaatctctttggttcttgtggatacttctataggctggcctattgtgcacaaaagctcctggaatgagatcaatttgatgctcaaattcccttaaaagtggtagtccact

SEQ ID NO: 249493 - DNA, 419 bp, Glycine max
caagctatctctcttaccattaatgccgatatatgttttgatatcctactcaaggcgtcagccactacattggctttgccggggtggaaactagctcagaatcataatctttaagagactatacccatctcttttgacgcatgttcagctctttctgactaaacaagtacttaaggctcttatgatcactaaacacctcaaacttggagccaaacaggtaatgcctgcacatcttaagggcaaaaactacagcagctaactccaagtcgcgagtgggataattcctctcatgagtctttagttgtctagaagcataagctattacttggccattttgcatcaacactcctcctatacccatctttgatgcatcacaatacacctcatatggttccctcgggttaggaaaaactagcact

SEQ ID NO: 249494 - DNA, 403 bp, Glycine max
gcacttacttcacatctcccctttttatgatgacaaacccgattctagagaatactatgcagatttggtctatcgttcactcatctctgtctccccctcttcttttgaattcatgcttaaatttaaattatgctcttgaattctaaaatactcatttttctctccccctttggcaacatcaaaaaggccaaagttcgtggatgttataataaacatatatcatatgctaacaaacatagcaacaagacaaaaacacaatgaacacctatttatctaagtcactagcatctaaaagaccaagttcacttttaatggcaaagaatgtttcttttggagaagttggtaagatgccacaagtgattttagtatcacaattctaaacacaatccctttaagacatgat

SEQ ID NO: 249495 - DNA, 445 bp, Glycine max
gcttctatataagctgaaccattttatcaataaacacaagttgagttttattcagaaaattagagtttatctcttttatcttagggagagtgattctcctaaattcttgagtgattcaagaacaccctggctgtatcaaaggactttcacaacctttgtgtgttgccctcgctggaaagagtgattctttccttcctatcatctccacccttgttctttcaaaccacaattccagaaaatccacctctgcccaaaattatctcgtgaccataactcccattttacacactcaaattaagtgattcttgagcctaaattgaatttcaaaacgagacctttcacctcgttttggactcacctcatttggagccctgtagcttccgttattgccatttctagatttctgtccagccaccacttaacctacgttgtaccatcccattca

SEQ ID NO: 249496 - DNA, 437 bp, Glycine max
  unsure (1)..(437): unsure at all n locations
catgcacttctcagcctttcggcgaagctacattggaaagtttttttgccaaaatatgctacccttaaaacaaaaacggcatacaacctcctccagtaaatacaaacatcaatgtaaatggagagcaagcttatgcgcatacttctttacaaacgttcacttgcacaagacattcttataactaagaaaaatgcacccatatacaatcaaggcaccttcgttacctagattatttatatgtacttccaaggtgtatttgttacctacatctcatgcacttccttggctaaatatacatacatgcgtactcaaagcatttgnggtaccaaaaattgcacatgtgcacattccagtatttctaatacttatgcatatacaaactttgtgatgaatcttggctatctacacaataaggtgacacatttcatgccttactc

SEQ ID NO: 249497 - DNA, 376 bp, Glycine max
aaaggtcagccccttagcacttctctctctctcgaaattgcttaggaaaaatatttccgtgaagaaaatccaagccgaggcgcttccgtaacgtttccttgagtaattacgcgaagattctcgaccgttcttaagatttatcgctcggtctttcgtttcttcagtcttcgacgggtaagtaccttaaaccaagcttttcaattcattctatgtacccgtggtgggccacattttggttcatggtattttattctcgctttcatctgcttttcatacccccttttgatgtgcttaagccatttatttaagtcatttctcgcttaatctaaaaataaaataaatctccactgatcgtttgaatcgtatcatcccgtaa

SEQ ID NO: 249498 - DNA, 395 bp, Glycine max
gctttctggttttccaattcttgaaaactgtgctattcatcttttccattcccttctccctttgccaaaaagaatccgccaaggactaaccgcctgaattctttttgtgtctctcttctcccttttcgaaaagaacaaaggactaaccgcccaaatttttttgtgtctcccttctcccttgttaaagaattcaatatgacacaatctgagaatttttttgattcttccctttcccatatacaaaagatttcaaaggactaaccgcctgagaattcttttgtatccccattcacaaagtttcaaaggtttaaccgcctgagaactttgccttaacacattggagggtacatcctttgtggtacaagtagagggtacatctactttggttgtgactg

SEQ ID NO: 249499 - DNA, 337 bp, Glycine max
tttaaattgaagaatgttgagtttaataccatcaattccgttttgtctaggaacaccatcattccctcttctcctcctttcttcttcattatgatctctattctccatttgatccaacctctcatggagcgcaacatctcgttgtttcattaacctctccaaatgttgcatcaaagcctggcattggaatggcgaaagccccactccatcattaggattagtacctgacatctcaaacaaacaaatcaaacgttacaagacaattatagttgcgtgttgaatacctcacccactcgagtgtatcacacaattatggcttttctctaatgaaacactc

SEQ ID NO: 249500 - DNA, 368 bp, Glycine max
tcatgccctcaaaagtttccttctccacttcatactcgttagctctaaaactgacaccccattgttcatttacaatcgaggtttcatcttgacttatttttttgtctatggagacaatttagtgcttacaggcaacgatgaattgtttctcaagctataccaagatgcactggcctcacaattctccctgaaggaccttggcacacccatacatcttttgggtgttgaaattgttcccacgtcacatggactatttctcactcaacatcactatattcgttatcttctcctaacccacaacatgcatgatgatgctacaccagtccacacccatctatctaccacatgcaatctcacatcaggtgatg

SEQ ID NO: 249501 - DNA, 321 bp, Glycine max
ttaataaaaggaggaatttgatgccggaagtttattatcaactatagtaaaaacttaacacaagttcacaggtgctaaatataaatagggtcagagacaacatgcatcactcacatctttaactgttgactggttttctaaactctaaggtgtacgttgatgagagtgtacaggtatgccactgctcctctgcaattgtagcggacactctcactaaaccacatccctaaagaggacaaaatgggacccagccatgattttgctagggttgaatgatcaggttatgttaggaaagaggatcaaagtcatccacagattgac

SEQ ID NO: 249502 - DNA, 419 bp, Glycine max
  unsure (1)..(419): unsure at all n locations
agcttgtgcctcttcacgtctggaatattatatgtgcatataaatccaaaaacccttaggtgctttgctgatggcttcttcccgttccaagcttcaattggagtcttgtcttttacaaacttagttggacatttattgagtatgtaaacagcagtgtagactgcttctgcccagaatgtgttaggtagtcccttctccttaagcattgatctagccatttccataactgtgcaattctttctctcggacactccattttgttgaggagaatatgcgactgtaagttgttgctcaatgccttcatcctcacaaaatctttcaaactcgtgagaggtgtactctttgccgcgatcacttcttggtactnttatttgttntccactttgattttcagcaagggccttgaactttttgaatac

SEQ ID NO: 249503 - DNA, 380 bp, Glycine max
tcttggattgcttcctcaactgaaacttgtattaacattctcaattttctttacggtttgttgctatcctttgtgatcaaaaactcatttgatgttatgatctctataggagactcataacttgtggtccatgcacattaatttctcatcttggtattcaataatttgtagccgttatttaacttgtacatttttattagctattattgctaagcatgaaatgcatacataaagctccaatttcttgtcgctcgcgggtttaagattggtaatatttttggcctaaacacatgctaagggctaacataatgcgcctagaatatattctctaaattgcattgtgattggtgccccataacctgcttcatcaactaacaaat

SEQ ID NO: 249504 - DNA, 436 bp, Glycine max
  unsure (1)..(436): unsure at all n locations
acctcgctggataaattttatacgctcatattcttttatctaaagnnngctgagggaacatattaagaatcaaaagcttgaatcctgtacaggccctctattgccccagcttatctatgttaacatgtttaacacctaaaccagaaactaacaacacattacacgtgcaaaatgttaagcaagcaagacaacaattgtaaagaacaaacccggataaaaataatcaataacaaggtcaagaacggatgatattatcgagcagaaaaaaatcatcagaaaatttcatgagatacatatggagccaggacaatttaatcaacaaccaaccaaaattaacacgataaggcttcggacaaaagcttatgctgtagacagtcctgctaggactaccaaccctgtcccaaaattcctgcaatgaaatgtgacaatgattatt

SEQ ID NO: 249505 - DNA, 283 bp, Glycine max
  unsure (1)..(283): unsure at all n locations
atggtatccttatggatggtacttggatccagcaacctgaccttgtcaagaatgcagtgggtaacttcttccttgagaggttcactgaacagaattatctaagacctgttctagatggggtttcctttccttccattgatcaacaacaaagagaggggttgactgcacctttttctgacaaagaaattaaagattctgtttggngctgtgctggagacaatgcccgagtccggatggcttaactttaatttattaaggagtctgggattactgaacctgatgt

SEQ ID NO: 249506 - DNA, 364 bp, Glycine max
  unsure (1)..(364): unsure at all n locations
atcaatatgaagagaggacaatttaaaaatattcatgagatgacaatttagagagtgatcaaagactttcaaatcaatgtccactgaatntatcaatagacagatcaagatatcttaatgttgaaagttttccaaatgatctagaaagggcaccaccaattgagttgttgtaaaaatctagcatgtcaacatttttaaaaactccaatttaatccgtcaaattgggttattttatcatctagggataaattttttgtgttttttttctcatgtgggtactttttaaattatgctccaaagngaataagcggtttataacattaagtataagcctacatctatatgacttatattttgtttaact

SEQ ID NO: 249507 - DNA, 252 bp, Glycine max
cactttatgatacaaagatgatgatctcaagtattcaaaggactgagtgcaagattgaatcgagaacactctatggttcaagaggaaatctgttttcaagaatcaagaattcaggtttgaagattccagttccaagaatcaagatcaagtatcaagactaaagattctatgaatcatgaaaagtctttttataaactgagtagcacattgaatttttctcaaaaaccttttaccacagagtttctactctct

SEQ ID NO: 249508 - DNA, 351 bp, Glycine max
cttttacattcccaaatcacacataaatgcaccatccccaggtgcccacacttcatttgagctcacgtactcccatgttacccttatcctcgctcctctcaacaccgggtccccatcaatctctccaagcttgcacaacattcaaacatcatgaactatcaacaccaagcaaaaacagggcagaggtagaaatttctgcccaaaacataaaccaataccacagtttttcttactcaaataccccagaaacattcccttcgttccaattcgttcaccgttggatcgactcgaaaattctactggagggccctagtacataagttacattgtgaccgctggatcttgtaggaa

SEQ ID NO: 249509 - DNA, 260 bp, Glycine max
  unsure (1)..(260): unsure at all n locations
aatatcttaaaagaagtaacatgccgatttatagattctatataagcagtccctatgtaccccatatttgatctntttgaaaacaacccactaccacaatccaatttatgatcaacttggctctgataccaaaatgtatcgccttctgtttcaataacaatcagtaattaaatatatcaataagaatatgagatcccacaatttattagtatgagaatacttctggataataaataaagtcaaataattagtcttacata

SEQ ID NO: 249510 - DNA, 293 bp, Glycine max
tatgcagcaccagatcaactctgacatggctctcgaccggacccagctgcaaaacatgatttattgggaaaactagtcctttaaagaatacacttatcgttggacggacctggcagcgtaagtaccccctcccatggtcgagagggaaatggttactatgatggtggactccttgcctgtattttactatgaaaaaatagtgggctacatgccttctaacttcgcggacttggtctttatcggagaaaggatcgaggtgggtttgaagacgggaatgcttgattacatctccc

SEQ ID NO: 249511 - DNA, 255 bp, Glycine max
ggacttaacacgagtcagctattttttacgctttttttggcgaaaactcaataaagttgacgtgcatccttggcttctgtaattgacttcattatttccctgatcgcattgtgaaatatcctagattagcaagtcgtgtaaatcacggcgaatatatggcgatcactctgatcaagtatgggtaatttcaggctctgtaattacattatttatccctgatgacttgggaagttgcttaaactgactcggtattta

SEQ ID NO: 249512 - DNA, 377 bp, Glycine max
agaaaaggggtcagccccttatgcacctttctctctctcgaatttgcttagaaaaattgtctccgggaagaaaatccaagccgaggcgcttccgtaacgtttccgtatcgttaccgtgagtgatttaacgaaggtgtttctcttgctacctctatgcaaagcatcaaacacggggcagcccaaatgcaaataaaaactctcacaagcaagtcctaaatttcatgcttttctaatactaaaaccaagatttggaatcctagccatgactatgtcttcttgcattgaagctaaaaagtttgggttctaagcttaaattgcatctgggccctttttgactttctatgcttctctgatatataaaatagtccccctcccac

SEQ ID NO: 249513 - DNA, 333 bp, Glycine max
cccaggcgagctatgttgcttcaccgccttctggagaacttcctggaaggcccaaattggtctatttgctatttgcacccccttttttactaaatacaccccttgcctttttttgctgattctttttccgtaacggtacggaaacttacgaattacgtaacgatacttgtttcccttccttaatgttacggaaccttacagattacgtaatcatccctctttttgccttccaaaatgttacagaactttacggattgtgcactaacacttccttttaattttcggcatttcacggaacttcacagattgtgctacaatgctttcttttgactt

SEQ ID NO: 249514 - DNA, 392 bp, Glycine max
  unsure (1)..(392): unsure at all n locations
acatatactggaatttatttatatatctatgaataattaactcgtcaaaatgtggattgaaagccaagcatgcataccttatcaaatgagtttcctaataacactaatttggcatagcaattttaagcatacaagggaatggtatcttatatctatacgtactctatacacgcagagctcanaagagagagggagaatatgaataatttttcccatgttcccccttggtttagattccaccctactgacgaagaacttgttgattactacctaaggaagaaagttacctcaagagggattgacctcgatgtcataaaagatgttgacctctataaaattgagccatgggaccttcaaggtagtaattaaacttctttttttttttttatcaa

SEQ ID NO: 249515 - DNA, 453 bp, Glycine max
  unsure (1)..(453): unsure at all n locations
gcagctgcagctcatgctgaagtatgatggcaatcttcttactgtngnncattacatacaagtgagcttggaacatatcttctacacttggagtgataaaatgcagtcctcttgaacccttaccgcccactctatcggcatggcgagactcaggaagcccaacaggtttaacctttccaatgtactctgaacaaaattcaatggattcttctacaatgtacctttcaacaatatatgcttccggacgatgtaaattcttggtatacccttttaagatcttcatgtatcgctcaactggatacatccaccgcaaataaacaggaccacaacatttgaattcttgacaagatgccaattaagtgaatcatgatgtcaaagaaagcaggaggaaaatacatctccacctggcactgtataattgcggcctcattttccaggtcatcaaacttgaca

SEQ ID NO: 249516 - DNA, 434 bp, Glycine max
ttcttcctacattttaatcaccgggttgagtcttctttgtggttgacttactggattagctccatcctttaaatttattcgatgcatacatgtggatgggctaataccatgaatgtccgccagggtccagcctatagccttcttatgcttcttgaaaacatacaacaacttctcctcttgcttatgagcaagggaggcaaatataatcactggaaaacttttgctatcatccaagtaagcgtattttaaatttgatggcataagcttcaattctggtgtggtcggctggatagtggcagaaagagatggtttctcatcctgtacctcataaagaaagacagaggtttgtgtacttcctgaaacatggttagttctatctgactctataaaattcatctctagatgtaaaacaccaccaccagacatgcaattta

SEQ ID NO: 249517 - DNA, 341 bp, Glycine max
  unsure (1)..(341): unsure at all n locations
ctggcctctcctcgtgagtctggtcaacccataaaacatcttaaccacagactctatttatggaaactggaccaaaccacacgacccctcaactttttctcaaatagttaattctctgttgcaccttataaggggcgttatcaattatacttgtccgcccctgtagagggaaataagcattaaactcattcgctcgttaaagggggctttatagttcgtggtgattggatcgaattcactagttcacaagctgcaaggcacacaacgatctgaagtcgcatacactacataatttatcacatacactcgatctccatctcatnggntcaatctcaattaat

SEQ ID NO: 249518 - DNA, 436 bp, Glycine max
  unsure (1)..(436): unsure at all n locations
tggacttcctgagtgtagggaaccttttcttctcaagngatttctttccaatacctggtcaagcatgacgtactttctgcttatgttggcttgcccagcatagctcggattattgttatcaattagggccttcacttgctcatgcaacttcttcacatactcagctttatcctgagcatccttatgcttaaacataacaatgttaggcataggcaacaaatcaagaggagtcaaaggattaaattcatacactatctcaaatgaggaacaattagttgcgctatggacagcccgattataagcaaactctacatgaggcaaacaggcgttccaagatttaagattttttttaaaacagacctcaacagtggcctatagtctattgactacctaggttgacctcagatgtgggtgacagacgaaaaacaacaattaa

SEQ ID NO: 249519 - DNA, 253 bp, Glycine max
  unsure (1)..(253): unsure at all n locations
aattgaacacttctacacattctaaagtgttacctcaaatgtgatttgaaaatatggaagatgggtccctatgtgagtttgctataataggtaaccaactctaccacctttttttctcctttagaggttgtttatgggtttaatncctttatctcctattgatttaatctcccttaccctaatgattcttctattttgagtaaagatgggctttctagagccacttttgttaaggatcttcatgaaagagtga

SEQ ID NO: 249520 - DNA, 419 bp, Glycine max
  unsure (1)..(419): unsure at all n locations
tcaccgcagcatgcagcttgtgtattgtcttaccgctttttgttataggggtcaaaaagagcaaaactgataatatgctttgataaatgcgcaaaaaaatactgggggcaatgaatagggtgagaatgaaggagaagcccatgctgtgactgccatttctatacaggcaagtttcccaccaacccaacaatgttattactcagccaataacaaaccttctccttacccaccgctcatgtatccacaaaggccatccctaaatcaaccacaaagtctgtctaccgcactttcaatgacgaacaccacctttagcacaaaccaaaaacaccaaccaagaaatgaattntgcagcgagaaagccaatataattcaccccaattccagagtctatgctgattgctccatatctacttataatc

SEQ ID NO: 249521 - DNA, 418 bp, Glycine max
  unsure (1)..(418): unsure at all n locations
catgcaagctagngctttttgttctttactaaatttgtataacaggtttatgcctatgagaggtcaaaccgagtttacaattacaatttaaatccaagtggtcctgtattattacagttggggatgggggcaacagaaaaaagatggcaatcaatattccagacgaacctggtcattgtcccgatccattaaagactcctgatccttatatgggtggctcttgtgcaacaaattttacgtttggtacaaaagtgagtaatttctgttgggatccccagccaaattaacaggctttcagagaaagtagctttggttatgggattctagaggtaccattcctttccctaccccattgtcccaccctaagcatggtggtcaaatggtatttatattcaatacatggtatatttgtagtatg

SEQ ID NO: 249522 - DNA, 385 bp, Glycine max
  unsure (1)..(385): unsure at all n locations
agcttagaaaaatcacttttattgtaaatctctttgccaaacctttgctaattcaattaggaatttccttcctaatattctagtgatcatcttgatgttgggacttgtaatcttgaaatattgtcttgaattttaatcttgaaaagcccatttgcatcaattgcaacacatcatcatgatcatcatcaaaacatcaaagccaattgcatctacacatgtgtcctccaccttcgagattggagctatgtttcacgattgcctaagtgcggaccctcaaggcaatccgccattctccctctttttttcggagacccatgaatgttattgcctancgctattcatgtgccctccaccttcgaagttggagctatgtttcatgattgcc

SEQ ID NO: 249523 - DNA, 289 bp, Glycine max
gcaacatcattcgcggtatgaatccactccacaagttgaagtagaagaaaccctcagaccattaacaactgggcggacaaaatgggcttttacttgaatggtcattatgtcaatgcagaagggattcagcgttcactatgcactggtcacatattattgcgcctttggttactacagcccgaactactaccaatatataagatgttacacaaatgagtccatcttataagcttctccccacaatggagcctattgggaattagcagctatcctacttctaacacgcatg

SEQ ID NO: 249524 - DNA, 404 bp, Glycine max
gcttatggtaaaatctgggaccctaccatggtagaagtctccacatatgccattgccttcctcgcccagtattataatcagccggtgaggtgctttacctttgggaacttccagctatcacccatgggggaagaatttgaagagatcctaagatgtcctctagggggaaagaaaccatacctcttctcagggttctacccctcattagccagaatttctaaaatagtccaaatctcggcgcaggaattagaccgccaaaagcaagtcgaaaatggggtggttggaataccgagaaaatgtttggaggcaaaagcaagaatcttggcaggtaaaggcgaatgggccctgttcatagacattctcgcactgttgatctttggaggagtcctctttcaaatgtggat

SEQ ID NO: 249525 - DNA, 451 bp, Glycine max
  unsure (1)..(451): unsure at all n locations
aatatttaattntttagaaacttttttatattctcattttaattataaaaaatttatttagcaaataaatttttaacacctattatataaattaagaaaatttcacaaagtaatatgtaaattattttatgtaatgtataaaaaatatgcaaatttatttttatatataaataataacaaattttattttaattataagaagtaaaaaaattattttgtatatttatattattttaaatttacttaatttctataaattacataaaataatttttttattaatttataaattaagttatgtaatctttttaaattatattatatctaataatttattaatatgtattataataaacttttatattaaaaaacacatgtaaaactaaatattaaatattntattttatntaataaaattttattaataaaaaaaattaataactcttaaata

SEQ ID NO: 249526 - DNA, 290 bp, Glycine max
  unsure (1)..(290): unsure at all n locations
gactaccgctcttccttcccgcgatgcttctctttattctgcctgagtgggcttatagcctaaaccatacttcccacgatttccttnggcacttatcaagctagttatgccgccgttgtctttgcctaaacccattccgggttcataaccgttccccaacataactcgggccatcattactgctgcatcggacaggcaagcttgcccagagaaggagtccacggaggaaatgcttaccacctcaaaagactggaaaacggtttctaatgacatctctgcagcctccacat

SEQ ID NO: 249527 - DNA, 407 bp, Glycine max
agcttctcaaggaagctacctagtctatatatagaagcatgtgtaacacttgttataactttgatgaatgagagtcttgtgagacacaactcaaagttcaacttctctccctttttcttccttcaatttcatgctcccccctctctctttctctccctctttcttttcctccattgaagcatcctctccaagcttcttatccatggctcatcttagtggtgaagctccttcttccatggcttattccctagtggatggcgcctcctctcacctcttctcctttgtcttccgctgcatctccatggtggaaaatcaccattaaaggacctcattgaagctcaaagatccaacctccatagaagccccacaagcaagcttccatcacaacatcaaaagaagatcgttaa

SEQ ID NO: 249528 - DNA, 450 bp, Glycine max
cggatcttaagtcacctgagctgcaactgccacttctcgctagcgagttggttgcttcctccataagcaacagccttctggaggaatcttctggagggcccaaatgggcctggttgctatttgcacccctatttttactaaacataccccccttgcctttttttggtgattcttttttcgtaaagctacggaaacttatgaatttcgtaacgatacttgttttctttccgtaatgttacggaaccttgcaaattacataatcatcccctttttgacttatggaatgttacggaacctcactaattgtgcaacgatgcttccttttgatttccggtgtgtcaccgaaccttacggattgtgcattaatattttcttttgacttccggcacctcgtggaatttcaccaattgcctaatgatgggtgccaagcacctcataatgaccaaacac

SEQ ID NO: 249529 - DNA, 431 bp, Glycine max
agcctggaatcttttgattcttgccaattattgaacttgtctggcgatgatgtcaatgatgaggctccaatggacaataaacctggataggaagaagagtttggtgcagaaaaagaaaaggggaggcaatatgagaaggcattgccatattttttggacaattgaccaagcatggagattttgtcattggctagacctatgatacctgatgaccttccaaacaagccttgattgtcttgaccacaaccatacacaaaacctgatgatggtgcctctgaaggggttaagggtagcacatcttgactcaaatatccaattgagaaagaagtgtcaccatagctttgcttgtagacacaagcaccagttgcatttgagcaacctggagcattcagtgtggagcctttgagagaggaacactgagatgatgagca

SEQ ID NO: 249530 - DNA, 369 bp, Glycine max
  unsure (1)..(369): unsure at all n locations
tattgattaggctggagaggaaaggaagttgcaactaaatgagctagatgagatccgtttacaagcctatgagaattccaaattctacaaggagaagagcaagaaggtccatgacagcttgatagctaagaaggactttggggttggacaaaaagttntattgtataactctaggctcggactcatgagtggtaagttgaggtcaaagcggattggtccttctgtggggactaatgtttttccttatggtgcaattgagatcaaaagtggatccaccgattagagcttcaaggtcaatggacaccggntgaaaccattcctcacatatcctttcttggtggatgtagtggtggaggagaccttcttact

SEQ ID NO: 249531 - DNA, 160 bp, Glycine max
tggagaaaacaacgacaatgcctacaagattgacttgcctatggagtataatgaaaatgccactatcaatgcgactgatctatctctttttgatgcagatggacagaccctggattttatgacaaatccttttcaagaaggagggagggatgaggacttt

SEQ ID NO: 249532 - DNA, 381 bp, Glycine max
gtctcgctatcttttacacgtttttcactaagtaagtgaaatcctacgtacgtgctcattccgggggaactatcatatcctctacaggacctgaatctgcgaaatgtaatgtacttcttcttctcgagaaggatccacaagatgaagatccacactcaccaatgagcaaaatccgcctctgccaaaggattctcctcctctctctcttctttctctccggcgacactcctcttgtcttcgtttatcaccgcctcaaccttctcactcttctcggtaatctctctcatgatgcaaactgcgatgccgctttgcgttattataactcatgtaatcacttctccgattgattatgtgcgtgtctgtgaccggcgcctagggaga

SEQ ID NO: 249533 - DNA, 325 bp, Glycine max
taactatgaccttgctagcaatatatacaaatcaagttggaggaatcatcccaatccgagatggacaagtcctccacaacaacaatagcctgttctctcattttaatatggtagatggaccaagcaagcaatatgttcctcctccaatacagcagcagttacaacaaagacaacaagctatttcaacctttcttataatagttagtgagacaaatgaccttccagaatatgcaatcttagcatgagacaagagactccattcagagtctgacaaatcatatggggcacatgggtactcatatgaacaaagctcaatcccaaaatt

SEQ ID NO: 249534 - DNA, 282 bp, Glycine max
  unsure (1)..(282): unsure at all n locations
ctcctttttgtctcaaatttatttaaacccngtcttttcacctgtgctgaaacaacatgtgaaaatctgaactaaattacgatgcttaatattcttaagcgcattgctccaacaatgaaactttgagagctcctctcttttgaaggctcacgaccttaatggcaactacttctgtctactaactcaagtgatcctttggagacagaacctaaatctccagaccctatcaattgtgtagtcgagaatccattacttccattgggtaggaattgtgtataaact

SEQ ID NO: 249535 - DNA, 296 bp, Glycine max
acgtgagcatagttggacggtggccacatgggatggtgggattatgctctccattgtggagggggagaacttgttttgcaccatttccccaccgccaccttttaccactgggattagtaccccataatcctacaagcttgagatgatgaattgtagaagggtgaaacttcctgcttttattgttgaccacacaatgacacctgtatatatttcgtgggggtcatgagacctttgggaccttaggtggggtgtttttcccaaaaccaatcttgaccatatccgacccaatccgggca

SEQ ID NO: 249536 - DNA, 321 bp, Glycine max
aattcaggtccaaccaacttgtgattcatcgtttatattataagaaaatttaattgtttcgaaacattcctgattcaatttttctgagccaatacatgtctgtatatctgcataatacttaaagcgcgcgactctgataacaacaatgtatttggaatttgggaagttgccctaaattgagctcttttattctctattttacttatacatatatatatctatatatatatatatatatatatatatatatatatatatcgcaaaatatttgctcttcttttatttcatgttaaaaaaaatttcaacttgtctctataaggt

SEQ ID NO: 249537 - DNA, 318 bp, Glycine max
ctatcctcaaccggacaataatttactgccagtttatgatcttgcagtgaaatccccatagcatcttaggagttcatattgtttgtccacctgaacccctgatgtcagaagacatattttcaaaagcttttcttatcttggagggatggcaaagatggctatctaccttgtcccaggtcattttagtgggatgaactaaagggtgctttggaaaatgttccttcatcaggacactgcttaaaaaaacattcagatcagcccttatggaagactgttgtatttggaaagataaaattgtggcagctgtctacaccaatt

SEQ ID NO: 249538 - DNA, 369 bp, Glycine max
  unsure (1)..(369): unsure at all n locations
cacctgcngcatgcaacttccatatcgatcgggaaagaccttgtttctttcttcattaggcactaccagtacaatacggacattgctcccgatcggaaccaacttcagagtatgactaatcgaaagcatgagtccatttaggaatatgcccaaagatggaaatatctcgcatcccaagtcgtaccgcccatgatggagagggagatgatcacaattatggtagatacgttacccacgttctactatgaaaagctgataggctacatgccagctaactttgcggatctcgtcttcgtcggagaaaggattgaatccggactacgaaaaggcaagttcgaatatgctgccaatatggcccccaacaacaac

SEQ ID NO: 249539 - DNA, 369 bp, Glycine max
atccgaggaaaaagatattggcttttgactttgctcagagcttcggtaatcaattctgatcgtttccatctattacgggactccattggacatccgagtaaaaaggcactgtcgtttgaatctgctcataacttctattttcattgtagagcatctcgatatattatgggtctccatcggacatccgtgtaaaaaattattggcgcttgaatttgcaacgagactacatcttctatttcgagcgcctcgatatattacgggactcaatccgacattcgagaaaaagttattgtcgtctgaatttggtatgaactctctgtttcaattccgagggttcgatatattacagaactcaatcggacatacgat

SEQ ID NO: 249540 - DNA, 336 bp, Glycine max
  unsure (1)..(336): unsure at all n locations
tttatggcattatgaataacaagatgaggtggaaagggcttaaagagttcacttgcatgtgaaaaattttcaaaaagaaaaagattcacgttagaaggataatgccacccaattaatacttaccaagaaaagaatgttttgttaaaacattttcagacaatttaaatatttttatttggttatattagtataaatcatctctaatccatatattttttaatattatgcgttttttntttcattctcttttgatatactttatggctaaataacttgaatttaataaacatttgtgtatcaatcattcttagatgtgtatattatttataccaaatt

SEQ ID NO: 249541 - DNA, 449 bp, Glycine max
  unsure (1)..(449): unsure at all n locations
agcttgcgaatcaattgatcaatgagaatctagcagatcaacttgattcataagtgtttcgaacagtctgcactactgcgaaatttatcaacaagtgtactaagtcacaagtaatataaaacggtaagaactgaatatcgaatcacaaggagtttgtttcactctgagaagcgtttattcaacaagtaaacatttgtataaaaccaggaaatagaaataagcaaagatattttttgtaatcctaaagttaactacaaaatttgcaacctaaatgtgagagataaacagatgattaaaatgttgggtccttttactgagtaaaaccttatgtaattagatattnttttctctatttaagggtgttnttgtgttctatgccgagggcaactaccccaagccatgattcctcgcatgaatggactaattctaattaaaccacgttctcggat

SEQ ID NO: 249542 - DNA, 344 bp, Glycine max
ccacagcagagcaactatgacctttccaacaacagattctaccctggatggatgaatcaccctaaccttatatggtccagccctcatcaacaacaacagcagcctgctcctttctttcaaaatgctgctggcccaagcagaccatacattcctccaccaatccaacaatatctacatccccagaaacaaccaacagttgaggcccctccacaaccttccctcgaagaacttgtgaggcaaatgactattcataacatgcagtttcagcaagagaccagagcctccattcaaagcttatccaatcagatgggaaatatgggtactcaattgtatctacaacattc

SEQ ID NO: 249543 - DNA, 389 bp, Glycine max
ttgacatcaatgcttatccaccatggttataaacttaatgacctttgttttaataataaagggtcttgaccaaaatgataccccaggacaactatattaatcagctgacccccaacagataaatagaaggacatgaaacaattgagctgcacaacaaaaggttaaaaaagacaaactaaaagaagccttgtgagcacttttagccaaactaaaagaaaacttaaaaaaatagtagaatccctaaaaatctttcttcaaaaatccaatggaggatatccaaggaacagatagaacagggcttaaagttgacatttgtcagaaccagagcacaatggaacttgaaggcagttggaaggtgagccttgactacatacaaagacataccaaac

SEQ ID NO: 249544 - DNA, 378 bp, Glycine max
gagtcttcattcagaaaactagagtgtatctcttttatcttactgagagagatctcctaaattctaagtggatcgagaacacccctgcttgtatcaaaggactttcacaatccttgtgtgttgccctcgctggaaagagagaatcttttcttcctatcatctccccgcttgttctctccaaccacaattccagataatccccctctgcccataattatctcgtgaccataactcccattttacacactcaaattgagggattctcgagcctatattgaatttcaaaacgagaccttgaacctgttgtgaattccctcatttgagcccctgagcttctttttggctatttatttttggtcgaccccactaacctcgttt

SEQ ID NO: 249545 - DNA, 374 bp, Glycine max
  unsure (1)..(374): unsure at all n locations
tatcatattacagagatactcaaccctgtgttaacttaaatgagccttatataacccataatataaatgtcattgtcgttttttaaccaacaatgtaaactgtaaggtaaaccagttttaccacagcctcatgaattaataactaaactaaaaaatagaaatggatgatcccagttcagcattctaaactcaaaaatattccatacacataattttcaaagcacaagcttcacaatattgtcactagcaacagagcattatttcaataaagcattatntcagtagataaccaaaccctatgcttaactctaaataagccttaaataactcataatataaatgtcattgtctttttttaacccacaatgtaaact

SEQ ID NO: 249546 - DNA, 348 bp, Glycine max
caccaccattctcttgtcctttgatattttggatgttagagagtgggaatggttaggtcaggaatctggcctgcttgtgcaccaaaacaaataatggacacttgagaggcttcattatcgtttctttgtttgtcctctattatgagggaacgggagtgctgtgaatctcatgcactaagttcaaaggcactataaattccattaaaccataactaaggacacaaacatgttcatcgagatctcaagtcatgcccggagtcagtagaaacaagctcagaggtaaaccatacaacccatcatccttttctatccatcaataacaaacggacataatctgttaactcaaaa

SEQ ID NO: 249547 - DNA, 328 bp, Glycine max
  unsure (1)..(328): unsure at all n locations
acttacccgtggattatctaagaacgatgaagaacgaatgaagaacgtcgtagaacggttgaaatctttgcgaaattcctcacggaaaacgttacggaaacgtttcggaagcgcctcggcttaaattttcttcacggaaacaattnttccaagcaaattcgaaagaaagagaagtgcccaaggggcttgacccttttcttcttcactcctccccctatttatagcaaaataggggaggagcttgccacccaactcgcccaggcgagctcagctcgcccaggcgagcagggttgcttcctccaaagcaaccggcttctggaggaatatt

SEQ ID NO: 249548 - DNA, 415 bp, Glycine max
ttcaccttctggttcttctcatagtttttgttagagaaaacaagctctattttcatcttccactccaagtaagcctctggatcattctctcctttaaatggaggaatgtcgagtttaataccatcaattcggttctgtctaggaacaccatcattccctcttcttctactttcgttttcattatgaactctattctccatttgatccaacctttcatggagcgcatcatctcgttgttcattaacctcttcaaatgttgcatcaaaacttgcatttggaattgcgaaagccccactccatcattaagattagtacctgacatctcaaacatacaaatcaaacgtaacaagacaattatagttgctgtttgaataccttcaccacctcagtgtatcacacattattgcttttttct

SEQ ID NO: 249549 - DNA, 399 bp, Glycine max
  unsure (1)..(399): unsure at all n locations
agccttataactaataagtactggttattatctcgcaganaaccaaaatgcaatcaagttggaagactcctttctatagtagtataaactacatacatgtaatgcgtgaacgagaagaccaattaattgcaaaattaaggcttcgcagttcaaactcataaagaaaaaacattatgatgggattaaactaatgacttaatgttataattcatccacttttttaataatttatggctcaattataattaaaagcttaattaggtccttaataattaaaaagttcattcaggtttttaattattctaaaatttcaattaggtccttcaattattaaaaaaagttcacttaaggcttctaataagaatcttcaactattaaaaaattcaatcacaatttata

SEQ ID NO: 249550 - DNA, 416 bp, Glycine max
  unsure (1)..(416): unsure at all n locations
atcaaacccacctttntattctcactggcaattccagtaaacctcctgcatacacacaattaatccattgtcatttcaattataatcggtgtttcatattaacgaaaataataaaacaaatagaactcatcattattaccttaaaaaggtcttaacagtggggttgcccaattcaaaattcagggccttaagtatgtcagcctccatactcaccaccttaaatggttaacaacaacgagaaccaaagttagggcccgttaacaaaataaaattgtccaattcaacacaacaacataattattaatttcatagctataaaaacaagttatctacctctgtcttgtcatacgtgttgtcagtgataaagcagaattcttccacatgcggcgggctaatttcctcatacttactgtata

SEQ ID NO: 249551 - DNA, 375 bp, Glycine max
tatcttgccgcccagcttgcccatgcgatcttatctagttcaggcgattttggttgcttcctccaaacacacagccttctggaggaaggatctggaaagcccaagtgggccagattgctatttgcacccccctttttactaagtgcacccctttctatttttttgagaattctttttccgtaacgctatgaaactttacgaatttcgtaacgatacttattttccttccgcaaggttacgaatcctcacggataatctatatactctttttttagctctcgaagaaattacggaaacttacggattgcgcataaacacctcttttcgatttctgagatgtctcacgacttcatttattgtgcaacaagggacgcc

SEQ ID NO: 249552 - DNA, 194 bp, Glycine max
gctgaactgactgaacccaactaataccaaaacactattttataactttttaacaaacacacagtctagaagtaccccctgtaatccaaggcacgatgatagaaaaagcctaggtgttcaaacttaaaaaggtattattcgtatcaggtaaatggctatgacattcaaaaactataatgtaaaagttgaataga

SEQ ID NO: 249553 - DNA, 337 bp, Glycine max
  unsure (1)..(337): unsure at all n locations
agctttttggagtagaatacatgggaccaatctcatttttatttataaagaaagacgtatctagtcaaggtctgagagaccatacaagtttcctaacgatttctaattatgtgggccattaaagtctatcatatgtngacaatagccgagaagcccatgaatctcttcgggggcggagtaagtgtccgccatcaccttggccttggctaacaagcggggaagttcttgactcccattcaaggtaagagcaaaccgatccatccacatggttgcctccttggtgaaagagtcgatcaccctttctctatcctcttttttcgngtatacttgggcatac

SEQ ID NO: 249554 - DNA, 261 bp, Glycine max
gggtcccattgaatcgccgtatacacactttgtggttgacttagggaaggccttagtggataactgtgcggtgggtaaagaaaaagtttgttattggctgagtaaagacattgttgggttggtgggaaacttgttcgtacataaatggcagtcacaacatgggtttctccctatcctcaccctctttatttgccccaattgtctcattcgtccaagcaggatgatttaatctgcctctcttatattcacttagatctcttt

SEQ ID NO: 249555 - DNA, 365 bp, Glycine max
acaaggatgatataaaaagatgatgactaaggtgatgacacaaagctctaagatcaatccaagaacaaatctagggaatcaaagatcaatcttagaacatctcaagtgaatcaagaacacatcaagaggtcaagataagaatcaagataaattcaagactcaagaagaaagtttagagtctagaatcaagattcaaggttcatgatctcaagaatcaagatcaagattcaagactcaagattcaagaatcaagagaaggcttaatcaagataagtatgaatagtttttctcataaattgagtagcacatgatttttctcataacatgtgtaccaaaggagttttactctatggtaatcgattact

SEQ ID NO: 249556 - DNA, 138 bp, Glycine max
cgtctttccgcgacaaacctacttcaatttcaccttccaccaccttctcggctcctttaccttcttcccaaccccttatttcttggtcctcaccgtcaaacctcttccttctctacctaccaagagactgtctctgga

SEQ ID NO: 249557 - DNA, 411 bp, Glycine max
  unsure (1)..(411): unsure at all n locations
cttatatattataatacactgtgtgctctagtacatggtacctgacacacaacaatntctacttaactggaatttatcaataacagcaagagttcaataacttttctaatattcacctccaattaacaaataagaaaaacatcccaaaatcgctgcttaacatttggtcaatcaggcacagtcatgggtgtaaatcaaagattgatcatgcctaccaaataggacctaacatggcatgaaataaacacaggaaaaaaaatacttccaattagggctactgatctatacacacacacactgtgctcgtacttcttcactctctntcactcttaagcttcatctcactcaaaccaaagttggaaattgcagcataatcccaattgtagttttgtagcataattgatgtgtaaa

SEQ ID NO: 249558 - DNA, 309 bp, Glycine max
  unsure (1)..(309): unsure at all n locations
agcttttaaaaggtcaagccaagccaaaataaaaaccttngatagactatangccaagcttatgcctcaaagaatcatcgtaggctaggctcaagcctttcaaagcctggcctggcctggcctattcccacccctaatagggataagggtagtaatagatctagactatgaaatttacatgattttctcttatagatatgttgatgatgcacttatgatgttttgagacactcgatgtttactatttataataacattgtcattactggatattttcgacaatactgttatggtctatgtctctatcca

SEQ ID NO: 249559 - DNA, 423 bp, Glycine max
  unsure (1)..(423): unsure at all n locations
ttactaatatgatctatgaaaaattattatagaaaaaataattgccttctttttagtttgatttaagtccgtatattataattatgtcgattttacatattgtatacttaacattttgaagtttatcttaaatgtttaatattatgtagaatcattttatcttttaaggaatattctttttttggaatatgtaaattttgttgctctgttagtaataaacattatagtaatttataacattnttcctatgaaaaaaaagtaaaaagtttgctggtttttttatgggtcaagaacctgattctatcttgccctgagcttttgcaccaaatcattgggtctaattgagaaccaactttctatttaagtattgggctacaaacattaaaatgcatattgttaggcgagacgccctaccaatataat

SEQ ID NO: 249560 - DNA, 426 bp, Glycine max
  unsure (1)..(426): unsure at all n locations
agcttatgcgcatacttcttcacgaacgttcacttgcacaagacattcttataactaagaaaaatgcacccatatacaatcaaggcaccttcgttacctaaattctttacatgtacttccaaggtgtatttgttacctacatcacacacatttcctttgctaaattcacatacatgcatactctaaacactttggctatcaaaaattgcatacgtgcacatcttggtatttctaatacctatacatacacaaacttcatgatgaatcttgactatcgacacaataaggggctacatttcatgctctcctttttttcaagtatttntactacctaaagccgcatgcaaattcaagtatattttcttttgctcactaaaattgtattcaaattaaaaggtatttttgtaatgtattttctgcaacata

SEQ ID NO: 249561 - DNA, 412 bp, Glycine max
agcttgatcttttcatacgacaatatctttttactcggaagtctgatagagtcccgagatataactagacgctcgaaattgaatgttgaagctctgatcgaattcaaacgacaataacttttcactcggatgtctgattgaggcccgtaatatatcgagacgctcgaaaatgaatgttgaagctctgagccaattcaaacgacattaactttttactcggatgtctgattgactctcgccacatatcgagacgctcgaaattgaatgttgaagctctgagccaatccaaacgacaataactttttactcggatgtctgattgaggcccgtaatatatcgagacgctccaaattggattgttgaagctctgagccaaatcaaacgacaataactttctactcggatgtctgat

SEQ ID NO: 249562 - DNA, 351 bp, Glycine max
aacaagctacaaaaggagagagctagaaatgaagagccaatggttgatacatggacggagatgaaaaagatcatgaggaagcggtatgtgccggctagttactcaagggacttgaaattcaagctccaagaactaacccaaggcaacaagggggttgaggagtatttcaaggaaatggatgtgctcatgattcaagcaaatattgaagaagatgaggaggtaactatggctcgatttcttaatggtttgactaatgatatccgtgatattgttgagctacaggaagttgttgaaatggatgatttgcttacaaagcaatccatgtggagcaacaattataaaggaagggag

SEQ ID NO: 249563 - DNA, 341 bp, Glycine max
  unsure (1)..(341): unsure at all n locations
ggatccttaagtcaccgctgctgcagcttgagattcgtatcgaggcttacctatgacggaccttgggttttatgagcttgtgaaactcaccaaggcagaccttgggtttggtgagcttttggagaatcaaccaaagatgcgtgcatcctaaattttgtagcacgcgtgccatgctcttgcatacatgtcacttatggagcggcatgtattgaagtcgtagtgtcgcgctctggcatacatgtcacttgtcaagtggcacgcactagaaacatggtggcgtgattttgcatacgagtcactcatatagtgacacgtattggagacgtggtgtgtntggagaa

SEQ ID NO: 249564 - DNA, 264 bp, Glycine max
acgactacataaacttctaagttttttcttgtaaacaacattgcaccaaacatgaaggcgaatgtagttttaccattaaacttatatggagtttttttaagggcttatgaccctattatgatatacagatattaacgttacccaaattttgaagagacgattaaaaggtctacattttcaaatatttttttacaatctttgtgagggttaggctaaatattaagctgtatacaaaataaatttattcaacccctgacatctaaa

SEQ ID NO: 249565 - DNA, 358 bp, Glycine max
ttatgaaccccttttttcaatattatacaagatgaaagcacacaatcaccagcaacaactacactaaatgctagcaaaacaatattaaaaatgactgggttgcctcccagcaagcgctcgtttcacgtcattaacttggcgcatcattctgttatcctggatcaatcttggttctctccttcaaaaccttcttatccaactccttcacctgtaagcatacatcctggtccagcaattctcttccttcattaaatagatcaaagttgatttgttggtttccaagactcacttccaactttttcttccccatgtccaccacacagcttgtagtggacataaatggatgtcccaaaatgac

SEQ ID NO: 249566 - DNA, 371 bp, Glycine max
  unsure (1)..(371): unsure at all n locations
acccatgatcttgagggttcattgntattaataaaatcttcattatttactttgctccacaaggtgaggcatccctcttctttgtagtagcatacccatgttcttaagttgaggttctccttcagaataacatccatgtccaatggatacaaatctttggtcctcatggttcttttgtacaacgaaattgctagatctatgtccactttgtctatttttatatccatggaaattttctttgtaagggaactagttggttggacaaatatgacaagtgagctgagattcacatagttggatttgatgtgaatatagttttagacgcatcattggtatttaatgggtaacatgctactcaactcattctcaca

SEQ ID NO: 249567 - DNA, 344 bp, Glycine max
ttgactatctcaaatacccgagagtaaaaactctgtggtaaaagctattgtgaaaactttatgtgctactcaatgtttcgaaagccttttttgtacttatcttgatagagcctcttcttgattcttgaaacttgaatcttgaatcttgatcttgaatattctgattcttgaaacttaaacttgaaactctctgaatcttctctgactctgaatgtcctgactaacttgagacattcttgggcttttgcacattttgtatcacaaacacttgaacatcttgattatatcatgaacaatgacttgtttaccattgctaaaaacaatagttgtgagcaatttctgga

SEQ ID NO: 249568 - DNA, 73 bp, Glycine max
accatataagagaacctaacctactgctaaccttggcgagacttaggatgaccatgcaagggatcgactctgc

SEQ ID NO: 249569 - DNA, 400 bp, Glycine max
tctgaaccttctcagcttcaagaacttcctgattggctgcatcacacaattgatggaccttctctgagtccagtcctatcacactatccatagcacttttagcagcattggcggcttcctggataaagaacaaatattatttcccaagataagttgaagtgagacaagagactagaccaggttccagatattgcttacctgcatggcctcacccctcagattgaccaactgtggtccatcttccaagcttaaaagtcaaattatatacatgggatcaatggcatatcagtttagagaaagatgaacctcaaaaaaaccactcactgaacaatttatcacacaactcattgtcaaaatacagaggttagttattattctctacatattgctgaagctgaca

SEQ ID NO: 249570 - DNA, 331 bp, Glycine max
tttactatcaagcacactctcatcaatcactctattatgattaacactgaatcatctaacaaatcgattcgtagtaaggacaagaaagttatatataaaatctcaccgttaccaaacgagactcggaatacagtcattctactactacatgataagcgcataactgatagcacaaatttaatgatggggaatggtacttcgcaccaacataagtcaatcctaatgatgaggtgaacaaaatgcattatggaagactctaaagtatgctcagaattcatgaatgcaaaggcgactctttcaaccaaggggaatagcttgaaattaaccatga

SEQ ID NO: 249571 - DNA, 348 bp, Glycine max
  unsure (1)..(348): unsure at all n locations
gtgccagcatacaacggggcacaacactcacaatgaatataaagatggatggctccaattcctacaaaggtaaaatcatcaccttcaaattgagccttcaaaactatcatgacatgtggagaaaaactcaggatntcaagtccaaaaagtcaagaacctttatttcaaaacaatacccactgctgaacatatcctattatcaaagaaaaacagcaagccgacgtctcaccaaatgtacccaatatttaactaaaatttaccaaactaccaccttaccaattaactcacttacgacttacaaaaccactaaactgcaaaccacaaacattccccccatcttaaacacac

SEQ ID NO: 249572 - DNA, 343 bp, Glycine max
ttaacatgttggatttaaacaactcatgaaaagttaagcttgattttattataatcctagctggaacaattatcatgtgagtgaacaatatcaatcttccattataacaaaaaaccaacttatttcatggacctagactcatcttccctctaatctcatatgagtaatatttatcctcttcatttcgaaccagaagagacttcaatttccacactaactactcaaacacgaaacataagggaaaaagaattagggtgatttgttcctgatatttccctaataaatgattctaatttataaacttattactgacgtaatcattaaatacacacatgtattcatc

SEQ ID NO: 249573 - DNA, 417 bp, Glycine max
catagaacgcctgcagctgcaacttgatactcattcggcgtttgtttccaactatacaagatcatatggtgaacccccatcacttactgtaatttgtcggatcatagactccactagtgatattataatcatatgctcttaactaaccacatgaaactataacgacatcgcgggaccggcctaagacatataacattatctgcggcatagctcgcagaattcttatcattaccaaactctcaaaggagaatgctcatagagatctgacaacccacaacatttcactaaatggaactctccatcctataatatcggacgttcgctacacatgactatcttgggaggcaagatgaggcaacacaaaaggccggtggaaataacagattttacagatcatacggctactcgaattcgcac

SEQ ID NO: 249574 - DNA, 424 bp, Glycine max
  unsure (1)..(424): unsure at all n locations
agcttgcttctactatatgacatatacttngacaatgttgtgtgatacatacttcgagcatcccttcttaacatgagaaggcatggacaaattgcagtggccagaatgatctcacattaagatctcgatgagcctcaaggcatatagaacctagtgaatatcatatacaagcagatcaatgtataacccttcacagtttatgattactatcacccctatcctaaattcttggatactgttttgccttacaatagggaagggaacataacatatgttgaagacatatctgagggtcttgagaacgtgccatttgactaaaagcaatgttccaaggtcgtagtgctggtaaacaagccattatactcgctctggaataatcatgacaaccgtactgtcagatctttcaatccatttcgggagcgtt

SEQ ID NO: 249575 - DNA, 366 bp, Glycine max
gctgcaacttaaattaatcacacttcgtcacacactttttctatttatatatgaaaacaatctaaacaaaagctatgtatacaaacttccctgctcacaaacaaaccttgaaagtacatgttgtagccagaactttagcaaaaatagttattttgttggttggaaataaaaccagtgaagaggcatagatgattcattcatgccctcgtggaattgaagtgctatatagaccacagtgaatgggattgcagtcctatagagtggcatgataacaggaatcaaattgattatggagggagcccccccccctccaacctagtggatgccacccaaatatctaaccagtgttggagacccttgtccaat

SEQ ID NO: 249576 - DNA, 348 bp, Glycine max
cagcaagatcatgagaatcaagagtgatcaaagagtttgatgatcaccaagatgatgacaacaagctcacaagtcaaaacactccatgataacaaagatgatgatctccagaatcaaagaatgagttcaagactgaatcaagtacacttcaaggatcaagaggaacggtgaattcaagaaccaagaatcaagtttcaagattcaagttccacgaatcaagatcacgattcaagacctcaggatcaagaatccagagaagacttaatcaagataagtattaaaaagccttctcaaaaactgagcagcacatgaattcttctcaaagaacacaggactaaccacccgaat

SEQ ID NO: 249577 - DNA, 201 bp, Glycine max
ccgacttaatcactgcgcgcactttagttgggaggatattttatgttctgaccgtagaattcagtttgggagggggcttagctctaagaaaaaaatggccattggattttggagaactcaataacctgcttgcatggctaactaagaacgcaacattgttgtgtaacaatgtgtgctgaagaaaccctttggtaacgaggg

SEQ ID NO: 249578 - DNA, 126 bp, Glycine max
attttttagcgccacggcgggagggtgaccaaaggcgcatgaaaggccaggacaggcaggaaaacacagaaaacaaaagaccccctgggcagtacagacacgataaagagcgcgcaaacgaggcca

SEQ ID NO: 249579 - DNA, 143 bp, Glycine max
agcttgctctaaattacattgatggttgtatttatgtgaggaggttgtacgccattcttgttttaaagagtagtgtcccactggtaaaactaactttcccaatttttgccttcacaagaaatggcccccaggaagcttgcctc

SEQ ID NO: 249580 - DNA, 279 bp, Glycine max
ctgcaactttgataatatgcccgaacgtcttccttgaaagtataccatttaattcacgagagctaggggttaatttcactgatcaaatatatgcaccaaacggatgtcggagacaagtatgaccttgaatttctgcagcttcgtgtcaattttagcctttcataataatgccccgaactgactctcgggaaagaaataacatcggcttcggaggcttccgatgtcattcgagcaatcctatacttgcgcttaaacgacatcgtggacaagtaaaccttt

SEQ ID NO: 249581 - DNA, 300 bp, Glycine max
acatttcatgcctactctcatagcttatatgctttaacatccattgtcacaccgcctagataggatatctgttaccacattactatattaccttatctttcatacactctttaagtgatactttggatagattcaaccataatttctcttaccttttgctttcaaacctccaacaaaaaagaaccgcaacttatgaaccaacatgagtcatccttaatctattggtaatggcgagggtactagacacaaggaccctttatctagaatcttagatgaagcgagttccctcaacgtatggaa

SEQ ID NO: 249582 - DNA, 420 bp, Glycine max
  unsure (1)..(420): unsure at all n locations
attctctgtttccgaaaaatgcatgcctaaatatgcattccatacttcaaattagcctgtgtgtttatatgaacgcataattggttcccttctaaactatagatacggggacccctccagcattaataagattgaagcatttgacattgccataaactaatctgatgaattatctttgtaggcttgtggtgctatgcctctgcagctacatcacccttccattatatgctcttgttactcaggtactatatgcttttcgttcctgattttcttgtatatgatcggagccaattttgaatgactaaattccaataattaattgctatcagagaactgagagatgcaaatagtttcaggttgatgaggccaaagctcataaagctcaaagaatatcanaggacatccatgataataaccgat

SEQ ID NO: 249583 - DNA, 443 bp, Glycine max
tcacaaactaattatcaccactacctttttctgttatgagctaatccaaacaggcattcccttcattactatctggctcatatttaaggtattcacaaattaaataaaaaaacctaaaattggtggccaaatatactaaagtttttgtgaaacaaatttaacaattagtttaagttgttctgtggcaaaagcatagccaggtatactataaacaaatataccatagtctttccaattccactctttacaattacttagaaattattcacaatcccaaaatggcctatgtttcacttcctattcagagaatcccactacagtagtgttaggtcttgcgctcaatctatataaagagactgaattatcttgtctctctcaatctctcttcccctctctctctgctctctctttaaaagagatgaacacaaccacataacttctac

SEQ ID NO: 249584 - DNA, 296 bp, Glycine max
gctctctatttattagactacggtagctttccttgagacgctttcttgaaaatactttctttaatagcttctttgagaagacttccttgagaagctatagcttaattcccacactcctcttattactaagctcacctccttgagaagcttcctttagaagaatcctaaagaagctagagcttagctacacatacctctcttatagcctaactcacctctctgagagtgaaaacctagacttagcttcccaccccctataatagctaagctcaccctctgacatagaatatgaaatt

SEQ ID NO: 249585 - DNA, 226 bp, Glycine max
gcttggcgaagcaaggaattcttaataccggtgtagctactaatattgggttctctctctttatccacacccgagagacagagcatgaggggtgacatgggcagacaaagtgccagccttctatactgaagagcacatgaacaagggagagctatattaatctctagccctctgatgacgaaatatgatcatggcgtctcaatgccccctcctttagcttatagaa

SEQ ID NO: 249586 - DNA, 294 bp, Glycine max
  unsure (1)..(294): unsure at all n locations
tgactgacatgaacgacagattaaanataaaacatcatattgaattttttaagatacagaattacaaacaaacaaataagattcagactctaaagtaaattctctaaatatttaaaaattaaattaaatcatttaaaataattcaagagtaactcgataatcaagccttattgtatatttttccaaatacataaatgagaaacgaacacttgacatctgttgatacactattgacgttgaaccctctctcgtccgaagagagaacgaacatgtcctctctcgagagagaaagtg

SEQ ID NO: 249587 - DNA, 363 bp, Glycine max
aaatcacgcagctgcacttttatcagcgagaggggtattttttctccatgcaatcccaatggaagcccgcttaacactgctctttatatctcgcattcacatagtgaatataccattaggagcgcatgaacctaagatcacactcaagaacccacaagcaatttcatcattctatactgaagaatcctccaccaaaagtcattctaaccaaaaacctttttctaccaccaccagtttcactatgccaccctaataaccacataccacttcacaaacatgcataaccatcttagcttatcacaattaccaagaagaatttgataaaaatctgtgaattcacccattatgagtctttcttattac

SEQ ID NO: 249588 - DNA, 410 bp, Glycine max
tcttcacatggacttgatggggcccatgcaagttgaaagccttggaggaaagaggtatgcctatgttgttgtggatgattcctccagatatacctgggtcaactttatcagagagaaatcatacacctttgaagtattcaaagagttgagtctaagacttctaagagaaaaagactgtgtcatcaagagaaataggagtgaccatggcagagagtttggaaacagcaagtttactgaattctgcacatctgaaggcatcactcatgagttctctgcagcccttacaccacaacaaaatggcttagttgataggaaaaacaggactttgcacgaagctgctatggtcatgcttcatgcacaaaaactctcctataatctctgggttgaagcatgaacacagcatgctttat

SEQ ID NO: 249589 - DNA, 439 bp, Glycine max
atttatggattgaacctattggaacaagtattatcctgtggttatactcgaaacagacctggcattgaactgagcttcgaacaccacgaccaccaccacagttgaaacttccttcttcgcggtcattatgaccaccagaacctctagaatctgaggaatacatacactgcattagtatctgaggattgatatgaactatcttcttcaataaattgtgagagacttgcttgagtaagattcaaagaaggcgcacaggtgttacttgaagaatcaagattattgtatttactgagtcttagttcctgtgaagaatgagaccttccgcctcttctatggttatatgacggagacgactttaaatgagagcaataattcatctgctcatgataagtaggagcatctttgatagacacacgcttatcgatgaacaccttaatga

SEQ ID NO: 249590 - DNA, 460 bp, Glycine max
agcttgatataagtatagtctatatgcgcacttgatgattttattaccgtcacgtcttctttttgtacttttccatgaagaatatagattttattatggacacaacacaaacatgcgtatatcctaatacgagaaatcatatagtccaaaaccgggtaaacatatgtgaagactgaagatgagatatggcgacatttactgaaactgaatatctatgaaaactcaagtagttagggtaagcccacaaaagataaatgttcctttctatctatagataaaaatatgtcaagaatgcaaaacttattgagggaattcggatgtacttaatatgtgtgaatcgcgtatcaatatgaaagggttttaatatccattattaaggatttctaacactaattattaatcgaaagcaccaccgttgaaagttatactattaatatcgattgaaacccgatgttaacat

SEQ ID NO: 249591 - DNA, 194 bp, Glycine max
ggagaactgggctagggggcagccaacaacgaaaccgaccaacgcaaacgaggaaccggagaccacagcacaccgcgcacaaaaaggaccaaccaacggagcggggcgccacgaacgaaaaggaaaggccggaacgaaaagggaaccaacagcaaaagaaaggagcaaggccggaagaaccgggaacaaccgcc

SEQ ID NO: 249592 - DNA, 394 bp, Glycine max
  unsure (1)..(394): unsure at all n locations
cagcagatcatgatacacttattggactccccttaacaccaacaaagtgacaaccatcttctgaatgtgatgatgaaacaagaagctcacagatnttacttgctcaactatccgctaacaaattaagaaaacatgagccagctgaatagatttggttgcttacaagtagttcaagcgctttttttattttggttggtaattggaaggtgtaaatgaagactcctctttggcttattgatgttctgcccctaggaacactacttgttggtgtgggtgcgaaatctaccggcaagcgcacccgatcgcaaataaatacagatgtctgaaaaagcgtattcaaaaacccgtggtcgagatagaataagcttatgaattgaaacaaaatatttctatt

SEQ ID NO: 249593 - DNA, 306 bp, Glycine max
ctgcactggactgccgttgaaagggtttgtatataaggagggggtactatcctcaatgggtgtcttaatggctgctgtcattaccccacacattgatatcctacatttaaccttatattctttggaatacatgttacttatggaaggcctattaatcagctttacctttactgatgtaatgagagatggggaatgtattaatcaacccgcgcgcggagataacataaaaatggttgtcagccttttcaacccagcttgactatttgccaataaccttatataataattttctcttaaatcatctga

SEQ ID NO: 249594 - DNA, 407 bp, Glycine max
  unsure (1)..(407): unsure at all n locations
catgcattctttctttctttacccaatcctcacgtttgggtttttatggaaacacaccataactaaacgcgccaacaggcatccctatcgcaccatatccaaatctataacgatgggtgatcaagaggatacacaggaacagatgaaagccgacatgtccgctccaaaagaacatatggtcttcatgatggaggccatgttaggaatgaggcagatcatggagaaaaatgtggccaccgctgccgctgtcaattcggctgactaaacatacccaacatatttggcactgcgcaccatccttcatcaaacatattatgacggggaatggacacatgaggcatcatggtaccctcacctggatacaacgagcggctacccttatggatgcccccnctactcaccacccg

SEQ ID NO: 249595 - DNA, 371 bp, Glycine max
gcctatttttaagactgtggataagatacagctaatgaggcttctgctcttcttgactgcaaagctcttgtaaatattctgctgcgtcataatgtgagctctctatatgtcgatatatatatacatatattactaagacgaaagtgggcttttcacactccaagtgcaagacatggaatctgagccctgtcgtgaatttggtgattggggtacacattattactccagctatattatgtatttctattctgaaagcctgaacatttcagttcgcgaatatgtgataacttcgtctctgaagatcaactaaagactgcgtatattagattatctataccaatcgaaacacatgtctttctatctgctctttg

SEQ ID NO: 249596 - DNA, 271 bp, Glycine max
cgcagccgtttgggaggaactcacttttttttggaacgcaacctagaagttgagttaactaccgatcatcacctggagtcgaggagagagatacaagattcaataatccttaaagactttctaaaagaaacatgaaccgttagacaccctcctcccggaaagaaaaacagtggtagaccccaagggccagtaactatacaattctcctattctacgcaaccatataagctgacaaggcatattataaaagaacctgcatccaagtgacccg

SEQ ID NO: 249597 - DNA, 346 bp, Glycine max
  unsure (1)..(346): unsure at all n locations
aactgaaagtncttacactttacaattttttgttagcctacctctcttcacccgataaaatgctgccgaactgcgctacaagcgattgtaaacggaccaataaataacctcacacaaacactctttcacgtgatgacactccataatatttgtaactacggtttcacatcttttgttttgggccatatctcctctgaaagacacacgacaattgcctttggccgctcgacttctcctaaagagctcttaagtaagaacctctgggcgttgattatacacgacaacacacactacgggaccaatgatgaaggaaaaagaacaaacaaagggctcggaacaagggatc

SEQ ID NO: 249598 - DNA, 414 bp, Glycine max
catcctattaactaaaagaaatgcacccctatacaatcaaggtagcgtcattacctagattatatacatgtacttccatagagtatttgttatttacatcacacacgcctccttggctaaatttacatacatgcatactcaaagcatttcggggtaccaacaaatgcacatgcgcccatattggatttctaatacctatacatatacaaacttcatgatgaatcttgactaccttcgcaataaggtgctacaatttatgcgtttttcaagtttttgctacctaaagccgcatgccaattcaagaatattttcctttgctgacataaaatgtactcgaactaataggtatatatattatatgtggaatgtatattctctacataacatgcaacatatctatatatatatatatat

SEQ ID NO: 249599 - DNA, 420 bp, Glycine max
ctgagcatcaacttgatgttgtgtgaatgcttttagttatcagacctaaagcatgaaattatgtgcttatagagctacagatgtattgcaaatgatacatacaaacatgtgtgggccctttcatacaacttcatggaatgctcaacaatattttatatcattgcgtaaagataactcagatatgcatacttgtctcttatacatgaaaagtcacaatctctggatgtgttacaacatttaaagttgaagttgtaaatcaactctacaaaataatcaagagttatacatctgaccatggcggtgaatactatggcacaaatgatggttaatgtgaacaacatgcggggtctatttctaggtacctgaaggaatgtggaatcgttgcacagtacaccatgttatgtgtacctatcatgaatg

SEQ ID NO: 249600 - DNA, 352 bp, Glycine max
accgcgatctctaaacgactgcagcatgcagctttgaaaataaaaggcattactttatctgactccatcagctacataaatggagacgctctgaactaaacatccgaagctctcgcagaaaattaaatggtcatcaactttcacacggatgtccgattcagagcatcactataaagacgctcgaaatagaacaacggaagacttcgagacattcaaatggccatactttacacacggatgttcgattcaggcgcttcacactatccaaccctccaaattgaacaactgaacctctagagacatacacatggtcatacacattcacacagatgtctgattaagggcatccata

SEQ ID NO: 249601 - DNA, 414 bp, Glycine max
  unsure (1)..(414): unsure at all n locations
tgcagctnttaaaaattatattattgccattttcttatatttcttgccatcgtacaaaagtgttgtgttttgagacatattaaaattgacggtagaagaaagatccgttgaccgtagaaatacacccctcccctctctgcttgatnttttctgcacagtcacacacgcatacacaactatcacaacaataaccccgcctctctctttctctctttctggtcacaatcttcaccaaaacctcacccaccctttactctctctattattctttcaacaagttcgttacttcggttccacaataaaaaagaagacaaaaaaaactctaccttgccgggtattcttcaaatggccaatactctccgctgccgatgaagatctccggcgacttcacccgtcctctgcgtccattcccgc

SEQ ID NO: 249602 - DNA, 239 bp, Glycine max
gaatgaaagccatggttgatacatggcggttatgaaaaatcttggaacggatggccggctgtactcatggactaaaattcaactccaaaaactatcccaaggaaacaatgggattgatgagtatttcaggaaatggatgtgcttatgagtcaagcaatgatcgaataagatgaggaggtcactaatgctcgatctctttaaggttagactaatgatatccgcgatattgttgagttgca

SEQ ID NO: 249603 - DNA, 398 bp, Glycine max
ttgcgaaactctcttcctttctcattcaacatggatatcaacaatcagcatctgaccattctctgttgttaaagatatctgaatcatctactacaacccttcttgtgtatgtaaacgatattgttcttgcaggtaacaatattgaagaaatagaaataattacaggccttcttgatcatgcctttaaaaaaaagaatcttggcaatctcaaatatatattgggccttgaagttgcccgaaataactctggaattcatatctctaatgccaagacactctggacatattgacagactatggtatgttagcatcacgccctgttgccacacaaatggattacactgctcgactttccacctcatctaacacaccacttactgaatattcctcctatcgtc

SEQ ID NO: 249604 - DNA, 384 bp, Glycine max
  unsure (1)..(384): unsure at all n locations
tttctagaaaatcattgtgtagaaatgaaatttttctacctcnttggaagaaggaatattggaccaatatatgtaaagaatcaattccaaaacacgattttgctctctatgaatttccattggggaactgaaaaccatgtttgttgctaacaacacattctttccaaacttgagagggagcagtaatttgaggaaagcctatcaccattgttttttagagtaaggatcttcaatccacttaaactcaaatgaccataatgataatgccacatccaagtagaaacagtaactctggccattaaactagaatgaatgctttcaattttaagtgggaatacctgcttgaattcttattataactgctatggcacctcaaacaggata

SEQ ID NO: 249605 - DNA, 284 bp, Glycine max
ggatggcattttttttttagtctacaaaccaaatagtaagtgtggctatacatactttttcatctccttagggtgaattaaaaagaaatcctctaatttgggataacgggcctattgaatttaatcctattttaccttacagggactgtataataaagctttcttaaacaatatttttgatggtggcgcaaacattcttagaattaccttcattgtaggaaacaaatattcacttaagtgcatcccaaccgacgaggctttcatttattcacaatcgaaaacac

SEQ ID NO: 249606 - DNA, 297 bp, Glycine max
gctagagaatgactagaagaacaatgatggtgaataagacgaacaagaggaggagaaaaaggttgacgttcaggacaacgatgtgtctcttcgaggggagcctcttttgccaaacaaaggtgcaaaacgtgttgatgaggctctgtcgaaatctttgagggctatggaatttaaagataatgatgcatttgagatgctgtataacacccttatatggaggaaggaatcaaacatcgattctgctgtggatgaagatgttggctctgactaggcctctgctgcttacaagaatggagt

SEQ ID NO: 249607 - DNA, 443 bp, Glycine max
  unsure (1)..(443): unsure at all n locations
agctgtgcctttatggctctgacctcatcactttctatctaagctttaacctcattgtctctcacagcctatagatatgggagccaatccaatccttgtgtccggactctcagccacttatgatagccgccgatgatcccattactgcttcccctaaactctctgtcctttcttcacgccgcatcccatgccttgcgaactccttggagtaccctcgcgttgtggtcactgaaaccccgtgcgatgaaaggcgtgatgctttcgtctgatggcactcctctcatggggtagccaagctgtcttatggcgaggacgggatntataattaatacaaccccttgctcccatcaagggaacatttggacatccttcgcatgaagatagaatcctgattcttccttccttctagcgagggaaccaattaacagacgcccctccatgct

SEQ ID NO: 249608 - DNA, 392 bp, Glycine max
agtggcgagccggccatggtgcacaacaagattccaatcccaagccacaaaacccacctcccctgtagtccacttcacggaacatacgtactcccacgtagaccatatcctctggtgttctcaacaccgggtccccatgaatcctccaagcttcccaacagcaagcaaaacaacaattacacagcacaagctattacagtcaagcgaaacaagacaaaggacagaaaactctgccaaaacaccaacgcaaaaattacaggtttgcccactcaaagacaccagtaacaactacttcaacccaagtgtcaaccgtggagcaccccaaaattaactggggcccatagggatacgccacatttgaccgtgggaatactaacaacgccaaactattt

SEQ ID NO: 249609 - DNA, 328 bp, Glycine max
  unsure (1)..(328): unsure at all n locations
agctntgatcttccaccaccgccgccaccatgatcttatacttatatttcaatagtagtactgtgatcatcagccttgaatgacggctatattagcaatggatttgaacaatatactatttccttatttggatggcatgattggaccaatattaagtatgttatacgactatgcggagcttataattaatctatgcatgggtgatgctgcatggcttcatgatgctcgtggttcaagatcagtcgtactttattttggaacattgatagacgttaaaaaaacaaatttatcccactttggttttcgagaaccataggggagagaatgg

SEQ ID NO: 249610 - DNA, 443 bp, Glycine max
  unsure (1)..(443): unsure at all n locations
ctaagcactgagctgcagctccaaccacacacacaaatatagggtccattaccctcaattaatagaatntctaggctttagaagcgaaattgagaatgaggtaaatatgaagcaaaatctcacctcacaccagtccataacatcaatctaaactcgctcaaactggattcacgcttaaaatctcaccgaatcaaaatttgactcttcaacacccaaatttgccctagaaatggctctttgtcaccttggtcatttgtttttctctctagcacagtccaagctatctcataagtcctaaatggcatttcaagctaagatttactcactctaacctctaaatactaccaattccagatttggccttccagccctcataaattcactcttttcccactcataacaccacatcttcactttctaaccctaggtaattctaccattca

SEQ ID NO: 249611 - DNA, 459 bp, Glycine max
  unsure (1)..(459): unsure at all n locations
acccctgaatatacaaaanaattgagatattattatagatgatctaataggagatgtttgtatgttgcattaaaataattatttagtcttccacacacatataggggctaactgtttgatccactttattgcaatcaaagatacagatttatacaagtgtctatgataaaacattttcttaccaaaagcattctatactcccaaaattttacaactggaagtgccaaattgtaaactcatactgcaaactcgttaatatttgggattattatttaccagagtcaatatatcagctcaatatctccttacctgtgtcactattgcagtgtaagagctagcaacaacaataacaagtctgttgtcccccttgatagattactagccacccctgttatgattaaccaaatctagttatgtgttgtgcacttgccttaaatggccaattcatgattttcataa

SEQ ID NO: 249612 - DNA, 174 bp, Glycine max
aaaaaaggggcgcacaccgaaaagggcgcagtctttcccaccccaacgggggcaggaagggggggaccgacaaaaccggccacggaagggaagacggcaagcggagacgggacaagacgaagctcaaacctgaaaagccgcaaacggacgcactagcaaaaagcccgcaagaaa

SEQ ID NO: 249613 - DNA, 339 bp, Glycine max
tttcaggaatttctcaaaaacttctcaagattttctcaaaaccttctcaggaactacctatttataatataacatgtgtacacttgtcgtacttcctgaagaaaatctatgagacaccttcatagtctactttcccccacttttatccttcaatctcggctccccctctctcttttttccctcattttttctaccatgagcattctccaacttctatccaaggctcacctggagggaagctcttctccatggttatccctagggatgggcctccttctctcttctcttgcctccgcgctctcctgggaaaacccatgaggactcttaactaaaatcacc

SEQ ID NO: 249614 - DNA, 436 bp, Glycine max
ttaatcactgagctgcagctataaatgtaaggtcttctaattggtattgaattttagactaaattcttttataataaactcactccttgcaatattataccgtgtgattggtacctatgatgatcgcgaacctttgttcgtggaagtagaatgataccagccaagtacgaaaagtgagcttcttttgtggagccgccgagccgacgtgatgacgctgaaaatatcttaagagagagctgcgtattattaatcaactcttccatagctggttccataattacttttgttgaattgaggatgtaaatcacaaatataattatatgtatgaacaaaattactttccattatgtgaatgatgtgtactcgagtactattcccatatatatatttatatatatatatatatatatatatatatatatatatatatatttat

SEQ ID NO: 249615 - DNA, 412 bp, Glycine max
  unsure (1)..(412): unsure at all n locations
gcatgtgaattaggaagcatcaacaagaatcaagccaaggctattgtgcaagcaatcaatggggcaaaacacaccaaatgattatgatgatggatggctcaaatnctcacaaagggtaactcatcacttcaaattgagctttcaaaactatcatgacatgttgaggagaatcaaggatttcaagtcacaaaatgtcaagaacttctattatcaaaacaattaccccattcttgaacatatcctataattcaaagaaaaacatgcaaagacgcacatgcacacaaaattgacccaaaatattaaactaaaaatccgaccaaactaacaacattaacaaattaacacaactaacaaattaacaaaaccaacataactagcaaagccaaagacacctcccccccccccatactta

SEQ ID NO: 249616 - DNA, 399 bp, Glycine max
  unsure (1)..(399): unsure at all n locations
tatcagctacttggttactctccctaagagaatggtatctttacaaagctctcttgttgttcctcaaaagccttgaaatttcaaaacatgctntaaaacaggtgaaatgaagggcagccatgattcataagtgaaatagccactaaggaatcagattccaacatgaattgcttgaatcttctactccgtgcaatttcaattccaagcatgattgcctcaagttttgcagttacaactaatcaataccatacattaataacaaaagagaagttcgctttgccattataatccttgagaactccaccaacaatggccttattcgagtctctattgattgaaccatttatatggagtctgaactagccatttgaaggcttgactcaactaatgcttttatga

SEQ ID NO: 249617 - DNA, 276 bp, Glycine max
gcaacttgactactcgtgaggcagctgcctgtattcttcttatcgctagtacatcgtttcgagcttagcatgcctcatcgtgcttaaggaaggtgcccgtattcacgttaagcaagtgctgcgcgctgagagcgtttttagctaggcctctcttttttcagaattttgcattgtacttcatctttatgattttaatccctcattatcatatctgcacgccatgaataggaaaaaaatcaattcttaacaattaagcatgaataaccgctaaataat

SEQ ID NO: 249618 - DNA, 399 bp, Glycine max
tgttaaagaactaacgtaaaatctagaacatgtttgttcgcacatctttcgcgtgtatgatatccactccacaaggtatgaagtagaggataacttcaaccctataacgcagcgaggcggacaaaagtgggcagttaacttgactggtcatcattgtcaatgcggaacgtattcagcgctacactatccatgctcacacataattgcagcttgaggttacgtcagcatgaactactatcaatatatagatgttgcttatacgaactagcacatcttacaagcttactccgcacaatggtggcctcttgggaatgaagcggctatacctccttctgaagatgcatggacacttatccctgacccaactacaatatctgcaataggtcggacattatcaac

SEQ ID NO: 249619 - DNA, 302 bp, Glycine max
aagaacggtgaacaacaatgaagaacggggaagaatttccacgataacgcttacgcgaacgtcttgaaaacaatatggaaccacctcggcttggattattttcacagaaacaattattctcactaaattcagagaattctcaatacacatgggctgaacccattggtttaccctccttccctaattatagagaaaaaaggaggtggttcccctacctcgccagcaagctggttgttcaacaaatgccccgcctttttgaaacctaagaggctaatgggctggtgctattcacccccttaata

SEQ ID NO: 249620 - DNA, 406 bp, Glycine max
tatgctgcaaacatctacaacagaccttctcatcctcatcagcaaaatcaaccacaatagaacaattatgacctctccagcaacaggtacaatcatgggtggaggaatcatcctaaccttagatggtcgaatccttcacaacagccgcaacaacaaccttattttcaaaatgttgctggcccaagcagaccatacgttcgtccaccaatccagcagcaacaacagcaacagccgcagaaacagcaaacagttgaggctcctccgtaaccttcccttgaagaacttgtgaggcaaatgactatgcaaaacatgcagtttcaacaagagaccagagcttccattcagagcttaactaatcagatgggacaattggctacacagttaaatcaacaacagttccagaatt

SEQ ID NO: 249621 - DNA, 392 bp, Glycine max
aagaagagatgaatgacgggagatgtatattttagcacctatttctgcgctccaacagacctttgacatctgaactttactatccaaacgactccaagttgaaaaaaatgcacacacaagacctctattcataccctaagcgccacacataattggagggaaattcaaatttcacttgaattggaaatcgaatctgaggagccaaactttggagccaaaatttcactaattatgattagtgaatttgagttatggttcagcccactaatccaagatcaactacaagatgctccactaagtgtgctcacgcttcatgaggcatgaaaagcatgaacgacatgcacaaagtgtgactatctgaagagccaatggggcgcataagcaaatgctca

SEQ ID NO: 249622 - DNA, 289 bp, Glycine max
tttctttaccttctcttccattgttgggtcttcaattttctccatggatcttctctcatgtcgtggtctaaagctgcaacatgactctttagagagtccaccaattaaacttgctatagagactagatttgattttctatgggtaaaattcttgctcttggtctagaaccatgaattgtgttgagtttacgttcctttgagctacagcttgaaattttatttggctgaaaccttaaccataaaattcttacacaaataatatagaagaagaaaacctcaaaaatctaca

SEQ ID NO: 249623 - DNA, 360 bp, Glycine max
tgctctgaaattacattgatgattgttttatttacgaggtttatgccatttcttttaagagtagcgtcccactggtaaaactaactttccaaatgtttgccttcccacgaaatggccccgaggaagcttgccttataaaggtccacgaaggacaaggcagccgaatgaactagttccgctccggagtatgacagtcaccgctttatgaacgctgtacaccagctgcgcttcgagaccatcaagggatggtcggttctccgggagcgacgcgtccaactcatggatgacgagtatacttgatttccaggacgaatagggcgcccgcggtgggcattactggttactcccatggcccaattc

SEQ ID NO: 249624 - DNA, 158 bp, Glycine max
caagggctcgggacagaaggatgctacacaccctctagccaagcataacgtgtgaccccaaccgatccatcaccacactacggaaccatgaactttcgaaaaagagaacacggaccaaaaaagaccggacccccaatttggaacgatttcacgaaaac

SEQ ID NO: 249625 - DNA, 394 bp, Glycine max
tcttcttccacggcttattccctagtggatgactcctcctatcacctcttttcctttatcttcgtttgcaactccagtccccatagaagcttctcaagcaagctttcatcaagtggtattagagcacaagagcttcaagtaggtgctccttaaacctccattaattttcagctttaccttctcctccattattggttcttcatttttttctccatgtatttcctcgcatgtcttgtgttgaatgttgttaacatgattctttataatttccaccaattaaatttgctatagaatctagatttgattttctatggctcaaatttcttgttcttgttcttgaaccatgaattatgttgagttttgtcttgctattttttgggctgaaacctaaacc

SEQ ID NO: 249626 - DNA, 367 bp, Glycine max
tcgatagactgataggataccacattgtcttttgttacattttggcctatgaatcattctacatgacagggaacaaacatctaataatatcctcgagtacaacaatgggatgatatagaggagcttccctcatatttgactgtgccctttccaacaccctttaacatatttaatacgcgatttataaaggtatgggaatgaatgacacttattgtaatccaactcttatatagtaaaataaaatgagaatacgaatcagaagtcttagctattgacaaaattattttaaactctaacataaatttaccattaactccctgcatgctcttagtatgaccaggatccatcctaggttgccatgggaaag

SEQ ID NO: 249627 - DNA, 277 bp, Glycine max
gagcaatggtgcaagacaattctccacatccacaaatcacgtataaacccaccatcccctgttgcccaccttcaattgagctcacgtactcccacgtagcccttatcctcgttcctctcaacgccgggtccccatcaatcctctcaagcttccacaacatccaagagattcaacattccatcatcacaaactaacaaaaccaagcaaaacagggcaaaggcagaaaactctgccagaacacaaacccaaaatcacagcttttcacataccaatactc

SEQ ID NO: 249628 - DNA, 356 bp, Glycine max
  unsure (1)..(356): unsure at all n locations
taggctaaattagcctaatactttgtaagctatttaagctgagtctagtccaacatcatggatctgaagatgaagcttanctaaagttagtctaaatctaatagggctatctaaattgagtctattccaacaagagggatctgaggacgaaactcggattgatttagtctaatgagggatcgaggtttagtagtttaagctacaacctagaacacaaaagtctgattgattagaaaaacatttttatatacatcaacttgtttgttagaaaacccaacacttttacctactgttgtcaattttatctacttgcatttcttctgtttttagcctagacttagtttaattctgttcta

SEQ ID NO: 249629 - DNA, 390 bp, Glycine max
ttggacttccaccaccgtcgccatcatcatcttatactttatattacaatgagcactctggatatcagccttgcattatggctatattatgatactatttgaacaatttactatttctctatttgcatggtatgtgtgaactaatattaagtagttatctgactatgtggagtgcataatttatctatgcatggatgtctgcttcatggattcattgttcttgcttcttgcttcatgatttggctgatattttttatgaacattgtatggattaaatttatttgatacgcactttggctttttgttgatgccaaagggggagagaaatgggattaaatcaagaattcacatgagcaatcaacttatttttaagataagcataaattcaaa

SEQ ID NO: 249630 - DNA, 271 bp, Glycine max
actaaaaacacacgctcacacaaatttaaacatttaccccctcccacatactgacccaattatgttaatcattaataactttaattatgagaattatattatagcctggttaaatgatgggactacaagaacatatcactagaatcacatgtagtgggggttcttatcctggaatataacactaacatattgctgctgtcatagtaaaaggcaattgcttactacccaaatgatgtgatccaagcagctataactaagcagagaatttgag

SEQ ID NO: 249631 - DNA, 411 bp, Glycine max
cgttcttgatttatcctcaggctctttaacaagctttgaataatatacttggccttcatttaactgtctttgggcttggcagccatactcaacaaagtactttcgacacctattgtacgttgatttcaccaatgctgatatgggaatgttgcgacaatcctttaaaaccttattgatacattctgagaggttcgttggcatgtggccatatcgacgtccttctctatcgaaagccatcatccatttttcttttgagatgcgatcaatccatgttgctatggctggactcaattcacaaaatttttctaaattttgataaaaaaaatgtgcttgcaaggagtgtacgctgcataaaattatttatgaataacaatttaaagtataaatgacagttaaataaacgtggccatc

SEQ ID NO: 249632 - DNA, 408 bp, Glycine max
tctactctctggtaatcgattaccagaggatgttatcttttaccagcggccaaatacgccttataacagctataaaaatttgaattcgaaatcctaaagctgtaatcgaatacacatttgtggtaaacgattaccagccattagtatacgttttaattcaaattttaaaagctgtaatcgattacacaattgctgtaatcgattaccagacaggaatttcagaaaaataatttcaagagtcacaacttttcaaaggctctactcatgaccaccaatggtctatatatatgtgacttaaacacgaaattgctcagagagtattcttggtccaaaatgtcttatcctctcaaaagacaatgagagagattccaaaagaacttcattgtcaaatgctctctcagaagaaat

SEQ ID NO: 249633 - DNA, 407 bp, Glycine max
  unsure (1)..(407): unsure at all n locations
acatgtggttctatgtggcggtcgggcgatggtgcacaacaagctttccacattcacaattgcgcgcataaacccaccatcccctggtgcccacctccaactgagctcacgtactcccacgtagcccatatcctcgtttctctcaacaccgggtccccatcaatcctctcaagcttccacaacatccaagcaaaacaacattcaaacagcacaagctatcacagccaagcaaaacagagccaaggcagataactctgctcaacacatcaaccataatcacagcttttctcacgtaaagaccacagtaacaattccttcgatccaattcgttaaccgttggatcgactccaaaattntactggaagtctatagtgtataagcctcgcatttgaccgttgggatatact

SEQ ID NO: 249634 - DNA, 404 bp, Glycine max
tgcttcagtataataggaagcaccaatataaatatgttgatgcctactattgatatatagcattgaccatacatgatactagctagagagaatagaaactattgataatagtacactccataggtagtaaaccacaaaaaactttagtggcttgcataactttagttaaatttagcggcttttaatgcttatcctatatatattataatgacataagtatttctaacttgttacctcctaagagattccctttggagtccttactggtttgttaatcttttagctgaaacattgcattttggccatgaggttgatacaaggttgaatattttttataagctaacattgttggaacatcctaattgagcatttgagatttgagatcatacctcaatttacctatg

SEQ ID NO: 249635 - DNA, 262 bp, Glycine max
ctgcactagggggcatgatgcggggggttacagaagacacggatgtgagacgtaggaccaagcgtcagaaaacatttccatggcaagagaaagatcacctatgtgggtggatggcacctgaacgtgtacctctcattgccgcggatgggggataggtcactgcgaacggcgcagcgccattattagactcgagaagaagaaagaatagacaagcttagaaatccaattgttcctctagcctacactttaacaaaactccatc

SEQ ID NO: 249636 - DNA, 415 bp, Glycine max
  unsure (1)..(415): unsure at all n locations
atagaatactcagctttatatgggcctcttgatgttgatgtcactattgatgttgtgctgccggggaagacaaaactaggnggctttcatcaaaatcccttgaatgacacccaattggacatgaccatgacattggaaaatgctgatgttgacaagtatgctgcggaagacttgatatcagacatcaaagcctatgagatggtgtttgatttgtatgtgggtggacacattggttttcaggttgggaaattgcagatgaataatgttccctttctagcatcttgtcatcaaatcaagagggaggatgtggattttggaagaaagcctgaatgtgatgttaagcctgttgctgccacgtaaaattaattatcttgacatcattgtctgtttcaaaagtttgtgttggaaatactga

SEQ ID NO: 249637 - DNA, 239 bp, Glycine max
ggacttaagcaccgccgctgcagcttgggctggaactaatacattttttgtttagttagcccaccttctctgctctttttcgattggcaacccagtccgcttttagtttatcataaatttgccctcaatctaaatttcttcctattgaaaaggaggtaagcctaacgcgtttctttgagatcagcacgctcttttgagtctatatactgcaaatttgtcatctttctcttcctaatact

SEQ ID NO: 249638 - DNA, 399 bp, Glycine max
tgccacccagctcgcccaggcgagcatggttgttttctccagaagcaacagccttcgggaggaatcttctggagggcccaagtgggtctggatgctatttgcacacccatttctactaagtacacccccctgcctttttttggtgattcttttttcgtaaagttacggtaacttacgaatttcgtaacgatacttgttttctttccgtaatgttacggaaccttgtggattacataatcatcccctttttgacttacgaaatgttacggaacctcactaattgtgcaacgatgcttccatttgatttccggtgtgtcacggaaccttacggattgtgcatcaatattttcttttgttttccggcatgtcccggaatttcacaaattgcctaatgatggg

SEQ ID NO: 249639 - DNA, 387 bp, Glycine max
  unsure (1)..(387): unsure at all n locations
ctaaacctcaccgtccacagngcctctgttcttttcgtcactataaacacaagaagcgatacttcggtccactttccattatggaacgcattggcagcggtgcttacccgctgcaactacctgaagggtctcgtatccaccccgtcttccattgttctttactacaccctcatcacggacctcttgacctccccacctcttcccttccggcggatacttcctccccacaccctatacttgagccactagccatccttgactctcgaatggactcttctgtataccccccaactcgtttcgtacttgttcaatgggttggtcttcctgcggaagactccccgtgggataagtgtgacgaggcttgccatgctcatcctcttgaggaca

SEQ ID NO: 249640 - DNA, 384 bp, Glycine max
  unsure (1)..(384): unsure at all n locations
agcttntatatcaacttgtgttattgtcttattttctatcatttctgctttgacataatcccaaacatgtcaattgagagagaaagaaaaaagaagacactcgttgaggtgaagaggtattccatacgccaatggcattatacttgggacatgagtggataaattctcctttggtgggagccattgcataatcatcaacgtaatttgttgtaattgaaatccaagaaggccagcaattagttagatctaatcctctcaattgatactattatgctttctttcattcacactaacttttcagcatacataacaaatatggatatttcctattaggtttcataagttggtcatgactcgttatatcaaccttctcacagggacaca

SEQ ID NO: 249641 - DNA, 323 bp, Glycine max
tgcccttttacgcttgctaaataattcaaaacctttctttggacattaacgctgttgctaagtatgattcgcgaattaaaactaacagccgtgtgtgtgtttaccgaaaatatataattgttatagaatgtttaactcttataatttacgaatgccctcaatttaaatttccctcgttacctaaaaatcgggcgttaggataaaatatatacatgttcgattttaataaaattgtgttccgggtaagtaagatacaaagcctcattctgcaaatgttgttgtttaacaacagaattgactgtcttcctttttaaacctcttta

SEQ ID NO: 249642 - DNA, 322 bp, Glycine max
ttctcaagctggcgctgggagcagcatcagaccatttccattttttgctttagaacccacaagcacgctgacgtcttgatgccataccatttgagtgagacctcgttgccttctgcttaccatgtggtactgtcccagttctgaattactatttctcaacattaacattctcaactatggagcttcaccttgatctctcccctcttgagagtttttgtaacatcttctacccgacttatatctcactgaataaaggatattacattcttactctaattcacatcgataaaagggtcccctatcacattcactctactattac

SEQ ID NO: 249643 - DNA, 257 bp, Glycine max
agcatgggtgatgtcgcgcgcactgatgggtattatgaggtgtttgctggggtttgacccacgccggtgttgaagagacggcatgggcatctcctttttccttttgcccctgtcgccccgattcttttggcatccacgcttgtggaggaaacgtaatcaaactttcctctcttcaatccaacctcgattctttccccgacaacaccaaatccgaaagctggacggcatgtaacccactagcttctcatataaaacac

SEQ ID NO: 249644 - DNA, 393 bp, Glycine max
tgaatctattggcagcggtcatggttgttgattcgcatgcttacagtggattgagagtctcaattttagagtgactgagtgacacaggtatagagaccagtgaggaagcacaacaccacgtaacaaacaacttttatgtcttatgaattagccattatttatagggttttttatgttatattttaagtggcggggcgggttcggggtcggggcggatgttattaatcccatacccgtacttgtccttgcttttggttatcagggaaaacccgaacccgaaccaatacccggtcaactcgggtattacccgcccaagttgggatggattcaaacgggtacccatgggtaccaagtttattaccatgtctaacgagcaccttaagtctagtatta

SEQ ID NO: 249645 - DNA, 298 bp, Glycine max
  unsure (1)..(298): unsure at all n locations
agcttcttgcgtagccgctcttgttgctcataatattccacaaacaaatccctcttattactagctattttgaattctttagttcctgaatgtataaccttcaaatngttgattacatgtaatagactttttataacatggttgccccgaatcacaattaaaaagcacaactaccaatctttcagagtcctttnggtaatttgtcttgtctccttatgtggcgggggtgtgattaataatattatactttggccttccaaaaaaaacttatgactgatccctctttcattaatcctat

SEQ ID NO: 249646 - DNA, 393 bp, Glycine max
tgtcctaaagggaagctagttattaactcttttctaaggaaaaacgttgtttctacttcaaaaccctttgaactacttcacataaacttatttggtgcctctaaaactatgagtatgggtggtaattactatggcttaattatagtagatgattactcaagattcacatggactatgtttttgaaaaccaaagatgaagcttttgatggtttttgcaaacttgccaagggcattcaaaatgaaaaaaggtcttaacattgtttcacttataagttatcatggaggtgaatttcaaaatgagtctcttgaaatggtttgcgaagaaaatggaattcaccacaacttttctaccctaagaacaccttcacagaatggtgtcttggagaggaaaaa

SEQ ID NO: 249647 - DNA, 374 bp, Glycine max
tcttatccaaagctcattttggttttgaagctttttcttccaaggctaataccctatgggatggcaccacctcttacctcttctcctttgactttcgctgcatcatcatggtggaaaatcaccattaaaagacctcattgaagcccaaagatccagccttcatagaagctccacaaacaagcttcctcagactgtacctcataaagcaagtcataagaatatgtacttcctgcaacaagggtaaagcatactgactctaaaaaatcaacatcaataggtacaccacccacaaaatcaaatcacactcaaattcaatatcactcctctccataaaattatatcttggaactaattccactccgatttcatttacg

SEQ ID NO: 249648 - DNA, 383 bp, Glycine max
acgtcatctacttccctcaaggtcacagcgaacaggttgcttgcttctctcaacaaaaaatcccactcttcaatccccaactatcccaatctaccttccaagcttctctgtctcctccacaatctcactttgcttgctgatcccgaaactgatgaagtctacgctcagatcactcttcagccagtcccttctgtaacaatccatacttctcttcctccctccctccctccattcatcatctttgcttctaatcacattcctttccctttctttttcagttgacaaagatgctctcttgcgatctgatctcggcctcaagatctccaagcccacacccgacttcttctgcaaacaacttcaccgcagcgatactagcactcacg

SEQ ID NO: 249649 - DNA, 406 bp, Glycine max
  unsure (1)..(406): unsure at all n locations
tgctcatttcattntaatcctttcctctctcttacatattataagtgcacaacataaacttgagntttcaatttttttcttaatgagaccactatttntcactatgggtattaattaattcatctagattcttagattcttattcgtgaatcttatgattaatttcacagcctaatattccatttaaattcatttatactttaaattataatatatatacaaatattttttttcacttacaaataaggtaaataaatattgattgttaaattttactatttatgattgcattattcaaacttactcatcactctcgtgtaaaaatatcaactcattagagatgcctcctattatcatgtgaatatggggtgtgtagcaagtaaaatgttaaaaaaaagttataata

SEQ ID NO: 249650 - DNA, 269 bp, Glycine max
gaaaccccggcgcaaagaatcaagcctagcatcaagctgaagagtgagaacatggcgcaaatggcccgagaacctggagaaaccaaaggccaaagaaaaacaccaaacagtgtgagggttataggcacatatgaccaacctgagagtgaaggatcatacgcgcaaggctgactgaagaccactaatgctgcctagcaaaagacttgccaacagtagggaatgaagaaatgggccccatcatgaggcaagaaactatcacgggacccgac

SEQ ID NO: 249651 - DNA, 417 bp, Glycine max
cctatagaaactcaagcttaacaaccagctcgcttgggtgagctacccttgtacattaggctatttcctatgaatagccatgcaagggaagggttttaagggttggaaaactgacgaaagaaagaaaaaaagcgtatctaggagaaagaggataagaaaaaagcaaagccaaggcgctgccaaatcgaaccgtggattgtttcctacatcatttctcttgctagccttataccctgtgcaacaatcgattagtatttcttaagattttaatgtaatctatgtacccttatacgtcctttgcgatattatgtgtgcatttatcttcttcacttatgagtggtaatttcttcttatccgtaaggcttaaatgtaatcggtcactaatgtcatgaaattgcgtttttactatgactggaa

SEQ ID NO: 249652 - DNA, 286 bp, Glycine max
acatccacaaagcgcgcatatgcccaccatccccttgtcgcccaccctccaactgagctcacggactcccacgtagcccatatgcttgttactctgaacaccgggtccccatcaatcctcccaagctgttccaacatccaaggagaacaacatgcaaacatcacaaactatcacagccaagctaaacagggcaaagacagaagactctgcccaaaacaccaaccaaaatcacaatctcttccacttaaagaccccagagacatatccttcattccaattcgtaacc

SEQ ID NO: 249653 - DNA, 407 bp, Glycine max
ctctaatgggcctagatggccccatgactaattatcattccctaaattgatccttccaccccccattctgagttttttgcttatttccttttgaaacgtcacgaaatcttacggatcgcgtgacaattggctctaagcagttcaatgtgaccagcaagaattcgcatgtctacaaacaaatgtcctcgggcgaaattagggtatgagaatttcccctctttacttatctcttattggaaataaaagggaagtcaagataatacactaatttcgttcgagccgaatttcctcccgaccgatcattagctcaatcagcgaaacctttcaaaagaaagagcataaaagacattaggcgcattagcaaaagccttggtgccttgaaattgataaacatggataactgtgat

SEQ ID NO: 249654 - DNA, 404 bp, Glycine max
tctatctaagcataggctcgaaacatcaaggattgtactgtatttaataacagagagctcgaaacaaagtctggaatgcttggtatggcagatacaaccacattggataatccagatcggtatagaatggatagatcgtatctcatgaggcgagcaaggtacatctgttattctggggctaggaccacccaagctaatagctcattgacacttcggtgatcggtgataatggtgagtgatggccctagagataatggcaccatttttttactgcagcggtgatggcgaataactccctgacataagtggaagcaagaatgagtatgggcctgaatcgttactaaaaagggcgatagggtgtctgttttgcgagaggatcacgcccataccaactcgagatgtta

SEQ ID NO: 249655 - DNA, 391 bp, Glycine max
tctattaacaagctgatactctattctgatattccaactaatagttcggttgtacttgatagcatagctatcaaatcaccttagataggatcatcttatcaccactaatctatatattttaaaaatatgttgattctaggagatagctttccacagctatcaccacttgtttatgtatacatgaaaacattcaagagataatcacactcagattattcccctaaatttctttctttaacattgccaatatagctgtcaggcagccaaaaagtgtaggaataagtggtcattggtctcaaagcccataaagatgtagtatgtggtacatgggaatgggcatagtaaccaatttgataaaaccttctcgctgacttcagtttataactgaaca

SEQ ID NO: 249656 - DNA, 405 bp, Glycine max
taaagtatgcccgagtcattcatccctatgagatgttgttgaagtattggcgatcagaattgccattccttggattatagggttgaaccaagctcatgcttttacaaaaaggttcgtcaagtcaagttgaaatatggaagtaaccgtcctgcaaaattggggcaaaagatgaattaagtcacatcactgcttcgtctactgccaaacatatttaggattgttgatgtccttgttacttccagtttcaccttgacaaagatgtcatggaccatgttgaaaatctaaattgattcaaccccatatcctgcgtaaaaattcgcaatacttcgactgtacatcattcgcatgcatccatgcttttcattggttgcattgctcattgcattctttccttgaaaaataaaa

SEQ ID NO: 249657 - DNA, 391 bp, Glycine max
ctcatgcattctactatatttttggcatagcaataaccaatttatttgaaatttgatattcatgaacatctgtatcttctcacacagtcaatggttagattgatgaagaacacactaaatatgttactcaattgccaaagtgtataaattatttataatgtcgtccatgttttactaacatgggcattactttggaattaattacttgctatgaaataaaacattgagacttcatggacataagttccacctaatagtgttcagcaataatgcaatgttttaatataacttctatcaatggataatctacaggttacggtgcctcaattaataaaaatattgttccttctatgtggattatgtaaaaaaaaagaatataatttttgggtat

SEQ ID NO: 249658 - DNA, 379 bp, Glycine max
acgcttgggagattgcataccctgatcaaaattctatgtgtcctcctccaccaaagggtaacacaaaaggtgcatcgatgaaactgatgaacagatacccacgggtcacaaagcgtgatccatcttactgggagtatgtagatgcttttcattctcaacaaagtagcaattcgtcagtgaggcgtagtgcatcatcttctgaccaacccaatccaagaaggatgatgcctatgttggatcaatttcatccatttatccacgacttcattgataatattcttgatgtcgaagttgaaggaaattaatgatatcggtcgattgccgatttattatgtatgggtgaagactcttggttgttggctcacacccatctgcttat

SEQ ID NO: 249659 - DNA, 404 bp, Glycine max
tataaaactccagctcaaacttgccatcgcagcattagggtctcttaataataatactccgatgcgtgcacatcttgtcaagaatctatgtaatatgtgtaatccagagctacacaatagtaggcttcagatgccaacactaatcaaggagtatattgaagaggtatcaactcaattgagaatggtttgcaactctgattcacaggagcttgccttggaataaaagctttctttcatgcatgaaactagacacccatttgggaggactgctttgttgttaaaaggaggtgcttccctcggagcttttcatgttggtgtgggtaaaacactggttgaacataaacttttgcctaagacaattggtggtccaagtgtcagaaccattaatgtgtcctaattgtagc

SEQ ID NO: 249660 - DNA, 405 bp, Glycine max
ggacactaagaaactcaagcttgtacgtcacagcggggaagacaggtcgggctttagatgaaagagatccaaaaagcactacgagcatagggtgcacacatggggaacacaaccttcgtaaggatggaaaaaagtagacgataggcactctttcgacctgtgaggaagaatatgaaacaactacttaatgtgtcagccgagcagtctgtctcaagaatttactaaaaaaggtgggcacgtcacgagaagagttaaccaagatctttgtggataataagccaggcattgctctagcaaaaaatccagtgcttcatgagcgaataaaacatattgatacccattcccactacataatggagagcctaccaagaaaggatatacatgtacaacatgtgaagtctcaag

SEQ ID NO: 249661 - DNA, 315 bp, Glycine max
  unsure (1)..(315): unsure at all n locations
agctatgagtatttgttatttcctgatttctttgtattaaaggttcttctgaattactaatttgtaggtgcctgtgtatattggtgcacaagttttggcatcagagagtgctgcattcgctctgaaattaatttttcatccattcatgagcggnggagtgacggtcccttctgtgggatatgggcaagctttcgctgcaaagttcatgggcagctttactcttatagtcgttgtcactgcagcggccggcggcacaagagttgtgagttatttactctactaaccactactttcttcatctgataattaagtaac

SEQ ID NO: 249662 - DNA, 318 bp, Glycine max
  unsure (1)..(318): unsure at all n locations
agcttcatgatgatgatgaatctatattgatttttgtgggtntgatgataacacaggtgatgacaaaaagcccaagagaatgatttctagattgagtcaagaacaattcccaggagaatgatttctagattgagtcaagaacaattcaagaatcaagagaaatttgatttcaagattcaagaatcaagtttcaagattcatgactcaagagaagactcaaccaagataagtactcaaaagtttttcacaacattgagtagcacatgaagtttcacaaaagcttttaccgaagagtttttactctctggtaatcgatta

SEQ ID NO: 249663 - DNA, 395 bp, Glycine max
ttttgtacaaacaatctttactattataactgttattttaataactgaaacataaagctaactaaataactaataactaaattgttcatgattttcagaaattaaaacaaatttcttttaacatcctgctcatcctgtggctgatcttcatttaaatccaacactggagcagcaggtacattctgaagaatgggctgctctagctccattgctggtactgatggcatagtgtcctcagatataggtgcaagggatggctctggcatgggatctggtgaagatacctcctcctgagccatagatgtatctgcagcaattgaagagggctgatgtgtcattattttctcctatttcttaaccctctttgtcaccattttaattactgattagcctta

SEQ ID NO: 249664 - DNA, 310 bp, Glycine max
tttttatagttggagcttggtctcttatctaaagagcttttaaaaaggtgagcttgaccttttgtagaaacaagccgagccgagttgagccttacataggccgagccaaggcccttgacaagctgctcggctgattttaacccctatatacaatacgtccgttgaaactcgatcttccctttcttgaagccttaaaagaaatgtcatcttatgtcaaattcatgaaggaattgctcaccaaaaagaagtactttgaaaaacgcaccatcatactcaaagtgcattggagtttatacttcaaaaaacttta

SEQ ID NO: 249665 - DNA, 189 bp, Glycine max
  unsure (1)..(189): unsure at all n locations
gttgtgtcttcgcatagataacctcggaatgattataattcagagtttccaacncattagttaatataaacacgaaaaatgtattactccttaaggggttaccacgcaaattaaatggaatactacctaatggagcgtcgaagctcatgggttcccaccttattatattcactactaaaaaatacactt

SEQ ID NO: 249666 - DNA, 376 bp, Glycine max
gcacatttggaagggtaatgaaacatcgagatgatgcgctccatgagaggttggatcaaatggagaatagagatcataatgaagaagaaaggaggagaagagggaatgatactgttcctaaacaaaaccgaattgatggtattaaactcaacattcctccatttaaaggaaagaatgatccggaggcctacgttgagtgggagatgaaaatataacatgttttctcatgcaacaactatgaggaggaccacaaggtgaagctcgccgccacggagttttccgactatgctcttgtgtggtggaacaagctacacaatgagagagcaagatatgaagagccaatggttgatacatggacggagatgaaaagatcatg

SEQ ID NO: 249667 - DNA, 405 bp, Glycine max
aagcttgagatgaggcactgttgaagggcgaaactttttgcttttatagttgaccacagagcggtacctggagatatgtcccgggggtcaagataccttggggacgtcaggtggggtgctattgcccaaaaccaatgcttgaccaatcccgactcaacccgggcatagtttgacaatgagaacctgtgatgtacctaaacaggcgaactcttggctgcaacaaataaaaggaacaaagaccacaaagcaaggaggcttgtggtggctggccagctgtgaactttgattgatatgcgggttatggcctctggtaattgattaccaagggtaggtaatccattacaaggcttaaaattgaagacatgaggctaatatggtctctggaactcattacaccgggtgtat

SEQ ID NO: 249668 - DNA, 365 bp, Glycine max
  unsure (1)..(365): unsure at all n locations
ctgcagctttgatttgacacgagcatacantcatatttatagataagtatacatttacagtataccgacagaatccaatttgatatgttctataaggctaaaaacaagattacattattaatatgctttacaaaataaatatgagttaaaactcatataattgttatatataaaataaatacaaactaactcttaagaattactattacagcactattatataacatccattacgattaaattattgtgagaacaattgctaaaaaagaaatgataccagagcaacaattatttcttttatccataatatagaaatgggctttgagagaaacttatataaatatcctaatatatatatataatta

SEQ ID NO: 249669 - DNA, 319 bp, Glycine max
actcaagctcgtcatcactatatgcagggcatgcagcaagcatgactttggtggaaacacagcaaggcaataaatcccgatcgaatatgcacaatgagaagtggactacaatgcttagtgcaatgatattgtgggtcataataggcacaaacatgtataggcgctacttttatgtcataagcacaatcttctgtgaatgagccactttttattacaaatactacatcctttgcgtgctagcaataatgtgtttaatgtacatagaaccaagtatagagtgcctctttaaaaaaaaagggggtttaaatgcatcttgcga

SEQ ID NO: 249670 - DNA, 339 bp, Glycine max
actaatcccaaatatggcttctctaaaccctaaaatcgcacactgtactacctacaacattggcattctcacatttaaccctaaataaccttccccatcatctctaccagttgtctatcaacaaaattcagcacacaaacatcataaagcatcatcataaaaccctaaaacataatgcgtgaatttggctcacatcaaacatgtcaagtttagcatgctttcaacaaactccttcacaaataactaccataagggcataacctagtaagagaacgcatcatatctctcagaaacccattcccacgaaaaaatgtggaagaagccaccaaacctgaaatc

SEQ ID NO: 249671 - DNA, 396 bp, Glycine max
  unsure (1)..(396): unsure at all n locations
tctcaaggaggagagtttaattattaagggttgtttgtanctaaactctaacttctcaaggaagttttcttcaagaagcttctcaaggaagttttctcaagaaagcttctcaaggaagctacctagtctataaataaaagcatgtgtaacacttattataactttgatgaatgaaagtcttatgagatacacttcaaagttccacttctctccttcttttattccttcaatttcgtgttccccccttctctctttcttttcttccattgaagcatcctctccaagcttcttatcccaggctcatcttggtggtgaagctccttcttccatggcttattgcttaatggatggcgcctcctctcacctcttttcctttgtcttccgctgcatctccat

SEQ ID NO: 249672 - DNA, 407 bp, Glycine max
  unsure (1)..(407): unsure at all n locations
agcttttgcaactattacacttgaccataacatataatntcttcattaaaaatatagatagccaattcggagtcctaaaatctatagttactaataatgggacccaattcataaacacaggattccaagaattaattggaaggcttgaaaataaaataacacttcatctttgttgactacccctaaacagccaaccaagttgagggagtcaataaggagatactcaaaggctcaaagcactctgtaaaagactaagtgaggaacagagaaattagggtaagcacgattaacaccgtttatgtgaagattaaaccatgtcacattcctttacaagaaatatcatttagctacatataacaaagtatattcatcaaattaagacctctgagcttataagcatcatgaaa

SEQ ID NO: 249673 - DNA, 371 bp, Glycine max
tcctaatggtatgcctaccctttcacctaatattgtatgcttactgaaatgctctttatatggattgaaataagcaccaagagtatggtttgaaaagtttcgctccacactacttgtttttgaattcactcaaaggcagtatgatccctttcttttcctacaaaggactcctaaaggcatcgtggtgctacttgtttatgtggatgacattgtgttcactggtttagatcaagatgttgtttctagaatcaaaaatcagttgcattcaacctttcagatgaaagagttaggccatctctcttatttcttaagtttaaaggtgcattattatcaccaaggcatttttctatgtcaacacaagtatattcaag

SEQ ID NO: 249674 - DNA, 192 bp, Glycine max
gacctaagcacgaggagcagcattgcttctaaggacccctttatacacataggcccaagaaaacaaacaaactacaccaagtaaggggagagacaccctggaatagggcggatctttaccaaataccttcaaaaacagctcttataaaaaattcggataactcgaaacgcagcaatcatccatattatgggg

SEQ ID NO: 249675 - DNA, 242 bp, Glycine max
agctttgagggtggaggatagacgaacagtgctatgctatcaaatcgtggggcaccagactcgatggtggaggacgcatgactagcgctaggcaataatatcatgggtctccaaataagatttgagggtggaggatagacaaacaatgctaggcaatcaattcctggggctccacactcgatggtggaggacgcatgaaccgaactaggaaatcaattcatgggacttccaataaaatttga

SEQ ID NO: 249676 - DNA, 399 bp, Glycine max
gtcaaccggtcttcgacgatcttcattcgattcttatcgttcttcgatcttcaacgggtaagtacctggaaccaagcttttcgattcattctatgtacccgtagtggtccacattgagtttcgtgcatttatattctcgtttcgtttactttttataccccctgttgacgtgcttaagccattttacttaagtcgtttctcgcttaacttaaaaataaaataaatttccaccgaacgtttgaatcgtattatccattaacttcggttaaaataaattccgaccgttcggtcatgccgtaaccacgttggaaatcaaaaaagaggtaaaaaataatataaataatcaaaaaaaacatcttttagttaaataaagcggaatatcaatcggacgttttctct

SEQ ID NO: 249677 - DNA, 330 bp, Glycine max
agcttccgcagaaatcccttttcttgtgtccattcttagcatcatctgcagaagcaaaatcaagagaaattaactgggcatcacaacaagagttaaataattaagaatttctttaaggaacaacaatttatttcctttctatgttctccaatataaattaaggttaacataattacattatcgaaaatttaccttcatggaaaaatataagcaattagaattttggatttacgtttttaatcaggaggcattgtaaataaaaagtgtacaagaacacggattctaaatctaatgggaaaaaaaagggggagagagagagagaaaaggatg

SEQ ID NO: 249678 - DNA, 392 bp, Glycine max
tgtattgaggatatacttatatattaaaattctttttatgacaactgcttttattttattatttatttttttggctaaataataagtttagaacctaaatgtagcctttctgtaggtaaggctgcttacagttaccctcccctaacccactatgtcacccattttagggggaagtcaggtttcaccattctaatgttaggacatgtcacaagattgactgagtactaaggacttataaagacttcctaatgaaggaccaccagtaggatttgagccaagaccttttttgttgatgctgtttgatcttagcagttgagccaacctccttggcaaacagattagtttgacatgacagagagtggtggtgaaatggttggggtaactgggaatct

SEQ ID NO: 249679 - DNA, 178 bp, Glycine max
  unsure (1)..(178): unsure at all n locations
agctaccttnggtatatttttgcttaccatttttctctgccttactcacactctcctggttctcatatttgaagggcgttctgatctcgggttttgaaattattgccctaatggtttacggattacccttccttgagctctccattcctcgcaatttgcgtcatttgaaataaatgat

SEQ ID NO: 249680 - DNA, 343 bp, Glycine max
ggtttgagggcaaaaagctatgcgacacggatctttacgttacactatggaccaccaagttacgcctttgtaagttttcacaatgggccttggaattggaaaaggaaaacacttgctattaatattcccaatgaagtgcgacagaagacccaacatatcttttgtttcatgaaaatatcgaggaggcctacatttggtggcctcctcgggtgcatatacgacaaaatctgttttaggtggttgaccgtgagactactattctccttacctgccaggaaaatttggcttgggtcttgaggctgccattgccagaaaaccttatacacttttatttgcttactta

SEQ ID NO: 249681 - DNA, 408 bp, Glycine max
  unsure (1)..(408): unsure at all n locations
ctggcggnctaaactatttccttggcgagagtattcatcataatatgctctcttcagcgttacttggtatttattttccaataaaatcaagtccttttacttcaaaatgattcaaaaattggaaaaaggtacatagtgaaaaagattgtgcattttcatctcatgtgggaaagaatctgaattcacctcataatattgctcttaactactatgatgattttaagaatcaatctttccatattgataaagtgttatctaaacaaaacgtcacaacaaattttgaacaattggctgtgtcttaaagtctctattgatgttgttaaatggttgaaatttcaagcttgtgctcttaggggacatgatgaacgtgtgggatctaaaaatcgaggttattttcttgacatgata

SEQ ID NO: 249682 - DNA, 216 bp, Glycine max
cgcgcgcacttaataatcaagggaggttttctaccagacaacaaaggacggagagaaaccataacattacgcaaaaagtgtcaagaccttcagcaaaccaacaactgaccaccgcaaacatagcgagaccatagcatagcccctaagggagacctccatgcggataacaaggtcccaaaaagggaaacatccggaaagaaaaaaacacccagaaag

SEQ ID NO: 249683 - DNA, 267 bp, Glycine max
tctcttacatggacttgatggggcctattgcagttgaaagccttggaggaaagaggtatgcctatgttgttgtggatgatttctccagatttacctgcgtcaactttatcagagagaaatcagacacctttgaagtattcaaagagttgagtctaagacttcaaagagaaaaagactgtgtcatcaagagaattatgagtgaccatggcagagagtttgaaacagcaatttactgaattctgccatctgaggcatcactcatgagtc

SEQ ID NO: 249684 - DNA, 407 bp, Glycine max
tgcttgtggggcttctatggaggctggatctttgagcttcaatgaggtcctttaatggtgattctccaccatggagatacagcggaagacaaaggagaataggtgagaggaggcgccatccactagggaataagccatggaagaaggagcttcaccaccaagatgagccttggataagaagcttggaagaggatgcttcaatggaggaaaagaaagagggagagaaagagggagggggagcacgaaattgaaggaagaaaaaaggagagaagttgaactttgagttgtgtctcacaagactctcattcatcaaagttacaacaagtgttacacatgcttctatttatagactaggtagcttccttgagaagctttcttgagaaaacttccttgagaagcttctttga

SEQ ID NO: 249685 - DNA, 236 bp, Glycine max
tacaatcaacgctacactctatgatgttgatgagaaacaattctcaaacgcagccatataagattggctgtgaaaactaaaatatgcagctcacgttctggatgacttcattgacgagtgtgcctatgaaggattggggctggagaaccaacgggtcatgtgtggtccttcagacaagggacaacggtcttgcttatcctctttgcatcccaagcgtgttgctttccgtacaaaaa

SEQ ID NO: 249686 - DNA, 406 bp, Glycine max
tataatcttcctgaatacctaatgacaacaatatatcgtattgggattcgtaagtctctgctgtgctgccacacggactttgttctagtttgtactaaaacccatcaactagaaatcaaaattcacctgttttccttccacacttaagtgatcctagaaaaccctaatcctagagcatatgacaaagaaaccacaatcctacaagcatttaagccatcaacaaaaacataacacaattgaaaattttcatttaaaatcttattgcatatacacactctcatatgtatgcttgatgtggtgcatgtaaatgtgttttagcaaacatagatccaaatatatattgccaaatgataatattagttaagactagcaattacaaaagtttaaaacgcaatgtacctcatag

SEQ ID NO: 249687 - DNA, 213 bp, Glycine max
attatgaaaacggtaaatgttggtacgcgcttagatgagtgcgtgattcatgtgttaatatgattgatattgaacaacgaattttaaatgataaagtgtgtgaagcgaagtggatttgattaagcgaactatataataaaattttcgaataatttcgcttatgcccttgttattcggcccttatttaaaaatgcgatacctacctcatgtgga

SEQ ID NO: 249688 - DNA, 416 bp, Glycine max
agactactaagctccctttgagtgcatactttatcagtttcacatcttctttttcatcttagtaactgacataacccatttgcaacacttgttactcgaaccatccaagacccgatgaaaccaaaagctaaaatagttgattacatatcaataatttttgtagtcggttttgagcagattaggtctttatgtcctgaatccgattgtacctagccatttctcacccctactttagcttaatcacactagtttgttaattgaagcgaaaatgagtaaacatatcattattctaatttatatttatgtgttttataccttcatcaccaaacttacctatggccattcaacaacttttgttcttagctgtggaaaataagagtttccttaataatttaatgataatactcaacacaaat

SEQ ID NO: 249689 - DNA, 346 bp, Glycine max
  unsure (1)..(346): unsure at all n locations
agctntgtgaagctnctggtttagctttatcctattttactcaaccatttgaagttgaatgtgatgctagtggagttggcattggggctgttttgatacaaaacaaaaggcctatagcttatttctcggagaaattgggaggagccagattgaactattgcacctatgacaaagagttctatgccattgtgagagctcttgatcattggaatcattatttgcgttctaatcactttatattgcattcagatcatgagtcattgaagtatatcaatgggcagcagacgttgagtccaaggcatgctcaatgggttgaatctcttcaatcttttaatttctcttcaaa

SEQ ID NO: 249690 - DNA, 387 bp, Glycine max
tattgtcgtttgaatttgctcaaatcttctgttctgaatttcgagcatctccatatactacgggaaacaatcggacatccgagtaaaaaggttttgttgtttgaattttctaagaggttatgatttcaattttgagcgtctcgatatattacgagactcaatcaggcatccgagtaaaaagttattgacggtagatttttcttagagcttctatttccgattatgagcgtctcgatatattacgagattcattcggacatccgagtaaaaagttattgtcgtttgattttgctcaaagcttctgttatgaatttcgagtgtctcgatatactacgggacacaatcggacatccgagttaaaagttattgacatttgaatttgctcat

SEQ ID NO: 249691 - DNA, 134 bp, Glycine max
agcttgtcattggaattgcgaaagccccactctatcattatgattagtacctgacatctcaaacaaacaaatcaaacgtaacaagacaatcataggtgctgtttgaatacctcacccactcaagtgtatcacac

SEQ ID NO: 249692 - DNA, 354 bp, Glycine max
  unsure (1)..(354): unsure at all n locations
tgaattcaaatttaatagctggtgaatcatttttggcactggaatcatactcctctggaatcataccagaagatattcttgtaaaactttttacttaaatatcttgccaaacctcttgtactttaattggactatccctcctatttaatataccttttttaagactagagacatgctttgatcatccatcatgaatatctctaaattcctttgctctgaataaagctttagacgcatgtgaacctctcgcaatctcanaacaattagcttgatctttgttacaatctccccttttgtgatgaaaccctgaatcagaaactattccagagatgcacggcaccaccttatccccta

SEQ ID NO: 249693 - DNA, 408 bp, Glycine max
  unsure (1)..(408): unsure at all n locations
tgatcaaaacanagtctatacattccagcccactcaatttatacaactctcattcatttcaaacacaaccattcatttcaaacaaaacacaccactgaaacatgattcaatcatttcactgttcaaacaagctttttgtacaagcaatcaacactaaaacaacagaaatttaaatgattgaaatttaaataactgataaagcataaactaaataactagcatgaactaaataacggataaaataaattgttcataatttgcaaaattttaaaaactatgcagaatttaaaactcctaatcatcttgctgctaatcttctgcatgctcattcagatccaacaccggagcagctggtaggtcctgaagaataggttactctaactgatcgaggccgtacccgaatcaaat

SEQ ID NO: 249694 - DNA, 378 bp, Glycine max
aagcttaacattcaatttcgagcgtctcgatatatttcttgtactcaatcagacatccgagtaaaaagttattgtcgtttgaatggcctcggaggttcaacattcaatttcgagcgtctcaatatatttcgggactcaatcaaacatccgagtaaaaagttattgtcgtttcaattggctcagaggttcaacattcaattttgagcgtcccgatatattacgtcactgaatcggacatccgagtaaaaagtattgtcgtttgaattgctcaaatcttaaacattaatatcgaggtccgacatatacgggactaaccaacatacgagaaaaagtattgtcgttgatttgtctcacttcacattcaattcagtgtccgat

SEQ ID NO: 249695 - DNA, 395 bp, Glycine max
tttcgattcatactatgtacccatggcggtccatattgtgtttcgtggatatatattctcatttcatttactttttataccccctgctgacgtgcttaagccattttacttaagtcatttctcgcttaacttaaaaataaaataaatttccaccgaacatttgaattgtgtatataaactctttgttgcttttagtgcgttttaaaatgtatgcatgaggaaaatatttattcatttgatgcacacaaacaccaacactattttcacacactgtgagtgaaaaagggccctatacccgggttcatgggaacataatgagtggaggtgaatctgagatcatgctatgtctccgacttggttgaatacagtgaaccctcatctagagcttttctctt

SEQ ID NO: 249696 - DNA, 352 bp, Glycine max
ttaacacttaagtttctatctccgaagcccatgcctctgtaaacccctacacgaccaaacctagcttcaaacccaagatccagatacagtggcagcaagcattttatgccctgaacttgcctctattctaaatagcatgaacttgggaactgtctatcatgctctgcggatggatcaggacgtacttttctcttcctgaaactactggaattagacacatgcattataaaggatattctctaagcaatttaccatagcttaagatctctttgatatgcgatctttgccttcttgccattatgaggtgtaagaaggtacttgagctcattcatatatgaccacgccaactgcg

SEQ ID NO: 249697 - DNA, 83 bp, Glycine max
gaagactaaccagggacttaaaacttcccggcccaagggaaaacaagctgggccaaaccaaaaaaaggtggaaatccttaaat

SEQ ID NO: 249698 - DNA, 412 bp, Glycine max
  unsure (1)..(412): unsure at all n locations
ttatgttgcatcagtcatgtattgcttttaattatacttcttgcattcacagtgtgttgtcaagtttgaccacggagtatcatacatgcgtaatttatttttgttgcacaaattaatttattttttaacgcaacattaacggctaattaacgataaacgaatcataaaaatttatatcacataatcattaaaattaaaaattaaccaaatgaaccaaataaataaattatccacaaaattaaaaatattccaaataaataaccaaatgtcactgtcaaaaaataaatttaccaaataaataaattatccaaaaaattataaatcacatatacaaggcanaaataatacaacttcaatgaccgtccgtacgccgcctatgcctcgatctgtgacctacagttggttggccaat

SEQ ID NO: 249699 - DNA, 392 bp, Glycine max
ctcatgctatgggacaccatcacggaatgacttccactatcttgttgcgaacaactaccacagtgaatacaccaccatcatcacccaacggctgacgtatttcaaaaggggagccatcacggcgtcatggaccaacttctaaccccaattgaggcaaagagaaagagacctcaaatcctcaaataaaacgcaaatgatgactcttttcactcaattaaacagtgatgcttctgcaagacaaaactagcatccaaacgtgagctctgccaagaaaacgcatgaaaatggaacacaaactcacaaaatatcactccaagagtgggttatcaaccataccacacttgagcatcgctaggcctcaagcaatagctctagacctcaatcaaaacaaa

SEQ ID NO: 249700 - DNA, 355 bp, Glycine max
  unsure (1)..(355): unsure at all n locations
agcaaattccttattttctataaggaattctatcaatagacctccaatctttaatggagagggttaccactactggaaaacccgaatgcatatttttatcgaggcaatagatctaaatatctgggaagccattgaaatagggccttatatacccaccacagtagaaagagtttaatagatggtagttcatcaagtgaaagcataaccatagaaaaacctanagatagatggtttgaagaggatagaaaacgagtacaatacaacctaaaagccaaanacataataacatctgccctaggaatggatgaatattcagaagttcacatngcaagagtgctaatgaaatgtgggacac

SEQ ID NO: 249701 - DNA, 381 bp, Glycine max
  unsure (1)..(381): unsure at all n locations
tgtangaatatggggaacccgacacatggggttctaagaggtggacgagcgacggtgcacaacaagtattccacatccacaatgcgcgcataaacccaccatcccctggtgcccacctccatctaagctcacgtactcccatgtagcccatatcctcatttctatcaacaccgggtccccatcaatcctctgaagctttcacaacatccaagcaaaacaacattcaaactgcacaagctatcacagccaagctaaacagagcataggcagaaaactttgtcaaaacaccaaccaaatcacaggttttctcacgtaaagaccccagaacaattccttcgatctggttcattaacctgtggatcgactcgaaaattttactgg

SEQ ID NO: 249702 - DNA, 117 bp, Glycine max
  unsure (1)..(117): unsure at all n locations
cttaaataggtggcgtttgtcatgctcgtgcacttaacgcaattctgaaccgcttagtgcgcattggtgaatttcggcttagcgcgggcttntctcgctcagcgaatggactaaagc

SEQ ID NO: 249703 - DNA, 363 bp, Glycine max
gtgcgaaagccctaccgagcctatttatgcatttttgactctattgcgtgagatgaagcgtcaagaccggacctctcgctagttgcgattgatgaaaagcttaaacactcgcgctagagtgaaacagtatccgcgagactgcgggataaactactttcctcgatatatgtcttatgccctactccaattaattgtccaggatacactatatccttccctttcaataattgcatgctttgtgaaagacaagtgatgacggcatttgaccccattctattatcaagccatcaatagtcctgttgcatacacctttgacctagcccctgcaattacttgcacttggggaccaaagactcgacttta

SEQ ID NO: 249704 - DNA, 375 bp, Glycine max
taccaaagatgatgaccgcaagcccccgagaatgatttcaagattgagtccaccattcaagaatcaagagaagtttgatgtcccgattcccgaaaagatgaattcctgttccacgagaagaaatcaagaagacttccccagggaagtattgaaaatatttttcatacaacgaacatagcatatgtttgcttttcaaagagttttctcaaattttctaattaccagagctttactctctggtatcgataccagcggcaagttgatttcaaagtttatctcatttgaacgtccattatttcagatgtgaatcgatacagatttggaatcgatccaggccttgacgttggatcaatcattggagagccatcttcttaa

SEQ ID NO: 249705 - DNA, 299 bp, Glycine max
agcttataatatatcgatacgctcttaattaatcatcggaaactctcgagaattcaatagtcttacttttccacggatgtcggatacgggcgcattatatgtcgagaggcttgaaattgaacaacggaagctcttgaaaaattcaatggtcataacttttcacacgatgtgcgattcaggcttataatatatcgatacgctcgcaattaaacatcggaaacctctcgcaattcaaatggtcataacttttacacggatatccgattctggcacataataatgtcagaagctcgaaattg

SEQ ID NO: 249706 - DNA, 392 bp, Glycine max
tatgcgcatatttccttacaaacgttctcttgttcaagacattctattaaccgaaaaaaaatgcacccatgtgcaaacaaggcagcttcgttacctagattatttacacgtacttccaaggtgtattagatacttacatcacacacatcttcttgagtaaattcacatacatgcatactcaaagcattttggggtaccaaaaattgcacatgtgcacctcttggtatttctaatacctatacatacacaaacttcatgatgaatcttgactatctacacaataaggtgctacatttcatgctcttttcaagaatttgctacctaaagccgcatgcaaatacaagtatattttcctttgctgactaacattgtattcaaattcaaaggtatac

SEQ ID NO: 249707 - DNA, 317 bp, Glycine max
  unsure (1)..(317): unsure at all n locations
agctcgctaacccatggaagcttctaatatcttccacactntctggcgcgggccattcttggatggccttgtatttctcaaggtccacttggaccccatttctaccaactacaaaacctaagagaactatattatctacacaaaaggtaccacttctctatatttgcatagagggttgttttcctaaagactgaaagaactcgtctgagatgtcctaagtgaaaatctaggctcctactatacactaaaatatcatcacaataaacaactacaaatctacctatgaaatcccctaagacatgatgcataagcctcat

SEQ ID NO: 249708 - DNA, 391 bp, Glycine max
tttcctctttcccccttcttattcttttctatttccttatgttcaccattttcttgcacacaatatgatgactttttcattggcaatgatcatggagggctaaaaaaataatcaatccaatgatccactccaagcaaggctacatttgaattttggtttactatctctaaacttcgtgaacgttcatctttctcttcaatcttattttcgattttcatgattatgattacgattagaattgaatatggattaggttatggattcatttcctaatttcaaaatttaatcaaagattgttcggatgattttccagcctaatgtgcaatctcaaacaatgtatggagattgatccgatagaactttctctaatgcatttgagtgaactttcaca

SEQ ID NO: 249709 - DNA, 316 bp, Glycine max
  unsure (1)..(316): unsure at all n locations
tctctcatagtctttatatatgtgagccaatccaatccttgtgttcggactctcagccacttatgatagccgccgatgctcccattactgcttcccctaagctctctgtcctttcttcacaccgcatcacatgccttgtgaactccttagagtaccctcgcattggggtcactgaaaccctgtgcgatgaaaggcgngatgctttcgtctgatggcactcctctcatggggtagcccacgctgtcttatggcgaggacgggattataattaatacaaccccttgttcatcaagggaacatttgacatccttcgcat

SEQ ID NO: 249710 - DNA, 405 bp, Glycine max
ctttggagtagaaacatgggatcaactcattttatttcatatagaaagccgtatctagccaaggtctgagagaccatacaagtttcctagcgacttctaattatgtgggccattaagtctatcatatgctggcactagccgagaagcccatgaatctcttcaggggcggagtaggtgtccgccatcgccttggccttggctaacaagcggggaagttcttgactcccgttcaaggtaagagcaaaccgatccatccacatggttgcctcttggtttaaagagtcgatcacccttcctctagcctctttttccgcgtatacttgggcatactcgtccgtgatcctatgctcgtgagccgtggctagacctaactcttcttggtactcggcgatgaaagctagcatg

SEQ ID NO: 249711 - DNA, 310 bp, Glycine max
  unsure (1)..(310): unsure at all n locations
aagacttttaaaaattagtaagaaaaataactcttcattaaattggagggagtgttttaaaaacttaactaattcaagcccttatacataaatgcanggcataataatgatttacaattggaaggagtattttaaaaagtgaacaagtttaccacgaccgacaatttcgataaaatcataaaacgatgtaaacaactttatgtcgtcctccacagcaatagtgcaatacgaagagaatatacggcagcgaagtgcagaccttctccaacaaaagaataatacgtttagaaaaaatcacttttggagtcct

SEQ ID NO: 249712 - DNA, 387 bp, Glycine max
tcttagacgtgacgatggaacgttcaatcgttatttgtctgagtatctccataggaaggtccccgcatacgcaattcccgttgaaggtgtgttttcaatcgatcacgttgatagaaacgcgggtttattctaccgtgtgtacttaccaacctcaggaaacgaggctcaatggggtatcacagaccttgagaagccgctaagtactacagaaattgttcctgtaatcgtattcatttccgggggaagcttctcgcattcctcggccaacattcacatctacgacaccttctgccgccgccttgtgaggatttgccaggctgctgtggtgtctgtgaactaccggcggtcaccggaacatcggtatccttgtgcatacgacgactgctg

SEQ ID NO: 249713 - DNA, 392 bp, Glycine max
  unsure (1)..(392): unsure at all n locations
nccaagagcgaaaggcggtgacacagctttttgttaactttgcccgaccctaatagaccatttgaagtgtattgcgatgcgagcgggcaaggcttatggtccatattgatgcaagaaggaagggtagtggcttatgcttcacatcaattgtgttctcatgaagttaactatccgacccatgatttggaactagcagctgtggtctttgccttaaagatttggaggcattatttatacggtactcgttttgaagttttcagcgatcacaagagcctcaaatacttgttcgatcagaaggaactcaatatgaggcaacgaagatggatggagttcctcaaggattatgattttggtctttcctaccatccatgaaaggctaatgtaatagccga

SEQ ID NO: 249714 - DNA, 341 bp, Glycine max
tttctataaatagggggatatgtgtagtagaatagggctcagccccttaggcacttctcttctttcgaattgcttaaaaaattgttccgtgaagaaaatccaagccgaggcgcttccgtaacgtttccgtaacgtttcccggagtgatttcgcgaaggttttcatccgttcttcgttcttcaacggggaaggttgcgaatccgagactttcaattcatttcttggctttttaacctatcatctttatttcggtcatttccgatttcttttcttccgtctttaacgcgctactaccgtttatataagccgcttcttacctaataaatgataacatgaatttc

SEQ ID NO: 249715 - DNA, 334 bp, Glycine max
ttctcatttctgggggagggctaagattgctgtttacctgctccaagcccattaccagtgggatgaccttactaggtgtcttggaaaacacttccttgatatggaccactgtcatcaaaaacacatttaagcctcaggcccttattgggagagcttgttgaatactgggaagattccagaaattggtgaagctggctcacaaccacattctgactactccttcttaatatctctatgatggacttatcacaggagagagttgatgatgtgccatggggaactctgttgattacccctgtgaacttgaatttatgtaaaaatgtttcacttccac

SEQ ID NO: 249716 - DNA, 441 bp, Glycine max
  unsure (1)..(441): unsure at all n locations
agcttgaactancatgctatgtttcgagttcttctcttctcatgagcctctctgccgcctacacatatgattttaataatagaaacatcaaatataaaacactcatcacattgggtatgaaaaatgcaatgatgtaaaatagagtaatgcctatggaacagaggaaaagtcacataaaagatttcttgagccaaagtaaggagatccctctccagcatacaagaggctaacttaaaagcttattactctcttaaatttataaatcgagtcagatatcattaatcaacgtccaataaactaattgcaaatgtcaaaagaaaattgacgcaatatgccaggtctaaaactttgtatctatgtcgcaagaaacaaaaatgaaccatacctgatttgactgagcccttccttctccaagaatttttttggacaccaattttttga

SEQ ID NO: 249717 - DNA, 351 bp, Glycine max
  unsure (1)..(351): unsure at all n locations
tctaagtcactgangctgcaagcttgtctaagttaaacatgtagctactttttacatttaaacctatanacacaggggactgtatcacacacaaacaattagcattgagaccaacgggaatagttttactcaattgaaccattttacttgtgaaaggacaccaaagaactttaatttacttcccatagatacaccaacaaaccagtctaacttatccaaatcattcttcccctaatgaaggtgcttttttatacaagataaaggacaaaaattactgcagtgctacatctatcacttttttgttgagattggatgaatcctatgttttgttatgtacaatcaccctatctt

SEQ ID NO: 249718 - DNA, 371 bp, Glycine max
  unsure (1)..(371): unsure at all n locations
agcttcaagaaaagggccaaactcccttccanaataagaattcaggcttaaataggtggctttgttcgtgttcatgctcgtgcgcttagagcgactnttctcgctcagcgaatggaccaaagtggtgcacgtaatgggatggcccttctctcatcgaacaagcacaactcatccttcttccaaattcttcctcgcacttagccaaggattgttgcgctcagcggatagctcgctaagccagcagattggcttagtgagagggtgaaaatcaacacttcaaaacttgcctaattatcctggaattgagagaaaatgattattaaatacaaaaaatgggagtactacgtaattatttacctatctntaacaaa

SEQ ID NO: 249719 - DNA, 395 bp, Glycine max
tgcattgagctaagcctaaaaactccctgtttttgaaaatttcggatttgggctaagcgcgcaagggcagctggctaagcttgcatgtcgcgttaaacctaaaaacatctttgttttgtaatatctcaaattgggctaaacgtgcaggcacaggctaagcgagtcatgcattcccggtaagcctgtggtgctcgctaagcggattttgcaggaaatttcctcctgcaaaactctctaagccctatgtggcatgctaagcccaataatatctctgaagatgcaatttcatttttgggcttagcgcacaagtttgggcttagtgcgcaaaaaaaaaaatcaaaatttcttgtacttctattttggtatgtctcctacgcagcaagcttagtgcgcac

SEQ ID NO: 249720 - DNA, 443 bp, Glycine max
  unsure (1)..(443): unsure at all n locations
agtcacctgcggcatgcagctancatcattaaggggagtgtcaattgtggaagcttaatcaaggactttatgtattcttcctcaaatttattcttacttaagagaaatcctcttcgatgtgaaaatctttatatgaataaaatgagatggttcttgatacttgttcagactttacctcaaaagcttgcgatagtttatgatttggctatcttatatatcctttgcatttgataagactaactaattgttttaatgatatatgctataagtctacttccaatctttaaattggatttgttgacatcataaaaatggggagattcttgagtcaaaagacattaccgtcttgatgaatcacgactcttattgttttgtttgatgtaaccattaaaaggctaacattgtgcctatgtgaaataagggttgatggctctattaaacat

SEQ ID NO: 249721 - DNA, 314 bp, Glycine max
  unsure (1)..(314): unsure at all n locations
atgcaagctatcttggannatgttgatcatgctaagtttgtatatcaaatcatgaaatttgggtggtgccaatgctttggtgagaaaatctgccacttgatcacttgttgacactggtagtagctttagagtgcccttcataagcttcttttgcaccagatggcaatcaatttccaagtgttttgtgcgttcgtgaaaaacccgatctgaggcaatgtggactgcgctttggttgtcacagtatcagagttggagttctggtaagctgaactctcaaatctgcaaaaagatacaacagcctttgcaactcacaa

SEQ ID NO: 249722 - DNA, 388 bp, Glycine max
tttggatccgttaccgacatcaatcaaggtgttatattattataaaagacgcgacaaccttattgtctcctgcattaaaaacactctgacaaagaagcatgtgaaacaatggaacaattttgaaacatacagaaattacttaattgctagtaattttaattgtacaaaaaatatcacctttgaaatcttacatatgttggtagcatctattatatcttactgactatgtggtatatgttctcgtataaggcttacagataccctagacgcatagcaacaaagatctttatggattccatctgccatcctctaacatgagagaaaccgtgcacaaccaatttatctcactaaaacatggaagaatgtgcagaacctatatatcaaaatg

SEQ ID NO: 249723 - DNA, 335 bp, Glycine max
  unsure (1)..(335): unsure at all n locations
gaacaatatacttgcccttcatttaactgtttctgcgcttggcggncacgctcaacaaagtactttcgacacctactgtacgttgatttgaccaatgctgttatgggaatgttgcgacacatccttcaaaccttattgatacattctgagaggttggttgtcatgtggccatatcgacatccttctctatcataagccatcatccatttttcctttgaaattccatcaatccatgtggctatggctggactcacttcacgaaatttttctaaattttgatccaaaatgtgctttgcaggagtgtaggctgcataaaattagttatgaataacatg

SEQ ID NO: 249724 - DNA, 409 bp, Glycine max
ttgataagatagttaccatgtggaagctctggaccaacttaacaatatgtcaaacatatcaataactagatggcactttttgaattaattcattggaggtaaagatataaactttagattagacgcattataaacgaaaaacaaagaaggaaagggttcaagttattaataaacctgatgaaaaagcacctggttagtacggataaaaagagtagttgtagaaatgagaaaaaaaaagtgagggaagatcatggtagagtaattaactaaaccggccatcacaaatttagatgagagtggtttgaaaaatgcagactgtaacaaattagtgggacttaatttgaaagaaggaagaaggagacaattgtctgttctttgtccactacttcacctcaattttttggacatg

SEQ ID NO: 249725 - DNA, 153 bp, Glycine max
tctcataggagcttttcttctttaggatattcatattcctttatagggtgaccaccaaagcatgatcatcaagcacctatcacagggtattcaaccatagttgtgggttcccattttcagggactcttatggtaggaaatccacacataatgg

SEQ ID NO: 249726 - DNA, 409 bp, Glycine max
cgagtcgtgcaagagagataaacagatgaccttagtgatctttgagccatctatggggtaaaattgggtgttgaggagtcaaattttaattcggtggaaatttaggtgtaaatccagtttgagcaagtttaaattgatgttatagacttgtgtgaggtgagaagttgctccaaatttacctcattctcaatttcacttctcaaaccttgaaaatccattaaattgaagggttttggatacctagattttatgtcgctttggtctgaagtttgaccttggtttatacatgattggtacatgatttgagacttgtaggattcaatttgggcaaaattggatgagggaaagaatggttttcaaaatctgcactttatgcagaattttgctgttgaaatgtgcaacagaattt

SEQ ID NO: 249727 - DNA, 324 bp, Glycine max
caaaagatgcttataatcgaaaaacaataatcatttgtagcatttcgaaaggagaatataacagtccattgaatacatggtggcacactatgaattataactacctcgccgttattattcatttctttgatactccttgtctcatgaaagttgggttgtcccgtgcatatcttcctcttctacaaataataaattcactccatcttcgttctagcaatctcatccatgccgttgtacccaccccaaactatcccacacattcttatgccctttattcttaaggacatctacacccacctatgcattcaaagctaatttattttt

SEQ ID NO: 249728 - DNA, 84 bp, Glycine max
acccaaggggggctatgcccaaaccagcttgccaatctgacccaacccggcatagcagtcatgaaacctggatgacctaacagg

SEQ ID NO: 249729 - DNA, 277 bp, Glycine max
tccacaatatccaagcaattcagttttctaattttatgaactaccctacaccatgaaaaccgagtagaggcagaaaactctgcccaaaacacattcaaatatcacagctttccttactcatataccccagtaacactctcttcgttctgattcgttgaccgttggatcgccttgaaaattttactggaggttcctagcacataaatatacatttggaccgttgggatctgctataaaatgtctagaacccaatatgtactacctttcccataaccag

SEQ ID NO: 249730 - DNA, 425 bp, Glycine max
  unsure (1)..(425): unsure at all n locations
atcccttgtggatctcttgcttgtaaaaggattttacaaggttgaaagaaatctcacgaaccattggttgcttgtggactagatgtangcacagattatggctgaaccagaataattcttgtgtttgtctttttcttccctacactctttaattttcgntgtgtacttttaattgtcgcttttacttttggttaagatattggttctattctttactttcttaacttagtagtaaaagcctagctgaatctagtaacattaagaaggataattttttagttatccagacacattaataattaattcaaccccccttcttaattatttcaaggctacttgattcaataatttcatactcttcgaacagtataatgtctaaattataattccttcactatgatatattcgcatgtattataacattc

SEQ ID NO: 249731 - DNA, 295 bp, Glycine max
agactaccccatgggatccttgggccatgcaagacaccgtctaaaacgtatcttctccttcttcgaacgaaaatgggaaggtgggggcaaatacaatttgatgacagctaacctatgacgctgctgcgatcgtatcgccatgaatctggagcttgaggggtaaacaaccatcattctcttggcgtgaatgtaaagaacgggcgcgtaccccgcccacacagtttttacactgcataagatccaccaatgttaccgggggatcgcaccaggcgaaaatcccaggaattgacctttc

SEQ ID NO: 249732 - DNA, 315 bp, Glycine max
  unsure (1)..(315): unsure at all n locations
agcttgtcatcgtgagatatcagggacatgtttatttattaaatgtangtacgataaattcacctgattgatagagaaaaaacacacattatacattttatgcaaataaggcatgctaggccctaacattctcatacatgaatccctatattttttggttctaaaaactataattaacttgccttaaattatcttgacccatttatcttttcttataatggaatatccaccacatacaaattctggaaatacctaaatccagcttatgctggacattatcctgcacagcatagttttttttgaattggttttaaa

SEQ ID NO: 249733 - DNA, 352 bp, Glycine max
gggtacatgaacatattcaatgctcccaaatactgtcaagtgagcacctctagacttcactccacaccacgctgcaagtggtgttggatctctgacattatcagttggggagcgattggacaaaaaaacgggacatgcaacaactcttgaccaaaactacattggcatatttctagccctcacacatacatctagtcatataaagaatagttctatttcatcgctctgctaccccatttagctgaggagatctacgaaccgttagaggacgacgaatcccatattcatcacaaatatcattaaattcctttaatgtgaattcggcaccataacggaacataaagctctgata

SEQ ID NO: 249734 - DNA, 365 bp, Glycine max
  unsure (1)..(365): unsure at all n locations
agctntccgngttgggagttgtgtaggttgttttatactatctcacagctggngggatggcttaagggtctggaatgatccacccacatatggctaccatgcttggagtatgtcttacatgaagattctatcttattttgaatatgtacgttgaacacgcccatctccttgaattaaacttagcaatatgaaacttctattgccaatgtcatgatgtcttgtgttaaaattttgaccgggaccttaacagatgaaccacatgtgcttaattttaaaaggtaaggtacttcattgggttaaaaanattacggggactaagaatacgtgttgttcatctaagggaacgcaaatgaaagcaaaaaaaa

SEQ ID NO: 249735 - DNA, 404 bp, Glycine max
ttacgagtatgagtggatatagacatctaattttgtaattcacttctttagagaacttaattactctttaattaaatatcacgcttggataaaaatttgaaaagaaattgaaatttgagtatttggatcagggattttaattaacttaagtattagcatgtcaaattctttgattttatgaaagaatttgaaatacttgtgttgtgcttctccagaaaacttccttcattctctcagtattctctctcttgtaacagtttcatcgccgcgatgaactccttcgtctttggcttctcggcgaactccgccacatagtcctccaccacgacggcactggcggcagcgcttgcaacaattgtggcaatggcgaggcgcttctccttgcggttgatcttgatggaccc

SEQ ID NO: 249736 - DNA, 348 bp, Glycine max
  unsure (1)..(348): unsure at all n locations
agcttgatgcctctctgtataaccccttttacttttgggatctttccaatatcttctagcatcaagtcaagacaatgtgcagcacatggagtccaaaatatttttggtctcgtgacttgtaaaattttagctaanaagaccaaaatcaataaacttgtatgagtagtgtaacaattaaaagttataagtaactacaaaaaaaacttcattaagtatgatggaattctcacccgccaacacataattacttccatttgccgtcaccacttgaataacattcttttcttcaatctcctcaacaaagctatccaaaagctcaaagaccttctgaccagtcttcatgtattc

SEQ ID NO: 249737 - DNA, 398 bp, Glycine max
tagaacaatatacttggccttcgtttaattgtctttgggcttggcgaccacgatcaacaaagtactttcggcacctactatatgttgacttgaccagcgctgttattggaatgctgcgacaatctttcaacaccttattcacacattctgagaggttggttgtcatgtgaccatatcttcgtccagatgtattgtaagccatgctccatttttcctttgaaatgcgatcaatccatgttgctatggctggagtcaattgatgaattttttctaagttttgatcaaacacatgcttgcaaggcgtgtacgctgcatcaaatttgttaccatcaaaagttgtaggtagatatgaaactcaaattaacttcatgtataaaataaaccttacccaatttctt

SEQ ID NO: 249738 - DNA, 382 bp, Glycine max
  unsure (1)..(382): unsure at all n locations
nagcttgcatggtagaaggtgtatgacacccctatgttggttagagcccgaagaagccttaccttatgactggaagtggtaaaccaaccacagagaagatcaagttgatccaagaaaggatgatgactgctcacagtacgcagaacagttatcatgataaaaggagcaagggattggaatttgaggttggtgatcatgtattcttgagagtcacaccgtggactggggttggtcgagcattgaaatcccgaatactcacgcctcgctttattggtcctttccaagttcttaagagagatggccctgtggtataccacattgcattacccccgtctctttctaatcttcacaacttctttcatgtgtctcaactccataagta

SEQ ID NO: 249739 - DNA, 362 bp, Glycine max
tgtcgaaattgccgtgtttgggtgttttaaacttacccattctgatctagggctcttgtgatgatgtttgtgaagtttatatgctgaaattgctgatggaaatctgttagagatgaagggtacaactaacccacggttagaacgtgagaatgtgacgttatgagtggaaatagagcgagactcttagagttggaacgctaagtctgaattctgtggtaaatggaggttagagtgacgtaatactctctcgaaatgtcatttataacatgtcataaaggctacgctgggcttcacagaaagacaaatgacctaagtgaactaagagccattgctccggcaaattctggtgctgacaagacaaa

SEQ ID NO: 249740 - DNA, 391 bp, Glycine max
  unsure (1)..(391): unsure at all n locations
agctttcttcacaacaaacgactttttatagttcggggcccatttccttctgtgatccttttgagcctgtgacactttctttagaccaatgttcccctcgctgaacttacgcgggcgtacccttttgtcaaaaacatttttcactctgctttggtatagtcgcccatggctcatggcgtccaatctcttaccttcgatgagatttaactgatcaaagcgtgttggggtccactctgattcttccaacctgactctgctaggattcttaaagaaggaacctttacctcaaacgggagcacaacttccaccccgtacaccaaagaaaaaggggtcgccccagtagatgtgcgcacaanagtttgataaccatgctatgcaaaaagggagcatc

SEQ ID NO: 249741 - DNA, 277 bp, Glycine max
ctaattggttatggctctttataataggtggcttgattctagtgatttataaaactagcttataattctgtagacgaactgttcatacgtcttggttgagaacatacgaacgatggctttctgagataacaaaatgattttcaatgatggagatatgttactgatatgctctgttcaattttgacctaagattcccaccaaggaggatgtgttactgcgaaggaggaagaaaatataatgctgtggtcttaaaaatatgcttgtaatgagggaaaca

SEQ ID NO: 249742 - DNA, 369 bp, Glycine max
agcttgacctatttaataaagagtgttatgcttgagctcttagaaaagtctatttatttaaataggctaacaaaaaaagcctattaggccaacctatttatctatataataatataataaaaataaatattctcgtgatcttctaaaacctattgataggctttaattgcaccctaaaatgcttgcaaatagcatcgactatcatgttaagatctaaggtttgaggagtagcagtccttgctgtaacaccctgatatatatatctatatattattagaaattatgtttgatgtttgattatttgctggcgtaattttatccgtaattattttcaaggaggttaatttagttaatagaggggtgtgggta

SEQ ID NO: 249743 - DNA, 387 bp, Glycine max
  unsure (1)..(387): unsure at all n locations
tgtatgcttaaagctcncatctagtgagctctccanaaggtagatgtgcttattcttatcctcacacacagagaagctgttntctggatatgaattcatgaccttgaaggtcacaaacctacaacctctctgcattgctntaaggcttaccacttaccacggaagctagtataagcgtgcatctggaggagctgtatttacagcttatgcgaacttatcttataacataaaaacttagtgaagagtttaagacggcttatcaaaataacatgacatgtctatatattgttggagcttatatcaatacactcttctggatagtctatgaaaacaacttaaaacttgtatgaaaattacttgtgcataatgtgtactgtgataacatta

SEQ ID NO: 249744 - DNA, 175 bp, Glycine max
aagagaaacaaccagggaaacaacacaaccacctgacgcccaaagcgaaaagggacagcggcccccgagacaccggcgcgcaaacggaaacgcccccagggaaacaaagaaccggccccgaacacaagaaaacgccagcaacaaaaacacaagaaaacagcacaacccaggagac

SEQ ID NO: 249745 - DNA, 386 bp, Glycine max
agctttccagatccgaccatggtaagacttggctactgccttcattaagcagtaccagtacaatacggacatggctcccgatcggaaccagcttcagggtatgactaaacgagagcatgagttcattaaggaatatgcccagagatggagaaatctcgcagcctaagtcgtaccgtccatgacggagagagagatgatcacaattatggtagatacgttacccatgttctactatgaaaagctgataggctacatgccagctaactttgcggatctcgtcttcgccggagaaaggattgaatccgggctaccaaaaggcaagttagaatatgctgccaatatgggccccacaacaacagaagaacccagcaatgggcgcgaagaaa

SEQ ID NO: 249746 - DNA, 318 bp, Glycine max
  unsure (1)..(318): unsure at all n locations
tttatgccgcagatcttgagcttaatgaggctctcatgatgattttttcnctggtgtngaccggaagataaaggagaagatgtgagaggagacgccatccactatggtagacgtcatggtagaagatactnctatggatgaagagaatgatagggagagagggagaaagagaaagtggcgcggaacatcgaaggaagaaagggagagaagttgaactttgaagtgtgtctcacaagactctcattcatcaaagttacacaagtgtatacatgcttctatctatagctaagtagcttcttgcgatctagtgttataccc

SEQ ID NO: 249747 - DNA, 244 bp, Glycine max
agcttaagcctatactaacttttgtgtagtgtcgtcgctcaggatgctgcataatatacggcacaggcaaaagaatcaaaaccaaaggaatatctattacccaaaaaccagaaggtagatagaagaatgaaggctttgttcgttggaagagatgaggggcattttgtgttacgaaggctcaaagaccaagtctaaacaagcaaccactctcaaagatgaaagttgatagccaccttcctagcaa

SEQ ID NO: 249748 - DNA, 373 bp, Glycine max
  unsure (1)..(373): unsure at all n locations
agcttagagctgtatgaaggcacttcctctcgttttaatttttttgttttgtctctagttccattttgattatgaattatttaatactgagttgttgataaaattatttggtttaagccaggctatcactgtcttccaaatgcattttaagattttccaccatatttgtttgaaatgtataattcttatgctcttgttttttggatttgatttaaatactttcatatcattttattgtgtctgttatgaactgagttcctcctgtttgttaaaatgtctttaatgtgtaacatgatgcttgcttttcctgagtagctgctggtgatcattcaactttcatgtatctaggtccagaaggctagaactccagnta

SEQ ID NO: 249749 - DNA, 430 bp, Glycine max
ctcagcttgagggatatgggggacccatcacatgtgggactaggtggtggttcttcgatggtgcacaacaacgtttccacatccacaaatcacgtataaacccaccatcctctgttgcccaccgtcaactgagctcacgtactcccacgtagcccatatcctcggttctctcaacaccgggtccccatcaatcctcccaagctttcccaacatccagttaattcaacatccatatcatcacaaactaacaaaccaagcacaacaggggcaaggcagataactctgcccaaaactcaaatgagaatcacaagcttttctcacttaaagaccccagtaacatatccttcgttcaattcgttaaccgtttgatcgaactcgaaatttactggaagctctagtacataatctacattttaccgttggatctact

SEQ ID NO: 249750 - DNA, 242 bp, Glycine max
  unsure (1)..(242): unsure at all n locations
tgattcttttttcgtaaaggtaccggaacttacgaatttcgtaacgatactttggttctttccgtaatggtacagaacctcgccgattacataatcatcccctttntgacttacggaatgttaccgaaccttactatttgtgcaacgatgcttccttttgatttccggtgtgtcaccggaattttacggattgtgcatcaatatttttctttgatttctggcacgtcacgaaactccacaaa

SEQ ID NO: 249751 - DNA, 410 bp, Glycine max
agcttgcaacggcggataatgacttcatttacatttatcctatagaattttttaaactttagtagcacaggaattcaaattaaattgactgaaacaattcaagaaacctccttaaaatatatgcattatgattcttgaacaagtaaacattctttcctcctaggatagtactattggagcaagaccaaggtgtaagtaaaaatgcttagcaaggtacattacaattagcaacgtttaaaatcaagtaaaataactcattcaatcaatattttcagcaaccaatgctaaagtttaaatatggcaccacgttattagttagtttattttgttaaaatattcctacaaatatcatggatatgggtttttttgtctatatttcctcttggttgattcattttgttcatgggtat

SEQ ID NO: 249752 - DNA, 220 bp, Glycine max
  unsure (1)..(220): unsure at all n locations
atcgtgtggatgatataaactactgtaggagtgagggaaaacatgcgtgttgaacccaaagtctcctcatttccttcctttcttcatctcaaagcaagttcattatgtttgataggtaaggaaagttntactttgattgaatgcttctttgagtggtagatgcttgaaattntgnttttgggtgtggaatgattggtatgcatggtatatgatatctaat

SEQ ID NO: 249753 - DNA, 405 bp, Glycine max
agcttctgaattttggctgaaggtatatagagaattttggcttttataaaaaaatgattttctctttcctttttctaaaagcaatgccacatgtctcattttgagtggagcaaaaagggcccaccttttccccttgatgtgacttcatacttagccacaaggagagaaaaatttgacctttttaatgctaaaaatcttgccttggtttgtgtgccacttctcaggttgcagttcctcgcgtttctctgcacccgtcggggcccgttttccaaagtaagcaatatatatatcaaaacgctcagaatgagaccctgagcgtggttcagaggttggttttgttaaattttaagttgcacgcacaacgataattgttttagactaattaattgaggattaatctataac

SEQ ID NO: 249754 - DNA, 439 bp, Glycine max
cttcttcaaccttagtcattcttgactccattttattgaagcgcatatccacttgcagttccaaagtatcaaacctctcaccaacaaaggtttgaagaccatcataccttttcaaaatcttcgaaagaagagatgaatattctccctcatgtccttcttcaccaatatttctagcacccttctttacccatgatccatcatgctccttaatataaccaaaggatgctatgactgaagcgcctataacgaatgatctcttgattggaacataaggttcagaatcaagagggatgttgaaatgttgaaggaagaaggaacaaggtgaggataaggcaatgtggcattcaatcgcaatgccttatgcatgcgatatctaacaagatgtgaccaatcaatttgtaaacctttatgaaaggcccacatgacaatgagatcttct

SEQ ID NO: 249755 - DNA, 359 bp, Glycine max
agcttcattgcctaacaggcctattttctctatcagccccaagagactcagcataaggatgcacaaaccaaagttgcgtatgtaaaaaaattgtatgaccaagtgaaggtgcaaattgcaaagaagaatgaaagctatgccaagcaagcccacaagaaaaggaaggaagtggtacttgaacccggtgatgatcttggacatttgaggacaaatgttttccaagaaggagggaatgatgagaatcctgaaattggccatatacaggctaaaggcccaagtggagaatggcgaaggcccaagtggagaaagataaagccctcgagtggagaaagatgaatgtccaagtggagaaggatgaa

SEQ ID NO: 249756 - DNA, 396 bp, Glycine max
  unsure (1)..(396): unsure at all n locations
agctagtggagtnaacaaaatttatcaggttcacctttctctcttgatgtagctccatgtgacgttatgaactgcttggacgcaggttctttgtcttgagggacaacctcatcagctggagctgcatgggacacctctagggtcttgtccatgacaccactgtctataagataaatagggaccttacgtacaatgatgtcgtccacaacattagcaggggcttcaacttgtaaggaaatagcttcggccttctcagtggcagcaacgacaaactcttcttctcaagccttcttctctttttgagcatcatgaagcttatccacataatctaccatccccttctcacttatcttgaaaggattacaagttccttcatatcaaatagtaggaagacat

SEQ ID NO: 249757 - DNA, 405 bp, Glycine max
  unsure (1)..(405): unsure at all n locations
ctaagcttgcaaaatagtttaccggcaaaggatcgaagtggttctgaaatatgaatattgatcatcctgctctgatgaatgggaagcctgcggcacatatagaggatgagaataaggaagcaacccatgctgtggctgccattcctacatggccaaatttcccaccagctcaacaatgtcattactcagctaatatcaacccttntcattatgcaacacccaaccatccacaaaggccatccttaaatcaaccacaaagcctgtctgccgcacattcaatgccaaacaccacccttaacacaaacccaaacaccaaccagggaggggatattccagcgaaaaagcctgtagaaatcaccccaattccggtgtcctatgctaactngctcccatatctactcaata

SEQ ID NO: 249758 - DNA, 388 bp, Glycine max
  unsure (1)..(388): unsure at all n locations
agcttttcgattcattctatgtatcctgtggtggtccacattgagttttgcgtatttttattcttgtttcatttactttttatacccccttttgacgtgcttaagccattttatttaagtcatttctcgcttaacctaaaaataaaataaatttccaccgatcgtttgaattgtattatccgttaactttggttaaaatgaattccgactgttcggtcgtgccgtaaccacgttggaaatcaaaaaagaggtaaaataataatataataatcaaaaaacgtcttttagtaaaataaagcgaanaatcaatcggacggtttctctttgggatttctcattcttaattgaattgactaataactaaagtgaaactaagggctaaatcaac

SEQ ID NO: 249759 - DNA, 402 bp, Glycine max
  unsure (1)..(402): unsure at all n locations
gcttctactatgtggcagggcgggcttccttcactttcttgtctccaacgcgagctntgaccaccgctcttgcttcccgcgatgcttctcttcatatccgcctgagtgggcttatagcctaaaccatacttcccacgatttcctttggcatttatcaagctagttatgccgccgttgtctttgcctaaaccacatttgggttcgtaaccattccccaacaaaactcgggccatcattactgctgcatcggacaggcaagcttgcccagagaaggagtccacggaggaaatgcttaccacctcaaaagactggaaagcagtttctaatgactcctctgcggcctccacataaggcatagaggatgggcagctcaccaagatagtcttctcacctgacacgatg

SEQ ID NO: 249760 - DNA, 386 bp, Glycine max
ccaggatcttaagcaccgcggctgcagcttaaatgtaagatttttttacaaactgctgagaatcgattaccatatatgtgtaatcgattacacagggcaaattttgaattcaaattttaatagctgtcgtaaatcattttcggccactggtaatcgataacatcctctggttatcgattaccaaagagtaaattagttgaaaaagactttttaacttaaaattcttggccaaaccttttgctacttcaattggaaatcccttcctatttaatataccctttctaatactctaaagactgtgctgatcatccatcttgaatatctttaatttctttgtcttgaataaagcatttacacacatgtgatttgttgcatcatcaaaacat

SEQ ID NO: 249761 - DNA, 356 bp, Glycine max
ctagagatgccactatcactaccgttattatatgtgagcacgcttagatgtaacggatgaagttatcgcaattgagttacaatgaacatctatacggatcctataaggattaaattgtggtttatattgagactactattgaattataatctacctttacgaatataaatacgatattatcgtgtatgacggacaaatttgatgttattatgcgaattgattgatataaataagcgctctatgagatatcttgttttagaccttagacgttatatcccgatgttaatatgaatgtgaaaaatgatgaggagtgtactcccatgttggagaaattattgataattgtcgtctttgac

SEQ ID NO: 249762 - DNA, 395 bp, Glycine max
  unsure (1)..(395): unsure at all n locations
agcttaagacctcggaaattattatgaatgagaatttcatggtacaatttattcttaactcattaccatccgagtatgatccatttcaaatgagctataatactatgaaagacaaatggaatgtgatgagttgcacaatatgttggtttaggaggaaacaaggcttaagatcaaggaaatcactcagtccattgtgtaaaccaccaagggaatcaaggcttaagattaaggctggaaagaaatttaccaagaagcatgataagggccaaaagcaattaaagatcattgaagccttagtgcaaattcagaagaaagcatcaaagagcaataattgccacttctgtgggaaagctggacattnttagaaggattgccctaaacataaggcttggttc

SEQ ID NO: 249763 - DNA, 424 bp, Glycine max
  unsure (1)..(424): unsure at all n locations
tccccttcagttcccattcgagtacctaacgggtgtgattttcaaacgtttataaccagaatacacaatacccttaagcntaaccgacaacaatntttggatgaaatttactaccgacagcctttcacgtatgcaggtaatcaatttcggtttcaatgtatgcaactgaaagatgatgctgatgttaacacaatgttattgtgtaatcatgaattttcgtttgttggtccgattgagttattatgtagcattcgtagaaccccagatgggtatttaaacttacttgaaactactatgaccnctactcatgatgccctgttatattacaatgggaggtggaacatgtcacgccaaaatgagtnntgtggtactcgtcacaggannaaatccaanactttgcattccatcgatgtccatggtgact

SEQ ID NO: 249764 - DNA, 155 bp, Glycine max
cagagtggtacttggagatatgtcgcggggctcaagagaccttggtgacgtcaagtggggtgctattgtccaaaaccaagcttgaccaatcccgacccaacccgggcatagtctgtcagtgagaacctgtgatgtacctaaacaggcgagctcct

SEQ ID NO: 249765 - DNA, 404 bp, Glycine max
agcttatgcgcatatttccttactaacgttcacttgcacaagacattctattaactaagaaaaatgcacccatatacaatcaaggcagcttcgttacctaaattatttacatgtacttccaaggtttatttgttacttacatcacacacatctccttggctaaatttacatacatgcatactcaaagcattttggggtaccaaaaattgcacatgtgcacatcttggtatttctaatacctatacatacacaaacttcatgatgaatcttgactatctacacaataaggtgctacatttcatgcccttttcaagttttttctacctaaagccgcatgcacattcaagtatattttcctttgctgactaaaattgtattcaaattaaaaggtatatcttttttgt

SEQ ID NO: 249766 - DNA, 328 bp, Glycine max
  unsure (1)..(328): unsure at all n locations
aatgcgtgagctcactgaaggcgggcaactggtgatgatgtgtttatgtntgacttgtggaagtgggagaagtgatttgcaccatcgcccgatcgccacctagtaccacatatgacgagtgccccataatccaacaagcttgatgtgagaaagcgtggaagagtcagtcttcctacttnttgttgttgaccacagagtggtacctggagatatgtcgcgggggtcaggagaccttggngacgtcacgtggggtgctgttgcccaataccaagcttgaccaatccctgacccaccccggcataggcagtcagtgagaacatgtgacgta

SEQ ID NO: 249767 - DNA, 410 bp, Glycine max
agcttatgtatatatatatatttttctaatcaatcatgctcttgagttctacgttgtagtctaaattactaaacctcgctgtaagagaaaaaaaaacacaaatgagtgacaatgcattaaccaataccttaagaagtaactcatacgaatcaaaattgaattggataaaaactaaaaggattttctttattattatttaaatctaactttcttgttcatactcgtaaacaattgtccacctacaataattttgtccgtcacaaaagtacttcatcgatttcagtgaaaaaaaaaaaaaaaggagaaacaaaatacaaattacgcaaaaaatgtattgcacattactagctaagatctttgaataatgccaagactacagctttctcggacccagaatggatcagtcttgt

SEQ ID NO: 249768 - DNA, 239 bp, Glycine max
atatgtacctttactgttaagcattccatcctacaaagtagaacataaaataataaaatattggattaaatataaaggagaagtttcatatagtcttagagctaacttcactagacaaataacacgcgtgaaagaaagaaagaaatgaacaacttatattgtattcttgcagagaactttaattatattaaacggaatcagaattaaaattataatatacattcgattttgagctttac

SEQ ID NO: 249769 - DNA, 357 bp, Glycine max
cttaacatcacacactttcatgtggtggaactactcccatggacttgatggggcctttgccagctgaaagccttggaggaaaaaagtatgcccatgttgtggtggatgatttcttcagatttacctgagtcaactttatcaaagagaaaacagacccctttgaagtattcaaaaagttgagtctaaaacttcaaagaaaaaaagactgtgtcattcatagaattaggagtgaccttggcctatagtttgaaaacagcaaggttactgaattttgcacatttgaaggcattacttatgagttctctgcagccttcacaccacaacaaaatggcatatttgaaaggaaaaacaggactt

SEQ ID NO: 249770 - DNA, 368 bp, Glycine max
  unsure (1)..(368): unsure at all n locations
tatgaaccgcgtagcgcgcattagtgaatntcggcttatcgcggtctttctcactcaacgaatggactgaagcagggcgcgtagcgggatgacccttcactcaacatacatgcacaactcatccttctttcagattcttcctctcgcttagccgaagattggtctcgctcagcggatggctcgctaagccaatagatggtcttggcgagaggggtgaaatcancacttnnaaactggcctaataaccctgaattgagagatcaatgatccaccaacaaacccaatggcaggactanggtcttattatctatctttaacatacaataattacaacactacacagttagtcgtattcaccgactaacaca

SEQ ID NO: 249771 - DNA, 415 bp, Glycine max
agctttataagcgcgaatctgggatacaaaggtcaagtggtcacgatatgcgaagatgatgttccgagtacattggatttggtacgacgatgccctcctgatttccagctgggaaattggcgagtggaggaacgccctggcatttacgcaacgagcataatgtaaacctttacggttttaaaagctctatagttgggcctaggctttagagttttttccttttgttaaggctgtgtcttttgtttttgaatttataatacaaggatctttcttcatctgttcctacgtctctacccattctcattcatttgcatgtttacttctttttctgaaacggcagatccgatgacgagtcccccgaaggtactaatacctgagacccgcctatcgacttcgagcaagaaatgagtcaaac

SEQ ID NO: 249772 - DNA, 364 bp, Glycine max
  unsure (1)..(364): unsure at all n locations
gtatgtctntagcacaaatggccaaagaggtgcttttaaccaatgaccaattcttgtcaaaccanaccattccccaatctgtgtcagttctaaaccatgaacaatacaaccttgctttcatgcccatttcacctctntggagggaactcataaaaatatgcaacactcaattatttgcccacaagtctcttgatgctaaccaagacgttaggcgtaagatagtgcagcaactagtctctaatatccatcaaagcagatagattggtgaagcagtggatattggcacagcagcattcaagactaccatanatcttctatcaaacactatnttctctgtnggattgattcattctacatgtaaatc

SEQ ID NO: 249773 - DNA, 398 bp, Glycine max
agcttacctttgcgattggggatttgatcatgaatattattcgagacgtgagcgtaacctaagaaaagatagatgaaatagcaatgagatattggcacggctcaatcaaagattgacaacattggaatatggtggttgttatgtctgaatgaaccgagccaatagcacaatgggtatttcatacaataaaaggtgtatgtgtttgaaagattaagaaggttgaaggagggtttttatagaggaagttgaggtgtggttgaagagggtgtggtctgaaaatggcatttaaaagccccgactaccaaagcataaagcagggacagagcatttaagtggctccatgcccattttctgtttccgtttttccctttcttcacccgcaacgccaccgctttact

SEQ ID NO: 249774 - DNA, 421 bp, Glycine max
  unsure (1)..(421): unsure at all n locations
tctctattagtntctgtttganataacttcacanacgcgaggacgttattaatatgctgcagaagcaattgtaggcggactcttatataatttctctaagcctgngatggaaccggtaattaactctcatcatctcaaatcgtaattaaataattaaagacgggtgggtttatggtagaagaaatattgatgacaaatntaatttcaacctcattttcgttaaggagaaaactaatgttgtatcggtttgagaagatacattgcttggtgctaaatgaagaatgtgaagacatgcattgtgcaatttgtgcttatatcatggcgtcagggaggtagggtggaggcaataatttggcaagagctgccaaagcgaattaaataagccaaactaataattggccatctccaaaaacaccaaaat

SEQ ID NO: 249775 - DNA, 412 bp, Glycine max
  unsure (1)..(412): unsure at all n locations
agctttcttgagaaaaattccttgttaagctagagcttatctacacacacccctctaataactaagctcacctccttgagaagcttccttgagaaacttccttgagaagattcctagagaagctagagcttagctacacacacctctctaatagctaagtgcacctccttaagatgagaagctagagcatagctacacaccccctataatagctaagctcaccccatgacaaaatacatgaaaatacaaaaaaatttcatactacaaagactactcaaaatgccctgaaatacaaggctaaaaccctatgctctactagaatggccaaaatacaaggcccaaaagaaggaaaacctattcaaatatntacaaagaagagtggatccaaccttggcccatgggctcagaaatc

SEQ ID NO: 249776 - DNA, 505 bp, Glycine max
  unsure (1)..(505): unsure at all n locations
taagctatgaatgatatgagtcgaactcatntgctatattcaattactaattattattattatccatactttatttatttatttatattataaaaaacatgtaatgtgaatgtaattaattaagacacatcacttaataaatcattaaaatttataccttaattatattgttgtattaaattaaataatataataatgaaggaaatatcactcgagagaaacataatttgtagatatgaaccactcctctcacattaaagttctaccaacacatgtatggggcgtgtacagaaatgggttntatcaggcgtatgagaatgagttctatagcaccctttgagatcctatccattggtatccatattgatgagtccattttgtgttcaagagctactcatattgtttatactagtaatagggataagttttatttgtaataaaatactcatacaatgtagaatgggttntagaatactttctaaatgtattaatataatacttataa

SEQ ID NO: 249777 - DNA, 307 bp, Glycine max
agcttgttaagtgactggtcctgcatggaaagctggcgatgaagacgaaggcggaccgtaaccatctgcccttcttcgtactgaacatatcgacgtttcttgtccgcgaaaagatttatatcttcttgagcctttataaaatttcttctgagtgcagcgggaacgactccccgtgtgactaacattgtatcaactgcatcgttgcgggaagagcccttgaggtagtctaagaccgaaagaagaggcttgcctgaaaccacctcctagggggtgaaccccgtgccggaatgctgcgatgtgttgtatg

SEQ ID NO: 249778 - DNA, 358 bp, Glycine max
  unsure (1)..(358): unsure at all n locations
ctaagcttatattctgcatgtcgcattcttaatagagtatcttataaaaaatatataatattatctttatgagctatggagaaaaagagaatganatctgaaatatcttaaagtgtggcggtgtgtaaaccagttngggccaatttatcttattttgatattattgatcggnntttgcggatatgccgaaatttttctcatntttacaatggatccacacacaataaaaaaattgtatcaaataagatatatacttcggctttcttgtataaaaagcttggctcgtaagcacaaaagtactgcgtgcacttttttgaaaagattaaggtcagaaaaattattggaagaattctttaca

SEQ ID NO: 249779 - DNA, 379 bp, Glycine max
aaacgatcatcgatatctaggaatcgattatactgtcgtttgaaacaatgaaagataggaaggaggctttgctttaattgattaccaagcggattaatcgatcatttctctctcgcttgagtgttcacaggtgaacaagaacactttaattgattacttgggtcatctaatcaattacattgtccttgaattgatgtccagacgttggaagaacactttaatcaactacggagataatctaatcagttcgtctgttaaaacaatcgactaccttatagatttaatcgactatagacagatataactgatctttcgataaataaccagctggtgttcacatctacgccccacgagatcaatagagaaactcaatacatct

SEQ ID NO: 249780 - DNA, 451 bp, Glycine max
  unsure (1)..(451): unsure at all n locations
tcatgctcgatatgatgcatgcacctgacttcaactctcaaatgcaatgtggtatcatcctcaaggaaatagcctaagccgtgacacacgacactctcacttagagaaactacgtactcagtgtcgaggacactctgtcgtgcacagacaacttcccttctcccacctacagtgatcagcctgagtctcaatggagttccaaaccgagcgatatgcatcctagtacacgcattcttgctcatgaaaaactacgagtacttactgacacaatttgactatttcatgcatatgaagttgnacatgagcccatcaatggctgaccgcggtaataaatattctaagacatccctgcaagatgctaatactcttaaccctatgttactcactaggatatctacatagcactacactccatgtcatcacaactacaacgatgagcatgacacatcat

SEQ ID NO: 249781 - DNA, 112 bp, Glycine max
  unsure (1)..(112): unsure at all n locations
cccccgatggtntgcccccccacagcnnatatgctcaaccccagaccgaacacgagcagcaccgaccaccaattatagcacaagggggaaaaccacaaaaaccacacacccc

SEQ ID NO: 249782 - DNA, 406 bp, Glycine max
  unsure (1)..(406): unsure at all n locations
agcttgaggtgagagttaaacattatcactttttggccaatatggaactccttcctaagaatcctagaatcatgaaaactcttcactttctccttgcaaatcttggagttctcatacacttttaaaaggatctcctcaagttcttgcaaatggagctttctttccatacccgcttcatcaaatgtcatgttacaactcttcacttcccaataagcatagtgctcaatctccaccggatggtggcatgccttacaaaaaaccaccctatagggagacatcttccaaggtgttcggtaagtggtcctgtaagcccatagagcatcatcaagtagcctgctccactcactcctattgngttgcattaccttctgcaacacttgcttgatctctctattgaaaacctcta

SEQ ID NO: 249783 - DNA, 468 bp, Glycine max
  unsure (1)..(468): unsure at all n locations
gatgacggaccccgatgccactgacttaacgcaacttttgtgctgcacttgtatctatgcatgtgtcgacttgtacagtgaagtcagttntgtgataagggttaaaaatgttatttttcttaatatgttacaagacattaagagaattaatgagagtacagccacatntatgataaaattaaaatgatttgacggaaaaagttacgtatgggtgtgttaattacccttgtatgtttcacattagcgtaaacataacaatacttaagaagcattaagcttgtgataggccttgctactacaaatcttttgaaatattacacaacctgggtttgtattataaccgggcataagttatnactctcttcgaatggcagatgatacaagtgtaacatttcgggagcaggatagttaaaatgttcgaaatgctagtgaatctgtacatanagtctccctattatttttttttag

SEQ ID NO: 249784 - DNA, 405 bp, Glycine max
agcttgagatgaggaagtgtttataggtgaaactttttgcttttattgttgaccacagagtggtacctggagatatgtcgcgggggtcaggaaaccttggggacgtcaagtggggtgctattgcccaaaaccaagcttgaccaatcccgacccaacccgggcatagtcggtcagtgagaacctgtgatgtacctaagcaggcgagctcctggcagtcaacagataaaaggaacaaacaccacaaagcaaggaggcttgtggtggctggccaactgtgaattttgtgtgatatgtggattatggcctctggtaatcgattaccaagggtgggtaatcgattacaaggcttataaatgaatacaggaggctgaaatggtctctggtaatctattaccaagggggtgt

SEQ ID NO: 249785 - DNA, 390 bp, Glycine max
  unsure (1)..(390): unsure at all n locations
cgatacctcatgtttttctcaccatgtaaaatgggtcactttaagggccaacgccttataaggacctccttccaagtaaaaagaatcgcttacttcgccctctagaaagaactacataggtctgatttcctctttgatggagggtacgtatgagcaagagccctgctcttgttgacctcataaataaaaaagaaataaaagtttatgtacacaatttcacacaattctaaattaaggctgttgttctttgggataaacgtcagagacgctaatacctaactcaaacgtanatacaactcccgaatctggaataatcttcatgaccggttctctctggttnttccgacgtcttcaacacataaacgttggtggcgactcgcgcatttcctc

SEQ ID NO: 249786 - DNA, 282 bp, Glycine max
ttattattattattattatatataaagtctacactgagattatcggattgaagactcgtctattcatacaatagaaaaataatcttacaaatattattaataagatattttgtcatatatatacttttatatacggttctgtgatagaaaacttcaatctatggttctacgagccattaatgcaaaaacctcctttcatttttctttcaagtttgtgacttttttatttatgccatattataattaaatatatttgggcatggttatatcaataaatttaag

SEQ ID NO: 249787 - DNA, 338 bp, Glycine max
  unsure (1)..(338): unsure at all n locations
ctcagctagcacttggaacccggacgctccatctactagcctattaatgatggtgttagggtatgtgtctttggggcacaccctgtntaaattattgtagttggtgcacattcgccatttgtccgtggcccttttgaccatgatgacgttggcgaaccacgtagaatacctgacttcttggatgaaattngcattgaggagtttgtcgatttcttctttgatggcgttacataagntcttctcctatctttcttntcttctgtgatattggcttggcctacggacagatgacaagtttgtggcagattatgctacgatgaattcttggcatgtcagat

SEQ ID NO: 249788 - DNA, 342 bp, Glycine max
  unsure (1)..(342): unsure at all n locations
gaaaaaatgattatttaacacacaaaatgaaaatactcagctttattacctatacttaatagaaaatacttatactacaaaataatacaatctaccataaattgggagaagttaatacaatttatacaagttttatacacaaaagttagtcattgtcaccgactaacaacaaatatcatggaaaggagcttaaaccacagtcttacgacttgtgttttattcaagcacaagtgtttaaactattcatcaataacaactagcaagaggtccaaattttgaacttcatctcaagccatanagtcagaaatgcataaatagaattagaaggacttttacaggctt

SEQ ID NO: 249789 - DNA, 317 bp, Glycine max
cactactggaaaacctgaatgcataattttattgaggcaatagacttaaacatttgggaagccatagaaatagggccttatatacccacctgtcataccctaatttcgtccggggattattacttgatgacatgcaacctttgattggttgtttcaagatacttgacaccctttgttgcacaatatgtaagtctcgagacgcgccggaagtcaaaaggaagcatggttatgcgatccgtgaaattccgtagtgtggcggaaaccaataagaggtgttgttgcgcaatccgtgagtgttcgtaacttcttcgaaagct

SEQ ID NO: 249790 - DNA, 405 bp, Glycine max
  unsure (1)..(405): unsure at all n locations
agcttgtaggagtatggggtacccatcacatgtgggactaggtggcggccgggcgatggtgcacaacaagttttccacatccacaaagcgcgcataaacccaccatcccctgttgcccacctccaactgagctcacgtactcccacgtagcccatatcctcgtttctctcaacaccgggtccccatcaatcctcccaagcttccacaacatccaagcaaaacaacattcaaacagcataagctatcacggccaagcaaaacagagcaaaggcagaaaactctgccaaaaaaaaacccaaccaaatcacagcttttctcacttaaagatcccagtaacaattccctcgttccggttcattaaccagtggatcgactcgaanatgttactggaagtctttagtacat

SEQ ID NO: 249791 - DNA, 322 bp, Glycine max
  unsure (1)..(322): unsure at all n locations
agcttcatggtgctatgactccttgtttttccatcatccatccctcgtagagataaaagggctacattctccatccaaaatcacgtaaccttcctcctgggcatcctcgaatgcatcttcttcttcgcattcgacccataactcatcatcagctaagatgagacgaagttgtttcatgagacactgatgtaatggaccataaggtccaccacatttgaaacacatgcccttttttcgcttataaactagatcctgatatgccaaatgcttggctcctctgcctcattgtctgtgtttatttntttcaacaccatctcccctt

SEQ ID NO: 249792 - DNA, 267 bp, Glycine max
  unsure (1)..(267): unsure at all n locations
ttcatccgcagattcctcatgtaggactagactcagctcaagtagcttacanaaagttaacctaatttagcctaagcttcgtctgtagatccctcatgtaagactaggcctaaactaaacagcattattggtacaacataattaagacccaaaattaacctacagatccctcatgtaaggctaagtttcaatcctgcttcgatcaagttctaagggaacagtgcatttcccaatgctaaagtcacttaactgtgcacacaaatgggt

SEQ ID NO: 249793 - DNA, 379 bp, Glycine max
agctataaaacaagttatttgcttttatgacatgatttacactaaaaaataaattacattggaagatggtgtatctttctataatgagtcaaccaatgacagatgttacccaaaaagagccttgaagcatataacctctaggcccaaattctaaaccagttaaatgtaacatgtgctagcgagatgaaatgtgatgcagtgcttgttaatgaagggaaaaaaaacaagctaaaaagctccaccatggcttgaaaaacaattgataacggtttcttattttccgtaatctattatatggctggtgcacaataatttataaggcacgatatgtctacaagtttgtgtgaccaactaaagtgttcataaagctagtactcca

SEQ ID NO: 249794 - DNA, 347 bp, Glycine max
  unsure (1)..(347): unsure at all n locations
aacaagaatcaagccaaggctattgtgcaagcaatcaatggggcanaacacaccaaaagattatgatgatggatggctcanattctcacaaaggtaaacttatcactttcaaattgagctttcaaaactatcatgacatgtagaggaaacacaaggatttcaaatcataaaatgtcaagagacttttattttcagaacaattacccattactcgaacatatcctataattcanagaaaaacatgcaaatttaacacaacanaactaacaaaattaaactagaacccaacaaaactaacaaaattaaactaatntaacacaactatcagaaccaaaaccaaagaacac

SEQ ID NO: 249795 - DNA, 386 bp, Glycine max
agcttaagctccttcgactgcatattgctcttaatatttgaaaagtatccttgtggaaccttcacccgacgaagacactgacaaaaacttatcttctcctttttggacaaagtatggcaagctgggggtaaataaattttcttcccatcaaaccttggatgcaactgtgatcgtatcttcatatcagctagatcttgacgggtattcaagccattcttcgtcttgccttgaatgttaaggagtgtcccaatgacactgtcacatacatttttctcgacatgcataacatcaatacaatgtctaacatctagatcagaccagtacagaagatcaaaaaaaatgccccctcttctttcatatgcaactcttacttttatccttctttt

SEQ ID NO: 249796 - DNA, 324 bp, Glycine max
gacaaggtggcttttttttcatgattacgttgaacaactatggttgtctacatatattattcagaaccagtcattttgcttttgcaacctaatttttggtcctgacctttgacgtgttcttggttttgtttgggtaaatgacattggatttggacacacacacaaacacaaaggtcactaaaaacagtgaggtatatttttttgagacagccattatgattttttattacgggtagtttttttagtcgtcctcctgtctttggtattactatacttgatggttttatcgtttgtttatgatgtatgtcttagcggatttcaaac

SEQ ID NO: 249797 - DNA, 337 bp, Glycine max
atagaataagaagataaattggatagaagtatggaaatggtgaactgcaaaaatgagtaaaatacaaatgcttgacattgttttctttcaaaaaaataacaaatatccataacttcatgtcaacataataaagcaacaaattaaagagatcaccttatcccacaaggtaaactaaaggagagagcaaccagcaagttccctaggtaactgttgagactttggcaagtgtatcaatcgctcttaagtagtaaacctcggaagtccgagtatcattccgcagggattttattgcacttattagatacttctcaatttgtaagtaagagtaaaataataa

SEQ ID NO: 249798 - DNA, 286 bp, Glycine max
  unsure (1)..(286): unsure at all n locations
taaaatatttcgtcagtaattagggttntttttcatcctggaatattttttactttgactacaaatggttatttattttcgcttaaaacttaaagacttgatatgaaacatattgaaaggaaaaatgtattaaatgttaaacaanacaaataacctttacagacaatgaaaaaatatagctgaaaaaaatgctattaaagaaaaactttttaatcagcatcactatgtaatatgacttcgactgtgcatgatgtgagggagttacccactactatgtagcccacat

SEQ ID NO: 249799 - DNA, 250 bp, Glycine max
agcttgcatttggaattgcgaaatccccactccatcattaggattagtacctgacatctcaaacaaacaaatcaaacgtaacaagacaattatagttgctgtttgaatacctcacccactcaagtgtatcacacaattatggcttttctctaatgaaacactcttgccttttaccactctaattccccttgagttcttaggtaattcaagagattatggccacaacaaagaacaattcaccaatatgtgt

SEQ ID NO: 249800 - DNA, 206 bp, Glycine max
  unsure (1)..(206): unsure at all n locations
cgctcttctacanattgatgaagatgctctgtggctaactcgaagaatcactttgtgaagcccaatttacaagacaagaagcattcatgggctgagttgatcaatattggtggactatcaatattgagctcattagataataattaagcccaacatgctcataaattntaaccaactttgtagaataagatatatttcatgtttaa

SEQ ID NO: 249801 - DNA, 273 bp, Glycine max
ggagccaggctattccttgcgttctacaattcaaacacttgctgaaaagaccgttgacgccattgcttccttcgctcagatccttatacttttttacccctcaaagccaccccttacaaattgtgaggaacatcttctcattagctgtatagaaaccacgctccatgaaaggcgcgatgattataaccgacaactcacctgctccttagatagcctaattattttatgggccgaacgggattattattaatacaacgccctcgtcccatcaag

SEQ ID NO: 249802 - DNA, 368 bp, Glycine max
  unsure (1)..(368): unsure at all n locations
gcatgggtaatgctgccaccagactntccgtaagcccacgcggtccttgcacaaataagctgatctccagaaagacccataaaaaactcatatacggtgtgggctgtcttctcaatctcaactaaggctgcaatatctgtgtcaccagcctgtaccaatacatctcagtaagataatacgaccattgtagaaatcacatctagtcgaacatatnggtactaacctgaatgatnttagtttgccaaagctntgtaatgcgaaaacctcgacgctcanacaatcgttngcaaacaccttgacctgtgcgtgcccncatgttaaagatcataattccacgtggtttgattactgctatccnctcctcaact

SEQ ID NO: 249803 - DNA, 339 bp, Glycine max
gagtggtacctggagatatgtcgcgggggtcaggagaccttggggacgtcaggtggggtgctattgcccaaaaccaagcttgaccaatctcaacccaacccgggcatagttagtcagtgagaacctgtgatgtacctaagcaggcgagctcctggctgtcttcagataaaagaaacaaaaccacaaagcaaggaggcttgtgtggtggctggcccactgtgaactttgtttgatatgtgggttatggcctctggtaatcgattaccaagaatgggtaattgattacaaggcttaaaaatgaaaacaggaggctaagctggtgtctggtaatcgattacc

SEQ ID NO: 249804 - DNA, 347 bp, Glycine max
tcatcagaggagcataaaccacagactcttgcgacaggtacagatttctgattcaaggccagctgggttaccaagttaaccaatgcatctagtttgccttcaagcttcttagtttcagatgatgcagatgagtttgtagctacctcatgcactcctctaatgaccatggcatcatttatggcgctaaattgctgggagttggaagccatcttctcaatcaagtttctggcttcagcaggagtcatgtctccaagggctccactactagcagcatctatcatacttctctccatattactgagtcctctcataaaatattggagaagaagctgctccgaaatctgatg

SEQ ID NO: 249805 - DNA, 258 bp, Glycine max
actctagctatacgcgatacaatgaaacaccgtaatcgaaaggcacagggggccgctctaacgtcttttactaaaagaacaatacacgtctcacaaaagaaacagatgcatcatcaagcaaaaggtacaacgatcaacctaaaccgagaatgtgcattcaaggtaaaactcaacacacagttacgctatgttagctctggaaaaaggaactaaattattttatttgaaaggaaatccctacgtatcacataatactaa

SEQ ID NO: 249806 - DNA, 197 bp, Glycine max
ctgcttctctagaacatacttatatacattcccatcattcttcattcactgctcatgtcttgcggacatggatgcctcacggacgatgcggcacattacttggtaagagcatattgagagaatgaccacctgagctaaaatgtgctgctgtttgcccatggaacccatgtcttttctcacaatgtatcaatcatgaa

SEQ ID NO: 249807 - DNA, 405 bp, Glycine max
agcttttgcaagctgtaatcatttatcctatctccgaaagccaatggatgagtctcgtccaggtagttccaaagaaaaccggcctcaccgtgataaaaaatgagaaggaagagctgattcctactcgggtgcagaacagttgaagagtatgcatcgactataggaggctgaactaggttaccagaaaggaccattttccactggcattcattgactagatgcttgaacgcctggtacgtaaatctcactgctgtttccttgatggtttttctggttatatgcaaatcactattgctcttgaggatcaggaaaagaccatattcacctgccccttcggcacttttgcctataagaggatgcctttcggcctgtgcaatgcccctggtaccttccagcagtgcatga

SEQ ID NO: 249808 - DNA, 455 bp, Glycine max
  unsure (1)..(455): unsure at all n locations
agtctacgattgccacatgtgatgcaacaattggtagccatggctatacgagacatctngccaaacaaagtcgggttagccataactcgcctgtgcttnttcttccatgccatatgtagcanattcgttgatcctgtcaagttngatgagtgggaaaatgacgccgcaattatattgtgccagttggagatgtattttccccctactttctttgacatcatgattcacttgattgtgcatctggtcagagaaatcaaatgatgtggtcctgtctatttgtggtggatgtacccggttgagcgatacatgaagatcttaanagggtatacaaagaatctatatcgtccagaagcatctattgttgagaggtacattgcagcagaagccatttgatttttttagaatacattgagaanggctaaacctatggccttcttgagtctcgacaagatgac

SEQ ID NO: 249809 - DNA, 395 bp, Glycine max
agctttggaaaaagctgtttttattttctcactaatccaatctgctggcttagcgagtatccgctaagcgtaacactcttgggctaagcgcgaggatgaatccaaaataagatgagttgtacaggttcgctaagcgcaccgcttcatctctctaagcgcaccgcttcagttcatccgctaagcgagaaaggcgcactaagccaaaaatcactaacgtgcgctaagcggtctatatgtgcgctaagcgcacgagcacaaacaaggccacctatttaagcctgaaaccagaatttgtgaagagagtttggacagggattcaaagctttgcatgtctagagtttctagagagagaaaggtccaagttctacagaagtttgagagaatttgctgtgtga

SEQ ID NO: 249810 - DNA, 403 bp, Glycine max
agcttgatactcggcttcggaggtgcttctttacaccgtacatcgtttcttcgagcgccaagaaataatggagtgggcgaaataaacgacggtgcgtctagaatcacaacagcctgcccaatcggaatctctgaaggctttgggctggaaaggaccagtgtcggataagaaaataccagagccaggagtacccttaaggtatcgaaaaacacgagaagcaacttgtgagtgagcactagtggggtgagccatgtattggctcaattgctgaacagaatgggctatgtcaggacgagtgcttgtgagataaatgaggcggccaaccaaacgacgataggaagatgaagcttcatcaaatagcggatcacctaatgtggcatgcacaccagtagcatattccata

SEQ ID NO: 249811 - DNA, 374 bp, Glycine max
  unsure (1)..(374): unsure at all n locations
attcttatggcattatgaatgacaaggatgaagagacataaagtgcttanagagttcacttacatgtggacaattttcataaagaaaaaaagctcatgttaaaaagataatgcaatcagattaatacttctcaagaaaagaatgtcttgtagagacatttttagacaatttaaatatttttatttggctatattagtataaatgatctctaatccacatattttctaatattatgctcttttttttcatgttcttttgatatactttgtgtctaaataacttgaattcatatgatcttgttataaattatctttggatttgtacattacttatgcacgaatttataaagttcttttgttagttagtatcttact

SEQ ID NO: 249812 - DNA, 293 bp, Glycine max
gcccccaggatcatcagcgccgctgcagctactatgattgcttgatttttctaaagttcagggagctacttattctaaaggaaagctgtctgtcaattgattcggaacactcactgtggctatcagacttttcataattcaccactccaataattaagatagctattcaggctatatgagtaattcaagacgctgacttttaataatgtggcgtgactatgctatggaatatcactgaatatgctcgcccatagaatgatgatgttcaaacggagaccggttcagttataggg

SEQ ID NO: 249813 - DNA, 377 bp, Glycine max
  unsure (1)..(377): unsure at all n locations
atgttcttctgtaatcttgctggtcagcaacaagaagctgaagagaaaataatgttcaantttccccatctattgagtccaaaaccgatttcttccaacttctaaccgaagaaacattcttctagctaacgtcagacgagagagcgacataacttttgttgccattgtgcctatcatgacttctctatgatacactctttacacaaaaatattgtaagctggtgttgctgatcagatcctttaaccaatatgtttgaaatttgcttgcatattgagatacccatcctttctacggaaggacgtccagtactaccaatatctaacattatacaatataccaattctttttagttaacgacgtaatctaggagaaacta

SEQ ID NO: 249814 - DNA, 414 bp, Glycine max
cgcaggcatgccagcttctagccaagagggcgtacctttgttttaattcctttgagagcccgtttgagccttggttccctttccttgtttagaagctcactacaagccttaagtgaaaaaccatgatattaccatatccttaaagaattttggagctttggaagtgttctgggaataaggggggggggttttgtttcattggataacatgttttggtggccatgcttcatgaaatattttgggccatacttgatgtacattgcatattggctaaatgttggacatgctgaatgagaagctggttctcaaacgccacagactcaaaaaaatcggaaaagaaaaagaaaaaccataaagcttgagtgaataagatcttaatgacaaaagaatgatgaaactcttggtctactcttt

SEQ ID NO: 249815 - DNA, 482 bp, Glycine max
  unsure (1)..(482): unsure at all n locations
ttatctaaatttcacaaatatccaaatcgtttaaacgtgacaataattgatatgatagtaatacgaaattntgaataacttatttactctggttganaaaaacgtggcagtagaagaactttgtcgtgttcttcatgagtagaccataattgataatcctaatctgtttcggtgaaacaattccacttggacaaaccagacaaacactaccatgttgctatattacgagtaacgttccagcacagctnttggttatgcctcttcttctctcggaagaagttcacttctttactcaaactttgtgttcactctttctctttnttggtgtntagtcggtgaatcatggagaacccaatcgacggtggcgagttcgtgtacctttccgggttcggcaccacttctcttcgaggcctcgcagagctctgcgtggncagacagaccctcgttgccgacggctctcgcgagcaatttggacctctact

SEQ ID NO: 249816 - DNA, 379 bp, Glycine max
agctcctccttccttttcctatttattggggaagaagggaagaacaaaaatgtccaaccctcctggtatctgaaattcactgaaaattattgagaaaaattgtttccatgaagaaaattcaagccgaggcgcttccgtaacgcttccatgacgtttccgcgggtgatttcgctaagattttcaaccgttcttcgtcgttcttcgtttggtctttgtcgttcttcgatcatcaaccagtaagttcccgaaatcgaactttctaattcattctatgtacccttagcgggcttgcatgcttttattttcattttatttactttccgcaccccctcttgacgtgctttgacatttattaaatcacttctctgctaacaaaaaa

SEQ ID NO: 249817 - DNA, 459 bp, Glycine max
  unsure (1)..(459): unsure at all n locations
ctcagcttgaggattatggggacncctacatgtggactaggtggcggtcggtcgatggtgcanaacgattctccacatccacaaatcacgtataacccaccatcctctggtgcccacctncaactgagctcacatactcccacgtagcccttatcctcgttcctctcaacgtcgggtccccatcaatcctcccaagcttcaaaaatatccaagtaattcaacattcaatcatcacaaactaacacagccaagaaaacagggcagaggcagaaaactctgtccaaaacacaacccaacatcacagctttccacattcaaatacccagtaacattctctttgttccagtaagtaaccggtggatcgactcgaaaattgtactggaagctctagtacataattctacatttgacccgtggatcggtagaaaatgtcagaacccatatgactaccttttacaa

SEQ ID NO: 249818 - DNA, 409 bp, Glycine max
  unsure (1)..(409): unsure at all n locations
agcttcataggagcccgttatcctaggatcctcctcaccaaaggattcctttgcttcttggaagataaatggccgccgaatggagaaggaagagagagaggagaccccacttcaaggagaagatgagtctacaagaagctcaccaccataggaagccatggataacagcttgccggaagaaggagatgaatgaagggagagggagagaagagcacgaaattttgttctcaaaaagagctctgaaatctgaagttaatattcaaatgatcaaagttgaaaaaaatgcacacacatgacctctatttatagcctaagtgtcgcacanaattggaaggaaattcaaatttcacttgaatttgaaatagaaattggggagccaaactttggagcccaaaattcactaattatg

SEQ ID NO: 249819 - DNA, 451 bp, Glycine max
  unsure (1)..(451): unsure at all n locations
atcacgcgaccttagatactcagcttctanactttgtcaagaatgaagctctgataccacctggtagacatgtggtctcagatatnctaagaaagagggggttgaattaagatattcgaaactctntcccctaattcaaaatctatcttactttttactcaagttatgaattcccttaatgacaatcttcttaaatattaattcaaatgaagcaacttgaatatgaatataaagcactaataaataaataagattaagggaagagaaaatgcaaactcagttttatactgtgtctgccacacccnttgtgcctacgtcagtccccaagcaacccgctagagagttccactaacttgtaaattccttttacaagttctaaacacacaacgacaacccttcctttgtgtttagagattctntacaacaagagactcacagtctcttaatccct

SEQ ID NO: 249820 - DNA, 302 bp, Glycine max
tattcataaaggagagctctcacgcaaacgaacccgaactctcactgagggcaaataaagtttcccaatatgcccaccggttaactaaaaaaccgaagcccgccgcttggttatttccagaggcagctattaagcatgggggggtccatatccaaggggatggcggcgatattgttggtccacagactgatgattctgaaagggagacagcttgtgaaagtgatatatgaaatgagggacgggatgacatgggccaaaacaacgatggggactggattaatgatgatgagagggaaaaattt

SEQ ID NO: 249821 - DNA, 163 bp, Glycine max
  unsure (1)..(163): unsure at all n locations
ctacatatatataatgagtcttaagccttagcatgtatttttngtgcaatggttaaaaagtgtctggttcttgtcctgctaccagaacattgagccaaaacaatctcagtgggactattcctgaatcacttgccagtctttcaatcttaatcaatgtgtatgt

SEQ ID NO: 249822 - DNA, 377 bp, Glycine max
  unsure (1)..(377): unsure at all n locations
cggaccttaaagcgactgcagcatccagcttgtaccttaaaattatttatcatgtgatggaagtatactaaaaatgttagtccgtttgccagattgattgcgaaggaatgcgttaaccggatcccggggatagtgtgatccttatatttggagaaaaacgactatcatttagtattgatttttgtgtgaatctctgaagtatggactgaatgcatgaaattgaggatgacgaaagccatgtttgattgtgatagccactttgccaaaaagctgaccatgtgcttgaatgaattattccttgtacccaattcgagctgaatgaatnattgattgattgaaccctgagcctatacagtgttatctcctgctaccttgac

SEQ ID NO: 249823 - DNA, 452 bp, Glycine max
  unsure (1)..(452): unsure at all n locations
ctcagctatgctgcanacattacaatagacctcctcaacctcagcagcttattatccacagcagaaccaatatgacctctccagcaacagatacaaccctggatggaggaatcactctaacctcagatggtccagccctcagcaacaacaacaacagcagcctgctccttccttccaaaatgctgctggcccaagcagaccatacattcctccaccaatccaacaacagcaacaaccccagaaacagctaacagttgaagcccctccacaaccttccctcgaagaacttgtgaggcaaatgactatgcagaacatgctagttcagcaagagaccagagcttccattcaaagcttgactaatcagatgggacaattagctacacaatngaatcaacaacagtcccagaattctgacaagctaccttctcaagctgtccaacatccaaaatgta

SEQ ID NO: 249824 - DNA, 392 bp, Glycine max
  unsure (1)..(392): unsure at all n locations
agcttgttgaatgnganagaattgagagttgtttgaaatctaccaaaaattgttggacattaagaatttgaaaagaaattttttaattaatgtttaataaaaaaagtcgctgactcaataaaagaaaacttaaaaatgaaagaaatttgtattagattgtaaatgtaaataaataattaaagaatattagtagtaatattaaactaataattgtgagtagtttatgaggaatgtgaaatgtgaagatggaagtagaaaggagggatgaacacgtggagaggggaaggtagaccccacaccgaaccctttaaaatgtctacctcgccgctagggcgccaaaacccccaattctattgtgctcacagcacaccccaatntctctactgtcaatt

SEQ ID NO: 249825 - DNA, 386 bp, Glycine max
  unsure (1)..(386): unsure at all n locations
tctatctaaatgttttcaagctgnttgctcattctgctaacacctagctacctgcattntcttacttcattntacttgaaatacttgaattatcagtattngattgtaacttattctttggaattatagatgacgcgagttgaagcatctgttggaaggaagaaactaaatccaccagatgacttgacaaaattgcatcccgaagtttcatctctgataaatgaaggcattgcgcataatacaactggcaatattttttgtgcctaagggcttgcctttacttgacaacaatgtctaaaattcccttttatgttgagacatttggtactagattagctcaagatattcccatattctaatactaactcgttctcatgggttgattg

SEQ ID NO: 249826 - DNA, 377 bp, Glycine max
  unsure (1)..(377): unsure at all n locations
gccttcagaacatcccattcaatgttgttttcttgatctaataacaagtcaatcttgtgtggaagtgggtatttgtcacggacataatgaagaatagaagccaaatatgatcaatacaactgcagaanatagcaattcacagcaaggcattccagaagaaagctgcaatcacatttcatttgcagcaagtcatgagccttttgcacaagagtgtgtttcagaagttgtaaaattgaacacagagcatggtataaatgataacatttccaaccgtgatgataagaatgattntgaaaagaatacaagtctggtgaagacaaatgttgatgactcactggattatggctcgtgtgataaaaatctgtgtgtaaaacgta

SEQ ID NO: 249827 - DNA, 400 bp, Glycine max
agcttgcacacaagtttctaaatctatttttgcacaaaatgaagtaactaaataactccactaatatacagagtgactactcataaggaaaggataggccttgattaggcccatctaatctacctaattaaactaattatacaaggcaaagccccaatttgcagtcgaattattcaagtgtagaggttctgaattccaagctcaatttaacccttgaaatgagagaattggcccaagcttatttctgataaaattaaagctctttctattagctttccaaggactagtcacatgctccatttggatttctttagtgtcctataggtcctacacaagaaagataagttaggtaactgcaaaatcgaaaaataagcaaaaattctcaattaagctcaatcat

SEQ ID NO: 249828 - DNA, 443 bp, Glycine max
  unsure (1)..(443): unsure at all n locations
atggtatggatggaagtctgctngnggagcttctatggatgctagatctttgagcttcaatgatgtccttcaatggtggattttcaccatggagatgcagcataagacaaaggacaagaggagaggaggcgccatccactacggaataagccatggaagaaggagcttcaccaccaagagagtgccttggataagaagcttggagagggtgctctcctggaggaaaagaaagagagagagaaagagaggggggagcacgatactgaaggaagaaaagaggaagagaagtgaactttgaagtnttcttacaagactctcattcatcaaagntacaacaagtggtacacatgcttctatntatagactangtagcttccttgagaagctntcttgagaaaactttcttgagaagctagagcttagctacacacacccctctaata

SEQ ID NO: 249829 - DNA, 414 bp, Glycine max
ccccggatcttaagtcacctgcggcatgcagcttccagaataagatcattattcagactcaagaatcaagaatcaagagaagacttaatcaagacaagtatgaaaaggttttttgaaaaactgagtagcacatggatttttctcaaaacatgtttaccaaagagtttttactctctggtaatcgattaccagattattgtaatcgattaccagtagcaaaatgaatttgaaaaagttatcaaatgaatttacaacgttccaattgatttcaaaaaagctataatcgattacaatgttttggtaatcgattactagtgcctttgaacgttgaaattcaaattcaaatgtgaagagtcacatcatttcacataaaagctttgtgtaatcaattacactgatttggtaatcgattac

SEQ ID NO: 249830 - DNA, 404 bp, Glycine max
  unsure (1)..(404): unsure at all n locations
gacttaggtttctcttaaagatcttcatttcatttcctttnttgccttggtaaaccacttcgatgaaactggtgcgtttggtgagtctattgagagtatcatacacgactcaaggacttgagacgcttaaaacanatntaagaatgagatcttttatttagtcataaaatagtttattacaattattatttatttatttacaatacattttcggactttctgtaatagaaaaatatcgattaaatgtcataattaatntcatttaaccattatttttaatagacaataacgtcaatccccgtcaattttgttgagacattngtgatcttaagtaaattttattattntagctttgaaaactctttcaactgaaactagatcgctatattatctataactatata

SEQ ID NO: 249831 - DNA, 413 bp, Glycine max
  unsure (1)..(413): unsure at all n locations
agcgtgagcactttcagctcagttttatagatgcatagagccactagnataatttagtaattaccatttaccaccctcatttttgtagagaatagcgatggttctgcttacagactatctctatcagaggacacaaaagctctcaatcagctggcatgcagctcttgggctatttttgtagtttaatctactctttatctttagttgagaattttttttctgattataaattttaactgcttttgctaatacaaaatgcagaatgcccttacccaagagggaaaggagatggcatcggtgctttacacatatcgcagttgtgtcaaagcccttcctcacgtaaaaattttctcttaagctgcaggtagttgaagtctgtcaatggatacaaagtacattgtctattagatgaa

SEQ ID NO: 249832 - DNA, 299 bp, Glycine max
  unsure (1)..(299): unsure at all n locations
ctcagctgactcgaagcctcttttcaaagctgaagctccacaccgccagcggatactatctgcttgagtctgcttcttcaatcgactntttgtggagcgggcatacaagtatcgccctgttaaggtggtggaatttgaacttccncggcagcagtgtgtggtttacttggatctgaagcgggaggaatgtgccaatttgttcccatctggccgagtatattcgcaggcattccatttatgcggacaaaggtttttcttatcagcacattgcaacatggaccaacagagctctttccatt

SEQ ID NO: 249833 - DNA, 411 bp, Glycine max
agcttcaagagatcatccccttgtttcattattcgtgatatctccaaaggggtaacaactagacattctcttaaagatttatgcaataacatggcttttgtgtctatgattgaacctaaatttaaatgaagccataatagatgatcattggatagttgctatgcaagaagaactaaatcagtttgagagaaacaatgtgtgggaactagtagagaaacttgaaaactaccccataataggaacaaaataggtatttaggaataagttagatgaacatggcataatcattaagaataaggctaggttagttgcaaaagggtataatcaagaagaaggaatagattatgaagaaacatatgctcatgttgcatgattagaagccattagaatgcttttagcttatacatccat

SEQ ID NO: 249834 - DNA, 426 bp, Glycine max
  unsure (1)..(426): unsure at all n locations
acgttcttccggaagtagattctgagtacttcttgaagtcacacattcttctttcggaagaaggttcttccggaaaagttccggaaagagggtttccgaaaagtttttcggaaaaatcttctttcggaagatgaattgctgaaaggcagtttcgccacttcactgttngctgggtgcacgtagcaactcccacaagttaactacaatgaatatagaaagcttattntatacattaattgctntgaaagtgantttctatgtcgattatgaaaacaattaatatagaaagtctattttatactgagagataacaatacagctacattgcaatattccttatcatatataatatttccatctaagaattacacaaatatagtaatataaacggacttataaaacagaaattttcatttcattatacgt

SEQ ID NO: 249835 - DNA, 392 bp, Glycine max
agcttaatgaaaaactaaaaaatttatatattatttaccagagtgcaataacataaattataggccatcataatagatggatacaaggatgcaaaatctaaagtagcaattggtttttcataaaatccaacccttgcctccaatacctgcaagttgtaaagttcaaaatgcatgcatcaaaaggcaacacagcttgacaagtgaaacgtccaaaaggcaaatacaggaaaaggtgtaaaacattaactccaataatattatgtagatctccatacataaagatacttgaaatttgagaattttttcaattttattattaactgaaaacaaagggcatttaagattgacttgattcagcctaacatgctgtaagatcccaacaaatagtacta

SEQ ID NO: 249836 - DNA, 70 bp, Glycine max
cggggatgcggttgggaggaaccctttaaatgaaacaaatactggaagtgttcatcttttacaacgatat

SEQ ID NO: 249837 - DNA, 379 bp, Glycine max
tgcaagcatgcaagcttcttatccaacgctcatcttgttgttgaaactccttctcccatggcttattccctaatggatggcgccacctcttacctcttctcctttgtcttccgctgcatctccatggtggaaaatcaccattagaggacctcattgaagctcaaagatccagcctccatagaagctccacaagcaagcttccatcaaaggcccagaggcacaggcactactaagactattaattgttgctcaaggcccaaactaatttaaaggtccaagttaaatatgtttttagtcctaatttctatttattgtaattttggcccaaactgtttagaaagcccatgtctatttttatctttttgttcagaacactata

SEQ ID NO: 249838 - DNA, 444 bp, Glycine max
  unsure (1)..(444): unsure at all n locations
ttgtctctttaaatacacttaagaaaactcatcaatagacataaactcaaaatgcttatgatntctatttagaaagnttgtcataatccaagggttttagactcaacaatcacaaaatccacattaaaaccactaacaattgatattgttacaactagaaagacatataataaaggatactaacatcatcaacttctatatnctttatcacatttttgggataacattctgtcctccttcaattgtgttgagcttgaaaagaaaacaagtcattcaatatctaatatctgaaattaataaaaggttatgtattacttcatgtgatcaagccatctgaaacatcagcttcaaatattgattatcacatacgtgatagaatcacaatcctaatgagactcaagacattaatagaatgataaactttcatattcacgtggatctatc

SEQ ID NO: 249839 - DNA, 363 bp, Glycine max
  unsure (1)..(363): unsure at all n locations
tgatgaatgagagtcttgtgagacacaactcacagatcaacttctctcccttnattgtttccttcaatgtcgagctccgccctctctctttctctccctctctcttttcctccattgaagcatccttccaagcttcttatacaaggctcatcttgggggtgaagctccttctgtcatggcttattcgctaatggatggcgccgtctctccactnttctgcttagtcttgcgctgcatcaccatggcggaaaaccaccattaaaggacctcattgaagctcaaagatccagcctacatagaatgctcaccagcaagcttccatcacatgcgatctcagacgtaaattgatctggagaagggcac

SEQ ID NO: 249840 - DNA, 234 bp, Glycine max
  unsure (1)..(234): unsure at all n locations
agagaagttgaactttgaaatgtgtctcataagtttctcattcatcanagttgtgacaagtgttacacatgtttctatttatagcctangcgcaataactaaattgtgaatttcattntcatttcttgtgaatctaanaggaatattcttagaatatgccaaatgcatcttagcatattctctttagatgccacaagcatggaaggtgtgactctagcacatgggaaagcttct

SEQ ID NO: 249841 - DNA, 237 bp, Glycine max
agcgccttaaactagcttgaaggtgtttaccttctgtagcactgtgctatcacgccgtaaccacatttggctacgcagaaacttgagaaatgatgttagtcgtaccaccgtattactaccacgttattaccttacgaaaaggcctaccaaatatacggcctacgccatatgctacgccacccacaggcctttacctaattgttaaagaatggccggttaatttttgtgggtttaaaa

SEQ ID NO: 249842 - DNA, 255 bp, Glycine max
tgcttactttagatacatactcatttcagaggaatccactttataacactagtgtattttacgtctgattcggcgataataaatgtagtctggcatttaatatacatccaatagtatagtactggagatatacgattcatcataatttttttaatatcgggcgaagagcgtctgatctttcttatggttggattaataaatgttatgaattctacaattattttctaagaagaattgttcaatattaataactta

SEQ ID NO: 249843 - DNA, 379 bp, Glycine max
  unsure (1)..(379): unsure at all n locations
agcttatgtgtttgagtatgtgtgttcgcacaggcttcactactgcgggactgccttacctcaacaacagtgtactctctgtcatgttcaatttcaagtatgcagcccttgccattaacaatcgctttggattcatcattatgcagtgattgttgctgtgaaatttgatcagtatcaacttggacaaaggcaggagtgggtaatgttgtcttgacttcttcattcagtaactgtatttttgttgcttcttgttgatcaaaattgccaccatcctctattccttgttgcaatgttgtcttgtcagtgtcaatcactactcgttcatcatttttatatgtttgttgctgagagaattccttaanttcacctttgacaattt

SEQ ID NO: 249844 - DNA, 184 bp, Glycine max
  unsure (1)..(184): unsure at all n locations
acgccaagagacttgggtggaggagtaatctctaccactctgtagggaaggatgctacctcgntctctgtctctgtctctcttcctactgcacgaaacctcaaacgacatcgtctgcttaaagagagcgaacacgagattaactaatgaagaatcatggaaaagatagaacagtgggtgagtgc

SEQ ID NO: 249845 - DNA, 348 bp, Glycine max
aaaaacaacaccagggcgtttagaagtacataacaagacgcgccacataatgggtatatcagggcactttgactaaacaaaaatataaggtgaccagccaaagtcactctatttagggagaatactccaaccatatggagagcaacataggcttatgggagcactcaaaccgagtgtattgaccccaaggcctagattctgaagaatccggtagggtctcaccttttttattcaaggtcaacccctaaaacaacttttgcacacagacactactcatgaattatacaatacccacgacctcacacttgatttcaaatatgtgtaacacaatgtgcgtaaattttacac

SEQ ID NO: 249846 - DNA, 394 bp, Glycine max
  unsure (1)..(394): unsure at all n locations
gctcataagatggagtgctataagcccctccgcgaattatataatttgagttctatcagaaacgaattggacctaacttagtctacactgagtgactacataattattagagactgtttttataaatcacgtgtatcatttactaaagaattatatntacagtggaataanattattattagtaataaaactatttctttgagtatttaatctaacatatcatattgaagattcgaattcaaaatttttgattaagctataacaatttgatccacgtgctcgatcgtatatttataagtgatctagtattaagattggataaactctgatgttggaataacaatgaaaagagtctaattattggcaaggtggtactcaagtggctagtaatttg

SEQ ID NO: 249847 - DNA, 381 bp, Glycine max
  unsure (1)..(381): unsure at all n locations
agcttagctcgtatagctctcttccatttctccctntttgatataagaacttcatacacttgcctcacgtcatcaattatctttcacaaaacaaacttatgcatcatcaaagtgatacctcttggttggaccacaacactcggatggaatccttgtggtcttcaagttcttgaccatcaaacccatatgtggaggctttggaagtatcaaaccacataatttgattctaaaaaagcctatcatcaaacagatctaacttgcatgcaagcctatttacctaaaaaatgggcttcccatcacggcgatggttcacacagtctacttctgatctctacaagcattttttggttgaagcaaacttgaaccctttcttcttaccta

SEQ ID NO: 249848 - DNA, 265 bp, Glycine max
  unsure (1)..(265): unsure at all n locations
gtatcttcttgatttcaggattgtcatcatacnaaagggggagattgtggaagctatgccttncaagaattatttgatgatgccaaagaatcaagagttaagcaaattagacagattcaagaatcaagtgtctagaatcaagaatctagaacaatcaagatcaagattcaagactcacgattcaagaatcaagagaagactcaatcacgataagtactaataagtntttcacaacatcgagtagcacaagaattcttacaaaata

SEQ ID NO: 249849 - DNA, 265 bp, Glycine max
atgatgacgtaaatctcggcgtggtaatgggctttgtcggccgcgattgacaaacggcgcacaagacgaggttagtctctgcgtgctatcagggcttttcggtttacagataaccaacaaagaatatctatacagataaccatttgggtattttcgcccgccagcgtgactataatgtcaatatgacagatcttgtgagcgcggaagatgacataaatcttccgcgtgtcaccaagcttgtattccacgattgacgatgggtgca

SEQ ID NO: 249850 - DNA, 392 bp, Glycine max
agcttctggaggaagcctcttaatgaagcttctatataaaactacatgaagctgcctcggttgaaacgctgcccagccttcgttaaccgttggatcttctcgaaatttggtttgcaacttcacaagacactttaccatgatttaaccgttgggatatttgagaaaatatctggagtgtgctagaagcttccgttcccgagagcatattttatttaagcatttcagcctttgctttctagtagcttaggaaaaatgccatttcttcttctttctttcttccaaatcaatttctaaagttccaagtactttctccatcacccacatccaccattagccaccacaaaccatctttgttttcattgaaaacccacccgagaggaacctttacccga

SEQ ID NO: 249851 - DNA, 450 bp, Glycine max
  unsure (1)..(450): unsure at all n locations
aagattattgaaatgcacaacanagtcttgcttntatagactcttcatgtctggtcaagacaaccatttagaaaagttataactcttagaaaaacttataaccaatttgaaaaagtcaaaaaccttttgaagagttacatcttttgatttattcagaaacagtcactggctcttgtgtgaaaggatgtgactcttcacattcgaatttgatttcaacgttanaggcactggtatcgataccnaacattgaatcgatcagcttntgaaataattggacgtataatcaattgaaacttttcaaataatttgtactggaatcgatacataatctggaatcgataccaagagtaaactcttggtaactgtttgagaaaacatggctactcatttgaaaaacttcatactatctgataagctcctgatctgaactgactgatctgaacttgactg

SEQ ID NO: 249852 - DNA, 334 bp, Glycine max
agcttgaagaagaattgctcttatagcttgagatgagtttgtgagtgattgtgaggtcctatagatggaggagtgatcgaggccgtacccgaatcaaataaacatgaaaatgcagtaactaggaagtgatcctagtttgtttcccaacgagcagtgacaaaccaaatgttcataatatacttgcagtaactataacgattggggggggggttgtttgctttgtgattaattatctcaacaagtaaactggaatactaacttctactattatgaacgggttagttcttttttttcagaggacattcacttatcctaggatatggagaatttgtcc

SEQ ID NO: 249853 - DNA, 432 bp, Glycine max
  unsure (1)..(432): unsure at all n locations
tactcagctcacgaaaggtccactccttccaaatctgattcaggctaaatatgttgctttgttcgtgctcatgcgcttagcgcaattctgaaccgcttagcgcgcattactgaatttcggcttagcgtggctattctcgctcagcaaatggactagagcggngcacttatcgggatggccctttgctcagcgaacatgcgcagctcatacttcttccagattcttcgtcgcacttagccgaggaatgttgcactcagcggatggctcgataagccagaagattggcttatcgagagggtgagaatcagcacttcacanactcacctaattaacctgaaattgagagaaaatgattattaaacacacaaaatggaagtactaagtagttagtacctatctttacccaaaagtattacaacactacataataac

SEQ ID NO: 249854 - DNA, 404 bp, Glycine max
  unsure (1)..(404): unsure at all n locations
agctncttaatttttttactatcttttttttttttaaaaatcgagactgtgtgttttgaaacaccaacaacgtcctttattgaaattttttcagtttttaaacaagaatgactggtattttttttttctcttttactatcttatcatttttattttaaacttctatgcatgggtgtgatttgagatataaataatagtatagttaagtgtaattttcttttgacttctttcttaaatttacaggtgaattaagtgcacgtaacaaagacaaaaatttagttctccaattaagttgttgtttgatttggtgttcttaaatgagagcctcttacggttcttctatcacatgctggagctatttttttttctggggttttatgatctaagttggcaggtacataaat

SEQ ID NO: 249855 - DNA, 332 bp, Glycine max
  unsure (1)..(332): unsure at all n locations
tactaagcttagcttcttatgaatcttttaacgaagcttctcaggaggtgagcttatttatgagaggggtgtgtgtagctaagctctaacttctcaaggaagttttctcacagaagcttctcaaggaagatgtctcaagatagcttctcaaggaagctacctagtctataaatagaagcatgtgtaacacttgttgtaactttgatgaatgaaagtcttatgagacacactttatagatccacttctctacctctgttattccttcaatttcgggctccncccttctctctgtcttttactccattgaagcatcatcttcaagcttcttatc

SEQ ID NO: 249856 - DNA, 342 bp, Glycine max
ctcattcaaattccacagatgttgctactcacatactccaggaacattctcttcattccgattcagtaaccattggatcgccttgaagatgtacctgatggctcctattacagaaatctaagttttgaccgccgggatctgctagaaaatatatagaacatgagatgtactacctttcccgtgactagcactgcacaaccatatttcctcataataggccacaattgctgcacaattagacagctcttgctgcataatatgacagatatcgaattctagcttgctgagatacaattccactcacactggatgctacatgtcctataccatgtataaatcatg

SEQ ID NO: 249857 - DNA, 325 bp, Glycine max
cgactgaagaaccgggaagaacggttcagacctctgcgagattcctcacggaagacggtacggaaacgccccggaagcgcctcggcttagattttcttcacggaaataatttttccaagcacattcgaaagaaagagaagtgcctaaggggctggacctcttccttcatgctttcctcccctatccatagcaaaagaggggaggtggtggccgcccagctcgcccaggcgagcagggttgctttctctaaaagcaaccgccttctggaggaatcttctggagggcccaaatgggcctgggtgtatttgcacccccattttactaa

SEQ ID NO: 249858 - DNA, 164 bp, Glycine max
  unsure (1)..(164): unsure at all n locations
taataaatcccgatcatatattcacaatgagaagttaactactcttgttactgtaatgatatcgcgggtcatatattggcagaacatgtatacgtgttactaatatgtcataatcacaatcttctttgtaacttttgtgtngtgttattacatcttctacattc

SEQ ID NO: 249859 - DNA, 364 bp, Glycine max
cctgcggcatgcaactttaccgcatcaaaatccgttgtttatcaattgacggcgacccttgaaaatggcgattcgatgcaacaaacagtgacctatgtgcccaacgtcccaaatgctgaaatcacgctggcagtctcgaaagaaccggtgattgtccacaataaccatcttacgacactaacaacaacagtctctgatacagagggcaatgcgatagccaacactgaggttacatttactctgccggaagatgtgaaggcgaacttcacgctgagcgatggcggtaaagtgattactgatgctgaaggcaaagcgaaagtcacgctgaaaggtacaaaagcaggcgctcatactgttacagcat

SEQ ID NO: 249860 - DNA, 319 bp, Glycine max
  unsure (1)..(319): unsure at all n locations
tgcgctcacatctgccggtagcgtgaatgtcaccgcctcataggctatctggttgccgtttccatcagtcactggtgcctgcagcctggtcatcccgacgttattagcgataaaattgtcctcggtaacgttaagattaacctgcgcagtgagcgtatccgcaataaagttcaccaccaactgctcactcttaccgccagtcatcgatgctgtaacagtatgagcgcctgctnttgtacctttcagcgtgactntcgctttgccttcagcatcagtaatcactttaccgccatcgctcagcgtgaagntcgccttcaca

SEQ ID NO: 249861 - DNA, 402 bp, Glycine max
agctcgttaaagaacttataaattttcaagaacaagcttggtcacacatcgttcgcgtgtatgatatccactcacaaggtttgaagtagaggagacctttaatcctataacgcaacgtggcagacaaaagtgggaagttaacttgaatgaccattattgtcaatgcggaaagtattctgcacttcgctatccatgttcacacattattgcaacttgtggttacgtgagcatgaactactaccaatatatagatgttgtttacacaaatgagcacattttaaaagcttactccgcacaaagggggcctcttgggaatgaagcaataatttcctctttctgaatacgcatagacacttatccctgacccaactacaatccgtgcgaaagggtcggcaaaatcag

SEQ ID NO: 249862 - DNA, 342 bp, Glycine max
  unsure (1)..(342): unsure at all n locations
ctcagctgcttggggctttatggggctggactttagcttaatggngttctttaatgggcgatntccaccatggagatgcagcagaagacaaaggaaaatatgtgagaggaggcgccatccattaaggaataagccatggaagacggagcttcaccaccaagatgagccttggataagaagcttggagaggatgcttcaatggaggacaagaacaagggagagaaagagagaggcgggagcacgaaattgtaggaatataagaggtatagaagtggaactttgaagtatgtctcacaagactctcattcatcaaagntacaacaagtggtacacatgcttcta

SEQ ID NO: 249863 - DNA, 425 bp, Glycine max
cctctatagtcacctgcggctgcagcttacatggagctatatcatataagaagtccatatcaccacatgattcaaaaagagacctcatatgtaagttactcatttataccaatttaatgatgatcatgaggaccaaaacatttcattcacaagattagtaggctactcaaaagtaggttattgaagtgtgtttaaatgactcgtgttcacaagaaaaatatcagtagggaagaccttaatttaccatacaatttgagaaggggaacaacttgtagaaaacattatctgacaagagattcatacaaatttggatcagtaaagaataaccctatcacctatcatatacccctttgtcacaatcaactcattacccttctatagatagcaagatcatgagaaattctcaggataaggtatagtctatg

SEQ ID NO: 249864 - DNA, 277 bp, Glycine max
  unsure (1)..(277): unsure at all n locations
actaagcacacctctcgcgctaagcaccaagtcttcatgcgctaagcgggcacttgctcacgctaagcgcttggacccttgactagtggttggatggtagcgttaagcgcacttcgctgttgctatgcccaatacctctctggaatttgaaatntctcgaatgggcttagcaaggtgatgcattaagcacaattccctctctaatttggaaaatcttggaatagcgctaagcgcaagccatcactgcattaagaagcatgtntatgcactaagccca

SEQ ID NO: 249865 - DNA, 316 bp, Glycine max
  unsure (1)..(316): unsure at all n locations
aacctttttgttcggnccctgctccacactctttatacatgctttgtgactaagtattgattctttggaagctctccaagaaaaccaatagaagctctcgtctaaagaactaagaattctcttcttaaaagtctgatgcgatgaaaacacattgcttattaagggttctgcttaacattgaaaactatttcggtcctatgaatagtaaatacgtcggcactatgaagcttgacacaaggtcaccagatagggaccctccctctggatctctagaccatcctgcataaagtctatcattctacgactacaaaagacg

SEQ ID NO: 249866 - DNA, 251 bp, Glycine max
  unsure (1)..(251): unsure at all n locations
gaatcatcagngacgcagcgtcagagagtgtcagcatatccattatgagaactgaagatagcacctcaaaccaagtatctgatatactgctatcctgccaattggactctaccatgtgtaaaaaactataaattcaatctatacaacaactatagagaatgagtttgcttatggccatacatgtcatccatcttctgaagtttctcacttgaaaactattagtccttcaggaccatactctgttaataaat

SEQ ID NO: 249867 - DNA, 91 bp, Glycine max
gccctaaatccccaggtacaaaagcctgccggctaagaaaaactaaccatagcaggcactcgtggcgaggaatctttaaccaaccagaaaa

SEQ ID NO: 249868 - DNA, 409 bp, Glycine max
agcttgaagaggatgctcttttgtaggtttagaaagagagaaggggggagcacgaaattgaaggaataaaagagggagagaagtggaactttgaagtgtatctcataagactttcattcatcaaagttacaacaagtgctacacatacttctatttatagactaagtagcttccttgagaagctgtcttgagaaaacttccttgagaagctagagcttaactacacacacccatctaaaactaagctcacctccttgagaagcttccttgagaagctagaacttagctacacacacccctctaataactaagctcacctccttgagaagagaagtttgagcttagctacacacccatataatagctaagctcacccccgtgacaaaaaacatgaaaatacaaaataaaa

SEQ ID NO: 249869 - DNA, 337 bp, Glycine max
agcttgaggaactacccaaaggaaataaggcattgggtgcgaaatgggtattaataaacaagttggacgaggcaggtaaggtatcaagaaacatgccaaaggtaattgccaaaggctattctcaacaagaaagtatagattatacttaaacttatgctcctgttgcacatatattttacattcatttgcagctcataataaaatgaagctgtgtcaaatggatgtgaaaagtgcattccttaatggacttacccaagaggaagtttatgtagaaaaaccccttgtgtttgagagtggtacattcccaatcatgttctgcaactaaacaaagtcctgt

SEQ ID NO: 249870 - DNA, 426 bp, Glycine max
  unsure (1)..(426): unsure at all n locations
gcagatgaagaataatggccaaacaatgcgtaccataaagacaaatcagatgatgacaattacatctatggtgagttgaagaatatatggaatctcccaaccaaatgccagtttagaagttaggaaatgatagatgtaaagataatatcttatgttcttacgaatattttttctttttaattataaatatatcactttatttcattatatttcctgattttaaagagttgtctggtagaagatataatgaatataattaaaaacaacattgtgctacaatatatattatctatcataaatctaatatagaaattatatttcagaaacaataattcttatgacatttagatataatataacttgtatatgtanaatatatatgtgttatanactttaattatatagaacgtaacattagaaatacta

SEQ ID NO: 249871 - DNA, 403 bp, Glycine max
agcttcaacattagatcacttccagggtgctggaactacttcacatggacttgatggggcctatgcaagttgaaagccttggaggaaagaggtatgcctatgttgttgaggatgatttcttcaaatttacctgggtcaactttatcagagaaaaatcagacacctttgaagtattcaaagagttgagtctaagacttcaaagagaaaaagactgtgtcatcaagagaattaagagtgaccatggcagagagtttgaaaacagcaaatttactgaattctgcacatctgaaggcatcactcatgagttctctgcagccatcacaccacaacaaaatggcatagttgaaaggaaaaacaggactttgcaagaagctgctagagtcatgcttcatgccaaagaact

SEQ ID NO: 249872 - DNA, 347 bp, Glycine max
ttattcgtgaccacatagtggtacctggagatatagtcgcggggtcacgagaccttggtgacgtcaggtggggtgctattgcccaaaaccaagcttgaccaatcccgatccaacccgggcatagtcggtcagtgagaacctgtgatgtacctaagcaggcgagctcctggcagtcaacagatcaaaggaacaaagaccacacagcaaggaggcttgtggtggctggccagctgtgaatcttgtgtgatatatgggttatggcctctggtaatcaattaccaacggtgggtaatcgattacaaggcttataaatgaagacaagaggctaagatggtctctggtaatcg

SEQ ID NO: 249873 - DNA, 179 bp, Glycine max
ctcgccccgcgaactctaaaacgacctgcggcgtgcaagcatgaactaccctctgttagttgaagcttgatggtacgctaagccttacatctcaagctaatcgcatattggataaaaatttgtgttgtagaaagcgctaaacgccccctgttgcgctaaaccccacaagcttattggac

SEQ ID NO: 249874 - DNA, 267 bp, Glycine max
ctatattggtttttaaaaaagcctcccgatagaggtgccttcacttacacgggagaagtgcttcatttgcgtttgacaaaaaaaaccccatggatcaatgcgtataccaccagatcactgggagtgaaatatggtttcttagtttatatgcagaagatattttacttgcaaccgaagattggggcttgctacatgaggagaaacaaattttctctaagaattttgacatgaaagatatgggcgatgcatcttatgtcctcgccatta

SEQ ID NO: 249875 - DNA, 374 bp, Glycine max
  unsure (1)..(374): unsure at all n locations
ttgagctgacatatttactgacatttctagagatcaggaacaataatagaataaagaaccaattgatctggataaaaggataaattaagataaatcatacaagctggcataaaaatcagtgtctatgaagaataaaacaaggtgaaagggaagtgtgcttgttgttttggctcgaaattggttctataattagtgcttattttagaccaatcttagctctgaaatttcaattgaaaagaagtgtgaaaataagtgtcacaactatagggttatgtnggatcaagtggcctcagaataattatggggagagtgaattaattattaaagaacctttactaattaanaatatatccttcttaatgttactcaattca

SEQ ID NO: 249876 - DNA, 406 bp, Glycine max
  unsure (1)..(406): unsure at all n locations
agctnttgtgcgcatgagacaaccatgttttcatctcaaatatcatcaatgacttacacattataaaaaaaatttgtggtttactgtctttttagtctctaaactttttaggatttctatttgtaatacctgtactttttcttactagtcaatggtccttaattttttattaaggactaaaataaaaaatcctaaaaattttagtgattaaaaatataatatgtgcccattttgtcctattcgacgaaaacgttagaaaaaccaaaaagggggtctgtgaattttgaaaagaaaggttcgggagttgtttttgcacggggaaggtatacacgcccatcacagtggacgacaacctttaatcgagtgtacataatgtaacttcaaaattatgttgtttcttttttat

SEQ ID NO: 249877 - DNA, 345 bp, Glycine max
  unsure (1)..(345): unsure at all n locations
ctcagcttcttatccagccactctctcggtggtgaagcttctccttccatgagttattctctagtggatgacgnctnctctaacctcttctnctttatctttngctgcaattccatgacttanaatcaccattgaaggaccttatttgagctcanagatccagcctccatagaagcttcataagcaagcttccaacaagtggtatcagagcacaagagcttcaagtaggtgctccttaaacctncactaaatttcagctttactntctcctccattgntgnttcttcgtttctcttcatgtaatctctcacgtgtcttgtgctgaatagttgtaacatatatttt

SEQ ID NO: 249878 - DNA, 402 bp, Glycine max
  unsure (1)..(402): unsure at all n locations
agcttgatgtgagaaagcgtggaagagtccgtcttcctacttttgtttgttgaccatagagtggtacctggagatatgtcgcgggggtcaggagaccgtggggacgtcaggtggggtgcttttgcccaaaaccaagcttgaccaattccgacccaacccgagcatagtcagtcaatgagaacctatgacgtacctaaacaggcgagctcctagcagtcaaccaataaaagaacaaagtccacaaagcaaggaggcttgtgtggcggctggccagctatgaatctagagtggtatttggaatttggcctctggtaatcgattaccaacgatgtgtaatcgattacaagcttanaaatggagacagatgctaaaatgtgctttggtaatcgatacccatggtgg

SEQ ID NO: 249879 - DNA, 272 bp, Glycine max
  unsure (1)..(272): unsure at all n locations
cactagtggacatggagtttgatagacacaagtgggtcattcctcanagagagaagagtccagctgagggacagagagtatactgagtttcaagaggagattgcccagaggcagtggactcagctggtgtcacccatggctaagtacgacccacagatagtcagggagttttatgccaatgcatggcctatagaggagggagttagagaanaatgctcctgngtgagaggccagtggatcccctttgatgaggatgccattaatcagtttat

SEQ ID NO: 249880 - DNA, 341 bp, Glycine max
  unsure (1)..(341): unsure at all n locations
ggagggatttggtttttctattcatatctttcttagcggnnccctgtcctgatctcccgccccggactcaagcacgcggctcagcttactcctggattattacgagatgaacataccgtgcccttacttataacgtataaaatgaattcaaatgtaaaagtgaatcgattccattgtgggaagaataccacggtagaaacgtgcaatccaatttaaagctgaaggatacccatgcgtcgtgtaccctacggattaataaaatatgaagagtccactttcaaggttagtctgacaccaggctattttgtgctttcacaaatgctagagattcagaacacaaa

SEQ ID NO: 249881 - DNA, 289 bp, Glycine max
  unsure (1)..(289): unsure at all n locations
gaacttctgctttttgttgtcacagagtggtacctggagatatgtcgcggtggtcatgagaccttgnggacgtcaggtggggtgctattgcccacaaccaagcttgaccaattccgacccaacccgggcatagtcggtcagtgagaacctgtgatgtacctaaacaggcgagctcctgtcagtcaacagatataaggaacatagaccacacagccaggaggcttgtggtggctggccagttgtgaattttgtgtgatatgtaaagtaatggcctctggtaatcgattac

SEQ ID NO: 249882 - DNA, 400 bp, Glycine max
  unsure (1)..(400): unsure at all n locations
agcttagtcattcataatacattgtaattaacatctcaacatgtttaataacatgtctagtaataaaacttaccggggagaatacaaaatttatggaatacttccataaatctggtgttactttagaagcttaattcttctgatttgtggttatcttatctttttatttttttgattggcaatttgcgcttatcttaatatctatgtttatgcaggttgtctttatttgaatgaaacaaaaatgttggttcagaagactatagtgagaagttaacgcatttggttctatttctgtctcagccaaaatcaatgttgttttttcgtatttaacaatttgctggtgagtggagtgcatgtaatgctaaattttacaaggaanaaattcacagctggagcaact

SEQ ID NO: 249883 - DNA, 409 bp, Glycine max
  unsure (1)..(409): unsure at all n locations
ctcagcttcttatctctttacttgtccattgccaantgntcccnctcgtcatatttcttcttcttcttcactttcagagtatcactattctcaacatcatcttcaacctncctcttgctcttattgaccacatctttagtgctagcgttntgggatatcanactcatntttcacaacccaacctgcaaggtaaataaggttcaaccaacttgacattttggaattcaaatcatgaaatgaaatacataacaaaatacggaattagagagacagtaaataacaaattcaaatgaaacaactaacaattaccaatatgtgacgctgtgattggtaaaatcagagacanagganaaaggggaatcttaaatcanataaattanggttgaaaaggagcggnatacctttgtta

SEQ ID NO: 249884 - DNA, 403 bp, Glycine max
cctgtcagcctgcaagcttatagacccattttctatttttgactctacacctatttccctcatacgatgcgactacaaaggcactgataaattggtagctaataggctgagaaaggtattaactcacctcatcgataaaaggcaccccaccctttgtaaaaaatatacaactgcaccacggtgttctggttgctcttgacgtatacgacgatgccaggaggtccaagaggccatgtatggtctttaaagtaaaccttgaaaaggcctatgattcatcgtcatggcatttccatttttacatgatgagaacaatgggttttattaactatggatatcccgataacggatgcatacctcacctctgggcaatccttggaatggaagcccactctctatataaacc

SEQ ID NO: 249885 - DNA, 451 bp, Glycine max
  unsure (1)..(451): unsure at all n locations
ntgtatggtagaaggtgtanggcacncttatgctggttatatcccggttaagacctcaccttaagacctgaagtggtacacaaaaccactgagaaggtcaagttgatccaagataggatgaagactgctcagagtaggcagaaaagttatcatgatacgaggaggatagacctacaattcgaggctggtgatcatgtattcttgagagtcactccatggactggggttggtcgagcatcgaaatctcgaaactcacacctcgcttattggcctttccaagcttataaagtcggcatgtgcataccnattgcattacccatctctttatctacatgtctttgtgctactccgatattcatatcatcctggatcatgatgcgcagtacgaactgctataaatgcttggatagtagcacaccactaagatgatcatgcaagactggaatctaaa

SEQ ID NO: 249886 - DNA, 524 bp, Glycine max
  unsure (1)..(524): unsure at all n locations
acggtgaatcatgcaaccctgatctctaagcactgcagctgcagcttacatgaagtacattatgaaacttattttgttggtatcttaatggtatgtcatcttcacactgacaatngccttaagttaaaaccttgtgctgcgcttgatttatttaatttgagaagtcaatccttaataatagaacgttgatgaaggtcatttcttcccccatagaacacccaataattaatttattgggttctaccttaccaattggctcatagagtattaaaaaccttagattttatgtctgcatcacgaaatctgtaaaatggacaaacccataattgacaaagtgatattgtctcgctaattcaaatggcagtgggaaccaacaaacttttatgattaatgaggtgaaatattgtgcagctctcatanatatgttgcattaggaacatggggggtctacaattttttttgatacaggtagacggtacgtctactggaagctccctaatattatggtgactctatgattatan

SEQ ID NO: 249887 - DNA, 529 bp, Glycine max
  unsure (1)..(529): unsure at all n locations
tgcactaccgacacaagntgtggtatttntcttttatcattttaannnnaagcgcgggtgatncttatagcaccataaaactaactatacaatttataatgaccacccccaaattaaattctttgtcttaactaggaatcaaaacaaacctaatggctgagtgtaaccgacattgtggccactcacagttactcccaacagctaacaaatcaaccaccactttgtctcccaaaagctgatgcctatgtgccatcgggcccctattacaactcgaactaaaactcacctaatgcctcttaattgattaaccacaacatattcttggcagccaacctacaaggattggccattttaaacaaataaacactcaaaattagacaagtgggtctttagactctccattggcctgaacaatcaaaccttgactctctcctgaacttgggtgaatcaaatatatgacagacttgtgaagacttcctggctatctcgctcaacatgcataagcctccacacttcagggatcttcgct

SEQ ID NO: 249888 - DNA, 294 bp, Glycine max
  unsure (1)..(294): unsure at all n locations
ttatcatactaactcatttacaaaaatcaagcagtcacagaanataaacttggtttcaagtcataataatattctaaaccggtaacttcttgatagttctgatttagtttttcatccaatcataaatccttttaatagacatcagtgaagcatatactcaacaatacttcagctgcttacactatacatcaatagaccaaaactatgattcanataaataganaccacagatacacttatacttaagtagtaaaaatacaaacctttgtagttcctgtatgttcattggaaaat

SEQ ID NO: 249889 - DNA, 184 bp, Glycine max
  unsure (1)..(184): unsure at all n locations
tactggaaaacccgaatgccaatttttattgaggcaatagaccttaatatttgggaagccatagaaatatggccttatatacccaccacagttgaaagaattacaatagatggcagttcatcaagtgaaagtnttactatagaaaaacctagagatagatggtcttgagaggatagaaacgagt

SEQ ID NO: 249890 - DNA, 375 bp, Glycine max
  unsure (1)..(375): unsure at all n locations
gcttcattcattataaacatntaataatntaacatttagtagatacatgttagtcacatgactnttaatagaactntatgtctaaaatattctcatattctttatcttaactccacaaaaagatatgacatcatttttaacctgaaaatattttaacattcttcactctntttctttnttctctaattggacataaatccagtttttcattgaacatgaactcacctcgttggtacgcatggtgtaacatctcttcttcttcttcttcttcttcttcttcttcttttcttcttagntcaatttttttgggcgtgttaggtcgtttgggtgctacattntnntgtggacgtgtttccaacaatgcctatgaatatg

SEQ ID NO: 249891 - DNA, 366 bp, Glycine max
  unsure (1)..(366): unsure at all n locations
gaaatgccgaatctaaacctcagccaaatgagacttaaccattaccaaattcatttaaggtaaaaaaatggaagatgtgaaaggagatgaacatgtgaagttgtgaaagccatgaagatttgacgcgcgagaaggaaaaacaaaaacaaaaatcgtataacatgagatngcaaatcatgagaaaaaaatgaaaaagatgatcagaacacgtaagaaaagaaataaaataaacaaagaattatggaataaaatatgaaagagtaaaacaatttctttcaggtgagtattattagaanatatgggtaanaaacttgtactcgactagtactcaatagtattagaataacaaagtttaacaactcaaca

SEQ ID NO: 249892 - DNA, 193 bp, Glycine max
ttatgtggaatcctctgtcatgggacatggaagcggctgctatcatggcgatcgcattggccaatggagggcgaactatgccttctaaaacaagaagaatcaaaacagttctatgaacatgctatataaaagatgtttctcttccttatgagtgtacttttaaatgtgtgtgtgcaaatcaaatgagatacag

SEQ ID NO: 249893 - DNA, 455 bp, Glycine max
  unsure (1)..(455): unsure at all n locations
agtcacctgcggcatgcaagcnttctccccattntcttataaatagggggagatgtgaagagaaatttcgttcagccctcctggtaattcagaatcacttanaattagtgaaaaaaattggttccgtgaagaanatccgagccgaggcacttccgtaacgtttccgtgggtgatttcgcgaaggttttcgaccgttcttcgacgttcttcattcgttctttgtcgntcttcggtctccaaccggtaagttccctaaatcaaacttttcaattcattctatgtacccttagtggtcctcatttngctttacgtgctttcatttacatttcatttacttcccgtaccccctnttgacgtgctntagtcatttgctttaagtattntctcgcctaatcaaaaaataaaataaatttccaccgttcatttgaattgaacattcgttagtttctggtaaa

SEQ ID NO: 249894 - DNA, 431 bp, Glycine max
  unsure (1)..(431): unsure at all n locations
tactaagcttattaagacanagaaatcaaagatattcaagatggatgatcaagacagcctctagagtcttatgaagagtatatttaataggaagggaattccaattgaagtagcaaaagggttggcccagaaatttaagttaaaaagtctttttcaagaaatttactctctggtaatcgattaccagaggatgtaatcgattaccagtggccaaaactgatttacaacagctattaaaatttgaattcaaaatttgcactgtgtaatcgattacacatatatggtaatcgattaccagcagttattgaacgctgtaattcaaactttaaatactgtaatcgattaccagagcatattntcagaanatatttcaacagtcacatctttntatttggttcttgaatagctatcaaaggcctatatatatgtga

SEQ ID NO: 249895 - DNA, 263 bp, Glycine max
ttggaacattatatgatcaagtattgtctatggaacacctgaaaaacatatgctgatgatataaataaaatttgtcatataatgttattgagtcatgagggcaagccttggaacaaccgtgatgttgttgtcttatgaccaggagatcagaagttcaaatctagaaagcagtctctccactcgcaggaagaagaagcctcatgcactgtgtcacccttctatgatataactgagtcatctatgacttatcacttatttataac

SEQ ID NO: 249896 - DNA, 326 bp, Glycine max
agttcttcttttgaagcagatgccttatatgggatgctcgcctaacttcttgttttattgcacagtgatatgtggtctttgtaaagtgaagggtaggatgcaacaagttgaagagctcatttcggatatgcttcagaatgggcataacctggatgccactatgcataattacttacttgcgggattttttgaagacggggatgaagaaatgacaccaaagacaattatgacataatggacaagaactttgtaataaccaagacattttcttcacttttgtgaaggtgtgtgtgcaagggaaaacttgaagatggagaaacagtatc

SEQ ID NO: 249897 - DNA, 427 bp, Glycine max
  unsure (1)..(427): unsure at all n locations
agctataacattcaatttctagcgtctcgatatatttcgggactcaatcagacatccgagtaaaaagtaattgtcgtttgaatttgctaagagctgcggtattcaatttcgagcgtctcgatatattacgggactctatcagacatccgagtaaaaatttattgtcgtttgaatttgctctgagcttcaacattcaatttcgagcatcccgatatattacgggactctatcagacatccgagtaaaaagttagtgtcatttgaatttgctctgagcgtcaacattcaatttcgagcgtcttgatatattacgggactcaatcagacatccgagtaaaaagttatgggtcgcttgaattgttcagagattcaacattcaatntcgagcgtctcgatatattacgggactcaatccgacatccgagtaa

SEQ ID NO: 249898 - DNA, 400 bp, Glycine max
  unsure (1)..(400): unsure at all n locations
gaggaaattcaaacgacaataccttttgactcttatgtcggattgagtcacggaatatctcgagacgcttgaaatngaataccgaagctctgagcaaattcaaacgacaataactctttactcggatgtccgatcgagtcacgtaatatgtcgagacgctcgaaatagaataccgaagctctgagcaaattcaaacgacaatacctattgactcggatgtcggattgagtcacgtaatatctcgagaccgctcgaaatgaataccgaagctctgagcgaattcaaacgacaataactttttactcggatgtgcgattgagtcccgtaatatgtcgagacgctcggaattgaataccgaagctatgagcaaattcaaacgacaataacttcttactcggat

SEQ ID NO: 249899 - DNA, 488 bp, Glycine max
  unsure (1)..(488): unsure at all n locations
agcttgatgttcaatatttactcanattttccttgactgtgtctataattaagaagtcaatatgcttactagatgaagagaanaaatcaattntgtatgttgcagacttgaagatccacccaatgaacatgacatgaagaacaatttttctacaaacactcaaaatgaaatttcgtcaacaagatgagttcattctggacattgtatatggagttcaaaaatgcaattgagctattcttgatggatatagaaagcttgaataacgatcttcaactttcataaacaagttgtggtctggtacaacctgtatcatggacaaaattgagcctaaagttatagacgtngattngcctagataactngatatgaatgtagcaatttgaatactttngagctacacaagttcatttaagatgatctcagtgtctatggaaatctanaagaaagatctatatctttaatgaagaagtcatgagctaatatgactt

SEQ ID NO: 249900 - DNA, 317 bp, Glycine max
  unsure (1)..(317): unsure at all n locations
aagcttttgtggacatttctgactntcgccaataattggtgtatattatgatccaaaagccctggtcaagactcattcatgtctgttgctaatgaggaaaaccttgtgtcacattcccaggtgtgctcttcaattcttgaagtccccgtccctgcaaagatgctatgatttgaattttaacatcaatgggtatcatcattcagttgctggtggtggtggtggttttcttcttatagaaagatggttcagtgatgcatggactggaaagtctatcttgaacagcccaccttcgtatctgctatcaaatctttctttta

SEQ ID NO: 249901 - DNA, 286 bp, Glycine max
  unsure (1)..(286): unsure at all n locations
agctntcttcganatatattatattctntntcctattattntaaattgcttaatatattattgctcacactcttatgctttntgataagtgccatatctagttatttttgggattaaaatattagcacttatcttttgattgtaatagtttttcttataaactacccttaaatctagttgttttatagatattgtacatttactaaagcttatgtttaaatatgaaagattcaaccaggattctgtaggctctgatggttgtttgttagatccagaaacaaagtca

SEQ ID NO: 249902 - DNA, 489 bp, Glycine max
  unsure (1)..(489): unsure at all n locations
ntacacacacaacatgaatcttttaggcatgagtcaaagaacatcttgttcaaatatgactcttgagaaatatatattagaaggattagagttaatcacaaatgataaaaggttaacaattatttatgatatactctnttcatcaagtcatacaaacatccgagtccattctggcattcgggaaaatctttcattgttttcaccctctaggtgcacattttttttccaaaaaacctttcgtgttttgatccatgaatttccaaagaaaactggcgataagttctttctcaaaagaatgttagttttgttagtttttttagttttttgtcttgaaaaaagttataacctangaaaggttgtcacctgagattacacttatcataggaacaaagggcgcgtgaacgannagaaaccatacacaaatcccttcttctttttgttagtttttcttgtttcaaaccaaccatacaatgaataacacgacacatg

SEQ ID NO: 249903 - DNA, 447 bp, Glycine max
  unsure (1)..(447): unsure at all n locations
tgtctaagattctcaaacaaccaagtaaacaccatgaactacctagatcaacgagcaccagtgtgtaatctctaacagaagcncccctccccaaaattaaaagataagaaaacctattgctgctacccacgaggaattacaaatttttattctgtctccaaaaagatggatggggaaaactatttgctgcttgcccctttcccattgtgtccatcatttgtattcaattgaactttacttttctgtcataaaagaagaatggatagaaaggaatatagaagtaaaagtacatctgatggaggaatacgaatgcttctgagaagtatagaaattaaaaagaacatcgtgcctaggtgggccanataaacaagggctgccacaatcagtgatagaaactttctttgaacagccatgaacagatactgaacaatgagaattcacaacaca

SEQ ID NO: 249904 - DNA, 455 bp, Glycine max
  unsure (1)..(455): unsure at all n locations
natntttttcctctaaataagaaagacgatcttaagccaaattgggcaagccaagtttgggctctaagagctcaactnggcttgactcatttacaccgctacttaaaagtatgctattgccacaaaagcaatcatctacaataaaccagtaatacgctttcctagttttcaaaattcttgacggaagatatcataatcacggggtgtgtgttgatttnaatacaaaaccaaccagttcacagtatgaagaactgaagtagagtctgaggagtcaagaatttatgcttggacggctgangtatccctatagaagagaactngaggcccttcacaggatgactttcctagataaagatgatctggcattacaagatagcaattcgtatgatactctgatatagacccagcatgtctatgataaaaccatgtgtatgtaggacatgcctagattgtcn

SEQ ID NO: 249905 - DNA, 249 bp, Glycine max
  unsure (1)..(249): unsure at all n locations
cttaacctgtacctgcttaacaatcattctattgcccctcactagtcactactactatgctttattatcgaagccacttgaggctttcaatgtcatattattctttntggatgtgcttatcccttcagtacttactacgataagttaaagggagagatggatgccattatagaattcacacggctccatgtttgggttattctcttattaatcaatatgcgtaaagaatgagtattactcgtattctat

SEQ ID NO: 249906 - DNA, 579 bp, Glycine max
  unsure (1)..(579): unsure at all n locations
cgtcgccacctatcaacgctgntggttttgataanntttatatntttaaantaggggnnnnnnnnngngccccggctggncnctgagactctcacattcanacacancnnaancatataacttactctaagccaagcagcctcacagcggcttttggaacctattgaggtgggtcttgcggtaagaaaatcatcctctacacatttagagctcggcgatcggataccacacacatgtggggaaaaaaatatcctctccactggttatgacataccggctgcacatacaataacagtaatattgcagacggatatccttccccggtcaaaccggaatcatgcatgatctgcatctctctctccgcctgctataagctccagttacaactgacaacccttctttaaaactctcttaagacgactacattggctccataggagaatatgataggaacactccttatataactacatgccgtaatatacgattcatgggtccgttctaatagattggaaatttacttcggatacgatcaaaaggttaatcaaaccacacatagtatataatgaaccgcgcccc

SEQ ID NO: 249907 - DNA, 420 bp, Glycine max
  unsure (1)..(420): unsure at all n locations
atcaatgactatgcttacaaagttgagctgctcggtgagtataatgttagttccaccttcaatgtctctgacttatctcttntttatgcagatggagaatccgatttgaagacaaatccttctcaaaagggagacaatgatgaggacatgaccaagagtaagggcaaggatccacttgaaggacttggaggacctatgacaaggggctagagcaggaaagccangaagctcttcaacaagtgtttntcatactatntgaatacaagcccaagtttcaaggagaaaagtccaaggttgtgagttgtatcatggcccanatggaggaggactaaatggcaccactttgtctcaatttagagtgttagttngctaaataatggccaatcccttgtaagtggtgacaaaatatgtttgggtaat

SEQ ID NO: 249908 - DNA, 537 bp, Glycine max
  unsure (1)..(537): unsure at all n locations
cgacggctgtnccatggatnacgctgcactatagagtactcaagcttnctcgngaagctctcttgagaagttaatgccttaactaccaacacccctctaataactaaactcacctncctgaaaattaaacacggatnaaataacctaaccaaattatccaacctcaaaggacacccaggatctgtctcacgaattttaaattcctgatgattctgctttttggattatgattataactatattagtttcagtacattggttttaagaattctgggttctggttataattatatacctataccttttgtgaatagntagtatgcatgttnttgaagcatacaagacacgtttacttgatcatgatgatatgcagtgacataccgttatctttttgtgaaatgggtgttatagactactttttgaatgatgcatggtatgatgaagactatgttcttttataagttgagctagcgtgtatgtagacaagaaaaacaagatgtagctaccatagaactgtatcagtgacaggtgattgan

SEQ ID NO: 249909 - DNA, 340 bp, Glycine max
  unsure (1)..(340): unsure at all n locations
catcctgcttggacgaatgagaaaattgcggcaaataaagagggtgacgatgagggagaaacccatgttgtgactgccattcctgtacggccaagtttcccaccaacccaacaatgtcattactcaacccttctccttacctaccacccatttatccacanaggccatccctaaatcaaccacaaagtctgtctaccgcactttcaatgacgaagaccacctttagcacaaaccanaaacaccaacaaaaaggaatttacagcataaagcctgtanggttcaccccaaattccgttgtcatatgctaaacttgatcccatatccactcgataattcaatg

SEQ ID NO: 249910 - DNA, 564 bp, Glycine max
  unsure (1)..(564): unsure at all n locations
ctgggtntttnnnnnnnnnnnnccnggcgcgcgtgatgatncattgtatntctgcgacactatggaacactcaagctcgtgctctgtatacaataaacacaagagtagttattgattctttagtcaaagtcagcatatttaccacagtgacattggacatatgtgactagaataggcatcagcaatactaagagctgcctagcccgatacaagtaaagtattaatatctctggatcagcccatacaagaagatattaagtaatacgaacaccctttgtgaactaacattgacacaattgtcatattcaaagcatggataggatgctccgtgtcgatcaattccatggtgatgttcaccatgttcgtgcctatgcttgtttccatgtgccaatgttctgctaaccaattaatgaccagatgagaacaattcctacgagtgtataccatatattagatgacacccactcattgagaagaagcttaaactttggatataagaaatatacgcaataatctcattgcctctatggttgctgctgctcacacagatgttgcaacactgga

SEQ ID NO: 249911 - DNA, 161 bp, Glycine max
catagccttcttccttaattctctttgagagttctgctaagaattcatgcatatcacttgttattgggtggcatgtatctcctactaagaacacatgcacttgtcttttaatttcaatccatctcttacctggcttcttcactatccccctattgtgcata

SEQ ID NO: 249912 - DNA, 428 bp, Glycine max
  unsure (1)..(428): unsure at all n locations
catgcaagctngtgctattccaagttcattaatcatacctttattctcagatgcttccttcactccttcagttagggccatgtattctgcttcagttgttgaaagagcaacaactgattgttgatttgctttccaactgattgttgtaccaaacaaagtaaacacatatcctgttaaggacttccttgtgtctacatttcctgcaaaatctgcatctacatagcctgtgactactgcctcgtgtgcttgcttcttgtaccttanaccagctttcaaagaatccattagataccttaatgtccacttcacagcttcccaatgtgcgctttcaggatctcccatgaatctgcttataatacttacaacatgagctaagtcangtctgctgcaaaccatttcatacattatgcttncaacaccactggcat

SEQ ID NO: 249913 - DNA, 539 bp, Glycine max
  unsure (1)..(539): unsure at all n locations
nnnaaccgactgtctgactacggcactatgatactaagcttacattctgagtgacattaaacatacctggnctaagcagaatgtctaaacatacctttattgggaaatgactatgctatatgcgaattgggaaacttcgattctaaagaaatacctacgccaaccccagtcctttgtttgaaactgactgtggaggtgaaacttgaggcgatgaatgcccttatagtcatcgctagtgatgaccatgtcatcaacatataccactatatagatcgatgcacacggccaatggtgaatgaagggaaaatattaagtgatcaactttaccacccagaactaggagatttgtttcagtcagaacgtcgaagtctacagaccagatgagaagtcgctgatattgtaaaaccacgggggtgatccatgtatacctcttctttgaaagtaccatgtaggaaagatttatgatatgccattggtaagaaggcaatatcaaatggtgggcatatcaagaccaagatgagcaacgtgattntggcatn

SEQ ID NO: 249914 - DNA, 493 bp, Glycine max
  unsure (1)..(493): unsure at all n locations
tgttataggaagcctatggtgtatttaatccaagtccgaatattaacaatattaattatttttcaacaggatttttctcattgaatattggtgctcccaaatattaactaattcgaaactataatataatgttttataatgaggacattttaataaatagatgggctcactaattaatttgatcttccaacctcaagttcttgaagacgggcaacaagatcgagccaattaagataatgttcagacaatagaataacgccccaagcaattgcaagtaaatctggaggaaaccaacaaatctcaatcatactttctttgtattatttatttctatatggataaattaaaataagtatgtacctatgtngaatgagaaccgtttcttaaaatatctttcagagtatccttacgagcttgagtttcttttgatgggagattntttaataaaagtaaacctatctctctgtaagttatcattcttatttctaatcaa

SEQ ID NO: 249915 - DNA, 287 bp, Glycine max
  unsure (1)..(287): unsure at all n locations
agcttggaagtgtatgattttntgaagaatattgatgcttaangtgaagaagatggtggtccctatggctattatggaatttcctgcattggtaaagaaggcaaaaactgtggaacacctagaaggtggtagcaaagtgatcagaacccatggtggtggatcctctagcactaagaagggaaactttagaagaagccctattctagaccccaacaacctcaggaaagtttagttgtgaccttgctaggaactcaatgacttagtgatggtccacacttaatgaccta

SEQ ID NO: 249916 - DNA, 397 bp, Glycine max
  unsure (1)..(397): unsure at all n locations
agagatttctagagagagaaatgttctgtttcttatagtttatgagatcttgctgtgcaaagacctgcagagaccggagcttgaagaggaagtcgtcctgagagcttgagatgagtttgtgagtgatcgtgaggtcctanaggtggaggagacgtccccactacttgtatttcttcaatccttcatttttctcatctctttgntgtaaaggaagcttcccagatatggagagctaaatcctctgttgttcttccttgtaggtacttgatgtaaatacctgtatatctatttaatgatgttntatgtgttttctgtgctatcagtacttcatttcaatgtgcttttgcctcgatcacgtagatgcatgctttgttatgatcattcaacagtggaaact

SEQ ID NO: 249917 - DNA, 109 bp, Glycine max
aattacgcgccgcctgccctcatcgcagactgttgaattattaacatttgccgcatgatgcatccaacggatgataactgaatgcagcgcatagacttgtgcttgtata

SEQ ID NO: 249918 - DNA, 413 bp, Glycine max
  unsure (1)..(413): unsure at all n locations
agctntataagcgcggttctgtgagacaaaggtcttgtgttcgcgatatgcgaagatgatgttccgagtaccttggatatggtacgaccatgccctcctgatttccagctgggaaattggcgagtggaggaacgctccggcatttacgcgacgagcataatttaaacctttacggttttaaaagctctatagttgggcctaggctntagagatttttccttttgttaagggcnctgtgtcttttgtttttgaatatataatacaaggatctttcttcatctgttcctgggctctacccattctcattcattggcatgtttactatcttttctgaaacggcagatccgatgacgagtctcgcgaatgtactaataccagtgacccgcctatcgacttcgatcgagaaatgaatc

SEQ ID NO: 249919 - DNA, 457 bp, Glycine max
  unsure (1)..(457): unsure at all n locations
tattccatgcaactaatataatatgatagatntgttatatcaatatgataccaataaatatgcagaataacaatatgatagcaatacatgatagatttgacataataatatgagtttgttagcacaaacacaggaataaagagaattctctcaaacaaaaagtaattggtacaaaaattcttatacatgtaacttccaaactaataaaggcttctctaatataatatgatagatttgacataacaaaatgataccaataaatctgcaaaacaacaatacgatacaaatacatgatagatttgacataataatatgagtttgttagcacagacacaggaataaagagaattctctcaaacaaaaagtaattggcactgaaattcttatacatgtatacttcaaactaatagaggcttctctaatgcaagctatttgtagctntcttaactaactacta

SEQ ID NO: 249920 - DNA, 298 bp, Glycine max
gctaatcctttcgatttataacaaacttgtgcacacattgtcttatagaagaacatctatggacatgcatacgcgcaaaatatgtagctatatagtataatatacaagaacactctatctaccatacatattcttttgagaagaactcatatatgcacgctcaatgtattgtgccaaatatacacatgtgcatatgtcaagtattttgctaccaaaattacatacgcacatttgaagcattctattaacacacaaaagaatttagttgtttattacacttattataatatatgcacat

SEQ ID NO: 249921 - DNA, 257 bp, Glycine max
  unsure (1)..(257): unsure at all n locations
agctnttcttcgaaatataaattattctttttcctattattntaaattgcttaatatattattgctcacactcttatgctttntgataagtgccatatctagttattnttgggattaaaatattagcacttatcttttgattgtaatagtttttcttataaactacccttaaatctagttgttntatagatattgtacatttactaaagcttatgtttaaatatgaaagattcaaccaggattttgtaggctttgat

SEQ ID NO: 249922 - DNA, 361 bp, Glycine max
gcttacacaacaactgaattttagcatgataaagacatctgttcaaaatgatttgagaatattattaaagatagagttatcacaaatgataaaggtaaaattatttatgatatactttttcataagtatacaaacatcgagtcatttggattcggaaattttattgtttaccctctcgtgcacattttttccaaaacctttcggtttgatccataatttcaaaaaactgggatagtttttttaaagaatgtagttgtagtttttagttttgtttgaaaaagtatacctagaaagtgtactgaatacactataagaacaagggcggaacaaaaacatccaatctttttttgttagtttctgt

SEQ ID NO: 249923 - DNA, 264 bp, Glycine max
  unsure (1)..(264): unsure at all n locations
cataaaacatgaataatttaatcatacacaaagcataatttgtaaaacaaacataacagattctaaaacatacataaagcaaaacatgaataaaaccaaattgaaatgcaaaccacttagtcatatatcacaaaccataaatatcatgttcagtcatactaagcanatattaaaagaaatactnaagtgtcanatgctataataatatagccaaatacactgctagaaatcaaaatactattaataatagtaatgtctaaactg

SEQ ID NO: 249924 - DNA, 331 bp, Glycine max
agaagtccatctattgatgaagttggcgctctcctctaaagatcttaaccttaccatgttgcaaagacattaataagaccttactcagaagatctatcaaaggctaaattaagttgaccacatcaaaatgaagttgttttataggcaacatcataatggtgtacttgaggactttgagaatgagaaaaatataatgatactctgatgacaaactagaatcaagacaagatagattttgagaggactacatcagaatgatgtattgaagtcaaaatcatgttgtatctatgcatcaaaatggtgaaagatctagactctaactttctaaaca

SEQ ID NO: 249925 - DNA, 142 bp, Glycine max
tatatctgcctaaaaataatacaccccgtctgccctcattgatactgtagaattaataaacatctgcgacgtggaaccttacaacggctgaccacctgatcgcagcggatctcacttgcgtctgccatatattagcctgaag

SEQ ID NO: 249926 - DNA, 280 bp, Glycine max
  unsure (1)..(280): unsure at all n locations
gcagcttaagcaataagcacacctcactcgngacaattgttgagnacgnacaaactattttcacgtgtatcctanatcggatgagcttcatacaatcgtcacgaactaatattcaactaagattaaccacgtaaagagtatttcctagtgtatgctatcacagtgctcctctcaagaaaaggtaacagatgaacactacatctaagtgtcatgctaatttgtaccatccaagtcacaaagcataactactataccgatgtaattcgatactaagtatcac

SEQ ID NO: 249927 - DNA, 531 bp, Glycine max
  unsure (1)..(531): unsure at all n locations
ttgggttccggaggcaccgggccttgaaaactgagagcaatgaatntcacgcnngngnanagngngnngntattatacagcaacccaanganaaatttatccatacttgtatctttagtacccntgggacttcttaatatataaaatatctattcttgctgtggccaaaaacacaaagaaaggagcaaaagactcttatatgatgaatgtattgctgactccagcaataataagtctacatcaaccctgatgggctcggagagactagttcctgccacaaaatttaatctcatgatatttgatgctctcaagtccccattaaaaaacctatttattctatggattaaatgattcaaaagacctaggttggcactggagggtgacaatgagattgacagtgctataacggtgagtagcttgattggtgcaatattaactacacttttatgtacatgtcattttctgaaaaacgtgctcttagatcattgagtctagtggtgagaaaacctatttacatcatgttggttcgcg

SEQ ID NO: 249928 - DNA, 237 bp, Glycine max
acctatggatgctaactcaagatcgtgtgtgggataattctctttcatgaatttgagttgtcaagaagcataagccactacctgtccccgctgcataagcactccacccaaacccatcttgaatgcatcacagtaccccacaaagggttcactcgggtcgggtaacactaaaactggtgcagtggtctacctttccttaaaggtacggaaactactctcacactggggcatccacac

SEQ ID NO: 249929 - DNA, 395 bp, Glycine max
ggttatatgaagctgaatattagatttaaaaggtattatggaattgttaatgcttgtgattctgacttatagttactgcatatatgtgtttatgttattggagaatgggtgatattgaagttcaaactcaatcacaagtgatacaagctaatagtgagggtgaggctgatcctacttattcaccttcatatttaagtggggatgacgatatatacttggatgatgagactctagcatcgtttatgtctaaaaaaaaagcaaaggcaagtgtgcaaccttcaagtgatgaagataatgagcagtcagaatcaagggtgaagacatctgaagactagttatgaagttgtaatagagtaattaggatatgttttgaaccacttatgccactatgcata

SEQ ID NO: 249930 - DNA, 354 bp, Glycine max
  unsure (1)..(354): unsure at all n locations
agtcacctgcggcatgcaagcttctctngcanagaatgaaaagagnaaatgatttattaagaagtacaagttgtgaggatatctccttcacctctagaaacctcacaaccactcaaactctcatccaatactgcgcatgataacttcctcttcaatctttgctatctctcaaaatcttcacaccagaagttctccctgccactcaaccacttagatgaatgcttccaagaacagagaaaacaccaaaaattgagaactcccttccatttatgatttcaggctntaaatagtgtagcagatttttggttgttcgctcagccacattatggttcgctttagccaaataagtgacat

SEQ ID NO: 249931 - DNA, 336 bp, Glycine max
agaaagaaaaagggagagaagttgaactttgagttgtgtctcacaagactggtattcctcaaagttacacacaagtgttgcacatgtttctatttatggactaggtagctctctttagaagctctcttgagaaaacttccttaagaaaacttccttgagaagctagagcttagctacacacacccctctcataactaagctcacttcgttgagaagcttccttaagaagattcctaaagaagctagagcttagctacacacacatctctaatagcttagctcaccttattgagatgagaagctagagcctagctacacaccccctataatagctta

SEQ ID NO: 249932 - DNA, 369 bp, Glycine max
  unsure (1)..(369): unsure at all n locations
aatctatccataatttatttgataaaatatataattcattcattaacactttgtacggataaatactaagtatattcataaatttattttggagaacttgattcttaaagccatgacactacaaaaaaatacttatgggtacggacttctttttgctacagccatgaattaatatagggtaaattaaaaaatacttctatctaccanacggatgaatataggtgaaactcaatagctggtacttatcattatttgattgtaagtaattcattagacttctacctacaactattntatgtaggtaaaactcaaaaaaaattatgtctatgggtcgatagtataggtaaaactaaaaaaaaattattgtta

SEQ ID NO: 249933 - DNA, 271 bp, Glycine max
aatatcaaaatacaaagatatttttgcacaccctaaaatatctacgatatttacaacaaaaaaatcattgccttcttgtcagactcaaaagaaagagaaataaggagtccagcgtacgtgctaaaactattatttagcaaaaaaaaaagaactaactggttcttgaatcttgatcaaatgaagcttacccctaaaaactaccaccaaagtgataactggtttgaccacgactaaatcaacctacaaacataccattaatgactaaagattt

SEQ ID NO: 249934 - DNA, 580 bp, Glycine max
  unsure (1)..(580): unsure at all n locations
cggcctctgggttganccctgnnnnnctgancccttgtaanccgtgatcttaagtcacctgcggcatgcagcttatntactcatgtttacncatagaactcttgtacaagagtcttgatcattggcatcnttaaagaatgctgaacatgaaaaaaaggaaatatgccaaagaaaaatttgaaatagttcaaatggaagaatgcaagtctgttagcacaccaatgaagtcaaaggagaacgttagcgaggaagaatgtgttgataacattgatgaaggatattatgggagcttgattggatgtctaatgtatctcactacaacaaggccacacatttttattgctcaaaagacaaaactgaaattttatgtgacaatcaagtagtcattggtatcgcaaacaatcccgtgtgtcatgggaagactaaacattttaacatcaagttctattatttgattaagatgcancaaagtggtgaagngaacttaagttatctgtagtctatagatcaactggctgacatgttacanagtcactacctatcaacaaacttgaactcagagaaatgggagttgctgttn

SEQ ID NO: 249935 - DNA, 530 bp, Glycine max
  unsure (1)..(530): unsure at all n locations
atcgtnncaccgccccggggatgagaactaggacctgnacacacagatactaagctaggttatttaatagcgaacatacttgtacgtatactcttctgtcacaggttacaaaatctggcagatgtctatattaaaccataagcatttctggtcacattttattttttactttctctctgccttttatttctttttaaacgtgcaaatgatgggttgcaatctaatttatagatatattaaatctgtccagtcgtcgccgtgtgttaacggtcggatagtttgcactctattttttataatgcatttcattttgcttattaaaaatttaacattttgtcttattttttctctcacttctatcttactacgaaaccgcgccttggtcgagttgaaacgctagtctgttattatatacgtgaaaggcagcctatatagatagacttaagccagatgaaacatgttctctttncttnctatgngttactgcttctcttctcatnctatactacacacacactcactctgtgacn

SEQ ID NO: 249936 - DNA, 423 bp, Glycine max
  unsure (1)..(423): unsure at all n locations
agctnttcananggatattatgctcacattcactttcttctacatcatattcaaacttgtccaaataaataatacagtcatctcgactcagagaaaatcatataagtctcatacaattaatatacaacctatatcctaatgtcacatcctatcagagcgtggtgtttccatgtcctctagcacgaggttcttcatagacatgcacctattcatctgctcccccgaacacaagttcaagatcatcacacgatccanacacaacaacacacagggagtgagttatcacattcctagctaatagagaaacaagacaattaaatatacatattatataaatgagataccacttgcttaaacatagctcacgtaacttcaccacttcatcattcanaagtcacttttcaattatcaatcacattacac

SEQ ID NO: 249937 - DNA, 433 bp, Glycine max
  unsure (1)..(433): unsure at all n locations
gaaaaaggtactcgattacctgagagacaatcaatcaattcctctcttctattgctacagaanaaaaaaattgaaattgcgaggttggacgcgtgcgtgggttgtattaagaaagaaaggtggattcatatggaagggaaatattatgaaaaagggttttaagaaaaaaaaaactactaaaacagaaattgtggataaaaaccaaaaacggtataacaaagtagtatacataaataaataaataaataagaaaaccaaaaattcccccctaaaaaacaaggataatatgataattntaaacaaaaacaattaaacttatatatctgatttttttactggaatatctncgatttaaatcatggggagttatcttataaataataatttaggtaacttttatctaatctaacanaaggtaacttttataaataat

SEQ ID NO: 249938 - DNA, 280 bp, Glycine max
  unsure (1)..(280): unsure at all n locations
ttagtgtatataggaaaacatangatgtaccggntcttaaggattattcgatatgcattccttgtaggtagttttggatgcttattggacccaatgggtgtggaaaatctaccctcttgaaggtattttacacgattctggtcatctttttgctgttgttttttaagtgttttttttatgttcactattagatntattttgtattcaaattgcatcacttttttgctgtngtctttgctggtttttaaatggtcattcgtagaaatgttagtttcattat

SEQ ID NO: 249939 - DNA, 339 bp, Glycine max
  unsure (1)..(339): unsure at all n locations
agatatatatgtgaaatangcttgtcatcgtgagacatcatgggcaagtaatctaatcgatgagggtaggataaatttacctgattaataaagaanaacctaaaaatcatacatcttatgcaaacaaagcatgctaggtgctaacattctcatcccattgaattctctattgattattctgcttcatattattttctttatctacaacatatctgctattaaattcctgttccctctatatatactggatctctctctatttcttttcttataaagtgaaaattatacaatacaagttcccaacaaagtccctgtggaattcgacactctgacttctga

SEQ ID NO: 249940 - DNA, 273 bp, Glycine max
  unsure (1)..(273): unsure at all n locations
aacctctaaaaagttatcaaaaacattataatgattttttcaagcaaactgccacaaagattattttgaaataactaatattaattgtcacattattatttaatagagaaatataatgatagggatcaaaatcaaattaaaaaataaagtatagaataaaaacaatcaaataaaaatttanaaataaaaacataagttatccataaaataatatatattttcccgcttgatggatgtatctnttaaagtaaataatcatataccaatcgataa

SEQ ID NO: 249941 - DNA, 417 bp, Glycine max
  unsure (1)..(417): unsure at all n locations
tactaagctgtattaagttcttggttttaatttcaggacatctcttatattgggaacaattttcacagtggtctaagtcaaattaatggcagtggaagaggaattatatttggtgtagtttgggactactagtgctgatgacaactactcaatgttaaagatggtgagtgttggtgtgagcaatggcaaactctggtaggatgtgcaaaacttagtgtttatttattaanaataaactgaacagaactgaattgttaaaatagtggttcttaattanataagcaaatggttagagaataagtccacatgatttgaaaaccaattctaatcgatttgattaactagttcgaatgatttacaattaatggtttgactaatttaaattaactggtaaactagtttaaacttttaaaaaaa

SEQ ID NO: 249942 - DNA, 199 bp, Glycine max
  unsure (1)..(199): unsure at all n locations
agcttctatatatntactatactctactagttntatccatgattntatgaagctnttaagtagttggtaataatttaagtttcaaaagggtcattacactnttagggatttcgaccttatatntaaactcaagataaccacataaaaaaaaaaaaaaaaactcaagataaagtccatgtgaatcacacccactaacatg

SEQ ID NO: 249943 - DNA, 428 bp, Glycine max
  unsure (1)..(428): unsure at all n locations
ctaagctaagctccttaactgcacaaggctcnttaatattgaagagtattcttgtgggaccttgacccgacgaagacactaacaaaaacttatcttctcctttttggacaaagtatgacaagttggaggcaagtatatnntttttccaataaaccttggatgcaactgcgatcgtatacactgtcacatacatttttctctacatgcataacatcgatacaatgtctaacatctagatcagaccaatacagaagatcaaagaaaatggacctcttcttccatatgcaagtcttactttcatccttctttagggtattntcagatacagtattcaggtgttcaatccgctagaagacctcgtgaccagtcaatggtatcgacgcagtttcgtgctcttaacttncattaaaaagctttttcaatcgtct

SEQ ID NO: 249944 - DNA, 385 bp, Glycine max
  unsure (1)..(385): unsure at all n locations
tgtcacatcagataatgtcaattaccgtatcaaattatgtatatcgtggtatgggattgtaagagacatccttggccagagtggatttgattgggatggcactaagcacatgatcacagttgagaatgaaaatgcttggaatgaatattgcattgtaagtattctttaatatgttgctattcgttattcaaagtagattggatatgactttttctttgntttccagtcgcataaatcggctaaaccgtttcgatacaaggtgcttcataactgggatgatatagtggatttgtgtgctaaagatagagccaccggtcatggagctgaaactgctatggatgttgatgaagcgatgagtacagaaacacatgaagtggaattcatg

SEQ ID NO: 249945 - DNA, 411 bp, Glycine max
  unsure (1)..(411): unsure at all n locations
ctgacttgctttccaatctgacattcaccacagattctgccttcttctattttcagattgggaatgcctctaacagcacttttgtcaaggattntcttcatgcctcttaagtgcagatgtccaaacctttgatgccatattctgacttcatcttctttggtggatagacatgtggaggaatagctcggttcttggggtggtcatangtaacaattggtctttgatctgcttgccttcattagaacttcactcttctcatttgtcaccaagcattctgactttgtgaagtttacattgaattcttcatcacacagctgactgatgctcatcaagtttgcaagcagtcccttcaccagcagtactttgtcagactaggaagtcatcatgaactagctttccattccaatgatc

SEQ ID NO: 249946 - DNA, 246 bp, Glycine max
  unsure (1)..(246): unsure at all n locations
ctcaattcanagaaggagttaaccattatattaaattcatagagaaggtatatcgttacttggcttctcatgatttgcctaaactatgatatgtcaagtgcattatttcccatccatgttaagctgttacaaaaatacagaaactgtagaaactaatccattcagttaagttacagaacaanaataatccattcagtgtaggtgcttctagtgttattataattagagtttcaccttgatagtcat

SEQ ID NO: 249947 - DNA, 511 bp, Glycine max
  unsure (1)..(511): unsure at all n locations
ggggcggcggctgtgccactgattnacatacactatacantactcaagcttgaatgcagngaggagctatgaactctgtaagggtgggccttcttacctttgtcttgnctacctcataggatactaccgcttggtgaattagcttattatgaaatgggctattcgngttaatctttattaatatgttccacttgtagactgtggattactgatctgcctttaaaactatacatcaaggccagacctctcccaaaagctttgctgctttcgctgagagaatggaattngacaagactctgatatactctaagccgtagaagctcgttatgtatcaaaaatactgattttgttcatctgattctttgtgcctccttggtaaatcttgagactgtatgcccataaagtttaattggctgttaataacatgatatctgctttgatttactggacacatgtgctgataattgatgcgttatcactcaagttggtcaccctgacaactctactttcn

SEQ ID NO: 249948 - DNA, 190 bp, Glycine max
tccttctagatatatcagtgttgaggcagatgtttgcactgtcaagtcagaaccagatgaacccatatgagaagtctggaagcgattcaaatcattgctgagaaaatgtcccaatcatggttctgatgatggtacccagctaagcctattatgcaatggtctaaagcctaacactaagatgattctggat

SEQ ID NO: 249949 - DNA, 382 bp, Glycine max
  unsure (1)..(382): unsure at all n locations
tgcttgtggagcttctatggaggctggatctctgagcttcaatgtatgtcctttaatggtgtgtntccaccatggagatgcagcggaagacaaatgagaaatagggagaggaggcgccatccactagggaataagccatggaagatagagcttcaccaccaagatgagccttggataagaagctcggaacgatgctctaatggaggaaaagaaagagggagagaaagagagaggggggagcactatagtgaaagaagaaaaaaagacgaagagaacttgactttgagttgtgtctcacgagactctcattcatcaaagatactacaagtgttacacatgcctttatttatagactacgtagcttgcttgagaagctttctta

SEQ ID NO: 249950 - DNA, 384 bp, Glycine max
  unsure (1)..(384): unsure at all n locations
cagtgagtggttggatcctacattggacctcatatcctgccattaatatcaaattgagttggttcttgagtttccttctttntttattagttactcaaaattcctgaattacatcacatacttaatagcctcttctctacatatttatcttgttgaatgcaattcttcagcatgtcttcagaaaaagtgcaaattgaattttcaaaaaccagttcaagatgctgcagactcaaaaatatcatgtagcttagtgaatgtggaagatgggatagatgatgaagcatgtgaattagtcagtggagtggagctctcacttgaggagggtgatgaaaatatccgtgcttatctgttcaaggcagtaaaaaataacaatggaactggcct

SEQ ID NO: 249951 - DNA, 467 bp, Glycine max
  unsure (1)..(467): unsure at all n locations
tactaagctgcaaatctatatntaatgatctgctnatataatatgtatttgttagacatttttcgaaggatntactgatccttgttttggttttaactaatggagcaggttaaagagttccatagaagagatggttttgaggtagcaagtgctgacaagatggctaagtcatgcatggtttattttgaaatgcatctatccctaaggaaaaaaataattaccaaagcttttaatggtagttatagtatctacaaggaaactttttgtaaccaggtctattgcctctttgtttgagtaactggacatgcaggtacaataattgtngttgaagatgacaagggacctgaaagaggaatgccgagcttcaattctgagttacccaattccaactcatggtaaatcttgtctttgcaatagttcttggataggctctgcatatgtggaaaaatcatgtcacttgtcaatca

SEQ ID NO: 249952 - DNA, 353 bp, Glycine max
  unsure (1)..(353): unsure at all n locations
ctcttttacaanttgataaaaacaaaaattatgcaaaaaaatgaattaggttatataattnttttttaaaaagaataattcagtaaataattataaaattatatggtttaaagaatttgtaacagtaatgaatgatataatgatgatcattactatcgtgtatatgtaataacataaaaatagatataagggttttctagacaactaacanaaaaagataaaagaacttttagattgaataaaaggataaaataaaatttcaaataaaatagtatggataatntaaaaaacaacttataaaataatttattttccataagttacttcaattagttaatggaaaataaactact

SEQ ID NO: 249953 - DNA, 291 bp, Glycine max
  unsure (1)..(291): unsure at all n locations
atagtatggtgtactaattagcaatatttaagttaaatagccaccaaaaggcataccacaaaccacactaactagtntttaattcacaaagcaataaacagtttaaacaatgtggcacctgacaaatgcttccctatttctcattaaactgctactctttgatttactgttactatccatactcaataacaaaaaagtgaanaactaagttattgaccacaaaagtaaaaataggatacttgtaggtgatagcaataggataaaaagtggcctattgagtcactggtcact

SEQ ID NO: 249954 - DNA, 286 bp, Glycine max
  unsure (1)..(286): unsure at all n locations
tcacctgtaggttaggagcaacaacaacaagaaaatatcccattgtatatanttttattccccctttggtttgcaatgattgcttatatgagacatgaagatttcataggtttcatatataaaaagttgtctcataaagatttcatatatcttttatctatctctcntcctttggcaacataaaaaacaaatcatgaatagagaggaaaaagatgttaccactttgtgcaatgtatgagaatcaagtgataccaanaggcattanaacaatcattcaatattaatc

SEQ ID NO: 249955 - DNA, 450 bp, Glycine max
  unsure (1)..(450): unsure at all n locations
ttagacacctatgtcgagaatcatgccaattacaaagttgaggagaaaaacgcacgaggagctcaaacggaccttaatgggccatcagtggatgccttgccaatctatgtatggggcgtgtgagataacctatatgatacataggtgtattggtacttaagaccttgctcttaacgacttatagctctgctttataaaattgtgccattaggttgtttgcatgttataatggagaaatctgttatttgccaattgtgtgattaggaatgcttcagagatttaaaatagatctctagatggctaccgagctacaanggtaggtagctcatagaactactttacaggccatgatcgaaggtcaaggaacaagaattatcttaagatattatggatgtgtgtgtattgtaaaaactaatgttggaagtgcattaacccctattatacaaatat

SEQ ID NO: 249956 - DNA, 312 bp, Glycine max
  unsure (1)..(312): unsure at all n locations
tctcaagttttaaatgaccttgggatagattcttgaaatctcttcgtagggttttataagcttttgagacaatatatgagtaagatagaagctcatgataagcttttctaagagatttaggatcatcaaaatttacctcatctttttggtataactcaaacccttcaaaagttatgtccgccatcatccatatgttggcttcttcatcgtcttcctctgacanagtgtcgtccaggtcttctcatgtactcataagccccttcttttctttagtgctaaagaaattcttcatatcttggattttctctaaat

SEQ ID NO: 249957 - DNA, 383 bp, Glycine max
  unsure (1)..(383): unsure at all n locations
tctgatatctacccattgaattaagctatccccaacatcatgcctttgatcatataaaacttataatatatgcactttgacctggaaaatatgtgtttcctgcttctaaataagctttcttctagttgttttggttctaattgcagaatctatcccatgaagaagcttccactataggcttatgcttcacacttgtgctatgcttttgattatgtcatgtcttaataagatcacttaaagcaaccattagtagctaagtttaataactttggttttgcttcatagtgngttgtcgtcaataaaacatatagttcctagagcaactttgtctaacaatgggctactcaatggactagtttaagtcgttgtaggtcccttatgat

SEQ ID NO: 249958 - DNA, 351 bp, Glycine max
  unsure (1)..(351): unsure at all n locations
agctngctngtggagcttctatggaggctggatctatgagcttcaatgaggtcctttaatggtggttttccaccatggagatgcagcggaagacaaaggagaagaggtgagaggaggcgccatccactanggaataagccatggaagaaggagcttcaccaccaagatgagccttggataagaagcttggagaggaggcttcaatggaggaaaagaanaagggagagaaagagagaggtgggagcacgaaattgaaggaagaanaagggagagaagttgaactttgagttgtgtctcacaagactctcattcatcannagtacaacaagtgttacacatgtttctatttat

SEQ ID NO: 249959 - DNA, 394 bp, Glycine max
  unsure (1)..(394): unsure at all n locations
caaacagctcctacaggttctctctcaccatcaagctaataaaangntccatgccttttttgtactgttttactgcaatcacattcacatatatcttcaattagntatagtattggtgttaatattctcaataataatgtgtatgaatatctcaataatatattgcatgtgtagatagcaatttaaaaagtactcttcaatgttgaacgttcttttctggagaagaatatatactatgtgtatcttttagttcgaaagcattcttagaagggaatcagtggaaatccaaacttgctaataggctatgtttggttttttttttcttttgagtattccaaatcagttgaaggataaattaatagtttgaatacgttgatatgtcacatatgttgac

SEQ ID NO: 249960 - DNA, 203 bp, Glycine max
  unsure (1)..(203): unsure at all n locations
agcttaagaaacagntataggagttgtgggagaagttgtttgtgatatccagtgtgtctccatggggagcaccagtgttgntagcgaagaagaaagatgggaccatgaggttatgtgtagactatcaccaattgaataaggtgacgattaagaataagtaccctttgccttacctggtaggagcttatgtgtttagcaagata

SEQ ID NO: 249961 - DNA, 331 bp, Glycine max
agcttgaagagcccgttagtcaaagagaagtttttgtccatagccatcaaagtctgaagagagtatgatgaactaatggacgtcaatatggccaccgatgaagccttggaatgagaaaccaagaaggcccgaaaggaagaacacgaccaaaacaagttttgaggggctttatatggcagcaatagtgagctcaagctccgaagaggtgaaaggaatcatcacgggtcaaaggcatgatctggaaagatgagctaaaggcttgccttatgtcgaaaagaaatttgtctaacagtaaagtggactgaaggaatatgtggccatcatcgatgag

SEQ ID NO: 249962 - DNA, 389 bp, Glycine max
  unsure (1)..(389): unsure at all n locations
ntaacctcatcgtccctcacagtctttagaattgggagccaatccaatccttgtgttcggactctcagccacttatgatagccgccgatgatcccattactgcttcccctaagctgtctgtcctttcttcacgccgcatnccatgccttgcgaactccttggagtaccctcgcgttgtggtcactaaaaccccgtgcgatgaaaggcgtgatgctttcgtctaatggcgctcctctcatggggcagccaagctgtcttatggcgagaacgggattataattaatacaaccccttgttcccatcaagggaacacttggacatccttcgcatgaagatagaatcttgatctcttcttccttctagcgagggaaccaattaacagacgcccc

SEQ ID NO: 249963 - DNA, 328 bp, Glycine max
  unsure (1)..(328): unsure at all n locations
caaactgaactacttctaaactaatcacattngtcaacagcagaattaacaaaaggtgctcactggtagaagagtcaagagctgctatgagattataatatctgccggaacatatgagaatgttgatttgcaagtattaatatcaagaattaatgtggcagaatagtgagttatggcgcttcaccattctcacctttaatgtggttctcctttttccaagcaaacaaacactcgtggggtggntngatgttaatggaaaactgcacatggattcccttgctactttgatatgactgacacttgggacatcacattcacgccttaacct

SEQ ID NO: 249964 - DNA, 467 bp, Glycine max
  unsure (1)..(467): unsure at all n locations
ttgaacgaganaactctctaattaggcacttttcgtaatagatatgtcaacaactccaccaatcaccgtcaggaacccgtcttctcagcactacaattaattttgaatggatgtggggaaaggatcacatagaatagctttataggatgtggcgaaagcattagaactggtggatgatctgaaagatgaactaataaatcaatggaacagacttgcatatgggtggggtagggaacagccagcaagagaatgagaagaatgtacgtaattaatgagaaactcanactgtaatttgcacatattaatgaggcttactaactactttaacaagttgcccatcgttcatctcattcacattctttntgacaaatgttaatcaacatctctacagaaaactaagaaattacaaatgagaatatcattagagattattggtaatacaacttattataacttctaatacactc

SEQ ID NO: 249965 - DNA, 205 bp, Glycine max
  unsure (1)..(205): unsure at all n locations
agctngcttgtggggcttctatggaggctggatctttgagcttcaatgaggtcctttaatggtgatttccaccatggagatgcagcggaagacaaaggagaagaggtgagaggaggcgccatccactatggaataagccatggaagaaggagcttaaccactaagatgagccttggataagaagcttggaaggatgcttcaatgg

SEQ ID NO: 249966 - DNA, 139 bp, Glycine max
catccgaacaaaaaggtaatggagtccgaacgtgctcagagcgttaacattcaatatcgagcatttcgatatcttacaggactcaatcagacatcaaaggaacaagctattgacgtttgcactatcatagagcttaggg

SEQ ID NO: 249967 - DNA, 416 bp, Glycine max
  unsure (1)..(416): unsure at all n locations
aaataccttcatctgacttagcatcaaattttcctaagttatcttttccattattcaatacanaacatttacaaccaaagatatgaagatgtgagatgtttggttttctgccattgaacaattcatatggagttttctttaaaatgggtcttattaaagccctatttaaaatgtagcatgcagtgttaacggcttcagcccanaagtattttggaagaggagtatcatttaatanagttctagccatctcttccaaagatctattnttcctttcaacaacaccattttgtcgaggggttcttggtnngtgaaaagtatgctcaattccatgcttttcacaaaataattcaaattctttattttcaaactcacccncatgatcactcctaatagatataatcttgagaattttctta

SEQ ID NO: 249968 - DNA, 341 bp, Glycine max
  unsure (1)..(341): unsure at all n locations
tctatgtacccgtaggggtccttattgggtgtcgngcatttgtattctctttgtggttactttngataccccctgttgacgtgcttaagccattttacttaagtcatttctcgcttaacttanaaataaaataaattttcaccgaacgtttgaattggattatccattaacttcgggtaaaataaattccgaccgttcggtcgtgccgtaaccacgttggaaatcaaaaagagggtaanaataatatagtaatcaaaagacatcttttagtaaaataaagcggaaaatcaatcggacgttttctctttgggattctcattctaatcgaatngataataact

SEQ ID NO: 249969 - DNA, 238 bp, Glycine max
tattccttagtcatatgccatgacaataaacaaatctcatggccagtcactagaatgtgtcggactttacttgccctaataatgtaagatttttcagcccttgtattttagggcacctagactagttttgtattaggggtatgtttgtaatctcacatgcattaagtgcactatttgatgtgtgtgtgtgttgggagataaatttaattgaattgggagaagcctaatccaattaaat

SEQ ID NO: 249970 - DNA, 261 bp, Glycine max
gtgagcaatctagggtctatttccattattcttgtcaacactcatgaattgatatccttaggaccccactaattataccttttgttatgccttgccaagcaattagaacgccttttccagtttacccgaaggatagaggacttgatgttcactgttgcacctgaagaggtttgtgtgtataatgctgtatatttaatcttccagaggttactgctatacagcatatagtcatgactagaattctacttatcacacaatatg

SEQ ID NO: 249971 - DNA, 521 bp, Glycine max
  unsure (1)..(521): unsure at all n locations
aaaanagcgcagtngcatgatcagctantatgagactaagcttaannatganttgtcgaaaatgattcctataatgccatagagtttgtgcttcatttggcctggactgaagcccataagcgaaccactggcccgttggcagaccaattctctttctttttttgcccgatgatctaaaggggtgcagtatgctatctctatatccatccttgccataaggaaagaggagagggttctatagagccacgacagctaagagcggaaattcatggagtctctcgggntgtccattatgagttgtaacaataatatctctctctgagcctgggtcaaaaacaccaactaataagtgcaacaactttaggaacatctgggatattgtgtacacaaccatctttttcacgatcagctatcacttgcacaacgaattggtgctcgaccatctgtcatctatgcctggcattctaagctttcgcatggcagtgtgtcatcacatgtactaatcagaacaatgcggctga

SEQ ID NO: 249972 - DNA, 437 bp, Glycine max
  unsure (1)..(437): unsure at all n locations
agtcacctgcggcatgcaagcttctaatgctctgtgctgcaattgcagcactgtcatagttgctntctcttctgctgatagagaataagtgagagaagatgatttgatgtcatcaaaggaaggccatcctaaagctgtagaagaaaaaccagccttggggctttcactttcccactcagcaccagaaaccagagattcatgagattcctacattcaattntcattagtaacaaccaacaagaagtaaacatatatgggagttgggaattgctagcagccaatattagtattcctttgctattccgattntcacacatttgaagaaagtgtagcctaccacagctagcgatgttagccaataattaggtataacttccatctnnttatattaaaatgctatcccttanaagctagctctttgtatttgatctagtaat

SEQ ID NO: 249973 - DNA, 419 bp, Glycine max
  unsure (1)..(419): unsure at all n locations
actaagctgctaccatggaactctaattctccacactnnttggtgtgggccattcttggatggccgtgattttctcacggtccatttggaccccatttctaccaactacaaaacctaagaaaactatattatctacacaaaaggtacacttctctatatttgcatagagggtgtttttcctaaggactgaaagaacttttctgagatgtcctaagtgatcatctaggctcctactatacactaaaatatcatcaaaataatcaactacaaatctacctatgaaatcccttaagacatgatgcataagcctcataaaggtgcttggtgcattagtgagcccaaaaggcatcactagccattcatacaaaccaaacttggtcttgaaagcagttttccactcatcaccctttttcatcctg

SEQ ID NO: 249974 - DNA, 476 bp, Glycine max
  unsure (1)..(476): unsure at all n locations
ctagaccaaagccacatanaatctacggatccctcatcccccattttatggatattcaacgggggagaagtggaattgataatgaagccaactttgagcgcaactctctccttacacaaatcgataacatcaatgcaaacttgctcaaactggaattacaacctaaacttcaccgaatcaaaatttgactcctcaacacccaattgtacccctataaatggctnttctggtcactattgatcattttgatttntctcttcttgcacaagtccatgccttcctnataagtgctaaatgacatttgcaactatgattaactcactttaacctccaaagaccacgtaaatcagaattggccttgcacatctcaaaactcactttgttcactcatacacatattctacttttaacctaggtactctacctttcaccctagagtttcataagcattcagcacacacatagagcatatctan

SEQ ID NO: 249975 - DNA, 330 bp, Glycine max
  unsure (1)..(330): unsure at all n locations
agcttatgtgtcancgctttgcgaattggagttatttagtctcacgtgcagtgaatataatgaaccaggagccagtgtcttagcaattgagataacaatcataagacgtcttctatcttaaagccttcaaaagctaacattacatgttcgttcatgctcaaacccatcatcgtgcagaattacctcaaaacagggtgaaagcttctcaggactcattattgaagcatgaagctcacctaaagctgacatcttgctaagacagaggatatctcaacgctgactcccatcatcacaacatagataacggccttgagctagagcctacataat

SEQ ID NO: 249976 - DNA, 233 bp, Glycine max
  unsure (1)..(233): unsure at all n locations
gaagaaagtcagagaacaacattagttacaatacaatacaactgtgaaaaatataaggggaagggggcacataatcttaattcttgatagcccccattcgggatgtttgaataaattccttctacctttgaatctaatntaagctatttggctacatgaggatngaagttgcttgcatagtcattagtcacatgagacataatattacaactcaattgaataattcgtcagta

SEQ ID NO: 249977 - DNA, 351 bp, Glycine max
  unsure (1)..(351): unsure at all n locations
ctaagcttatgaaccttatcattctataagtcagnnaatttctttaaaattatcactaacacgcaattaactaataatcagaacaatcaattncaatttagaagtcaaagtgataaaaattaccattaactaactaacatcaaagaactttattaaaaagatgaactagagtatatgggtataactacatcacaatatgtgttttaaggggtttaactaaacaacatacaatattgctttagaaataaaaaaattgaaaaccttacaaatttagactccaattgttcttggtgcgggtttcctctcaaacaattttgaatcttccatgacatataggggtgaaaatgagtc

SEQ ID NO: 249978 - DNA, 491 bp, Glycine max
  unsure (1)..(491): unsure at all n locations
agcttaagacaactngagttatcagttacgataatgttgtaatcgattaaaacaaagacnttttgcctttgaagaaactntctaacttagaaactatcttctcacttactcatgatgatgcatgatgcacaagagatatgatatgaactaagatgaaacattcaatataacaaccaatacaaatgtcactcaaaggagttgggcatgtaaaagacaaaacatcttcaagctttcttccaagcttcaaactttagtcttcatgtagctcatgttgctccccctatctcttacaaaaattgcacttactcctagaaaggaacatgttnttataacaaattaagtaantttcactagatgaatttattaacaaataaatgtttaaagatgagacatagaatccattctcgatggaagttcttttaatctacanataagtcataatttcaactatcagagattgctaaactaatattataaatagaatttcataa

SEQ ID NO: 249979 - DNA, 361 bp, Glycine max
  unsure (1)..(361): unsure at all n locations
agtgtngaggtacaagccctaaaggcatagcttgtaagagcctgtgtagtcgaagagaagttcaagtccatagccatcaaagtctgaaaagagtatgatgaactaagggacgtcaatatggccacagctgaagccttggaacgagaaaccaagaaggcccaaaaggaagaaaacgaccaaaacaagttttgaggggctttatagggcagcaatagtgagctcaagctccgaagaggtgaaaggaatcatcacgggtcaaaggcatgatcttgaaggacgagctaaaggcttaccttatgtcgaaaagaaatttgtccaacagttaaagcgagactgaagggaatatgtgggccatcatcga

SEQ ID NO: 249980 - DNA, 274 bp, Glycine max
cctctcgatgtagctctgggggtgagttggaaacgaatcaactcatgagggcaaaagaagagagacccacaatcttattggctagtcgctcgaactttgttagatacttgttgacgctaccatgttgctggacatggtcagccacgtggtgaggaaacatgttctggacattcactggtactagcacaatgggtgtcctttcatatagaacgacgccatcgtgagccttgcgtgatctgggagatcttggtaatcgaagaattgggaaccttaa

SEQ ID NO: 249981 - DNA, 314 bp, Glycine max
  unsure (1)..(314): unsure at all n locations
ccacgctcttgtggcgcccataccgttgcatcaacattcatcatgataagtgtgacacattntttttctcataatcgtgctactcactcgttaatcccacagattggaattgttcgcgctcagagaaaccaagcccaaaaccttaacaacttcacgcatgatgaacaagaagaatagattgggctgttagacaagtggcctcagatatctctaagaaggaggggttgaattaagatatcaaagactatntctcaattaagattttaactctcttcttgattaataattacccttatatgaatactcaaagatat

SEQ ID NO: 249982 - DNA, 312 bp, Glycine max
  unsure (1)..(312): unsure at all n locations
agctttatatattgaattanaacgttcataaactactggtaatcgattaccatatatgtgtaatcgattacacagtggaaattnntgaattcaaatttaatagctgttgtaaatcagttttggccactggtaatcgattacatcctctggtaatcgattaccagagagtaaatntgttgaagaagactttntaacttaaatttcttggccaaaccttttgctacttcaattggaattcccttcctatttaatataccctttctaagactctagagattggcttgatcatccatcttgaatatctttaatttc

SEQ ID NO: 249983 - DNA, 410 bp, Glycine max
  unsure (1)..(410): unsure at all n locations
tgctatgtgctcgcgactggtccctttcttcccttcgcaacttgagttcactattgctaccccatagagctccgcgaaatttgttccggccatactcttccttgcgagccctcttggtttcttgttcaagggctcttgcggtaattgcattctcttcccgtaacccggcacactccttccgaacgtgtgtagcggccaacttgaacttctccttggcaagttttgcctttcctaactcgcttttgagagattggacttcttcgtnctcttncggtgcttcaaaatcctctttgctaacgacttttaacttggcgagccaatctaaacctcgtatatgaactttcagccattcgtggtacccaccaatgataccattacgaatgcctctaagctcttgatcttttcttaac

SEQ ID NO: 249984 - DNA, 292 bp, Glycine max
  unsure (1)..(292): unsure at all n locations
atatggacaaaatactaattgggcatcatttgacatatagaacgagcaccataataacaacaaccagaaagtgaaagtggagacagcataagacttgtactttacaaagcttagaacaaacttttaaacaaaaaaataaaaaacaaagatatgtgggaagacacccaccagattcacccaagacagcgattcccaccatactggaagtactttcctgcaatgaaaaaacaggtgacatgcactcnntctcattgttctgcagaaaggacacaaatattcatgtaactcaact

SEQ ID NO: 249985 - DNA, 356 bp, Glycine max
acatggggactaagagcagctgaggtaatttcaataatatgttaaatcttctcttttcgggtttccattttaataaagattacctttgaatactcttgatataccttgaccatcatggagatattagcttttgtttgttctgaactttctttacttgtgcaagaaaaaatcattttttccttcctatggtctaacatatcctggtgacctaattatgtaatctttccttctatttataacccttaatatatctctatatttacttaagttacattggaataaaactattcctagcaatgactcgtatagtactatgatcacattctggggagctattgtccatgagtattcaagca

SEQ ID NO: 249986 - DNA, 456 bp, Glycine max
  unsure (1)..(456): unsure at all n locations
gctntgagacacatgtganactntggcatcatcaattcattcagctggatcctttgtctactatctcccnctttgtgatgatgacaatccctganatcaagacaagttatatacaagatgatagcacattcacacaacccttactccccctatcttttggcatgtatgcctaactttacttaatgataaatttccaattgataatttatttctaacccaagttctctccccctttggcagcataaaaaagaactaagcaacataatcaatatccaaacagagccaaacaataaaccaaaataaattcatacattgtcataaccaaccaaatcaaagtcaagaaatataatataagtgcaagaatacgataactaagcaataaaaagccaaatacacgacgatgaaccanagtactaataatacttaattactaataatacttagtcataatactta

SEQ ID NO: 249987 - DNA, 357 bp, Glycine max
agaatacgctcagtgttcgagggacctggcagcacaagtagccccttccattgtcgagagggaaatggttactatgatggtggataccttgcctgtattttactatgagaaattagtgggctacatgccttccagcttcgcggacatggtcttcgccagagaaaggatcgaggtgggtttgaagaggggaaagtttgattacgtcttcccgataggtgccagcagtatgaggactggaataactgggacaaagaagaaagaaggagatgcccataccgtcacttcaacaccggcattggctaagccaccacaaaaaccccacggtacccaccaatatgcacaacatcacccgagttt

SEQ ID NO: 249988 - DNA, 335 bp, Glycine max
  unsure (1)..(335): unsure at all n locations
ttgtccagcttagcggaccanatcagcctcagatgcaagggtgtggggctaagcgcttgagactctcggcttagtgcatgaccaaagatgcggttggcgaaaggactgattntttagaaaatattttctaagttatttttcagtcccttcatcaacaaattgaaacccttatatctaacattcaaagataggctgatatactcctatgtacaaatcatgcagcatatgaagtgttgtttgggtcttggtgacacttgcgccatatgaagtgttgtttgggtcttattggaatgattggatatttttatagactaacttccaaatgttgcctcgca

SEQ ID NO: 249989 - DNA, 438 bp, Glycine max
  unsure (1)..(438): unsure at all n locations
acaagaatcaagcccaggctattgtgccagcaatcaatggggcaaaacacaccaaatgattatgatgatggatggctcaaattctcacaaaggtaaactcatcactttcaaattgagctttcaaaactatcatgacatgtagaagagaatcaaggatttcaagtcacaaaatgtcaagaacttttattttcaaaacaattacccatttcttgaacatatnctataattcaaagaaaaacatgcaaagtcgtacatgcacacaaaattgacccaaaatattaaactaaaaatctgacgaaactaacaacattaacaaattaacacaactaacaaattaacaaaaccaaccaaactagcataaccgaagaacacttccccccatacttatacaacacattgtcctcaatgtagcacaattaaaagaataaaaacaattaa

SEQ ID NO: 249990 - DNA, 369 bp, Glycine max
  unsure (1)..(369): unsure at all n locations
aatgtacaaaatatatttgatgaaaagaatataactntgtcctaatacaatatctgcaataaaaaggatatatcatatattttaaacaaaaaacaaaaattaaaatcagaattttcatttgaaaatacaacatgagcaagtattgtcatccaaaaacgattggggggaaggaaaaaaaatgccaatgatgagaaaacaacttcactaattaaaaaaaattaattagtgaactgttcagcaaatggaaggttgtgtgaaataattgctcttaagaatcgatattttgtgtaattgtgagctaaatggattcgtcgacttgtaactntgaacacanttttttngtttctaagctatttaagtattatttat

SEQ ID NO: 249991 - DNA, 399 bp, Glycine max
  unsure (1)..(399): unsure at all n locations
tttatgaaaagtggcatcgtcttgtatatacgtgctcagagaagtcatacgcctaacagtaatctcagatgacttggtaatttcattcatcgatcagtggaccatacacatgcatctaactcaagcatctaaaatggcagtacatgaaacacaacttgtgtgattnttgaagcaccaagtaaccagactttaatgtgtgaagagtatattccttatgcaaaagctacatctgcatgagaagctaaaaatgcagnctgtactctgacatgacaaccataaattaagtatttaaaagaatgcattatataagtatctaatttaattataaaactatattctttgggggaatatggtaaaattatctaattaattatttgcttaatctaaataataatatta

SEQ ID NO: 249992 - DNA, 433 bp, Glycine max
  unsure (1)..(433): unsure at all n locations
gcaagctntgcatcgctgatgttgaattatacatggatgtacgtgtttctcccatttctcnttaatatgaattttcctgggaaatggaaactacacaatgaatttacactntgcttaggtcatgttcactgatgatcgaacatataacaacctaggaaggcgcatatttgttgtctacctatattttctctctgacaagcaagtatttcatatacttaaaaggccgtggccatgttcaaatttcagatcttcactttntaaaaagaaatttgatggaggtagaaatgttgtctttaaatatacatgtganatactggaaaaacagatatcatatgacagtgnggaaattaccactagattcttattatgaagcaatagacaattataaaaagacttacatgatgctaaaatgaccatataacataagtgaatg

SEQ ID NO: 249993 - DNA, 304 bp, Glycine max
cttaaaaaaatagtttctaagagaaaatcaactacaaagtaggtcacctaatcatgaaaaatgttgagtcctacattggacaaaataatctcatcgatctctttcttttcctatatatagaggagaccaacaaggctcatatgctccaaagaattaagtgagcttagccttagacgtggagcctctcagtcaatatttttatatttctctgagtgtaaaagatagaagacattgaagtctttgaaagtataaagatagaagccattgaagtctttgaaagcataaagacaaaggatggtaagtc

SEQ ID NO: 249994 - DNA, 364 bp, Glycine max
  unsure (1)..(364): unsure at all n locations
actcatcacatgtggtttatgtggcggtcgggtgatggtgtacaacaagttntccacatncacaaatcgcgcataaacccaccatcccctgttgcccacctncaaccgagctcacgtactcccacgtagcccatatcctcgtttctctcaacaccgggtccccatcaatccttccaaagcttcccaacatccaggtaattcaacatccaaatcatcacaaactaacanaccaagcaaaatagggcagaggcagaaaactctgccaaaactcanacaaaatcacagctttttctcacttaaagactncagtaacatttccttcgttccaattcgtaaccggtggatcgactcgaaaatttactgg

SEQ ID NO: 249995 - DNA, 396 bp, Glycine max
  unsure (1)..(396): unsure at all n locations
agctntngcagaagtgtgttactctntattgagatggttgaagcaataatgacagatttctcccactgagattttagctcaagtttctctctcttggaaggctntaacttgtcttcaagattatccttgatgtcctcttaaagcttcaaagttgaccattgaagtggagcccactcaattgacaaactttataagcagaaataggtgacaactattaagtcatgacaactagtagagtcatcttaagaacctttctgatgagcattccaaagatacatcagaatggtgattctgatgttagctaagaaaggatccataatgaagtagatccttctgatgaagtacaattgatatggctttctgaagtaacataactccatcatacttaacacatct

SEQ ID NO: 249996 - DNA, 372 bp, Glycine max
  unsure (1)..(372): unsure at all n locations
attactaaagagataatcatttatttcattcatgaatcatgacgatgcaccaagtactgggctgagcatgtttttcttggaaactattcataaatccatatgttntgaaagacaaatatttggtcaaaagggtatcttgaattccatggatgcagatgctagatgcattttctgtgtctctcttgtgctcacttttgcatttcttctttctccatgctgttggggacctttattatctgctgacattgcatattacagttgtcaaagtatgcatgcacatttataggagagatagaaggttttggaatcctatttncatattnttctgcattatgtaatcacccacgaataatgattttattccataacaat

SEQ ID NO: 249997 - DNA, 510 bp, Glycine max
  unsure (1)..(510): unsure at all n locations
ccccgccgctggcttgaatgcgtcnctcgaacancaangananntaagctnttnaaatattatgcgcctgaaacggacctctctgttgtaagttatgaccatctggaaaaagcgagagcttgcgatgttaaattcagcatctgatatatatcacctgaacgacctcctgtgataaggtaataccatatgaatctctcgagagcttacgatgttcagtaccgtgcctctcgatatattatgcgcctgtatccgacgcttacgtgaaaagctatgaccgttggaatttaatgagagcttccgagattcatatggaggatacgaataatcatgtgcctgaatccgacatgcgtgtgagaagtaaagagcatttggactcctcgataacacacgctgttcaagtttgagagaaatgcatattatgtgccttaattgactgtcaagagatatctattggcggatagtgtcgcacacccacgtagtattgggaacggctgaatataagacctgacn

SEQ ID NO: 249998 - DNA, 291 bp, Glycine max
  unsure (1)..(291): unsure at all n locations
agcttatatgaatactgtgagagnnattaaanactatgtgtcagttgccctcaccaccaaatttctgagcagcttcttctccaatatttttatgaaggactcagtaacatggagagaagtatgatagatgctgccagtggtggagcccttagagacatgacccctactgaagccagaaatttaattgagaagatggcttccaactctcaacagtttagcgctagaaatgatgttatagtcattagaggagtgcatgaagtagccacaaactcatctgcatcatctgaaact

SEQ ID NO: 249999 - DNA, 467 bp, Glycine max
  unsure (1)..(467): unsure at all n locations
ctttggagaggatcaatcacgatgcctataggttggacttcccagaaccgcatggagtccgcaccacttttcacatttctgatttaattccttgcgcaagtggagctgagactgacgatgaggaactaacacattttgggacgaatcatcttgaaagggaaggggatgatgctgtcctacctaggaagggaacacgcactacaaccatgagcaagaggctgcaagaagattgggctatagctgctgaagaaagccctatggttctcatgaacctcatggtagatttctgagcgcatgggccaagggtgagtccaagtatctttgtacatattagactaggatgtcattatattcggtcctctgatataaggctccatattctaggtacggtaccctagaaatataggaatttccaccctttgatgttacggcacctagactagttcttgtatatgggtagttctgtn

SEQ ID NO: 250000 - DNA, 255 bp, Glycine max
  unsure (1)..(255): unsure at all n locations
tatgaaagggtcatcgagtcaagtggaagtatggaagtaaccatcctgccaaaaattggggcaaaagatggatcgtgtgacatcgctccttcgtctacgggcaaacacatttatggcctgtgatatccctgttacttccagtttcaccttgacggagatgtcatggaccatgttgaaaatctaaattgattcaaccccatatactgtgtaaaaattcacaatacttcaattgtgcatcattcgcatacatncatg

SEQ ID NO: 250001 - DNA, 413 bp, Glycine max
  unsure (1)..(413): unsure at all n locations
agctntgaacaatatanttgtccttcatttaactgtctntgggctnggcggccacgctcaacaaagtattttcgacacctactgtacgttgatttgaccaacgctgttatgggaatgttgcgacaatccttcaaaaccttattgatacattctgagaggttggttgtcatgtggccataccgacgtccttctctatcataagccatcgtccatttttcttttgaaatgcgatcaatccatgttgctatggctggactcagttcacgaaattnttctagatnttgatcaaaaatgtgcttgcaaggagtatangctgcatcanatttagtatgaataagaattttaagtatatatcanagttaaataaactcgaccatganatatganatcttacccaatttctttaacatttc

SEQ ID NO: 250002 - DNA, 443 bp, Glycine max
  unsure (1)..(443): unsure at all n locations
gcttaagcaatcttgcagttgacctacctagcctgatcttgtttattataataacaagattanggattagtggctcacgtagtttgttctgtttcaaatagttgatcgatccacctttgtacgtggaactttgaataatatcttccatacacataagcttcaagcaagtaaattaaaatcacttttttcttgatgtatccaaatgttaatattactacttgaacttatgtcaaaaaaaaattattacttgaacttacaagattaaattacaagaagctaacaaatttcttccatttatgtaatccaaaactagcaaaaattttgtccgtatntatcatttatactatacagtaggatatcnttggttctttttctcttcttgggttaatgagatttgggtagcccaaggatttcaattaaaggagaacngaatagtaaatatg

SEQ ID NO: 250003 - DNA, 251 bp, Glycine max
tgtactcatagatagattcaataatggttgcatacttatgatgcacatcaccattccctttaatcacatgaagatcatggagggagtatgaatgttttcttatgctcggccaacacattaaaaatattatatgatatatcttgtgtggaagtaggtcaacatttctattatcaaataaggagtttcaaattacatgcccaagtacttattacttcttgggttgtaattgtatttgaaaggcaaatatcaca

SEQ ID NO: 250004 - DNA, 389 bp, Glycine max
  unsure (1)..(389): unsure at all n locations
tctttgagaaaacttncttgagaagctagagcttagctacaacacccctctcataactaagttcacctccttgagaagcttccataagaagattcctaaagaagttagagcttagctacacatacctctctaatagctaagctcacctccttgagatgagaagctagagcttagctacacaccccttataatagcgaagctcacccccatgacaaaaaacatgaaaataccaaaaaaaaagtccttactacaaagactactcaaaatgccccaaaatacaaggctaaaaaaaaccctatactactagaatggccaaatacaaggcccaaaggaagggaaaacctattctaatatctacaaagataagcgggctcatacttagcccatgg

SEQ ID NO: 250005 - DNA, 260 bp, Glycine max
  unsure (1)..(260): unsure at all n locations
gttcatggccttgcaggtgaagacccacacaaacacctgaaagaattccatattgtctactccaccatgaaaccaccagatgtccaggaggatcacatatttctgaaggcctttcctcattctttagagggagtggcaaaggactagctatattaccttgctccagggtcatgatggaagcttgctcgtggagcttctatggaggctagatctttgagcttcaatgaaggtctctaatggtgattntacaccatggagat

SEQ ID NO: 250006 - DNA, 257 bp, Glycine max
tcgcgttatatatcgagatccccggaattggtaacggaggctctgagaaatttctaacgacattaactttttactcggatgttcgattgtgtcccgtaatatatcgagacgctcgaaattcaaaatagaagctttgagccaaatcaaacgacaattacttttgactcggatgtccgatggagtcctgtaatatatcgagacactaaaaattgaaaacagaggcactgagaaaattcaaacgacaataactttttaca

SEQ ID NO: 250007 - DNA, 373 bp, Glycine max
  unsure (1)..(373): unsure at all n locations
gattacatctccctctntctcaagcttattcttcttgatatcatttaaatctttatgatttacacatggnaaggcattgagaagtaatgtgtcctcttccaagacatttaaagcactttatagagctagtcttctcttgcatactagccttaggggcttgattttctattggcttccccttatcatctttaggcttagaaggtgtcaaccctaagatgccttgaccttggtctttctttggataagagtgagagccataagattntgaagtagacttctttataagttggtgctctacccttattcccaatctaagttagcctctacattgtctttcccatggaagtatgggaggttaacattagcctcttga

SEQ ID NO: 250008 - DNA, 295 bp, Glycine max
  unsure (1)..(295): unsure at all n locations
catctttttaaccttagtcattcctgactccatttcattgaagcgcatatttacttgcagttccaaagtatcaaacctctcaccaacaaaggtttgaagaccatcaaacctttccataatcttngaaagaagagatgaatcttctncttcatcttcttctttaccaacatttctagcacccttcttcacccaagagccatcatgctcctttatataaccaaaggatgctatgactgaagcgcctataaagaatgatctcttgattggaacatagggttcataatcaagaaggatg

SEQ ID NO: 250009 - DNA, 257 bp, Glycine max
  unsure (1)..(257): unsure at all n locations
aaagatattatcggccagtggttgtaaaanaattgttctttgtcggctggaaaatatccgtcggggctatttaactaccgatgtcggctattgttttttctattccacccctgaattatatttggatgatgcctattaggaaatgttcggtcggggtcatccggtcatgcttctttttgaggcctcgatctgtcgtctttcctagccggccgacgtcggctagcatttttttcgatcaatatctgtgtgaatcatgt

SEQ ID NO: 250010 - DNA, 275 bp, Glycine max
gcgaactgaaccgaagttgtgtttcggccgactggcatgttcttattttgtcggccaggaaaacattatcccacctcggcataaaaaacatgattcaccgatattgacaggaaaagaaaaatgctagccgacgtcgggcaggaaagatgaccgaccgacgtctgaaaaaaaagcatgaccggatgactccggtcgaacattttctaacagatatcattcaagtattattcagggattgaatagaaaaaacaatagccgacatcggtagttaaata

SEQ ID NO: 250011 - DNA, 431 bp, Glycine max
  unsure (1)..(431): unsure at all n locations
gcaagcttatgttggagaccacatccatgggcgcattttgaatactaatgagtaattttttatgtttgggaaaccgaaggttaagcaagttgaggaaggtaagaatcatagatatgtgaactaaagccactgtaagaaattataaaacagaagcttataatcacaaaattatccagatagtactgcacaacaagagttctcacatatgtagtttagaacaatgaacatgaactgcaagaatataagttctcactcaatggtttatatggacaactacatganaacgaaataacaaccaaatatgaagcgctttaaggttataataacatgtaggactttctcacctaaaatgtaaagaaataaatatatagaataaggctntgatactcacaattagatttctacttgagtgagagttgaatctaatatag

SEQ ID NO: 250012 - DNA, 402 bp, Glycine max
  unsure (1)..(402): unsure at all n locations
aatgatgagattacacaattncaagatgagaccttaataattccaagaaaaggatcttgtgttgatggttcaaagctatgcatggaagagatttcatgagggtaagcacatggaaaattgggaaaaacctttcaaaatcaagtataatataaagaatggagcattcaagttagagtaattatctaaggaaaacattccaagaacctggattcaaccttaagtttactacaactagacatgtaatggtgatgcactttttttctcactgaactttttattctctgtaaaatgtgaaagatgtttgccaataaggttntaacaaggcacaccttcactattatcaatgaataaagacattattatngttttgcgcttacatagtctctggtaaagcatgatacc

SEQ ID NO: 250013 - DNA, 493 bp, Glycine max
  unsure (1)..(493): unsure at all n locations
tganntagaatgggcttttcgagagtacattcgctaagcacatcatgtgtactcgctaagcacagtgcacttgcgctaagccctattctttgcggccaattcactagtttaattaagctaagcgcgacccattccggctaagcgaaattccttgcagnctggatagcgctaagctagcaacccctcgctaagtgcatgcccccctgtatgcaggatgcagtatattcgctaagctgaccatgagtgtggcttatcaagagttgcaggttgtcttatatgcacaattcgcttagcgcactcctttgcgctaagcgcagttaaaaangaaattgaatgtcanatgggcccatgtctacccgccaagagaggaggcgganagccaaacacctctcttgcttagcaggatatctcgctaagcgagtgattttgaacatggntaagtgaagtgcaacagtagttacactcacacttaccgccaaaatctgagaagctt

SEQ ID NO: 250014 - DNA, 371 bp, Glycine max
  unsure (1)..(371): unsure at all n locations
actcctacattntatctctagcatgcattctttctttctttacccacttctcacatttgggtttttagggaaaaacaccataactaaacgcgccacaaggcatccctatcgcaccagatccaaatctagaacgatgggtgatcaagaggagacacaggaacagatgatagccgacatgtcggctctgaaagaacagatggcctccatgatggaggccatgttaggaatgaggcagctcatggagtaaaacgcggccaccgctgccgctgtcaattcggctgccaaagcagacccaactctcttggcaactgcgcaccatccttcctcaaacatagtatggcggngaagggacacactggngcatgatgaca

SEQ ID NO: 250015 - DNA, 309 bp, Glycine max
  unsure (1)..(309): unsure at all n locations
agctngcacttatatatgaagcatcagatactaattattaagaatctatagaacctcgagatatgtacaactgcaaacaacaaggcatatgttattcattcaattattcaagtcttctaactagcaaacagaatcaacaacttaagaacaaaacctgaatcaaaatggaaatctttccatgtttattggaaggaccacccttaatttctaatggacatgatgtgcgtgccaacatctctagctcattctgttcttctttccgaacagcaatattctcanattcagatgaatggtgcaatcatgtaatca

SEQ ID NO: 250016 - DNA, 294 bp, Glycine max
  unsure (1)..(294): unsure at all n locations
atctaataatcaatcatttatgcaatgattttctttgtgtctcgtccttggatttttccacattccaattgcaatcaaatcacacctgcattttttgttactttgacttgaatcatacaattgctatttccagtttacagcgagtgtattgcatgtttgacttgaatcactcaaccaacttggtttgttcatccttgttctttcaaatatagattactccaaatcatatacaaacgttagtagttctaattntggtgaccacggtggtgattccatatgcttacgagctacaat

SEQ ID NO: 250017 - DNA, 460 bp, Glycine max
  unsure (1)..(460): unsure at all n locations
agcttgatgttgctgccaatggaattctcgngagcttatgtaatggcttntgtgaatttgaagagaatggngtgaaatcatatttcaccccgccttttatttatttatttttttctgcagcgcacactcacccaggtgagctggtcactcgcccaggcgagttaacatattttttttattttttttaaaaatatttattattattattattatttattattattttggtactatatatattntcctctaaactntataatcaagtataaaattctaggcaaattcatcagataattcaagaaaaataaacaaccctaacctgcaacaganaacgtanaacatataattaaagagcaggggtagagatactaggttggcctctangagtgcttctttaacgtctntagctggacgcgtggtctatgggcgacatctcatcctccctannatcttttcttga

SEQ ID NO: 250018 - DNA, 391 bp, Glycine max
  unsure (1)..(391): unsure at all n locations
gcttctaaggaggtgagcttagttatgagaggggtgtgtgtagcttagctctagcttctcaaggaagttttctcaaagaagcttctcaaggaagttttctcaagaaagcttctcaagaaagctacctagtctataaatagaagcatgtgtaacacttgctgtaactttgatgaatgagagtcttgtgagacacaactcanagttcaacttctcttcctttttccttcttcaatttcgtgctcccccctccctctttctctccctctttcttttcctccattgaagtatcctctccaagcttcttatccaaggctcatcttggtggtgaagctncttcttccatggcttatctcttaatggatggcgcctcctctcacctttctttctttgt

SEQ ID NO: 250019 - DNA, 426 bp, Glycine max
  unsure (1)..(426): unsure at all n locations
agctngtganatcaatgtaatccaagattccgttttatacaagtcgttcaattctattcttagaaatgtgacctaagcatttgtgccataatgctcctgagtttgtattatcaattctatgcttagtaccatgcaattntacattaaaggattcaccacaggagactgcaatatcaagtaaatatggattatcattaaccaagagtgaatcagttccaacaatatctgaattaaaagacaatctgaacacattgtttccaaatgaacacaaataacccaatttgtccttataagaaactgaaaccaaattccgtctaaatgacggtacaacaaaagtgtctttcanattcaaataaaaaccagtacataatatataattagagtgccctatagcttccacttttcactgattaccatcttcaacat

SEQ ID NO: 250020 - DNA, 325 bp, Glycine max
  unsure (1)..(325): unsure at all n locations
gagaaccgagaccttatatggagaaaaagagagcgcgagcaagatacggctcacaatatttttcaaaatctaagctgaacatcatttttttaaaaaaaaaaaaaccgatgttaacaaactgatgttaacattaacattgatcttccgaanaaaaccgatgttaacaaacttatggtaacatcggctcttggaaaaccgatgttaactaattaatgttaacattggttttccaataaccgacggtaatgtcacttcgttacatcagactttacaaaaccgatgtaacggatcacagtattacattatgcaccatgttacgttacat

SEQ ID NO: 250021 - DNA, 285 bp, Glycine max
  unsure (1)..(285): unsure at all n locations
agctttttaaganagtgatgaggttcaagccctattgcagagctngaaagagcctgtgtagtcgaagagaagttcaagtccatagccatcaaagtctgaaaagagtatgatgaactaagggatgtcaatatggccaccgatgaagccttggaatgagaaaccacaaaggcccgataggaagaacacgaccaaagcanagttttgaggggctttatagggcagcaatagtgagctcaagctccgaagaggtgaaaggaatcatcacaagtcacaggcatgatcttg

SEQ ID NO: 250022 - DNA, 372 bp, Glycine max
gaacacgaagcatgcacagattaatattaacgaatgtgagttaattggtgaagggaaaaactgccaggaagccacattataaacagaacctcgaagagagttgagctttgtcctcagaaggaaacaacaccagaaaacttagccttccatagattcaataaaagcagaaaacataaatcaaactaaaagcagaaacataaatgaagaacaaacgtaaatgaagcagaaaagtaaatgaaagcagaagaaggaacaagatacgaaattgcaataagaagtagagaaataaaaatggcattacgtgaacagtagcattagaacagaacacgtagaaccctacaccctatgctctgaataatagtctaacagaat

SEQ ID NO: 250023 - DNA, 346 bp, Glycine max
  unsure (1)..(346): unsure at all n locations
tctcgatgtgtattaaattgcttatatatggattttcactccttagtctttaaagctacaataactaggatgtttggatattctctggatataacattgaattttctgattgaatttgtcctatggtgttgcacgtgcacctctacaacagaatagatgctctaaaggatcaacatggggcaacttacagtcttgagaagtgcatgatatcaatctgcattaatggaatctacataagagtagaacttggaggacaantgggttactatattgatgtccttgcatgctccacgaanaacttgtctganaccttaagagtcattatataacttataatccctgcaat

SEQ ID NO: 250024 - DNA, 326 bp, Glycine max
  unsure (1)..(326): unsure at all n locations
cataatttctgaaattctttctggtctcacggcacgagaattgttctattatctaaaaggtgggcaagttgattatggtgaggagcacagcaaggcttgtggacactcgcagttcggacgaatatatgaacaacgttcggagatcttaatgttctgtttgttgttacctttattttttccttcacanctgtttacattgtagcttgctaatgctattgggggatacagggcattaccctgaatgggacgaggatcaccctattcattttgttggcactcagcaggagcacacgttattcgtgtcttgcaacaaatgctcgctgata

SEQ ID NO: 250025 - DNA, 281 bp, Glycine max
  unsure (1)..(281): unsure at all n locations
tgatcaagaataattatgaaccaatcaatcttgaagcataaattgaaaattggtcccacatcaagtaacagtgcaagtaacttacaggatcttcaagtgttggtattgagacagaaaatcgggaactttattctttaagctattatttgataaatncctggaaagcaaataattaagttgcccctttagatatatttaaatcttgacacatgtaccaaatgacatattgattgttgacacataatacaaagcacaaaaataaattaattaaaataagaggt

SEQ ID NO: 250026 - DNA, 440 bp, Glycine max
  unsure (1)..(440): unsure at all n locations
tgcacggnnnnttgacccccgtggtcaatgattccttgtagancgaggcttgcagcttngaaaccttctgcactggtatcgatacatatctgaatttttaccgagagaaaactttggaaaagtttgaaaatcattgcactcactttgaaaaaaagttaacttatctgataagtctttgtcttctgagtctaatctgatctgactgatctggagctgattggaactgatctgattttgaatcaaattcatcttgaccttgagtgtctgatcaagctgactcctcttgatcatgaacatattttgtacatgaggtctgacttgactttgcatacttgtacacanacttttgatcattgatatagacttgtttaccaaagataccgctgaattcttgttccctccaagtcaagacacgacgaacttgctaccatgaggtctct

SEQ ID NO: 250027 - DNA, 318 bp, Glycine max
actccctactttgtcttacatggcacacaccctaactattcatcggtatgtatctttggttctaaatggtttccctacacttgggatgcacgacataacaaattcgaccctaaaacccttccttgtgtggttggtggatatagtgatatacataaaggatataaatactttcatccttctagtaagaaattttttatctcatgacatggttgttttgacgagtcattctttcaatataaaactaattggtatcatacaatttcctcttctacacagcatgtagttagcatatttgattcttggctacctcatactaac

SEQ ID NO: 250028 - DNA, 284 bp, Glycine max
tggaagacaaactcgaagaaaaagttctgggtttaggtgtatgtttctcttcatagagtttggccaacgaaattgttctgaggagtcatgtaggtgattgtgcaatgacatcccttctgatatcaggttttaatccttccacaaagcaatccaatagagcttcttgtgtaattccttgtactcgactagctaaagccgtgaactgcacgtaatatgactgaactgaaccacattgagggagtttaaacaactgagatctatgacattcatacggtgatgggcca

SEQ ID NO: 250029 - DNA, 390 bp, Glycine max
  unsure (1)..(390): unsure at all n locations
actaagctttacatgcatgttcacatcatatntactatacttcgatcaactgatgcaatctatttgattgaaaagataatttatattactcttctaatgtagtcgacaactaaaaaaaaatataacagaaagtaatgcttatgccaatctaatcaagtcattttgaatctcgtcattactatcatgcatctcaaagagaaggagaatcaggcatcgtaatacatagcacaacaaaacatttaaagaaaacatgccttccaaagccaaccaaggttaaaatgtattcatatttggtgaactttttcaaaataataacacatatatataaacatggtggaacaatctgaccacatgcacaacacattccacacattatttctgataatgagt

SEQ ID NO: 250030 - DNA, 487 bp, Glycine max
  unsure (1)..(487): unsure at all n locations
tacctatcacatgtggtactaggtggcggtcggtttatggtgcacaacaagttttccacatccacaatgcgcgcataaacccaccatcctctgttgcccacctccaactgagctcacgtactcccacgtagcccatatcctcgtttctctcaagaccgggtccccatcaatcctcccaagcttccacaacatccaagcaaaacaacattcaaacagcacaagctatcacagccaagcaaaatagagcanaggcagantactctaccaaaacaccaaccaaatcacagcttttctcacttaaagaccccagtaacaattccttcaatccaattcgttaaccgttggaatcgactccaaaatntactggaagtctatagtacataagcctacantttgacgcgtgggatctactagcanaaatcagaactaattctgactactctttcacagccaacacacacaagcattttctgacaaagcaaaatct

SEQ ID NO: 250031 - DNA, 286 bp, Glycine max
  unsure (1)..(286): unsure at all n locations
tgagagaccatacaagtttcctagcgatttctaattatgtgggccattaagtctacaatatgctgacaatagccgagaagcccatgaatttcttcaggggcggagtaagtgtccgccatcgccttggccttggctaacaagcggggaagttcttgactcccgttcaaggtaagagcaaaccgatccatccacatggttgcctcttggtgtaaagagtcgatcacccttcttctagcctctttttncgcgtatacttgggcatactcgtncgcgatcctatgctcgt

SEQ ID NO: 250032 - DNA, 448 bp, Glycine max
tcagtctttcagctcttcggttgctgaccacagagtggtacctggagatatgtcgcggaggtcatgagaccttggggacgtcatgtggggtgctattgcccaaaaccaagcttgaccacatcccgacccaccccgggcatagtcagtcagtgagaacctgtgacgtacctaaacaggcgagtctctggcagtcaaccaataaaagaacaaagaccacgatgttggacaagtggcctcatatatcataataaggtggggggaggtgatataatatattaccacctatttccccagtgataattatatacaccttctaatacaattataaactcctctaaacatcaattgcttacggatgatccacacaaacaattgtatgtgctatttgcacaatgacaactgagttacggagagatatgcctctcgattatccggttctcccaccctg

SEQ ID NO: 250033 - DNA, 405 bp, Glycine max
  unsure (1)..(405): unsure at all n locations
cctgaacgtgttagtttttggcttggaaggtttataaccaggttaggcactcgagacatttaactaataattcttcttgtcaagagtgtggtgcagatctataatgtgaggatcatatttttcgaaattggctagcatctagagcagtttggtattttcttcttcccgcagctatgcactcctttcttncaacaagattntaaggtttggttggtttctaatcttaagaatgaggaagtgattaatagaagcgaatggngcctaatctttgctcgtgcgttggacttgatttcgcaaaatagaaataaaggtatttatgagggaaatagaacgcagcctatggagactattgngcacctttggatacangtagatgcaatatatgtcagcaatgattaccattct

SEQ ID NO: 250034 - DNA, 478 bp, Glycine max
  unsure (1)..(478): unsure at all n locations
caataaattttagttgagttntattcagaaaattagagtttatctcttttatcttagtgagagtgattctcctaaattcttgagtgattcaagaacaccttgtgtgtatcaaaggactttcacaacctttgtgtgttgcccttgctggaaagagagaatcttttctttctttcatcatcacccttggtctttcaaaccacaattncagaanaatcacctcttgccagaattatctcgtggccatatactccattntacgcactcaaattaagtgattcttgagcctaaaatgaatttcaaaacgagaccttttacctcgttttggaatcacctcatttggagccctgtagcttcagttattgccatttctatatttctgtccagccaccacttaacctacgtttaccatcccattcattctatttatgccaagaaccaccttattatacccacgaaatagccacctattttcatcttn

SEQ ID NO: 250035 - DNA, 538 bp, Glycine max
  unsure (1)..(538): unsure at all n locations
agcccgcgcnatgtncatgattccctgctattagtacacatagatactcaagctggtcgaggacttaccccgtgaagatcgaagaacgatgaagaacgaatgaagaacgtcgaagaacgggtgaaaccttcgcgaaattcctcacggaaacgttacggaaacgtttcggaagcgcctcggcttggattttcttcacggaaaccatttttcccagccaattcgaaagagagagaagtgcctaaggggctgaacccttttncacttcactttctcccctatttataagaaaatatgggagatgcttgccgcccagcttcgccaggcgagcagggttgctctcttcagaagcaacagccttctggaggaatcttctggagggcccaagtgggcctgtgtgctatttgcacccccatctttactaagtacacccccctcgccttctttggtgattctcntcttcgtaagtacgganacctacggatttcggaacgataccttggtttcttccggaatggtaccggaaccttgcggatacacn

SEQ ID NO: 250036 - DNA, 309 bp, Glycine max
  unsure (1)..(309): unsure at all n locations
gtgattggagaaaaattttactccactcatttccttaaattntctatttgatctctttaatgtaaaaatttataactcattgtgttagatgagtattttatagcataatttagttatggattgtgtgaaaagggttaaaaaactaagtattatggattattgtggcttcctcacaaccttatgtttgctaaatttgagaatcttgctaatctcttgttttttattctaaacgcgagatcctgtgaaaatacagtggtgatcctcccacaacattgaatgtatagatgcgtctttacgtgagactaatct

SEQ ID NO: 250037 - DNA, 373 bp, Glycine max
tatggaatgaattcaacgatccaacccaaactatatatgaaatcttattatatgtgccgataggcatagataaagatcaatgggctcatctttgtcattatcgtcataaaccatcaacattggtacaattagattggtttaattattgaattgtttttatagctcattatatgattactattaccaggtgtgaaccttgaattgctttgcatataagaactttgtaagagaaactaagaaattcgaagcaagcaagttatttcacacactggtggatccaaagcttaatctagaagaagacaatgagtggtaatgacactaaatgttacctttactaattaaagaagttcaatggttacttactctttattta

SEQ ID NO: 250038 - DNA, 405 bp, Glycine max
  unsure (1)..(405): unsure at all n locations
agctnggaacaggaagaatccatcagcaaagcacctatagggcttggatctatatgctacattcatattctagacatgaagaggcacaagcttgaagacaagactatacgaggtatcttccttgggtatagcaatatctctaagggctaccgtgtctacaacttgcaaactaagaaactcgtcatcagtcgagatgttgaagttgatgaatatgcttcttggaattgggatgaagaanaagtggagaagaacgttcttatacctgctcaactacctcaagaagaagatgaggaagaagacccaggtgaaccaccttcaccttcaccacaacaacaagatcaagaactatcatcaccagagtctactccaagacgagtaagatctttggtnacatatatgaaacct

SEQ ID NO: 250039 - DNA, 430 bp, Glycine max
  unsure (1)..(430): unsure at all n locations
agatactaagcttatgttggtcaagacagacttgagcatatataatactcctaactattgatgcatactaaattgcttncattcgttttcgttccatatcatttctaggacattgtgcgagactaaatttgtctcccttctgaattggaacgggtgatgctgagcacttttncatcctaaacctctctagtattttattgatatatgctttctaagacaagcctaacaatccttgtgatctatttcagaatatttctatccctatcacatagcttgcctcacccatatccttcatttcaaagttactagagagaaacttcttagtgtcatgaagaagactaaaatcattagttgcangcaatatatcatcaacatacaagattagaaaaataaccttacttccactggcctttagatatatacgccgatc

SEQ ID NO: 250040 - DNA, 384 bp, Glycine max
  unsure (1)..(384): unsure at all n locations
agctngcacgcncaccagtcatcacttctcttcctatagttttnnttttaacatatatctggcgagaattcagaatttagctgaaattatttgagcacaagtttttgtggcagatcaaaaaaatattctggtcaaactttgggcttattgggttcacatacacattattattgggcaaaaatttaagagatacctattggactaaatatccgttattgttcaaggtaaattgagcgacctaagaataaagtaggaaaagtagaagcgccacaattgctgttgctttcatttagccaacacannatggttttgatttttaatattaattataacatttaaataattcctcagaaatatcaataatttggaatttcaacagaatat

SEQ ID NO: 250041 - DNA, 406 bp, Glycine max
  unsure (1)..(406): unsure at all n locations
gaacatagaaactaagcttgagagcttaactattgcatgatcattccatctatccatcacttcctatgcacactaagaagtgagaacatggaaggaatactcattagaaaaagaactaaataaaatcacacctatcacaagtccctacttaattactcttgagagatgatgcctcgagaaattactcctctaaaatagtcctgtctcaagacattaacactcattntccatcctttgtattcttggccgcttgccatatcgtaccattgcactttacaaattatacaaatggccaatttgataacttatgacaaggcattgaaactcatggtatagtagagacatcatggatacaaacatgttatgactagaccaatcaaatctctataactcatggaagcacaac

SEQ ID NO: 250042 - DNA, 405 bp, Glycine max
  unsure (1)..(405): unsure at all n locations
ngctttatgcaacaattatactattatctcaagcctatatgcaatgggctatcatgcgagtgaanaaccatcctagggcgtataatagtacataaccagacacaccacacaatggatatgtcaggtcagtctcgttaagcaaaataataaggtgaccagtcacggtcactctgctttgcaagaatgctgtaaccatatgggatcaacatagacttaacagagcactcaaatctagtgtctctacccctaagccctaaactccgaagaatcccgtagggtctcaccttcctaatttagttcaaccactgaaataattttgcacgccacacaactcatnactattgatatcccaacctccactcgtgttatacacgttaacacatatgcataattaacactcgtcct

SEQ ID NO: 250043 - DNA, 467 bp, Glycine max
  unsure (1)..(467): unsure at all n locations
gatgttggacgatcttcttcaaaaggctctctttgatggagactatgttntaattttatttttgtcttcacgtagaagacaccaacttggtaaccataacccgtgcctccacaatgtcaacccaatttgcttttcaggagtaggaggtgccaacccaattntcttcttctacaactcctacatgtaggataatagtgaattcaaatgaagaactactattaccttatggtaatgagaagtgcttatgacactcgcatgactggtgtgaaatctttntataagggaccaatccaatataaatattactcctaatatttatacatctgtgcttacttaatatctcatatctatgactttcgtgatatgtatgcagtctactcatataatagccttaatgcattattgtcatccacagtaacaataatacttgattatagatattttttgaagacatttcattattcaat

SEQ ID NO: 250044 - DNA, 408 bp, Glycine max
  unsure (1)..(408): unsure at all n locations
tgtgcttntatgaanagggtcatcgagtttagttgaagtatggaagtaaccatcttgcaaaanaatggggcaaaagatggatcgtgtgacatcgcttcttcgtctacggccaaacacatttaaggctgatgatatccctgttacttccagtttcaccttgacggagatgtcatggaccatgttgaaaatctaaattgattcaaccccatatactgtgtaaaaattcacaatacttcaattgtgcatcattcgcatacatccatgttgttcattggttgcattgctcattgcattctttccttgaaaagaaagagagaacctaatcattgttataaaaaagaanaaaaaaggcatgctntacggtgccctcaccgaacctatgctagagctagagtaatgggtaaagcg

SEQ ID NO: 250045 - DNA, 271 bp, Glycine max
  unsure (1)..(271): unsure at all n locations
agctataagaaattanatggtttaggtatctttttggngccgattcacgaacatcaactatttacccgatcaaaattaaacgacggaagctctcgagaaattgaaattatcataacttttcacacggaggtccgagtcatgcacatcacatatggagacgcccganattgaaccacggaagatctggagaaattcaaatggtcataactttgcacacggaggtccgattcaggcgcatcatatatggagacgctcgatattgaacaacgga

SEQ ID NO: 250046 - DNA, 448 bp, Glycine max
agcctcctctatgccatgtcctgagaaggtttatcattttaaagttttcttaccaagaaatgctactactaaaacaaaaatggcatacaacctcctccaataaacacaaacaccaatgtaaatttagaacaaactcatgcaatacttccttatgaacattcactcgcacaagatattcttctacctaagaaaaatgcacccatgcacaatcgaggcaccttcgttacctagattatttatatgtacttccaaggagtatttgctacctacatcacatgcacttccttggctaaaattacatacatgcatactcaaagcattttggctaccaaaaattgcacacgtgcacattctggtattgcatatacctatgcatatgcaaactttgtgtgaaacttgctatctacacaaaatgactacatttatgcttattcagagttttgctact

SEQ ID NO: 250047 - DNA, 252 bp, Glycine max
  unsure (1)..(252): unsure at all n locations
atcctctgagtcacctgcggcattgcaagcttgcacgtatcanccaaagtgctcatttataattgttccagtttaaacgtggtgcctaagagcactctggagaaattaccattcaatgcctcccacttaaagccgagttcaatggtggttcgtgccttcaacagcacccgccgaaggtaaggagaatcaattcccattcagattgccctcacacctgcaagtactttccaataatggatttaattcccccta

SEQ ID NO: 250048 - DNA, 329 bp, Glycine max
  unsure (1)..(329): unsure at all n locations
nacttttcgcaaagcttaccgtaaaatctgtgtcttatccatggtttatgtccccacagaggccattgcctcccttgcccagaactatgaacagccgttgaggtgcttcacctttggggacttccagctatcacctatggtagaagaattcgaagagatcctaggatgccctcttgagggaaggaaaccatacctcttctcaaggttctatccctcaatagctagaatttccaagatagtccaaatctcggcggaagaattacaccaccggaagcaagtcgaaaataggcgtggtggaataccgataaaatatctggaggcaaaagcaa

SEQ ID NO: 250049 - DNA, 284 bp, Glycine max
acctcaagccccgcagcatgcaacctgctgtaaaaacaaaaaaaatttgctttctacatgaacacacttcgattaaaatggaactacctcgaaccaacaggggtgacaacaactacacagagatccaccatctaaacatatctggggtacgacacgtaggagaacggttcgagtgaaccaccacaatacgttgaacgagtggcccgaggggggcaaaatcgaaattggggaggggccgcgaaaactttatctgtacgccagtcgccggaaacatacggaatcct

SEQ ID NO: 250050 - DNA, 301 bp, Glycine max
ccatgaaaacaaaacctacaatgggcgaaaaaaacccccaaagcccagcaacccgaaaaacccaaagacggaaaagaaccacagctcaaaaaccgcaaccccccaaggccacccagccacacaaatcacccaaaatagaaagacccccaagaaccacaaagagaggggaaaaaaagcccacacgaggcggggggcgacaaaaaacacccaacaaaacaaccagaaagacccacggaaaagcgaagcaccaaaccccccaaaaaaaacatctacccccaacaaaccacgccaaacaacccac

SEQ ID NO: 250051 - DNA, 337 bp, Glycine max
tgcagcatgcaacttgtatagcaaagaaatttactcttgtcaacagacgaaaatgaagcgaccatacaagaatgaattgacaagcttcggattctgaaacactaatctgatgaagaccgcaagaacaaatgaagatccgaatgatgcaaagaacaaagaatgacgaagaacggcgaagaactctcatataatcgctcatagaaacgtctcggaagcgatacagaaacacctcgacctggatttattcctgtatgctcttctcctacccatttcaagtgaaagcttagcgcaacaagtgttggaaccttaacactagccccccttcactcattataag

SEQ ID NO: 250052 - DNA, 256 bp, Glycine max
taagtcgacctgctgcatccagcctggggctatttttttttttttttcccacactaatgggctttctctattctatataatattccagacttgcattttttaggactatattttgacgggtttaaattggtagccttacgcactaccacatgacagtaaagtaatgtattttcatgaccgtccattttttaaatgacacatatgtgccctgtgatgatagattcccaaatactcatgaaaatggatattgctttag

SEQ ID NO: 250053 - DNA, 337 bp, Glycine max
  unsure (1)..(337): unsure at all n locations
tctttgacagtgactggtgtaactgcaatcattcatcaaatagcncgatatatgctaaaatcaaatttgcataaaccaagatataaaatgaacattggcatttaacctatttaaaatataattgaagtccaaatcagaacataacaattatgcaaatcggatccaagttaatcttatcgaatactcaccttcattcgataaccagcccttgatgcacacatatccatggaaaataacttgcaacacttgcatcattgggtgcactaaccatgaatttccttacaaaatacacatatctgaatttcaatattatcagactttaaattacattggcatg

SEQ ID NO: 250054 - DNA, 341 bp, Glycine max
agcttgcagaaaccacctcatatctcatgttatatgctaacttgctcccacatatactccataattcaatggtggccacaaccccagtcaacgttacttaaccttcattttttcgacgatacaactctaatgcaacaagtgcttatcatgggggagccccacagcattccattgatcattgtacgaccctgaagcctaacgcgcaaggtctaattgaagtgggctggctaaaaattgaggagaaccgattgcgaatcctgacattgacaagcgatgcttgtctctttgtaagcctcaaaactgaaacattgattctttgaaagcataaagattgaaacatt

SEQ ID NO: 250055 - DNA, 161 bp, Glycine max
  unsure (1)..(161): unsure at all n locations
accagaaaaanncataactacccgttttcccccccaacccgccataaagggggccaccacaaccccccgaaggcccccaacccccaaaacggaccggccccccgcacaccaccccgaaaccccccaccacagcccagcacgacacggcagccaccacaacc

SEQ ID NO: 250056 - DNA, 185 bp, Glycine max
ggatgacattaaaacgcatctgatatgtgatggctttatcccgacgtacccaaaatggatatggcatggggagttggttggtcatacatcaacatgtccacctcatccggttgatctacacagcggagatctcatggaagacatgatacgtgattttgggcaagaaggctttctggaatgtcatg

SEQ ID NO: 250057 - DNA, 334 bp, Glycine max
  unsure (1)..(334): unsure at all n locations
catgctagctntggagnttccaagagccaattcgtctttctctttagtccaatcttctactggcttcaattcttcagtgggctttccttctgtgtccagcatcttgggatgttcccagcctttgagaacagctttcacgttctgctattcagtgatttgaggaaggccaccattcttgctttccagtattcatagttggttccatctaggattggtggtctgttcactggtcctccttctttctccatgttcatcaaaatttatctccctagacctcactctgtgatttcgagtgttggctctgataccaattgaaattctgataccaggggac

SEQ ID NO: 250058 - DNA, 345 bp, Glycine max
tcttgcctaacctctcaaagagctggcgaagaagaatgtggccttcacttggggcgaagaacacaagccagctattgctttgctcaacagaaagcacacacatgcacctattctacctcttcctgagtttctcaacacctttgagctcgaatgtgacgcctctacagcgggtgcggaacctgcattgttgcaaggccgggaccccatagctcttctgattgcaaaacttcatggccccccatttactaccgccttcatgaaaccgacctgtatgcctcctacagacgccctcaaactcgggacattcacttgcgcctacgaatcggcctcttagggtgcaaaata

SEQ ID NO: 250059 - DNA, 341 bp, Glycine max
accccgcagcagcagcttcagtctcaaaaccttagcacatcttgttactcgttggggaccactttccacgtatgcaaagaattcgcttttttccttcatctcattacactgacggactggtgtgatggaccaagggaaaattgtttatgctgcattctttttatcgttcctgacacttacgtaattatcattgaccatttactcatacattttgaaattaaggtggtaattctacgggattcatgaacaacagttgttgactaacataacaacttcgaaaccaatgctctgattttcttacagtttcctttttccaaaacgtttgccccatattgagtatt

SEQ ID NO: 250060 - DNA, 277 bp, Glycine max
gcatgcacttgctggaaaacttcccttatctttgtctacaaactacaatgggggagtgacaatagagagctatttgtagattacacaaagttttgataagcctctccattggaaaacatgccgatgagatactatttgatgatgccctatggaggctagcctcatattacttggaaagccttggcagtatgataaggacgttgcccacaatggtgtcacaaacacattttcatctgtacatatagggcaaaaggctacacttaaaccttttgcttca

SEQ ID NO: 250061 - DNA, 432 bp, Glycine max
agcttaacaagttattaccattggagcatattatctgagaatatgcttacttaagtgagtagcttatataaacaacggttacttaattcatttctattaattaaaagaaacatttttaaatatataatttaatgtggttcaaaataagcactcactctatcaacttttgcattaaagtaaattttttagttaaatttttaaatttatgtggcagtgtggggctctaatatataagataaacaacttatttaagccatcatacattatagagattcttaatgtaatttaagtactactaaaagatactatctccatcccaaatatctgtacatttgggataaaaatgtcccataaaagtgtacatatgaaacaaaattatccaaaaaagagtacatctgaaaaaatgcccatgcattttgattttcatgaaca

SEQ ID NO: 250062 - DNA, 341 bp, Glycine max
tataccaagatgatgtctctagtacattggatctggtacgaccatgccctcctgattacctcatgggatattggcgaatggaggaacacccccgcgcttactcaacaggcataatgtaatcctctaccgttctaaaagccttatagttgggcctacgctttacagactttcttttgttaaagcttcgtgtctctatgcttctaatgtatatacaaagatctatctttatctggcctatggctctacccatacttatccatttgcatgttacactttttatttctgagacgactgatcccataatagtcccccgacgtcctatacctggacccgctatcact

SEQ ID NO: 250063 - DNA, 231 bp, Glycine max
actcgctctaaatcgacgaacattaaaaccacgctaaactgcgacaaccacactctgctaactctggcttccatcaatcaaaatcaaactatgtgggaggacaaaattcactgagtggtaagattatccacaaaattataaccgctccgatgagaaaaatttcatccaatattatgaatattaaaaaaatatctaattctacgacacaccaaaatcattaattatacacat

SEQ ID NO: 250064 - DNA, 420 bp, Glycine max
  unsure (1)..(420): unsure at all n locations
gcttcttcagaaagacgtagtatttgtgcttgaccagccttatagagaggcatttgaggagttgaggaggaaacttaccacctctcctatcatgtagccactagattaagagcttccatttgagctcatatgtgatgcctccaattatgcacttggggttggtttgtcacggagaggtgataggctatcacatgtcattgcttactccttacacactatggatgcaacctaagtcaactacaccaccaccgaaaaagagcttttagctattgtttttgcattagataaattcagatcttatttgttntgctcccatattactgtctgtactaaccatgcaaacttgaggcacctgttgaagaaacctgatgctaaacccagattgatcaagtggatgcttcttcttcagaagtttgatat

SEQ ID NO: 250065 - DNA, 320 bp, Glycine max
  unsure (1)..(320): unsure at all n locations
tagcttaacaagcttttttatggttngagcttctccttctactctaaaaacgctctctaaaaagatcgagactgattcttatagtcaacacaccgagccgagccttacatatgccgagcccaaagcccttgattagacgtttggctaattttcacccctaactgcttgagaggcttaaatagataaacattggaaataatacgtgggggcatttgggataaattttactggttgaacccaatttaatgacacacaatccattaacctcaatgaactcggaattatgttcgctctctaaccggattggctcaataacactg

SEQ ID NO: 250066 - DNA, 348 bp, Glycine max
aacttaccgtatcttatatatggcctgaatgttttctgtgtggcatttgttattcctccgccggcaagagccagccttaacatcatacgcagatcattagtcgtaatctgcgggtcaatctgaaggacgaaagatctcccgttttcttcaaatggccagcgataaggcgcaacctccggggactgacgccagccgatacacttatgggtatttcccccggaggcgagaaagcactctccacgcccggtcgcaaggatcaggacgactgaggcacgcatgaatccttctcctgatggagacgtacagatgcgacttctgtcagcacggtaagagccatagtatgcgcat

SEQ ID NO: 250067 - DNA, 462 bp, Glycine max
ctgcagcatgcaagcttcaacattcaacttcgagcgtctcgttatactatactactcaattagacatccgagtataaagttattgtcgtttgaatttttctcagagcttcaacattcaatttcgagcgtctcaatatatgacgggactcaatcagacatccgagtaaaaagacattgtcgtcttaattggctcagagcttctacattcaatttcgagcgtttcgatatatgacgggactcatcacgcatccgtgtaaaaagttaatgaccattgaattggcttagagctttcacatttaatttcaagcgtctcgatatatgacgggactctataagcatacgagtacaagtcatagtcgttgaattggtgagagcttaacattcaattcgagcgttagatatatacgggactaatctacatccagtaaaagatttgtcgtttatatgctcaagctttaattc

SEQ ID NO: 250068 - DNA, 268 bp, Glycine max
gagggacgctccttatgtgttaaggactacaacaataatactaatgctgattacttccttaaaaaatagtactctacttattatagagacagtcgagaaatttcaatgagctaagatgaatagaattcttcccttcaaaacccaaagcctccactccacgagaataataataaatatacttttgatggaccaacacactatctaactttgaccacgtatgattcatcgccaatactatatataaaagctttagctcctgttcttaatg

SEQ ID NO: 250069 - DNA, 418 bp, Glycine max
agcttgtagctggagctgacccatcaactctcctaactctttcagactggcgactcctatcagagcattgtgtcccgacgtccttcagcacaaggttccttaaagcaactcacctagtcatctgctcccggaacacaaagttcaagatcatcacaggatccaaacataaacaacagagggagtgagttatcacattcctaactaatagagaaaaataagacaacatataggtataaatattatataacaaaatacaattcacttgagcataactcacgttattttaccacacgtctcattcgttttcacaacattcacatactcaatagtcaaaacacaatatcatcaaatcaatcaatatagaacaatacacacgcattatggaagagatacactaagactcaatcctatatgcaat

SEQ ID NO: 250070 - DNA, 438 bp, Glycine max
  unsure (1)..(438): unsure at all n locations
agcttgtagcaaattcgaacgacaataacatttcactcggaagtccgattgagtcccgtaatatatcgagacgctcgaactttaaaaccgaagctcgtagcaaatttgaacgacaatgacatttcactcggaagtcctattgagtcccgtaatatatcgagacgctcgaaatttaaaatcgaagctcgtagaatatacgaacaacaataacttttcactcggaagtccgatggagtcccgtaatatatcgagacactcaaaaattaaaacccaagctctcagatacttctaacgacaataacttttcactcggaagtcctattgagtcccgtaatatatcgagacgctcgaatttataaccgaagctcgtacanattcgacgacactacatttcactcggaagtctgatgagtcccggaaatatcgagacctcaaatt

SEQ ID NO: 250071 - DNA, 458 bp, Glycine max
  unsure (1)..(458): unsure at all n locations
caacttgtccgngtacctgaagatgctcatatgctcctcctgttttcattttattatcaggggaggccaagagatggtagcatttattcaagggcaataatttaaagacctgtgatgaggatgttgagaagtatctaaaaaaatattttccacagtctaaaactgcagaaggaaaagctgcaatttcttcattccatgaagacacctgaagaagccatggacttaatagaaaatatggctgccagtgaccactcaattttgcatgatatagctcctaatcctaccaacacgtttattggagctttcatcacaagatgccttgtagaccgaaaatatattgttgtccacacacatgaagcttatcttaaacactaagtaatgtgccaactcaatgtcatgctaaccaaactttactttatctgtttgcagttacaagttgccaccttgtggggactcat

SEQ ID NO: 250072 - DNA, 406 bp, Glycine max
  unsure (1)..(406): unsure at all n locations
ttcattcagcaacacaaattatgtttatttgcacgcttaaatttgctagatagcctactcaattngaaaaaggcaatttctatcttacatcttttatttggacaatatgttacataagatgcaactaagaagattactaaaccttatattagagatggacatcaggtcttaatatattgcttggccggcgcaacacaaaatattntttgatttcctttgtccaaagattagacttgtgttatatatgtctctgttgctcaagttaaaatcggtatattcttgcggtagccatcaatgaacttttaaatgactattgtaatacacaccatgaatttatgccaccagtgatatgctgataaatggatatgtgagaatgattgacttattttagagggattttactgta

SEQ ID NO: 250073 - DNA, 274 bp, Glycine max
gccattatcctagggaattaaaacaaacttaatggctgagtgtaactgaaattgtggcaatcaaaagttacccccaacagccaacaagttatccaacaattggtctcccaataagcttgagcctaggttgtcaattgggctcttattacaacttgaactaaacctaacttaagcccttttatgtgataacccaaaacatattttttgtcacccaactttacaatgaatgggccattaattagacaaactaaacacttctaaattgagacaaagt

SEQ ID NO: 250074 - DNA, 458 bp, Glycine max
  unsure (1)..(458): unsure at all n locations
taactntcaacatgagtcttcacgaataactatcctgtttcataaaactacctcaactacccatcatatttcccaaatccccatacccactataatcataggagaacagaagccacccaaacctgaaatctcgaagtgccactcgtagacacgcactttacgaccccgaaaatgccctcctttcccgattcggagcataactgatggccaaaggttggagctttgttgggcaacaatggtggatgaagaatagaagacaaatgctgcctgagagagagggagagcttctgatattttttgcttggctgagcgaggagagagataaactctttggtataaatacagggttttctctgttttattattttatttaagccatgcacatgtctccgttgagtggacaaaaaaggccactttccctttaattggaccaacctcactacaaaagtgataaaatc

SEQ ID NO: 250075 - DNA, 268 bp, Glycine max
ctgaagcatgcagctaggcggtatatggattgacgatttattacattaattgctccaacattatctctaatctctgtaaccccacatcggtatgtatatatgaccgacagactattatctcttaactcttccgatggatatctccatgtcaaagtattggcatacatgtccatgaaaatataccgaaaaatattcttatgtgaaactaccgaccgaatttcttgtgagaacaccgaatgtatttttattgggaaattatcgacagatc

SEQ ID NO: 250076 - DNA, 416 bp, Glycine max
agcttgaatcggacatccgagtgaaaagttatgaccatctgaatttctcaagagctgtcggtgttcaatttagagcctctcgtcatattatgcgcccgaatcggacatccgtgtgaaaagtcatgatcatttgaatctctcgagagctttcgatgaataattttgagcgtatcgatatattattaaccctgaaacggacctcagagtgacaagatatgaccatttgaattgaccagagctatcggcgtgaatttcgagtgtcattatatgtgatgcgccacaatcgtacattcagagtgaaatggtatgaccaattggatatctcaagagatcctgttgtgccactctagcctcttggcctcttatgcgaatgaatcggactacctcgtgaaagagtatgaccatttgaatttccc

SEQ ID NO: 250077 - DNA, 293 bp, Glycine max
ccggacttaagcactcagctgcatgttatcaccaatcatgtttagcgactgtccaatcaatgaaatcaaggagccatacctacccagatataacctcatttctcgaaaacactcaaccacgtggtttcacaaaaacccggcgtcattggcatggaggcttaaccagggcaagctaaagatcggctgcaaaattgagaaatggtgtaatctgaatgaaaaaaccccagggcatataaagcgtgatggcctaaatcacaggttcagatatccttatgaacacatcaagtaataaa

SEQ ID NO: 250078 - DNA, 196 bp, Glycine max
ggttcaccctactatgcacttctatctccctcgaaactgctgaggaaaaatattcccgtgagaaaaatccaagccgaggcgcttacgttacgtttccgcaatgcttctgtgagtaatcacccaaacattctcgaccggtcatccagatacatcgttcggccttccgtttcttcaagctataacgggtacagtacct

SEQ ID NO: 250079 - DNA, 333 bp, Glycine max
tgctagcaagcttaatcacttgtgccaccatctctgttatgcttaacaaaatacaccaagagatatgcatatgcactgagggcaaactgtgtaattataaaactaaggtttaactttattgcacaactctaacccggctaaagctgtcaacttttaacacgcttatgagcatgaaatattacatatcaagtttgggcaagctggacatgcatatttataatcaacaccctacaatatccaagtccatgtcattcagagcaaagccttttataaacgcttctcatcagatcttctcttctgaacacaaaccacaatccacatgccctttaaaat

SEQ ID NO: 250080 - DNA, 252 bp, Glycine max
  unsure (1)..(252): unsure at all n locations
ctgcagcttatgagaagcccctctgattcaatattgtctacccgtcgaagacagctanactccctgcatgaagtcacatgatttaactccaatgccatctctatacaaaaaaaaaaacaactcccaagggtgtacattttacctcgcgacacaacaatggctatccctggaggttgctgcttgcctggcctaaaagtcctgctcacttaccgctttatattaacaggacaaagctcatgcagcctgactatg

SEQ ID NO: 250081 - DNA, 343 bp, Glycine max
gaataatacatctcttggcatctctcgctgtcataatcgaaaaagagacctgaccatattggatgcttctggaacttctgtcttgtcttcaactgtcccaaagacattgctcaataggttattggaatatcatggccattgtttgtaacctaacactatgcagccagatgcatgttctcatatttcttaacttcttctcctcccccttttctccttttatcagatgtgcacaaacattaaaacatctatctcctttgtggaggatatctcatcctcctgctacgccctttattatccaaattacttgctacttacaccttccataacatcgaatacaatggat

SEQ ID NO: 250082 - DNA, 305 bp, Glycine max
  unsure (1)..(305): unsure at all n locations
agcttctcatacaaactctttacaaggtaattttattttttatttataaattatattcctactcatgttttctacaaatttttctacaattaggagaaagataagaaggaaccgagagaaagtgtggaataagattagtaatgtgatggagggagagggagagatatacaaaatgaatcgcaagaaaatattgtagaataatgtttgtagaatagaataactcttttctttattatatatatacagattntactttaacattaacttgtaaggctttgcatgangaatgatttcaaaagtgaaat

SEQ ID NO: 250083 - DNA, 339 bp, Glycine max
agctcgcaactgaatttacacagttccatttgtttctaaatgttgtcaccgatctacactgctttggtaatcgattaccaacgcgtttgaacgttgaaaatcaaatttaaatgtgaagagtcacttccttccacaaaagagaaagctttgtgtaatcgattatactgatttggcaatcgattaccaactgatatatttctgaacaaatcaaaagatgtatctcttcaaacagttattgacttcttcaaattggatctaagctttctaaaggtcataactctcctaatggttctctggaccagacatgaagagtctataataacaacgctttgctttgca

SEQ ID NO: 250084 - DNA, 387 bp, Glycine max
  unsure (1)..(387): unsure at all n locations
gcacaactggcttcatggccatctccttctttgaagattattagactacaaaagctcgagggaatagttctggattttcattcatatccttgctgattatgacatagccatatatatagcaattcttgctatcggaattgcaccccattatgctagggagaaatgcaaaaacagaaagcggataaacttgatttctatcaggactacataacatcactgcaaggatcctctcccagctcaacctagaatctgttnttcttttgggcactaactggcctggttcttcttttagcaataacttcttcctatcactttgacccacctcttccatgatactatgtattatcagataaaactcatcccgacccattaataagatgggatccc

SEQ ID NO: 250085 - DNA, 191 bp, Glycine max
caccaaaataccccgaaccaaattgacccccaaccccacattacccaaaaagattcttgtaaatggcattgtttttatctgccaaccaactttataggctaacacattcaactggaaaacccttaactcaataccctaatcaattggcctcacctaaaaccactttttactataccctgtcccctttacct

SEQ ID NO: 250086 - DNA, 361 bp, Glycine max
  unsure (1)..(361): unsure at all n locations
agcttatggattatgaatttgntagaagattactaatcctccacctccctgattatgaatccgcaagtcttctgggtgcaacacgtggcttctaatactctttgacctatcatggacagaggagaggaatctacctgtttgggaacccatcattgacttctaaaactgtaaattacatagagttctgaagttaagtgagtaatcaaagtcaaccggctcccgtagggggggtcatgaaacacaaaatcactcacttttgggcaataaagtgttatgtttagaaccatgtaattctatggaagatacaaaggtcttcaatcgccccacccaccaataagggtttcaagggaaagaataaagg

SEQ ID NO: 250087 - DNA, 324 bp, Glycine max
cctcaggctccgcgcacctataatatgaaacctgttgcttatagactacatctgcacttctcgaatatctcaaaatatgtaacgctctcaaaacgacggtcatatcaataacgacaaaacatatcaaacaatatacgcttggcttttggcgaatacgaatatctttgctggtcatgtagcatgtgtactgtatgtctactcttaattggcagtgacaaatagcaataccttttcaatcccctcccctttagaagagcttgtaacattttctgttaactgtcatatacagacccacacacagaatatgtgacttacaggtgtcta

SEQ ID NO: 250088 - DNA, 327 bp, Glycine max
ggaccctaagcgaccgcagcttgcaatctcaagaacggatacatgaacatcctatattaatgcacaaagacgccggcatgacaacccataaccacaggttccaagccctccaccaactacgaaaggccactaaaacctcctaactaatttgctatagaagaggccacaaaagtctagcgaaatggacgcaagcatacatacaccacatccccgacctggaacgcaagaccccggctatgcttatatgctgccaccttcatagtctactgaacctttgcaaaaccgcgttgaatggaagcgcgaatagactcactcataacggagcaa

SEQ ID NO: 250089 - DNA, 387 bp, Glycine max
cagcatgcaaacttctcccctattatgctattttatggtgagacgtgaacaataaaagggttcacctctttgcacttctctctctctcaaatacgctgaggaaaattatttccgtaaagaaaatccaagcccaggcgcttccgtaacgcttccgtgacactttcgtgagttattacgccaagattctcgatcggtctcaagagtcatcgctcgctcttcgttttcttcagtcttgaacgggtaagaacctcacaccgagcttttcaattcattctatgtaccccgggtggaccacattttgtttcacgtaatttcattctcgtatacatttacatttatatcccccttttgacgtgtatagccgtggtttaagtcatttcttgctta

SEQ ID NO: 250090 - DNA, 288 bp, Glycine max
agctttttattctaacctcgaatttcaagtatatcacttgatgtctgaggattatgggataaaaatgggcattgaccaatccttattctatgacttaaccccattatctattgaaagtgtgccatttgaaggtgcactgaatgatgattggaaatttgattttctgtgcatgaagcccaccgattggtttgccccaaccaagccgatattactggaaagctgcttgtctgttaattggctcctgaaagccgcattcttcactatcttattgtgccgattttactttct

SEQ ID NO: 250091 - DNA, 353 bp, Glycine max
gcagaagcatcccctgttttctctaggattcaatacaagagaagggacggatgagtctcttatgtccatgccaggacagtctctacaccacaccttacggaatctacaccggaaaatgccgaatgcagtcaacctatgtgcactttattaccatcaccggtactatcttggacttacgttactatgacagttgcgcgactaagaaaaaaatgctcataagcgatatcgcacccaacttattctgcaacccacggcggaaggggacatacttcacctcggctgattcagagaccaccccgaatgactcaccggaaatctacgtggcaaaaaaaaaactttaaaaaacggaacaa

SEQ ID NO: 250092 - DNA, 391 bp, Glycine max
  unsure (1)..(391): unsure at all n locations
catgagataatttgcctataaagtagttcaagggccgttttacctatcccacccataccccatataccaaaggttctaacttctgtcggcccaattttaagtaatgattcaatatgtttacaatgttcctcaattccaactagtcctttacgttgatnttggtatctaggaggcaatttttgcaaaacatctgcaacaatgtccttaagtaattcaggatcagtcctagcatatgaaagggaaacaaagataaaataaaaatgatcgatgtgttacatatctatcaaattcaaaaaacaaaaaaaaaaccagaataacatacaaatgtatttacaagtctaacaaaaaaaatataatctatgatcaatatggtactgtagtagagaataac

SEQ ID NO: 250093 - DNA, 409 bp, Glycine max
ctcagcttacctagcatattctttgatataaatcacgcctttgtttatgtgaacacagacgatgaccatcactatcatcatttacgagagagaaggcacacaaatctcccactcgatcttaagaagcattatatatagctatgaattagatgactagagatcactttatctcggttcctttttattcctttaatgataaaaatgagttagattaacaattagttaaagacagcggccagtgctggtctgaataaaggccaacattggttggttataagtggatgtgaatcatttgctctccgttttttgtcttttcaaattaagaagcaacatatgtgagtagaaagcattaatatcttctattctgatttttagctcttatatttaagtaaatgcttagtctttaatc

SEQ ID NO: 250094 - DNA, 346 bp, Glycine max
  unsure (1)..(346): unsure at all n locations
tgaagacnagactatacgaggtatcatccttgggtatagctttatctttatgactaccgngtctacaacttgcaaactataaaactcgtcattagtcgagatgttgaagctgatgagtacgcttcttggaattgggatgaaaaaaaagaggagaagaatgttcttatagccgctcaacaacttctagataaagctgaggaagaagacccaggtgaaccaccttcacctccaccacaacaacaagaataagaactatcatcaccagagtctactccaagacgagtaagatctttggtggacatatatgacacctgtaacttggccatacttgaacctggaagctttg

SEQ ID NO: 250095 - DNA, 112 bp, Glycine max
tttttactttgataccgcgcattgatatggagccattttatatatcttgaggatatgcacttggggtatctggtctatgggacttagggcaacccccccttgtattatttag

SEQ ID NO: 250096 - DNA, 457 bp, Glycine max
  unsure (1)..(457): unsure at all n locations
tgaactccacttgtccataaaactattttgaacatgtaatatgtttaataaaaatgatgaaaacaaactaacaattacctcatgtaatacaagtttcacaagatgtgtaggccatgcaatgaatgtgtaaaggatctgcctgacatatngaatttcagacatcagaaatgggacttgagcgtcaccatcataaattttctcaacactgacccaaaccacatcatctgcataagccacgctgtgtatggtagaccccccattgtatattnttcccaatgccaccaggtgtgtacaattatgaccttgcacatacaatcccatactcggtatcacatgagtaccatcttcttccctgctgggttgattgccatttccatgttactcccctttgtgctcacacgtgcccctaatacctgtatatctggctcacccaatgatgtgacttgcatcccctttg

SEQ ID NO: 250097 - DNA, 408 bp, Glycine max
  unsure (1)..(408): unsure at all n locations
cttgatagctgacaataatgtantacaacattaagcgattcacagctttgtgttcagcatgtcccaacttgaaaaacagtgtgagatatgcaatatctcttgtgacttagtgtaattagcacacatctgctcttagcttgttccgaccctataaaagtgtgtattcattctgtcaaaatgccattgcgccccatattgccttggcttaatgggccccaactttcagggaaaggattaattgttaatgctacgctgagcttacaatcatctgcttcaggaaatgagcatattaacgggttcactccttaacaaattggtcaattgcattgtctgtacatgagcatgtacaacctcttatcccgtatctcttatatcgattctagaaccttaccaacaacaggttgcttc

SEQ ID NO: 250098 - DNA, 461 bp, Glycine max
  unsure (1)..(461): unsure at all n locations
tcttcgttccttcctttgacacgcttattatgtatcccgttcaatgcccnctctaaccatcatgtctttctccttcttagcataagaatcaagagacctcttcttgatctcgcccaacaacacggtcgcaattgtggtgtgcttatcgatcacctgcttcctctcagtcaactcatgcagagaattcacagcgttcatcaaatgcttcgtgttcccgatcaaatccgtcccatcaaactccgcgccatgagtcccaccagtcctcttgttcacctcatccacatccttcttatacgtattcaactgcgtctcaatctccaccgcaacctccgggaactccaacgacccattcgcaaccccaaaagaatcagcactatccaactcataagatctcattccacccttctcccgctgcacactcagcctattcatgctcaaccccagcacatcatggacaagcc

SEQ ID NO: 250099 - DNA, 442 bp, Glycine max
ttaaaaacctacaccgtgatccaacgggactagctcatttatatataaaccgttggatttgatgctatcaacaactcataataatattttttggcaatactcgtcttttcgaactaaccaatggaatgacattataggtacatgacccactttttattcgatgtatgttctttcaatttgaaattgggttgagatctagagaaaaccaacaactaaactcacccatgtaatgcactccatttatttaatgtgtttaaattatcaattcttaatttgagatatagtattctatttaatgagtttctaatagtatatcgtatttttcaatcaaataaataggaataaatttattcttgattcctaatagatatctaattgttgtatttgctctttaataaacttttctctttggttgagtccttaattatacaaaacattaaat

SEQ ID NO: 250100 - DNA, 328 bp, Glycine max
tctcagaggcacctgccgctgcagctggcagagggtatcaacttctgtttgtgtctgtttgtgaccactcatattccacacagaagacctatcttgtgcaaatatagattcaatatgtgtttgctcgtaaacaatacaatttctgcgaagatgagatagtcgagaaggatggtgcatttgggcaactgatttacctttgcgggggaaagcgggaagaatataattattgacttcagatccggctgttgttctgtcgagtatatacccagatcgccgcttatacttgttacgggatgacgagaatgatattcgtcacacctttcattat

SEQ ID NO: 250101 - DNA, 463 bp, Glycine max
  unsure (1)..(463): unsure at all n locations
acctatanaatactcagctngatgagctacttgtgtaaaccgccatagatatcacacttataacaatgaaagggatgaagaaaaaaatgatgtgagatgaagaataggaagaggcggatcaacacacaggagagaaaataggtaaagtggagaaacagaatgagacacacatgaaaaggaagacagaagaagcacccaggatctgatgaaatgtctggataggaaaaaggtcaagatatatagaaaggtcaaataaacaaatatagggatattaattagtcggacaagtttattattaattaataccctataaggtgcatataaaatcaatgggaggtgtccatatgaaaaacgtatatcaccctaaaaggtgcatagaaaatcaaagggaggtgtccatagggaaaacgtatatcaagatgtgtaggtntctgaccatggtcgtccgagtcaaagggtatgt

SEQ ID NO: 250102 - DNA, 421 bp, Glycine max
tgtaagccttggatcttgttcatcaatggagtcctctgttttttgaatattaatggtagcggaatggagatggaagaatactgattggaaatgccacttcaaggagaagatgagtcaagaagaagctcaccaccatatgaagccatggataagagcttgaaggtaggagaaaataagaggagggagagggagagaatgaacacaaaattttgtgcctcaaaacaggtctgaactttgaagtgtaattctcaaatgatcatagttgaaaaatgcacacacatgacctctattatagcctaagtgcacacacaattggagggaaattgatatctattcaatttcactgatttaaattgatttgtggagccaaattcattaatatgatagtgattcagtttggttagcccctattcagatcagt

SEQ ID NO: 250103 - DNA, 430 bp, Glycine max
  unsure (1)..(430): unsure at all n locations
ntacagcagattttagtaatgacccactaacctataatttaaataacttaatgccattaacctagggaattaataaaaacttaatggctgagtgtaactgaaattgtggcaaccaaaagtcacccccaacagccaacaagtcagccaccatttggtctcccaaaaggctgatgcccaggttgccaattgggcccttattacaacttgaactaaacctaactaaagcccttttagttgattaacccaaaacatatttttggtcagccaactttacaaggattgggccattatttagacaaactaaacactctaatattganacaaagtggtgtcatttagtcctcctccatttgggccatgatacaactcacaaccttggacttttcttcttgaaacatgggcttgtattcaaacagtatggacaacactt

SEQ ID NO: 250104 - DNA, 462 bp, Glycine max
  unsure (1)..(462): unsure at all n locations
ttgagcataatcaaacgacaataaattattactcggatgtgcgagcgaatcccgtaatatatcgagacgctcgtatttgaaaacgaaagctctgagaaatttcaaacgacaataactttttactcggatgtccgattgtgtccagtagtatatcgagacgcctgaaattcagaatagaagctctgagcaaaatctaacgacaataactctttacccggatgtccgattgtgtcccgtattatatcgagacgctcgaaattcagaattgaagctctgagcaaagtcatacagcaataactttttacacggatgtccgattgtctcccgttntatatcgagacgttcaatattcagaatagaagctctgagcaaaatcaaacgacaataaatttttactcgaatgttcgattgtgtcccgtagtgtatcgagacgctcgatattcagagcagaagctctgagca

SEQ ID NO: 250105 - DNA, 410 bp, Glycine max
ctagccttccatggcaagatatcacctttcatctacaatatgagggttttgatggaagcgtgcttgtggagcttctatggaggccggatctttgagcttcaatgacgacctttaatggtgattttccaccatggagatgccgaggatgactaaggagatgaagtatgaggcggcgccttccactatggaattagccatggaagaaggagcttcaccaccaatatgacccttggataaaaagcttggataggatgctttaatggatgaatagaaatacggagagaataagagtggggggagtcccaaattgatggaagaaaaatggagacaagttgaactttgagttgtgtctcacaagactctcattcatcaaaaatacaataagtgtacacatgcttctattttagact

SEQ ID NO: 250106 - DNA, 468 bp, Glycine max
  unsure (1)..(468): unsure at all n locations
gctatgtcgaggctntgtgaacctgtgaggatcatcatgcgcatagcttgggtttgacgagtcttatgttcagcacatgtgttgtgctctagcatacttggcacttctggataagaggcctcaataacttaagagagggggtgaattaagttcaaaaatttccaactaatagattttaatcccctctttaaatgaaatatggtagatttataatgcacaagaaaaagcagcaatcaatttaattgatgttctttagaagttcaagacaaaatcaattgcaataaaatacatgagataagagaagagagaattgtaaactcgatttatacttgtttggccacttcctgtgcttacgtccagtcctgaagcaactcacttgagattttcactatctttgtaaaactcttttataacttctgaaccacctaacgattccactccctttgtgttacgattctcacaattcaa

SEQ ID NO: 250107 - DNA, 490 bp, Glycine max
cggaccttaaatctcaacttatcagatgctgcatgttcgtatcagctcctcttattgaagaacgatatgcacttcttgcattggcaaattgctttatcgtggtgtaactgtcggcattgcgttccttcaacgctaacaagatatttttcggtttcaccatcgactttgtcatatcagcaataattatcttttcttccttaggcaatcgcccgacgtatggatgtccaactaaggacttcgccaattcatgattatgaatcccacagatcaacttcaccatccaaccttcccctccacgcactggtttcccacgaagcctgaagggacaaccacatttcctactcccggtgtcttttctaacgaattctttatttctacactagtacgtaccactcctttcacacccaaataacacagatgaacttcttcctctgctaccggtctctgtgtcagatctcataatcactgcaacaaatccaatttcatgggc

SEQ ID NO: 250108 - DNA, 459 bp, Glycine max
tcgagccaaaatcctgactcaccataaaccgtgacccactgttattatgccaatacctaccctcggaagcaaagaataaatagtggggacatttccaactctagaaaaacagaaggaaaattccaatgaaagcaaaacatagacgatggacaattccccaatcacagagtgggataatgcaaaaaaaggatataaacgagaaatccccaatcaatgagcgggagaatgcatatagaatagaaaggaaacttcccagtcatagaatgggagaaagtcaaaaaggaacaagaagaacgatagaaagctcctgatcaaggatcgaaatataccagaatagatgtgcagagaagtcgtttgatcatacaatatctgaacagttcaggattgctaccatatgaacgaaaaagaacgacagggaaccccgacctaatatagtcttcttcctttgattaccaacca

SEQ ID NO: 250109 - DNA, 265 bp, Glycine max
ctagcctcacatatattacggcactcaatcaaacatccgagaaataagttattgtgcgttgaatttgctcataagttcaacattcaatttcgagcgtcttgatatgttatgggactcattcaaatatccgagtaaaatagtattcgtcgttgaattggctcagagcttccacattcaatttcgagcgtctcgatatattacggaactcaatcagacattcgaggtaaaagttattgtctgttgaattgtgtcagaggttcaacat

SEQ ID NO: 250110 - DNA, 436 bp, Glycine max
  unsure (1)..(436): unsure at all n locations
ntggaagcggctgcagggtctgcagaaaatcagagtggtgattcattttccagttgggagaccagctttatgtctgctagttctggtcctgttcatgaaatgcccaaatcagtttatcattctaaagttgaattggatatgacatctggattcttgaaagattctgttggtgtaaagaagaatgacgaattcaatccttcagcatccacggaagacgattattttcagggtggatggagaactttcaactcagaggtacatgaccagactgggaaatcagaatcaaccatggatcctagtggtataaaaacagcagaaaatgctaatggttctagtagaaatcttgattggatgcaagatgatctatggcaagggagtgataacaagacaactgatactgtgcctactgcggaagataaagaatcatttgatgaat

SEQ ID NO: 250111 - DNA, 191 bp, Glycine max
tctaagtcacctgcagcattctaacttgatagagccatatatattattgatggttcattaaccacagcccgacagttattgtttcactctatcacacatagttatgtatatcatcaatcaacaaccaacataattctcaacctttgcacttcatcacatgccatatcagacataactcacaaactgaatcc

SEQ ID NO: 250112 - DNA, 200 bp, Glycine max
ctcttctccatcttacttccacacactatcacatcttcttgagtgggataagtcttttgtctgtgcataattctggattgatctagattagggattgcataagaacgttacttgctatttatgacttattaatataataatgttatctctacccaagactcaagggggggggtggtttcatctgaggggcttccttttct

SEQ ID NO: 250113 - DNA, 467 bp, Glycine max
  unsure (1)..(467): unsure at all n locations
ctatcttgctgggtngatgcactctatctcgcactatggtttgatcactagcagatatattctctatcaattcaagtgcctcttctgggattctcaactttatcttccctcctgctgaagcatctaacaattgcttggtttgcagtctcaacccatctataaacatgttcaattgaattggctcagagaacccatgtgtggaagtctttcttaacaaaccctgaaacctctccaatgcttcactcaaggactcattatggaactagtgaaatgatgaaataacagctttcccttctgcagtctttgactccgggaagtatttcttcagaaatttctcaacaacttccttccacatcttcaaatggttacctttgaatgaatgaagccacttcttggcttctccggcctatgaaaatgataataaattgagcttgatggcatcacttggcactcctgcaatctttaca

SEQ ID NO: 250114 - DNA, 438 bp, Glycine max
  unsure (1)..(438): unsure at all n locations
cgaatatcacactgaagatatgcatcaccatctcaccctactgggtctggcttacactgatatatgaantaatatccaagaaggagagtacatgattgtctacagttattggacggagagaaatctataaaccttgccagggcaaaataagctgctactaagacctggattaattcatcagtgaaacataatttgtgcatggctgcatggatcctgaccaaaataatcatgtggccggataaagctataatagtcatccttattagtgtatttctccaacgccttctcatttcacgggcatgtataagcaatgtgatgtcataaaaagttaaatagtacaattactcattctatcgttacagttgtacatattacattatattcttttagactctgcacttacaattatttcgtttagatctaacaaagcccgtttat

SEQ ID NO: 250115 - DNA, 455 bp, Glycine max
tgaagtgaggaagcgtggaatggtgagacttcctacttttattcgttgaccacagagaggtacctatagatatgtcgcacgggtcaagagaccttggggatgtctggtggagtgctattgtccaaaaccaagcttgaccaatcccgacccaacccgggcatagtcagtcagagagaacctgtgatgtacctaaacaggcgagctcctgtcagtcaaccgataaaagaacaaagaccacaaagcaaggaggcttgtgtggtggctggccagctatggatcttgagtaatatgtggaatatagcctctggtaatcgattaccaagggtgggtaatcgattacaaggcttaaaaatgaagacaggaagctaagatggtctctggtaatcgattacccagggcgtgttatcacatactaggcctacaaatgggatcaggaacgtgagatggcttctagt

SEQ ID NO: 250116 - DNA, 445 bp, Glycine max
tagctttgaagcattaagggcttttaaagagatgcaggggtctggtgtatagtcaaatgcggtcactttcataggtatgttaaatgcttgtagtcattcacgtttagttaaaagagggaaagaagatattggattcaatgagtgacgaatacggtgtgaacccaacaattgatcattacaattgcatgattgatgtatacttctcagctggactgctgcaagaggctcttgatgtgataaggagtctgccatttgaacctgatgttatgagttggaagagtttattatgaggatgttggagccatatgaatcttgagattgggatgattgctgctgacaacatctttcgcctggacccactacactctgctacttatgtgatcatgttcaacttgtatgctttggctgggaagtgggatggaacagcccactttataaagatgat

SEQ ID NO: 250117 - DNA, 206 bp, Glycine max
actgtgcataattaaatatcgatttttgttaccaacaatgaaatgagttttggtcttcgatcatccatgatgatacaaacaaggttttaaaagaagatcaactcagaaattatctgggcaatcctaagaggacctacatctttgatttcttaaactcttaaaattgcagtataaagaaccaactctctcactctccatgcaattca

SEQ ID NO: 250118 - DNA, 398 bp, Glycine max
aatagatttgttgtattttatatgaaagataatcttatttaaactggataaataagataattataagtgataaaactctgtctccaaatatttaacgtaattatatatgtaagactaattaatctaaaataactttgcatgattaacatactcagtgctataacactaatagtttggtaataactaattcattgataaatattataaaatcatcaatatttgagagtattagaataaattttacttcgtattagaataaaattaattagatgcaaacctattaacgaaatgccttaacttcaccaaatatgtgattatgaaagcaaagggtagatggcagaagaaagagcacgataaataccatgggacggtggcatttgagagtgatttggaaagga

SEQ ID NO: 250119 - DNA, 431 bp, Glycine max
  unsure (1)..(431): unsure at all n locations
tgcaagtgtattgactgtatattgagggattcttttttttagttttttatctntctgtcaggggagtttcactaggtcccatgtcaaccctctaacatggcaactaaaaaatatgagttacgtaaggataggtcattcaagtcttttttctaattgaatccagctagtatcactttcgtacagtatccttcttatcacggtaatgcgaagtgatgaataaattaagaggtttttgttttcttacaagggtgattaaattgaatgagtttataataaactaaatattattattttaattttggtttgtgagttgtacttcatatatgcaacttaacttttatcataaaaaatagataaattgtatttattaaatacagtctaatgtatttttttaaaaataataatacggttaaataattaattcttttttt

SEQ ID NO: 250120 - DNA, 421 bp, Glycine max
aagacgatcaacttcaccattatggccaactttaatggcatatacccatctaaaaccaaccaccttctttttaggacgaagagaaaccaactcccaagcaacactatgttaaagagcctgcatttcaacaatcatggcttgtcaccatccatgatgaccaagtgcttcatggacatctttgggaatagtacgagaagataaaggggaaacaaaagagaaatgtgaagaagataaacgatgataactcagataaataggatgaggattttgagtagaccgaatacatttcctaagagcaatgggcacttgagtcatcatcatgaggaggcgatgatgagaaagaaggatctgtcataggggaagccaatggagaaagacatgaaccagaagacttttcatgtaatattggactagttccttg

SEQ ID NO: 250121 - DNA, 321 bp, Glycine max
atgtccggctcggctctattttatctgggcttacagaatttggctcaaagactgttcctctaactcgcctgtgctattaatgtcatgctatatgcaccacagtgattgatcctgtcaatttagatgagttggaaaatgatgccgcaattatactgtgccaggtggagatgtatccccgccctgctttctttgacatcacgattcaatcgattgggcatctagttagagaaatcaaatgttgaggacctgtttatctacagtggatgtgccccgatgagctatgcatgaagatcttataagggtattcaaagaatcgttatc

SEQ ID NO: 250122 - DNA, 444 bp, Glycine max
  unsure (1)..(444): unsure at all n locations
ctcaccaccacatcttcctctttngccccactctacatgctcccctgtcggtgcccccctgcccgaaaatgcaactattccgaaatgtaagaagcgagttcgtcgccccatcgacctccacgtacacgatccacccctcccttcgatgtccccgatgcccccccatcggcacgtacttctctcacaggaacgctaccacattattcccctcgtcccctgccttcacatatatctttttccgatcgaaacaccgcatcaccgccagcacacacttctccttcacactcagagactcttcctcgccttcatccacattatcgtctcccaaaaactcatactcaccgtcgctttcaagttcgaaatgggaatattatttggaaacggcaacatcttatggtgggttgggtcattttccattgaggaggaaccgggtgatccgttgcg

SEQ ID NO: 250123 - DNA, 333 bp, Glycine max
atatagggatgaaccaaactccatctgttactataaggtgcatcaagtcatgatgaaatatggtagtaaccatcctgcataattggggcataatatgaatcgagtcacattactgcttcggctactgccaaacatatttaggattattgatggtcttgttactctcagtttcaccttgacaaagatagcatggaccatgtggaaaatctaaattgattcaaccccatatcctgcgtagataattgcaatactgcgactgtacatcattcgcatgcattcatagctttcattggttgcattgtcattgattctcccttgaaaataaaataaata

SEQ ID NO: 250124 - DNA, 428 bp, Glycine max
  unsure (1)..(428): unsure at all n locations
cttgatgggctgaaacaagctctaagaactttgtacaatatatttaactcacactctttgcaaaacgatctcttgaggaactaaaatgagtctactctttatgttaaaaagtgtggcaatgggaagaaaattgttgcttcactttatgttgataatttgctgattacaggtgatgatgttgatgaaatcgacaaatttaataagagcaagcaacaagttgtgaaatgactgatcttgaagtcaagaggtattttttgagaatggaaatgcattagcttgatgttggaatctttntctcacattgaaagtgtgtcaatgatttgctgaagaaattcaaattggagaattgtaatcttgtttcaactcctttctctataaatgagaagctttccaacaatgatagtgatgcatacgctgatgaactctgt

SEQ ID NO: 250125 - DNA, 447 bp, Glycine max
  unsure (1)..(447): unsure at all n locations
tctatatcatcgagtacttggattgaatgtttgtcttctgactttgcatatctataattggtcgaaagtactaaatccctcgaggtacacagatcccatttaaggtctaacctctcccaactgatggttttccatattcacggatcagggatcaaactcctgaccacatgtttaaaagacaaggttatcttccaaccatgccacaccatgttgtgatattcatttagtagcattttataaccaattgctacatagcagaagtcaaaacccctatgttcataaaaaacttgttccccaagctctcggttgatgaattgtgtatccatattttgcatcttgtctctgggtaccttataactattgtcaagataactatgctaacaagtccactntgtactacaagccatatactagattttgtgtgtaaaaggtttatttatcctgttt

SEQ ID NO: 250126 - DNA, 452 bp, Glycine max
  unsure (1)..(452): unsure at all n locations
tgagaactaaacttacccaagggacaccccgggtagcactcacaagtgatgaaatattgactttggttattaatttttagcctcctaacatagtctccatgtacnttgtttgtagtgccacaaagaaccttagtatagtcctcacctctcttaaaactgagaatcatcttgagctcttcttcatcaaacaatatcttaccatcatctccaaccctaaattgctttctaagttttgatggccctgcttatttcgtcatgaaaatagttccaagccaagaattatagacaaaaatgaaactcactaaaatatgttcactccataatggtgtaaaattgtgaactagttatgtgacattattacaccacaaagtggcgacaatgggcaagtaggcataaaacatgcatgccgatataacatgatatgagggacctaaatgtgaaactaattaatc

SEQ ID NO: 250127 - DNA, 463 bp, Glycine max
  unsure (1)..(463): unsure at all n locations
aactatanaaactcaagccttgagcccatatcctaactcaccatataccttgttccattgtgagatatgcaatctctacccttggaagcaaacaagaaaagaaggataattgtcattcaatgaaaataaatagagaaggacaatctccacttcaagagaaagtcacaaaaaaagagagaaggaaaatttccaatctaacgaaaaaagagaggacaggaaatatcccaatcaaagagtgggagatagcgaaaagaaaagaaagaaaatttccaaccaaagagtgggataaagtaaatggaacgaaagaaagctcctgatcaaggatctaaacaattcatacgaaatgtgcagaaaggtctttggaccggacaatatctgtacaatacaaaattgtcaccaaatgaacaataaaagggaaaggaaaccacgacctgaaagtggtcttctctctttgattaccaac

SEQ ID NO: 250128 - DNA, 431 bp, Glycine max
  unsure (1)..(431): unsure at all n locations
gtttggtacaaagaagaagaagaaggtcttagagattcatttgcttgtaaggattgcatgaataagtgttcaagatacttgaaatgaaaaacaaagccttgcttttatagactcttcatgtctggtcaagacaaccattagaagagttatgacttttagaaaaacttaaaaaccaatttgaaaaagtcaaaaactatttgaagagttacatcttttgattttattcagaaacaatcactggtaatcgattaccaaatcaatgtaatcggttacacaaagcttttatgtgataggatgtgactcttcacatttgaatttaaatttcaacgttcaaaggcactggtgatcaattaccacaacatngtgatcgaatacagcttcttgaatcaatggaacgttgtaaatcatttgaaactttttaaatccatttt

SEQ ID NO: 250129 - DNA, 429 bp, Glycine max
  unsure (1)..(429): unsure at all n locations
tgctaccaatctctgtggggtcaacctgatgtggcttgtgaatggcagcctgctatgaatgctgctgaggggcttctttgtgcttggaataataatacctttcaggttgactttcgttnttctgacaaggatttcattatgctatgtggggtctggctgcctgaaatgcaaagggtggttgtggttaatatttatgcaccttgtgaccttctatgaaagagacagttctggcagaatctaaggagtaaaaagatccaatcccaagacacatgttggtgtcttgtaggggatttcaattgtattaggcaccctttagaaagaatggggagtaattgcagcagttctgataccagcactatatgctgaattaatgattggattgctgagttggaggttgatgatataccttgcatgggaaagccttatact

SEQ ID NO: 250130 - DNA, 448 bp, Glycine max
  unsure (1)..(448): unsure at all n locations
tgactcttcacaatggaagttgaatttcaacgttattatacactggtaatcgatttccaatatcttgtaatcgattacaccatttgaaatcaatttgaatgttgcaaattcagttaaaaacttttgaaatcaaactttgccactggtaatcgattaccagaaagtaaaaactctggtaactttgaaaattttgagaaaaactcttttgaaaaaaaaaactgtgctatgtttgttttttgaaaaaactttntaatactttccttatgaagtcttcttgatttcttctcttgaatcttcttgatttcttcttgttgacttaatcttgaaatcattctttgggccatttgtcatcatctttgtcattatcaaaactacttgaatcaacttgagacatcatcatgaagcttgcttctacacttcggcattcttcattcgttcttcngtcgtc

SEQ ID NO: 250131 - DNA, 439 bp, Glycine max
agatgctctttgccttaaatcattactctattgatcatgaatctatcaatttaagtcaaaggatataattaatttcaagaataattaattaaatattaactaatctatcagaagttatccaaatagtttgatcatgcaatttggtgcaaaatattctttacctagttctaccaattacatgtagatgattactactatgtaatcaattgactattagaatgacaagttctaaataaacattaaaataaggaagatagttaattaacataaaacaataaagaattccattaagaacaaagagaggagtacatttggacagttacatcataatcccagactagggggactagtcacatgatcaaagaaaaactaacaatcctatgaagaataaacatagacataccaatagatatgaacgatgatcacgatccatcctagt

SEQ ID NO: 250132 - DNA, 311 bp, Glycine max
  unsure (1)..(311): unsure at all n locations
attgccttattgcaatttaattagttgcatgaagaggataaatagtgtacacataggatcaagctgaatgttttgatgatgccaatggattacatgaatcatatgcttctcaaatatttactcnctacccatcctttcgagatattcgagatggatgatcaacacagtctatatactcttataaagggatattaaatacgaagggaattccaattgaagtaccanattgtttggcccccacttttctagttaaaagtcttttttcaacaaattactctctggtaatcattaccatacgatgttatcattac

SEQ ID NO: 250133 - DNA, 416 bp, Glycine max
atcataacagctgaatataaatattgtgcatttcccaatataatacaactgcaaaataaaatagtcatgacgttcaaatattaatatactttatatacttgaaattcctctcagccaaagatccctgatcataacagcagtaatcttccatttactaaagagacaacgaaattttgtctgtaaaacatggactgcggagtcataattgttgtgtgaaaaatcttactatacatataagttaataatcgattaaccaagtttaattttatagaaatgaacacatgaagtcaccttccaatgatcatttaatagctaataaaggcagccggtgaatccagcggcggtgtcaggataggcggcaaattcgcaatggtatttgcacaaagaagcggtgcaagggaaatttaactaaagtt

SEQ ID NO: 250134 - DNA, 187 bp, Glycine max
  unsure (1)..(187): unsure at all n locations
tacctctttaccaacatcaatattttttttctttntactctgtgaaggtatctttgtcacaaagtaataaatctttcccaaatgaattaaaagactgcttctttactctgacaaatagcggacttattacagctatcctaatttcctatacactacttagtcatacctgcccactaactattttaaa

SEQ ID NO: 250135 - DNA, 468 bp, Glycine max
tccgttcccgagagcatctcttatttaaacatttcagcctttgctttcttgtagcttaagaaaaataccatatcttcttctttctttcttccaaatccatttctaaaggtccaagtactttctccatcacccacatccaccattagccaccacaaaccatcattgttctccattgaaaacccacaccgagaggaacccttcaaccgaagcagaatttccaacttggcttgcggtttcggtagagaacgaaaaccctaatctgatctttcgttttctttcgagggtaaccatggtctatgcttgcttcttgttagatacatcttgtctttgcatcttttctaactttgcaaccgtcattgcatgtcttatgcttcctttgaaaaaccttagagaaagagactttgttaacattatcctttcatgaaatgcatgttattttcgtaacctacactgaaccccggtcacatt

SEQ ID NO: 250136 - DNA, 466 bp, Glycine max
  unsure (1)..(466): unsure at all n locations
tcattggagcttgtaagcctatgatcttcttcatcaaggtanttcttgcttcttggaagatgaatggtagcggaatggggaaagggagagagagaggagacgccacttcaaggaaaagatgagtctagaagaagctcaccaccatatgaggccatggataagagcttggaggaagaaggagatgaatgaagggagagggagagaagagcacgaaattttgtgctctaaatgagctttgaaatatgaagtttaatattcaaatcatcaaagctgaaaaaaatgcacacacatgacctctatttatagcctaagtgtcacacacaaatggagggaaattcacatttcacttgaatttgaaattgaatttgtggagccacactttggagccaaaattcactaattatgagtagtgacatttacgtatgggtcagcccactaatccaagatcaattccaagattctccac

SEQ ID NO: 250137 - DNA, 403 bp, Glycine max
aaaaatgtcgaacctctttttttgtagggcgaggcgaaaagcctacagtgcattttgtaatgaagaaaatgcttggagatgccacctacgtttatttgatgaaaacgctagataatcctatcagagacgaagaattgtgaattttgacaaatgagggtatgagagttgtctactcacgggaaaggtattatcaccccacacattcgtcacaagggatgacagtctttactagagtgtactaaacatgacttccaaattatgtatttccgctttttattattattatttctttggtgtcgacaagggtgttgtccttgctcctacgtatcctcaggtgcgatgaggaattcagacctacatagttctttaagtctgaaagtttatgcgttacataggttctatg

SEQ ID NO: 250138 - DNA, 226 bp, Glycine max
catgcacttgctgaaattattaaactttttctcacacaaattagccaacaaacatatgactctcttcatagacaatcccggggagaacatccaacttattttaaagatgtggcccacaaccatacttctcaccatcacagaacaaacaacaaccaaaatacaaagtgagccctcgcccttccttaaaactggagcaagattcaaaatgcattacaaaacaacctct

SEQ ID NO: 250139 - DNA, 472 bp, Glycine max
  unsure (1)..(472): unsure at all n locations
catagaaactcaacccttcaaatggggaaaggtcacattcacttcttcttttcatattcaacttggccatataaataatgaagtcatctcgactcaagaaagtcatataagtctcatacaattaatatataacctatatcctaatgtcacatcctatcagagcgtggtgttcccgtgacctctagcatgaggttcttcatagtcatccacctattcatatgctcccccgaacacaaagttcaagatcatcacaggatccaaacacaaacaacaaaccgggagtgagttattacattgctaactactagagataaacaacacaacatatagtagccaaatacattttacttaacatatctcacattatttcatcactttgtcattcatcaatcacactnttcatccatcaatcacacacntcaatcatcaatcattatacacaggaatcacacactctgatcaagacataata

SEQ ID NO: 250140 - DNA, 472 bp, Glycine max
  unsure (1)..(472): unsure at all n locations
tatatgaacaaaatcgccttaatcatttccaaatatgcatgtgaattatgacgcatcaacaagaatcaagccaacgctattgtgcacgcaatcaatggggcaaaacacaccaaatgattataatgatggatggctcaaattctcacaaaggtaaaatcatcactttcaaattgagctttcaaaactatcatgacatgtagagaagaatcaatgatctcaagtcacaaaatgtcaagaacttttattttcaaaacaattacccatttcttgaacatatcctataattcaaagaaaaacatgcacagcccgacgtgcacacaatattgacccaaaatattaaactgataatccgacgaatctaacaacattaacagattaacacaactaacatattaacaaaaccaacaaaactagcaaaacctaagaacacttccncccccccccatacttaaacaacacatngttctcaatg

SEQ ID NO: 250141 - DNA, 452 bp, Glycine max
  unsure (1)..(452): unsure at all n locations
tatatgccaaggcccaccaataaaaaagagttatttatcattttggataatttatgtttgagggttggctcatttgagggtttgggtttggcttggacatatgagtttaattgtgtttatggttaaggatatgagggtggggtagggcttatgctacaggtagtagtatttgaaaaaagattacgtgggtgtttgggctaattaagttanggtcgtgtgtggtggctgacgtaggtaacgtcgtgttatgaatatggaagtgggggtagtattacgttttaggttactatttggtttaggagtcgaagttgcaagtgaagagttaggagtgaggttatggctatggatggcatttacaattgntggttgctaataatgctcattagtacatagtttcttttctcccacaatgatttcagcaactgttctatctcatattcattgcatcatga

SEQ ID NO: 250142 - DNA, 450 bp, Glycine max
  unsure (1)..(450): unsure at all n locations
tgttgctcgcanatatgngcctccggagattattgagattatcaaccaanatgcttatcatttgcaattatcaagtcacattcatgttgttcatgttttcaatgttaagcacctcattccttattttggtgaggatattttttttttttttgtattttcttgcgatgatatggattctgatttgaggatgaatctttttcactccggagaggattatgcagtgtatggtttacccaaaaattcaagtgtcttcatcttttatgaatgagtacactttttcgcatggaaatagcctcctaagcgagattgcattccctttggcaatgtgttggttaatattttagccaaattccatcatttaagggatcaaaacaataattttatcttatttttagggagtatttttgctattttctttatgtaagagccttttcagcatcttattgtttc

SEQ ID NO: 250143 - DNA, 459 bp, Glycine max
  unsure (1)..(459): unsure at all n locations
cttgagtttcaagctttagccttgcgcgtgtaattatgtttcttatgttgctccccttatctgtaacattagagacttacgaaatcaagttaatggtgatatatgtgtcgatagcataaaactatttaaaattgtcaatcaattacaaatcagttctgttatgattttaaagataattattataaaataataaacctatcacatataatgagctgtaattggataacgatgtaaaacgtttttactattgtcaatacatgacctatttttttagatgaattttgaataaacttcttcaaaaacacttatagagaacgaaaatcagaggataaaatatataagtttctatataagatttttttttgctagacaacaagtatcttcaattagagacaatcttgttcgagtaagatagaactactatgaacaacanaactcttctctcaagatttaatgtat

SEQ ID NO: 250144 - DNA, 380 bp, Glycine max
  unsure (1)..(380): unsure at all n locations
acacacacacacactctctctttcttaataccagataaatattggtgaaatttttgaaaaagatgaagactaatatgaacaaactactatatctctctcgcccaatgagagtgtcaatcttgtgtcttttgattgaattaatgaaagagaaaatacctctattttctttcagagcatgatgacgaacaaggctgccctaataacttaagagcaatattttgaagtggtggtgcatgagcaccatgaattaaccaccaagacttngcttccattagacctctatctcttatagagtcaatatcatcaaagccttctattcaccagaaatgtgcgcaaactcacatttcacttgccttctttgattagtatcgataaaatac

SEQ ID NO: 250145 - DNA, 260 bp, Glycine max
ccagaatataattatcaggctctaatactttatatatcctgatccccccataatcatgtgacactagaaacttaatactttaattgagcaatctcttaataaggaaaacacaatattctgtagataggataaaccgctctttagttaagaattattctacagtgccatttatcacatgattactgtccggacataaaagacgggaggcctaacaccctaataatactagagcaggaaataactgattgatatatttttta

SEQ ID NO: 250146 - DNA, 159 bp, Glycine max
gacttgatataggaagaatatgcctcataactttatttacttcctgtttctgaagtacgttttttctcactaacatctcttttataacactaactctcttaatcctctcatttgtactaattactttatcttacatgtttcttccttttcttctcatct

SEQ ID NO: 250147 - DNA, 447 bp, Glycine max
  unsure (1)..(447): unsure at all n locations
tctgagcctgtctggtggcttaaggagntaaagctcactttccttaatttctggggttgcgatgaactcactaagcgaggctgtttcgctaaatgagttcatgcttttctttgaatttctgggttttctgatgaacacgctgagtgccccctgtgggctaagcgagtgcatgaagtttgtcttcattttctgaatagtagggatgaaattgctaagccagtgcctttatgcttagggagtctatgcttattggctgaattttctggaatttgatgagctcactaagccagttacctacgcttagtgagtatacttaaattaatctaaatatttgtgtcgttcagtatcccagcagtggcttagcgcgacactcacgctaagcctaatttccaacagtggctcaaagcttgatattcatttctgtagtgcgcgctaagtgagttcacc

SEQ ID NO: 250148 - DNA, 405 bp, Glycine max
ttagtgtcttcttccaccttctctgcatacaatagcgattgtattgtgaggagttagaaaacaaaattaaacaatttaagcttctgtattgtgagaagtcaccaagaaaaggaacttgtactcatagagttttgaaataaaaatcgcagctttagtgtgttcctccaccaagaacacgattcaaaaatccactggggaggaattatagataaaaatcacagttttggcattaaaaattgcaactttagatgttaaaaaatgcagaagacgggtttaagcttttgggctgcaaaaaatcaattaaaaaaattaaccaatgatacatatataaaccgaaaatggaacgcaaggtgtataatgttcatgaacacacaaaaacttataatttttgtagtgcgagaactc

SEQ ID NO: 250149 - DNA, 328 bp, Glycine max
  unsure (1)..(328): unsure at all n locations
tatggatngccaacatgtatgttccttatagattgtccatctcttattttgctttacagtcattcatcatctttataaattcacttcattgcctaactagaacaacaataatcgctcattaatttttctctaaatagatatagtttgaacattcatttgaccgctcgtagtcgcataccctgaaaatgatattaacgcgaaaataatctatacataaacctgtctatttcccttttaattcactgcactatattaatttatgcccaaccaaatgcccaaagtatctgacagtataattacggcgtgatcacgagttttttgattgtca

SEQ ID NO: 250150 - DNA, 283 bp, Glycine max
agctctgacttgagtcatcattatatttatatatgtgaccacggcatgaatttcataatgaatcaatcaatcatctatctttcaatcttctctcaacatctttcaatacctttcaactctttctacaaaattgtctcttcatccttctaaaagttcttgatcaatattttctctttcaagaaaatttctttgatcaacaacttgtgctattcatctttttaattctcttcctcctttgccaaaagaacgaaggaatagccacctaaattcttttgtggctctc

SEQ ID NO: 250151 - DNA, 448 bp, Glycine max
ctttagccatgctgcgtggatatcaatcaatgaatcaattctttctctgacacttggaacacaaacgaactcctcccttactatcatactctttctctatctaatctctctctctagctgccttgttatgcgatatatctatctgcatatacaaatgatactctctttctacttcatggtgaataattaacctacctaggtctagaatgagggactgaaagttccaagagaagagtttgaatccagagaatatcagctgtggcagcaactaaacttctatattttgctgcaagggccacttctatatcagttgtggctttgtatctattgatattgccatcacaattaataatgatcaagcaaaaaagagaaaagatgttatttcatatacattgacctaaagattgatctactaacgcgtgtgcttaaggaccatatacactacatt

SEQ ID NO: 250152 - DNA, 374 bp, Glycine max
atcttcagaaacaagtctcttgaagaattgagaatcttggaaatgtatcttttgaaaacattcactagtaatcgattaccattaagttgtgaccattcgcatcctagatgtgactttcttaaaattatgaaatcaaatgttataagctctggtaatcgattacaaagtgtgtgtaatcgattacacaagtttaaaatgatttagacatttaaaacacaagttgtaactcttgaaatttgaaatcttaacgttttaaaacactggtaatcgattactaccttctgataatcgattaccagagagtaaaactctctgggtatgattttgtgaaacttcttgtgctactaatattttgaaaacttttataacttatc

SEQ ID NO: 250153 - DNA, 445 bp, Glycine max
tgtggggaaatggtatcaatcgacccagacggacacatttattattttcgtattcccaaatgaagtcatatcagttggaatatataatgaatcgctgccatctgtccatcatcttggcaattaataccctctacatgataaggagtaagctcatgcatttgattaaacatcatagcataggagctaaacgactgtatgattatgactatgtgctagctcctaatcattccgaaaatatatatattctcatatcataaaataaaggactctagttgcttttttttacatctttttcaagaacaccaaatgacgtaatgctaatgaatacagatttcattgcgaaggaactgagatgctactttcctgggacaccacttatgcaatgattcatgacccaattggatatttcaatataatcaccactctcgcatgtaattgccaacag

SEQ ID NO: 250154 - DNA, 429 bp, Glycine max
  unsure (1)..(429): unsure at all n locations
aaaaatntcattctccattctagacttgtttttccttcattttcttggtctatcttctctaggaatttaaaattttcatgtttacacatgaaagaaaagctttaggaaagataaacatccttcattttttctctcaaaaattccgtgagtttcaccaagaggaaggggggaggggtctttccaaaccttgaatctattcttgttgttgaacatgtcatttcaagttttcgtacttgcttccctgtattggatctatatgntggcttgtttttcttgcaatattgatgccaaagatgagttccttgtgtatcaaaacctaggttttgacttaagattcacctaaaatggaattttctagagaatgttatgagcaaaataagtgtaggagacttttctaagaaaaaatcgattttttgggcgaaattgact

SEQ ID NO: 250155 - DNA, 474 bp, Glycine max
  unsure (1)..(474): unsure at all n locations
tacgtgaactatgaaactcagcttacaggcaagggattcatggtccttcacctcacttctactttggcaatattccaaaaatgaagacccttttgcttcaagttcagttagcaccaaccactcaagtcaatgataaagttcaacgtgtttctctttctcacaaatggccttttcctctcttccctcatattcaaaagtggatcaaccaatatggtaagttacttctgtcttgtcttgtcttataaacatcatgtttcattccttcattttgtttagagaaatgaatcaatagtcaccatggttttatattgtggtagtgggtagaggttgctgctgatctttgacaatgcaggttagtgtggaaaaatgcagctgatgtgccacaaattgcagtcgcgctaagtctaaaaatttcatgttgtggctgcaattgttgttgcagacaattnttaaagggcaaaacataaatacaat

SEQ ID NO: 250156 - DNA, 397 bp, Glycine max
ttggtctttgccagtgagaggatcgatgtttgtctgtataaatgcatatttagacatcctgcttggacaaatgagaaaactggggcaaatgaagacggtgaaacagatggagaaacccatgttgcgactgccattcctatatggccaagttttccaccaacccaacaatgtcattactcaatcaataacaaaccttctccttacccaccgcccagttatccataaaggccatccctaaatcaaccacaaagcctgtctaccgcacttccaatgacgaataccacctttagcacaaaccagaaaacaccaacaaaaaggaattttgcagcaaaaagcctgtagggttcaccccacattccattgtcatatgctaaacttgatcccgtatacactcaat

SEQ ID NO: 250157 - DNA, 456 bp, Glycine max
  unsure (1)..(456): unsure at all n locations
ttagactatataaaagacaaaattcacacatgttggttatatatttaattacacaagctgtgagttgtaatgcattttttaaatattatgcattttgtatctcctctttccaaacgttgtcactacattgtttggtatttttaaataataatacatattttgtttattaaaaaaattaaagtattaagtggtgtcaattgtcaaagatccaatttataatagcttanatggtgcaataatgatttcccaataaggcacatagcatgctactttatagcatggtaccatattagatgtattattgtatacattggggcatgcacacacacacatattgttatttataagctatatttgtcaaaaacatcctaaaccatactatgagtactcatggtnttttggtntacaagaaaaaacagttttaatgaaacatgacactcatgcgttgcataaatc

SEQ ID NO: 250158 - DNA, 341 bp, Glycine max
  unsure (1)..(341): unsure at all n locations
catgcaagctttctaagaagctacctattatattatatgaagcatgtgtaacacttgtggtaactgtgacgaatgaaagtcttatgagatacactccatagttccacttctttccttcttttataccttcaatatgcggctccacccttctctctttcttttcctccattaaagcatcctcttcttgcgggttgtgcaaggcaattctaggtgagaaanctccttcttccttttcttattccctatttgatcttccctcccctctccttctttcccttttccttccttgcatctccctggcgaataatcacccttgcttgacctttttgaatctctaagat

SEQ ID NO: 250159 - DNA, 430 bp, Glycine max
  unsure (1)..(430): unsure at all n locations
tagggggagaagtgaagtatatattggttcagccccttaggcacttctctctctttcaaatatgcttaagaaaattgtttccgtgaagaaaatccaagccgaggtgcttccgtaacgtttccgtgagtgatttcgcgaaggttttcgactgttcttcgacgttcttcattcgttcttcatcgttcttcagtcttcaacgggtaagtacctcaaaccaagcttttcaatccattctatgtacccgtggtggtccacatttggtttcatgtatttctattctcgttntcatttactttntatacccccttttgacgtgccttaagccattagttaagtcatttttcgcttaacctacaaataaaaataaatttccaccgatcgtttgaattgtaccatcccgtaactttggtngaaatgaattccgactgat

SEQ ID NO: 250160 - DNA, 296 bp, Glycine max
agctttcaacatgagtcttcacaaataactattatgaagtagaatactaacataactacccatcatatctcccaaaaccccatacccacgaaaatcaaaggagaatgaagtccacccaaacctgaattttcgaagtcccactctgagccacgcatttcacgaccccgaaaatgctctcctttcacgatttggggcagaaatgatggccaaaggttgaagctctgcttggagcttcaatggagaatgaagaacaagagaatggcatcgtgagggagagagagagctgtctgatatgt

SEQ ID NO: 250161 - DNA, 452 bp, Glycine max
tgtaggattatgggggacccatcacatgcggtactaggtttttttgcgcgatggagcacaacaagctctccatatccacaatgcgcgcataaacccaccatcccctgttgcccacctccaactgagctcacgtactcccacgtaacccatatacctcgttctctcatacaccgggtccccatcaatcctctctagctttcacaaaatgcaagcaaaacaacattcgaacagcacaagctatcacagccaatcaaaacagagcaaaggtagaaaactctgctcatcacatcaaccaaaatcacagcttttctcgcgtaagaccacagaacaattccttcgaccaattctcaaccgttggatcgactgcagaatatactggaagttatattcataaacctacttgtgaccgtgagatctactagcagacatactaactattgcgactacttgtc

SEQ ID NO: 250162 - DNA, 423 bp, Glycine max
  unsure (1)..(423): unsure at all n locations
actcagcttctacgggaagctgagtgtgaagtatgcaattcttcatangattggcgctgcaaaccgggtacccaccacatcacactctccactgtatgccacagggcttgggtaaatatctgtatgcctgtggaaccaagaccaaatttaattttggaaactatatttctgatcaaactgttaagcattcagaatcctttgctgtcaagatacccattgccttcccaactgtattgagtggcattatgtagagtcaacatcccaaaattttaaacaacattgactctgtgatgaagagagaatcggctctgtccctgcattacaaactgtttgaggggacacatgtcccacacattgtctcgacatcaaggaaagctactgcatcatgtgctgtgtccaaagatgccttgattgctgaactca

SEQ ID NO: 250163 - DNA, 457 bp, Glycine max
tagacgaacttgtttgagtcgagatgactttattatttatttggacaagcctgaatataatgtagaagaaagtgaatgtgagccttttacccccttgaaaggcttgtatttaaaaatgttctaaaaatacttttaattaaatatttgaatttttattcctttattaatatatatgtgaggggtagaggatgtcacacaaggcatatttaatgtgagcacttttttcctttattgtccactcctaaccatgcaaatcaatggtgagttgttgatctagtctcttaaataatagtattataatgggaacacacatgaataaacaatatttcttatactgtttcaactacgtgaataaagatccctctagtttaattaattagtgctaataacttatacgtgtaaggactacagctagaacctagaagaatgcatgccttttaaaaatagttttttttgg

SEQ ID NO: 250164 - DNA, 183 bp, Glycine max
  unsure (1)..(183): unsure at all n locations
aagaaataaacccaaaaccacagagganttgatgatgcatgcaaacccaacanaaaccgaccgcacacgcaacacccaccacacgataatattctgggggcacaccacccagcgcaaaaaaacggaaacacaggtcccccaaaaaagcaccgaaagaacatgacagcccgtaccccagaaaac

SEQ ID NO: 250165 - DNA, 346 bp, Glycine max
ctacttatggagcagagccgattgcccttttttttctttggcagatatagcgggtaaccctgaatatgatttggaagacccaatatgattaatctagtgctatggaaagagccatttttttgatctttactgggtgacttgacttagacattgtttgtgtatgcatgtggagaaaaagttggacatggatgggacttccttacatctagcagacaaagaggcttgatacccgcagatctactgaatgggttatatccagtgcatcaggctgaggaaaaattacttccccacctgcatcttgtccaaagcaaaaattctgactgttctcgggaagtccaggtctcta

SEQ ID NO: 250166 - DNA, 394 bp, Glycine max
  unsure (1)..(394): unsure at all n locations
gcttcaacgctgaagttaactgtggcgttcctaaataatgattgacttaatagtaataaattaaatagcagaaaccatgggagaatttttttctttttctctctctctctcttttgtttgcactggtattcatttcacggaaattaaattcagaaggaaaattatcactataaagtcctgaatggccagttcacaactctattcggattcatttctttctgatcactcataacctctaaactattntgctctttcaaaaaaaatataccagccatcattttaggtcgtcacgtgaaaaataataagaagcggtcggtaactcttttcaataaagtttgtaacattctcttttctataacaagaataaacatatatatatttatcatctaacact

SEQ ID NO: 250167 - DNA, 463 bp, Glycine max
  unsure (1)..(463): unsure at all n locations
tgaccaatcccgacccaacccgggtatagtcagtcagttagaacctgtgacgtacctaaacaggcgagctcctggcagtcaaccaataaaagaacaaagaccacaaagcaaggaggctngtgtggtggctggccaactatggatcttgagtgatatctggaatatgacctctggtaattgattaccaagggtgtgtaatcgattacaaggcttaaaaatgaagacaagaagttaagatggtctttggtaatcgattaccaagggggtgtaatcgattaccaggcctaaaaatggggacaggaagttgagatggcctcttgtaatcgattaccaaggggtgtaatcgattacaaggcttagaaatggagacagtatgttgaggaggcctctggtaatcgattaccaatgttgtgtaatcgattacacagagtaacagggcactggtaatcgattaccagctatg

SEQ ID NO: 250168 - DNA, 292 bp, Glycine max
taactttatagtacttatcatggctgagtcttctcttgagacacgaatcttgaaactcgattcttgaatctcgaaatcaaatttctctcgattcttgaattgttcctgactcaatcttgaaatcattctcttgggaattgttcttgactcaatcttgaaaacattctcttgggctttttgtcatcacctttgttatcatcaaaaccacttgaatcaatcttgattcatcatcatcatgaagcttgcttctacagagactatgccaaatatcagcctatctctatccactgtc

SEQ ID NO: 250169 - DNA, 341 bp, Glycine max
  unsure (1)..(341): unsure at all n locations
atggcttatttgcctttaggacaatttgcactcatctatttccttgagcttgtgaccccactattggatggtaagcctttttcttctttctttgagattacccataatgggtatttgtgcaacatcttattagtgttagttttgcattattattattcatgagttttggtaaagtgttgttgttgaacaaaaagttctttttttagatcacatgctcttctttctttcattccttaagaacctaagctngagaaccttatatgtaagggaagctttagactttcttcatctttgtggtacggattggactaaaattgcttaataatgaactgtgatgtatg

SEQ ID NO: 250170 - DNA, 443 bp, Glycine max
tcaacaatcacattcatggctacacacaagagaaaggagttaaatattcatatgtttacacatcaagagagacacactcatccaaggcatatatagttcaaaaggtttgcacaacacaaatccacacatcaagagagagataaccttattgccaatatacacacaagaagataagggctcattaaggcattatcaatcaatattaagactacctgtgcggcgtccctaaataatgactggtttaatagtaataaatcaaatcgcagaaaccatggaatctttttttcttgcactgttattcatttcacggtaattaaattcagaaggaaaattatcactataaagtcctgaatggctagttcacaactctattcggattcatttctttctaatcactcataacctctaaactcatttactatttcacaatataccagtcatca

SEQ ID NO: 250171 - DNA, 423 bp, Glycine max
gtgtttactatcattggtatcattttttcttcgtcattgaggtgccacttgagctgctaggtctctccacctttgggcatattctttgaaagatccgtgcccctttttgcacatgttttgtagttgcatcctatccagaaccatatgaaaattgtactgatactttctaacgaaggcaaccattaggtccttccaagaatggactcgggaaggttccaagttaacgtaccaggtaacagctaccccagtaagattttcttggaagaaatgtatcaacagttcctcatcttttgcgtatgcccacatctttcgacaacacgtctttagatggttcttggggcaagtattccccttgtacttgtcaaagtccagcaccttgaacttgcgaggggtgatgatattgggtactaagaacaactcttc

SEQ ID NO: 250172 - DNA, 387 bp, Glycine max
ggacttaatcactgagctcaactacaggatgggagaattatttattgctgtacaaaaaattcactatcaaatgtttactatctctatcttttctcaatcaatttcgtaaaataaatccctgatcaaaataatatatactattatgtattgtatatctcatcattaattacaacgaattatcttcacacaaattacaatcatgtgactttaagatgtaagaagttctatagtttatatatattcgaccaaaaaatatttcataagctgtactataaatactcatacttaaatatttacagcaaggtaccaatcatcaattctaaccatttatcaatggttaatatgaaagttctccattgatgaagatgatattcattttcctatctt

SEQ ID NO: 250173 - DNA, 466 bp, Glycine max
  unsure (1)..(466): unsure at all n locations
tgagatgaggaagtgtagaaaggtgaaacttcttgctgttattctttcaccacagagtggtacctggagatatgtcgcgggggtcaagagaccttggggacgtcaggtggggtgctattgcccaaaaccaagcttgaccaatcccgacccaacccgggcatagtcagtcagtgagaacctgtgatgtacctaagcaggcgagctcctggcagtcaacagataaaaggaacaaagaccacaaagcaaggaggcttgtgtggtggctggccaagtgtgaatcttgtgtgatatatgggttatggtctctcgtaatcgattaccaagggtgggtaatcgaatacaaggcttgaaaatgaagacatgaggctaagatagtctctggtaatcgattaccaggtgtcgcaacctacccttcggcgggagggcgacgcgagactcgcnggatgcgtgttccacgaaaggaata

SEQ ID NO: 250174 - DNA, 480 bp, Glycine max
  unsure (1)..(480): unsure at all n locations
tctactgatgtggcagggcggagccccttcngcttgttgttccttccgcgagccttggcctctattcttcctttctgagatacttttccttatgtcagcttgcgtaggtttatagcctaacccaaacttgctacggtttcctctggtgcttaccaagctggttctaccgctgttgttcttgcccaaacccattccgagctcatagccgtaccccaacatcacccgggccaccatcattgccgtatcagacaagcaaggctgcccagagagggaatctacggaggcaatgcttactacctcaaaagattggaaggtcatttccaaagactccttcgcggcttccatatatggaattnggccttagatgggaaagcgtaaacaacaatttctccaacgtggctttgggcatcacgttcaaactggagccattatcgatgagtaccttggccatgacgtggtccacgcattggactgacacat

SEQ ID NO: 250175 - DNA, 154 bp, Glycine max
agcttagtgaaactcatgtgccctcttgttttgaaacctctatacttatcttggtgagtcttctcttggtcttgaatcttgaactcgttcttgaatcctgaatcaaattctcttgttctcgaattggactgactcaatctcgaaaacattctct

SEQ ID NO: 250176 - DNA, 424 bp, Glycine max
  unsure (1)..(424): unsure at all n locations
gcttgaagaagctttcttgtcttttacatgcccaactctcttgagtggcatttgtattggttgttattttgagcgttgcatctcaatccatattatatcttttgtgcattatgcatcaccatgtgtgagtgagaagaaaatttcttcagaaggcaaaactctttattttaatcgattacaaccttatcgtaatcggttacacaagttgtttcaagcttgcaaagatatgtctcgtatcggnttaattgattatagccttattcgaatcgattacatagttttttttagacaatgatagatttatttaggaggctctgctttactcgggtatcatgagatataatcgattacttctctttctataagtggtttagaagtgaacaagaacactttaatcaatactttgagtatctaatcgattaca

SEQ ID NO: 250177 - DNA, 454 bp, Glycine max
  unsure (1)..(454): unsure at all n locations
tcgctgctgatgtcataatctacatgttataatgtaagcttgcaaactcacctgttttcccttgctcagttagaatttgaaacaggattttcttatttttcagatggactcaaacagtgagagaacgtgggatgacagcattttgttgaaggaagaggtagatgcctcttgcgtaagcaagaaagaagcagttcttaagagagaaaaagtaaaagaatactcatttaaccacagagtaagctcttaaaccagtttttgctcttagttaaaaacattttctcttttcatattctatttatattcagaattataaaaaggtcactctgttttcattttgtttcatatttccagtaatttctttaagtagcaaaattaagattgtgttattttcactgtttcctatagaatccttcaaattaggaaatanagagaaaacattaacaatgtggtactt

SEQ ID NO: 250178 - DNA, 440 bp, Glycine max
cattcatccctatgagatgtttttgtagcaatggcgatctgaattggcattccttggaatattagggtgaaccaagctcatgcttttacaaaaaggatcatcaagtcaaagtgaaatatggaagtaacccgtctgcaaaaatggggcaaaagatgaatcgagtcacatcactgcttcgtctactgccaaacatatttaggattgttgatgtccttggtacttccagtgtcaccttgacaaagatgtcatggaccatgttgaaaatctgaatggattcaaccccatatcctgcgtaaaaatacccaatacttcaactgtacatcattcgcatacattcatgcttttcattggatgcattgctcatttcattctttccttgaaaaataaaataaaatacaataaagtgaacttaatcattgttattaaaaagaataggacac

SEQ ID NO: 250179 - DNA, 464 bp, Glycine max
  unsure (1)..(464): unsure at all n locations
tgtagaacggctggacatgacatatgtcaaagtgttgtgtttgcctacgagctctggataaaaagggatgtcccacatttttttcatgacacaaatgcaataatgatgattatgaaattttatgcaaaacaagtcatgcatgcacctatggggacactcaagtgtcgaaatttttttggtcatgtgatgctagggctcatgattcattttctttactttagtcaacccagtgtttccaaaatatgttcttttatcaatatgtgcattcatccgagtttatatttgggcgttcgggataactctcacatcattcacccttcaagtgtatacacatttttttcaaaaactggttatgatcaatgaattctntcaaagaaaagttggaagctatctcctttcacaagcatgttgttttctagctagacaactcattattatctttttttcctccttattcctttctt

SEQ ID NO: 250180 - DNA, 458 bp, Glycine max
  unsure (1)..(458): unsure at all n locations
tgaagcttaagaaaaaattgaagaagtatttgaatatgttntgacttttacatgcctaactcccttaagtcacttgtattggttgttatttagtgtattacatcatagtatcattaatcatcatggttagtatgaagaaaaatttctaagttagaaaagtttctttagagacaaaaactctttgttttaatcgattacaaagttgtcctaatcgattatagcaaattgtctgaagcttaaagagttaactctcgtatcagtttaatcgattatagtagtctcataattgattatactgttgtttgagacaatgactgatttattcaagagtctctactttaatcgattaccaagtgaattaattgattacttctctctcggttagttgttcagaggtgaacaagaaccatttaatcaattacttagatcatctaatcaattgcattattattgaatta

SEQ ID NO: 250181 - DNA, 351 bp, Glycine max
catgcatacttatcccccaagtttctataaatacggtgttaagtgaagcgaaaagggttaccaccttatgcactattttctctttcgaagttgctcggaaaaattgtgtccgtgaagaaaatcctagccgatgtgctgtcgaaacgtatccgtaacgtttccatgaggaatttcgcgaatgttttgaccgttcttcgacagtcttcattcgttcttcatcggtcttcgatcttcaacgggtaagtacctagaacctagctcttcgattcattctatatacccgtggtggtccacattgtgtttcgtgtgattttattctcggctcattaactctattaccccctttgacgt

SEQ ID NO: 250182 - DNA, 388 bp, Glycine max
tcgagcaagaagagttggtgccactaaatagtctctagtttggttgatacaatacaatcgtaggagctgatgcagattctttgcttccgcgccaagcagtaatcacattctgtttacttccccttttttttcttttacaaatcaaaatagattttgggtgtatatgaataagttaagcactagcttgataaaaaggttatgaaataaaatttgtgtctgaccttaaatgtgaaactcattgaaataaattcaaaagttctgatgttcttctgtctttcttttacaatggttattactggtttactatgcacgtctagtaatgatttttttttttttctggttcagaaacttcaggaatgctctttaaataatgggtagacaattatgc

SEQ ID NO: 250183 - DNA, 463 bp, Glycine max
  unsure (1)..(463): unsure at all n locations
tctggaggaagcaactagctcgcctgtgcgagcatgttacttcaagcttaagccaccaactcacctgngcgagctgggcggcaatatcctcccctattttggctataaaatggtggaggaagctgaggggaaggggtttagcacccttggcaagcatatgtcacttaaaattagtgaagagaagaagaaagaaggagaaaatcaaggtcgaggcgcttctgtaacacttccctaaagtttccgagatcaaatccatggacgttcttcgccattcttcgtttgttcttcatcgttcatcattctntgactggttagttntcaaatttgaagctttgaattcattntatgcacccttaggtgtccattcttgctttgtatgttttcatctttaagtctttactttcagtattctttntccttggtttaagcgaagtttgaccagtcgttcataccgtaatcttgc

SEQ ID NO: 250184 - DNA, 455 bp, Glycine max
  unsure (1)..(455): unsure at all n locations
ttgcatgtctagtgattctagatagagaaaggtccaagttccatatagtnttgagagatttcgctgtgtgaagatctgcagagaccagagcttgaagcggaagccgttctgagagcttgagataagtttgtgagtggttgtgagatcctagaggtgaaggagacatcctcaccacttgtatttttgcaatctttcatcttggtattctctttggtgtaaaggaggcttcctagttatggaaagctaaaatcctctgttggatcttccttgtaggtacatgatgtaaatatatttctatctatttaatgatattttgtgtgttctctgtgctatcaacttttcattctagtatgcctttaccttgatcatgtagatgtatgctctgttaggtcattcaatagtggaaactggtctaattctgatgacctcgataggacagggctaagttgtcatac

SEQ ID NO: 250185 - DNA, 480 bp, Glycine max
  unsure (1)..(480): unsure at all n locations
actaagctggctaataacctgatattgagagaaaatgattattattcactctaaatgaaaatactaagtatttattacctatacttaacagaaaatacttataacattacaaaataaccataaatngggagagtttgatacaatttatacaagttttatacacaaaagtttgtcattttcaccaactaacaactcccccaaatttacagttatgcttgtcctcaagcaaaaagagaacaactcacttgtccttaagtgacaatgacatgcagtgactaagtacaaaggtgtatgctacaaagtgactgattgcatgataagagaatggagtaaaatgccctcatcacttgtctttcacaaggtatgcacttatccaaagagaagaataaaatgtatcctgaacagatagatgaagttatgcataagacagatataaatgaaagtagcttaaaccacagtctcacggctactggttcactc

SEQ ID NO: 250186 - DNA, 443 bp, Glycine max
  unsure (1)..(443): unsure at all n locations
tgcttgtctgatgcagcagtaatgatggcccgtgttatgttgtggaacggttacgaacccggaatgggtttaggcaaagacaacggcggcataactagcttgataaatgccaaaggaaatcgtgggaagtatggtttaggctataaaaccactcacgcggatataaagagaagcatcgcgggaagaaagagcggtggtcaaagctcgcggttgaggcaagaaagtgaaggaagcccaccctgccacataagtagaagctntataagcgcgggtctgggagacgaaggtcaagtggtcgcgatatacgaagatgatgttccgagtacattggatttggtacgaccatgccctcctgatttccagctgggaaattggcgagtggaggaaacgccccgcatttacgcaacgagcataatgtanacctttacngtttaaaagctcta

SEQ ID NO: 250187 - DNA, 203 bp, Glycine max
agctcgcttctacaccgacaatagaagtagtgtctgtgccacaagcctccccaaaacgcggttcgtcctctgttgtatgatggtcttctgcacaactccatcataccttgcctcttgaaaatctcctccaatggcagcgaaacacattgctggagggtatgtgtgtgtggagttgatagtgtataaaaattgtccctgatgtg

SEQ ID NO: 250188 - DNA, 460 bp, Glycine max
  unsure (1)..(460): unsure at all n locations
tttccggatntaaagatagtagccatttatattgcaccatatagaaaatcaaactcataaaagaattccttgaagagtttccattgtcgaataacttttattattttcaatttacagcataatatctatttgcaaaatttctctaaatctcaccattccttggtaagcaattaactattgagctttcctatgaataaccaagaccacctacaacactttaccattaaaatgttggtggtgaagggagaaggaaaaagggaaggaagaggtcataggttcgaattctcctgcttatagaaactaacaatactaataataactaacatttactggtaaaaaaacattatgatgttggataatatcctgattgatccaacactcactatcaccacacatacagtaaacattgctagtggtttgcatgagtnntagtctaattaaatatcacttaattttttta

SEQ ID NO: 250189 - DNA, 160 bp, Glycine max
cattgctaccatgatatcactacttggggaaattggagatatggcctgaggaatcaacaccccttcgctatgtgctcaataacacatggggactcatgaagtatctcctttatatgagcacactcttatatgctgtttgcatgggagctaagccccatta

SEQ ID NO: 250190 - DNA, 425 bp, Glycine max
  unsure (1)..(425): unsure at all n locations
ttagccttcatgttatccatgctgctccctctatctctattagggactacaggaaaaagttaacaataagtctacgatgtaatagtggcaagatatggtacctgcatcaactngctatctattaataggcttttccacaataatctagatgcacgtcaataaacacgctaaaacttctttaacatgaatttggagagagtttatcaatgtatgatgtgaacctgattaagagcggaatgtttgatacatgctatggagctctggatgacgccacttccaaagagggaaaataagtcatgggagatgccacttctggtgatgaagataagacatggtacacgccacaaggattaccttgataagtctgataattggttaacaaggaacccatagagaaactctcaccaaattttatcacatgccca

SEQ ID NO: 250191 - DNA, 415 bp, Glycine max
  unsure (1)..(415): unsure at all n locations
cacatcaaagtttccacatccacaaatcgcgcataaacccaccattccctgttgcccacctacaactgagctcacgtactcccatattctcgttcctctcaacaccgggtccccaccaatccttccaagcttccccaacatccaggtaaaacaacattctaacagcacaaactatcacagccaatataacagggcaaaggcagaaaactctgcccaaaacaacaaccatgatcacaacttttctcacttaaagaccccagtaacaattcctttgttccagtttgttaacctgtggatcgactcgaaaattgtactgggagtctctaatacataatcctacattntgacccgtgtgatctactagcaaacatccataactcattctgcactactcttcccacagctaaccacacac

SEQ ID NO: 250192 - DNA, 411 bp, Glycine max
  unsure (1)..(411): unsure at all n locations
tacttgtcagtggctgatagagaaccgtgtcttttaatcnctaaccctgccctcggggtgcgacgaaattacccctcagcatcatctgtcttctcgaatgccggacggcgcgaattttcagagctgaacagttgatgattaccatctactatggactaggcctggcgcaccagtatggcgggacttcgcaaggcctgtgaaagcacaatatgcatgaaatggaaggagatgctacaaataaagctaaactatactctaatgactcatatagaaattaataattgtgcaacatggcgccgataagtacttaccatggatctgaagtgagtgtggatggcgtgaacatcttggcccgagttgtaggggttggagggcgggaaagatggccgtggaaagagggcatgtcccaaa

SEQ ID NO: 250193 - DNA, 261 bp, Glycine max
  unsure (1)..(261): unsure at all n locations
ttttcataancaaccagagttgataataatggaatgtgtcaagcacattgtactaaagcaataagcgtaactttgtctgaactattggcatggattaacaaatcaaaagtgttaattctatgttgctccggaagtgatctgctactttatgacaaccaccataaaaaggccgggcttgatattgatcttagaaactttgatttttgataagaattcactgatatcctttgtccatacagatgagttaacctaacaagacaa

SEQ ID NO: 250194 - DNA, 466 bp, Glycine max
  unsure (1)..(466): unsure at all n locations
agaaatacaagntctgggcatatgagctattntgctagtttaggggtaggagcgtaaaggctctgtgggatcctctcacccgcagaccctttcttttgntcaaagggatgtgaacaaagtagctaatagtttggcttctttagcttccctttttgaggatagagtttggattgaggaagtttcccctcaaattctttcccttgtaaatgatgacttangacctctagccattttcagttaattaatatcgcttacttcaagaagaaaatgaattgacaatatccatcctttgatgattgaaggagatacaagaaggaaaaattattattataagtagattttatattattntccttttctctattgaagtgaaagacaagaaaaggagagtatttatgcacacccacaacttctnttcatcttcttttattttgggttctttagtaccaaataatccacacaatca

SEQ ID NO: 250195 - DNA, 231 bp, Glycine max
gttttatcatctttttttggaaaccataccagacttgctactgagattaagagcagttatatggctcccttgagccacatatgatatcatttactcacaacgactagctcatgaaagatcatgtactacattcaaccaatagacattagctattctcttactgatcgggacaactgtaccggatatggtttactctatagacatcactctctattgtactctatgtcgaac

SEQ ID NO: 250196 - DNA, 429 bp, Glycine max
  unsure (1)..(429): unsure at all n locations
ttgagccaattcanacgacaataacgttntactcggatgtctgattgagtcccgtcatatatcgagacgctcgaaattgaatgttgaagctccgagccaattcaaacgacaataactttttactcggatgtctgattgagtcccataatataacgagacgctcgaaattgaatgttgaacctctgagctaattcaaacgacaataactttttactcggatgtctgattgagtcccgtaatatatcgagaccctcgaaattgaatgttgaagctctgagccaattcaaacgacaataacgttttactcggatgtctgattgagtcccgtaatatatcgagacgctcgaaatngaatgttgaacctctgagccaattcaaacgacaataacgttttactcggatgtctgattgagtcccgtactatatcta

SEQ ID NO: 250197 - DNA, 451 bp, Glycine max
  unsure (1)..(451): unsure at all n locations
ntgtgatacaaagatgcaaaatctttgcctttatggatatcctagcaaaccgtgggaagtgattgtgcctttcgaatatgttgtatggaattcatatttcatggccttcttgtatgggtcaaagatcacatacagtactaacattatttggcatatcaatcaaactagtttggtcttaattatatgttgttttgaagggataatcattacttgtttgttagtgttgaaagaaaaaaatagcactgacttttctttaagtgatgctttgataaatggaatgttaagttgttaacatcatgaaatagttgatacctggattaaattcttatatgttctttcccctcatgcaatcattttatgttgaaacggtaactttgaaaaacatttgcttggatcatgcattggtaagaattatatcttgtaagtccaagcttggctctcttatatcact

SEQ ID NO: 250198 - DNA, 322 bp, Glycine max
  unsure (1)..(322): unsure at all n locations
atctcactactatttccttgatggtttttctgggtatatgcaaattactattgctcccgaggatcaggaaaagaccatattcacctgcccctttgacactnttccctataggaggatgcctttcagcctgtgcaatgcccctgataccttctagcggtgcatgattagtattttcagtgatttcttagaaaattgcatagaggtgtttatggatgatttcactgtatatggatcctcttttgatggttgtttggatagtttggaaaaatttttgaatagatgcatcgaaactaatcttgttctaaaatttgaanaatgtcat

SEQ ID NO: 250199 - DNA, 67 bp, Glycine max
aaaaaaacctccaactacagaaagggggcaaaaattttattacacccaacccgggaaggcaacagaa

SEQ ID NO: 250200 - DNA, 187 bp, Glycine max
ggccattacgggctgaacagtgcttataaaatacattttctttgcatcacttatgtttttcgcgtccctggcacattgtcactttattgatctatgtccccaggacatatatggtgcttggttatgttctctgcacaagaagcctgactataacactaagggtgctttcaactgggtactttgatac

SEQ ID NO: 250201 - DNA, 451 bp, Glycine max
  unsure (1)..(451): unsure at all n locations
accaatcattgcttcatacagtgtggagtgtttatctctctacaagttaaaaaatatatggtcatatatttctcatcacattacaacattttgatctctactatatctctttcacatcatactgtacaataccttcatccctaattgggtatttgattaagtacttccttcatcaaacctcgcttgtgagatgagtttttacattgatttattatagaaatactcttaaaaaatcgaaagtatgtctgattttcagttcaacttgttgtatataaaatatgagaccaaattcgatggtctaccataaattaaatgcaaaagaaagaatataattacatatttttgcaatctttatattattattaatatcaagttgcaacggatacccaaacatacatttagtcgtgtatataaattcatctattatntttgtatcttttttcccctactc

SEQ ID NO: 250202 - DNA, 228 bp, Glycine max
  unsure (1)..(228): unsure at all n locations
accactatttccttgatggtctttctggttatatacacactactattgctcccgcggagcaggaaaagaccatattctcctgcccctttgacacttttccctataagaggacgcctttcaacctgggcaatgcccctgaaaccttctatcggtgcatgatgagtattcttagtgatgtattacaaaattgcccanaggtgctgatggatgatctactagttatggaac

SEQ ID NO: 250203 - DNA, 407 bp, Glycine max
  unsure (1)..(407): unsure at all n locations
atgtgtcttatatagaactctacccatcatagangttaatcgtggacatatatgtgggaaccataaaattcacacatgatctcattatgaacgttaacattgatatgggtttcaatacaaattaaaaaatggatcacatactgtgacaccttntacttcgacatacatataaataaataaaacatataaaaatacagataaaaaaatttacataagtaaaatattcacattcacttcactattaccaaataaaactaattaaaaacatatatggctcagaacaaggccgtcaaagtttacaaaagaanttttgttaaatcagtgaggtaaaataaaataaaaaataacatcatggaattataataaaaacccatccccaatgtcacatcctatcatagcattgtgtc

SEQ ID NO: 250204 - DNA, 430 bp, Glycine max
ttctccactaagatgcctgatgcctgatatgtcttttttgatggttgtggtcctagatgcacggaagaatttctccaagaacaccctcttaaggtcatcacaactgaaaatagacctaagatcaaggtagtatagccaatcttttgccactccctccagagaatgaggaaaagtctttataaagatatgaatgcacaagctttcataagtgaaatcaggtgcaggcatctccctaagagtcctctcacgaggtggaggttgagccatgttctcagtataaaaattagtagtggaatgttcaaaatcagaatcaccctcaacaaaatgctcagaatgctcacaatgcacagaatgaccaggatgcacactatgtctaactaatctatgaaaggttctaactatttcacgatcaaacggttgtacatcacat

SEQ ID NO: 250205 - DNA, 212 bp, Glycine max
gaaacgaatcaaactttcctcttcttcaatcccaacctcagtctatccccggcaaactccaaatccatatagctggactgcctggatcccactctctactcattagaaaacactggccacaccgctgccatcatggagatcttcaatcgctcagtgtggagtggacctccatgagctcgcgagggacatctaacgtgcgcataataaatggg

SEQ ID NO: 250206 - DNA, 369 bp, Glycine max
  unsure (1)..(369): unsure at all n locations
taagctccttcaactacacaaggctcttaatatttgaagagtattcttgtggaaccttcacccgacgaagacactgacaaaaacttatcttctccttcttggacaaagtatggcaggctgggggcaagtaaattttcttcccatcagaccttggatgcaattgtgctcgtatacccatatcagctagatcttgacgggtattcaagccatccttcgtcttgccttgaatgttaaggagcgtcccaatcacactatcacaaacatttttcttcacatgcataacatcaatacaatgtctaacgtcaagatcacaccagtacggaagatcaaagaanatggacctcttcttccatatgcaactctgacttt

SEQ ID NO: 250207 - DNA, 408 bp, Glycine max
aagctccaccgatcactctacgggttgaagcaaactcctcatcttgttttggcaagacactcacgtcgtgcaaccttttggagagaaacaaagagaagatgagcactctgcttattaatgtcatacatagactggagaaagggatcatctaatggtttaaggtgatgacatagcgattacaggggaagatactactaagaacacccagctaaaagagcacttatttagacaatttcagaccaaataactgggatatttgaagtatttccttggtattgaagaggctcaatcaagagatggtgttgtgatctctcaaaggaagaatgcccttgatattttagaagaaacagatattcagaattttagacctgttgaaagccctatggatccaaatctggagctcatgac

SEQ ID NO: 250208 - DNA, 410 bp, Glycine max
tcacaactaaagtatattctcacggcgcatacaacctttctttcacatacgttgaggagatgtaccataggcttcatattattgccttcatcaaactctattctagcttgctcttctctacaaagatatgtatctggtcgaaatagagggcattgtttatatcctatcactctgactatgaaaggaatattcactagttaagtagtcttgccattgacgatgtctggtggatcgttgcatgagctgatagcaccctaagtacctatagagaaagaagaaccctagttgtacattttcccactattctgatgaggataaattactttctctagtatgagttttacaatgaagttgaacattggactattttattggctatgcaatggattataaacctttacatgttaatg

SEQ ID NO: 250209 - DNA, 425 bp, Glycine max
  unsure (1)..(425): unsure at all n locations
ctccgcttgccataaataaaaaatctacatctgcaccttntactggtgcaagagtctgtggtctatgttcttctgctgatcaccacatagacctctgtccttctttgcagcaatctggagtcaatgagcaacctgaagcctatgctgcaaacatttataatagaccccctcagcagcaaaaccaacaacaacagaataattatttcaaacaacagatacaatccaggttcgaggaatcatccaaatatgagatgggcaaatcctccacaacaacaacagcaacaacaacaacagcctgcccctcccttctagaatgctgctggtccaagtaggccatatgttcctcctccaatgcagcatcaacaacaacaacaaagacaactagaaactgaggccccttctcatccttccttatgaggagtagt

SEQ ID NO: 250210 - DNA, 323 bp, Glycine max
  unsure (1)..(323): unsure at all n locations
ataggatatgaatgtatgaaatgttgatgaatgaagtaggatagaaagataaaaggaagagggggaatagagtaagtgataattgggtatggaagagtgaatggatgagtatagagaaggaggtatgttagtgtataattaggggagagtatgttnnnnccaacgacaggggaggagatgatatttgtatttgagntgtttgaaggtataatgataatgggaaggaaaaaaaagagatttgtagtttacaaaagggaaagaaaaattatattttttgaaagagataagaagaatttggtggaggaataaataataaaaaaaaa

SEQ ID NO: 250211 - DNA, 358 bp, Glycine max
tgctactcttaaaacaaaaatggcttcaaactcctccaataaatacaaacatcaatgtaaatttagagcaagcttatgcgcatacttcttttaccaaccgtcacttgcacaagacattcttataactaagaaaaatgcacccatgtacaatcaaggcaccttcgttacctagattatttatatgtgcttacaaggtgtatatgttacctacatctcatgcacttccttggctaaatatacatacatgcgtacttcaagcatttggggtaccaaaaattgcacatgtgcacattccagtatttctaatacttatgcatatacaaactttgtgatgaatcttggctatctacacaacaag

SEQ ID NO: 250212 - DNA, 387 bp, Glycine max
  unsure (1)..(387): unsure at all n locations
ngagatgaggaagtgttgaagggtgaaacttcctgctcttattgttgaccacagagcggtacctggagatatgtcgcgggggtcaggagaccttggggacgtcaggtggggtgctattgtcccaaaccaagcttgaccaatcccgacccaacccgggcatagtcggtcagtgagaacctgtgatgtacctaagcaggcgagctcctggcagtcaacagataataggaacaaagaccacaaagcaaggaggcttgtggtggctggccagctgtgaaactngattgatatgtgagatatggtctctggtaatcgattaccaagggtgggtaatcgattacaaggcttaanaatgaagacaggaggctaagatggtctcttgtaatcgat

SEQ ID NO: 250213 - DNA, 450 bp, Glycine max
  unsure (1)..(450): unsure at all n locations
actaagctgtaggttctaccgatattggatgaaggaacatatatatattgntattgatgctggacactatggtgcatttgagatgataatacactgctagtacttcaatttattctttagaaccaactatgagactgagtattttaaagtaaaaatacagaggactttcatattttggaaacttgaatgttgaaacaccgtggacatagcatggtcatgatgaatggcattgctttggtaacatgttgaaattataggtactgggtggaaaattgaaaagagacaatatactctattttaccaataggactctatataattgttatattgcaataatagatcactaatggtattttcctatttatactaatattctagatcaattactagtgagatactatgaattaatgcacactgaagcccaatatcacttctaacataacactacta

SEQ ID NO: 250214 - DNA, 481 bp, Glycine max
gcttgtcttaatccctttgtggttagacttggtttatcttattattgtaacaacatacttaatacagtaacttaatccgcagatccctcttgtaagactaagcttcaattctgcttcattcaagttctaaggaaacaatacatttcccaatgttaaaatcacctaactaggcacacatatggttgatcagaccaagagcatactaaacttaagcactgtagaagcattgtacacaagaaacaaaatcaattagatatgaaaataattacatcagttgttcattatagatccccaacaaaggtgtgtatccagccattacaaatgagaccctaacaataataagcttacaaaacctatgtatctctgcaaaagctactcctcttgctatctccagagctcttttcctgcaataggcattatggtgtactgttggaatttgtgccctagcctttggaaaagtctaccctattatcacaagaca

SEQ ID NO: 250215 - DNA, 463 bp, Glycine max
  unsure (1)..(463): unsure at all n locations
cttgtaagtgcgggtctgggagacgaaggtcaagtgttcgttatatgcacagatgatgttccgagtactttggatttggtccgaccatgccctcctgatntccagctgggaaattggcgagtggaggaacgccccggcatttacgcaacaagcataatgtaaacctttacggttttaaaagctctatagttgggcctaggctttagagatttcattttgttaaggctctgtgtcttttgtttttgaatttataatacaaggatctttcttcatctgttcctggtctctacccattctcattcatttgcatgtttacttctttttctaaaacggcagattcgatgacgagtcccccgaaggtactaatacctgggacccgtctatcaacttcgagcaagaaatgaatcaagcggaagatgaaggagatgaggatggtggactttctttggaactagaaagaatg

SEQ ID NO: 250216 - DNA, 381 bp, Glycine max
  unsure (1)..(381): unsure at all n locations
tctcagagagtataaggaatctcccaagcctgatttttctgtcctgaaggatttgcaagttttgagcttgagtcttaacaaactcactggtccagttccagcttctttgttgggtcttttgtggctcaaagttgtgaatttgaccagtaacttgtttcacgggccaatgtctgtgtttgctcattgggtcgaggtggataatgcccctggttgcaataattattgcttgcctagtctcggtgattgtgatcccagaatggagcttctgctttccgtggttggccttatggagtatcatccgcaacttgctaagagttggatagggcaatgatcctcttatagtggntaagcattgtgttaacttctttgttgatggtaaac

SEQ ID NO: 250217 - DNA, 144 bp, Glycine max
ctgcaaggctattcataaaagggaggttcatgggaggagctgatgaagttgtaggattgcatgatatggggtggcttggaaagctatcggaaggaacaccaatggactttgctgatggaccttgcaaaggtagtgcctgcatga

SEQ ID NO: 250218 - DNA, 417 bp, Glycine max
tgcctcagcgtttatgcgagacagagaccaacatgttagccatcatcagcaagtactaagaagagctaagtctagccacagtccacgagcatagagtggcggacgagtatgcccaagtgtacgcggaaaagaaggctagaggaagggtgatcgactcgctacatcaagaggcaacgatgtggatggaccgatttgctcttaccttgaacgggagtcaagaacttccccgattgctagccaaggccaaagcgatggcggacatctactccgcccccgaggagatccacggacttctcagctattgtcagcatatgatagatttaatggcccatataattagaaaccgctaggaaacttgtattgcactcagacttgactagttataacttctaaataaatgagttgcccatgttttac

SEQ ID NO: 250219 - DNA, 180 bp, Glycine max
ctttcaagaaaaggtctttgaacaaaaactagtgctattaatgtttgtcattctctactccctttgccataagaatagaaggactaactgccggagtgtttttgtgtctctcttctcccttacaaaagactcaaaggactagatgcctgagagtctttcgattcttcccttcccctttga

SEQ ID NO: 250220 - DNA, 400 bp, Glycine max
  unsure (1)..(400): unsure at all n locations
ttaaaactcagcttataaggcgcgtcggagacaaggtcagcgttctcttatgcgaagatgatatttcgagtactttggatttggtacgaccatgctcttctgatttccagctgggaaaatggcgagtggaggaacgcccccgcatttacgcaacaagcataatgtgaacccttacggttttaaaagctctattattgggcctaggctttacagtattcattttgttaacgctttgcgtcttttgtgtttgaaattataatacaaggatctttcttcatctgttcctggtctgtacccattctcattcatttgcatggttacttctttttctaaaacggcagattcgatgacgagtccnccgaaggtactaataccctggacccgcctatcaacttcgagc

SEQ ID NO: 250221 - DNA, 447 bp, Glycine max
  unsure (1)..(447): unsure at all n locations
gaggtccaggaaggataggcgttctaatgaactaattccgctcctgagtatgacagtcaccgctttatgagcgctgtacaccatcagcgcttcgaggccatcaagggatggtcgtttctctgggagcgacgcgtccagctcagggacgacgagtatactgatttccaggaggagataggtcgccggcggtgggcatcactagttacccccattgccaagttcgatccagaaatagtcgtcgaattttatgccaatgcttggccaacagaggagggcgtgcgtgacatgaggtcgtgggtaaggggtcagtggatcccgtttgatgccgatgctatcggccagctcctgggatatccgtaatgctggaaaggaccacgagtgcagtatggccgaggatgaaccggctgatgggtcgatgangcgctatcgctcaatgctatgtatacc

SEQ ID NO: 250222 - DNA, 154 bp, Glycine max
tttttgggtgtgagatgttaatttttatgaattaagtaatgatgttggatttgtttagaaaatgataaaatattttaatatttaattaaaaaggatatttattggatattgtagatgaatattgtattaaatgttgtgaatatgaggtttttta

SEQ ID NO: 250223 - DNA, 411 bp, Glycine max
  unsure (1)..(411): unsure at all n locations
tattctttatcctataaagctattgggtggttctaaacatatcaaaaaacctatagttggtttgcacactaactaactcttaattgtcttacaaataaatatacaatctaagcacttagtcttttctctaaaggtgttcaagatgtctttagagctttttcaaactttacaagaatgtacaaagagctttttacagaagaatttgaatgttagtgcgtaggtttgtatcccgtgccttcaaagcttttaatatttataggccttagccttcaaactcaaggtgtcccatgtcttcaaactcttaatcgtcttaccggcgaatatacaatctaagcactaagttttttttctctcaaggtgtttttagagctttttcaaactntgcaataatgtacanagagggttttacaa

SEQ ID NO: 250224 - DNA, 339 bp, Glycine max
  unsure (1)..(339): unsure at all n locations
cactcatccacccgcgcggaataaaatgcgggtgcgtgactacgttgatttcccaaccattcaaaagatattgcatttgttggctccactatgggagacctactttttcatgaaaatacgacctctggnggctagtgggacgacccaatctaaactaacacctatctctcctgtagtaaccaatcatacaagtataccgtgctataaaatatgaaagatgttattcttgcaacactttgctctagatgggtgaatattgttgagctgtgacatcgtatattacacagcgctgactaactgacacttcattttgtaatctaatgtgatggcgagacagct

SEQ ID NO: 250225 - DNA, 213 bp, Glycine max
tctttttccgtaacgttacgaaactttacgaatttagtaacgatgcttgttttctttccgaaatgttacaaaaccttacggattacgtaatcatccattttttgcctttcggaacataacagaactttacggattgcgcactaacacttcctttacttatcggcatgacacggaacttagcggattgtgctacaaaacttacttttgacttgt

SEQ ID NO: 250226 - DNA, 469 bp, Glycine max
  unsure (1)..(469): unsure at all n locations
cttggtagacctctatcggtcatctttccacgccgaggtttattcttattctcttcgatccatttcgtgaaaatattttctgccgagatgggctaatgttactctggccgaataaatgggaaaaagccatgttttgccgaaacataaaatctgtttagctcgcacaaataatactagccgacctacattttaaatnttttatgcaacaccaaaacaagagaacatcctgtgccggaaaaaaaatacattacatgacagcgagctgtttgaaaaacaaaattgcgcaacgtcggctgaaaaatataagtcggggctttttcacaaccgatgtcggctattgagttttcaatacaatcctggaacgaaatttgcatgatgtcggtaaggaaatgtttcatcggcatcatcctgtgaagtatctttttatgcctcaacagtcaatattctgatcaccgcactggcatttttt

SEQ ID NO: 250227 - DNA, 214 bp, Glycine max
ttctttttccgtaacgttacgaaactttacgaatttcgtaacgatgcttgttttctttccgtaatgttacgaaaccttacggattacgtaatcatccattttttgcctttcggaacattacagaactttacggattgcgcactaacacttcctttatttttcggcatgtcacggaacttcacggattgtgctacaattctttcttttgacttct

SEQ ID NO: 250228 - DNA, 405 bp, Glycine max
gttgattaatcatacctttaagccagattgttttcttcactccttcagctatggccatgtattctgcttcagatgttgtaagagcaacaactgattgttgatttgcttttcaactgattgttgtaccaaacaaagtaaacacatatcctattaaggacttccttgtgtctacatttcctgcaaaatctgcatctacatagcctgtgactgctgcctcgtgtgctgtcttcttgtaccttaaactagctttcaaagatccatttaaataccttagtgtccacttcacagcttcccaatgtgcgctgccaggatctcccatgaatctgcttataatacttacagcatgagccacaataggtctgctacaaacaattccatacaatatgcttccaacaccacttgcat

SEQ ID NO: 250229 - DNA, 342 bp, Glycine max
ggaatctatcactcataatagtgtttcttacccaccagcctcactaagaattagctattttctactcaactgcctttacttaaatacacacttgtttagatcctctatctggatcttaaccctctcatgcaacttctttacaaactctgacctagaattcccttctttatgtataaaagaagtgtccactggaaggggaatgaagtctaaccgtgttaggggattgaacccatatacaacctcaaaaggggactgcttggcggtctatgaactcccctgttgtggaaaaatctactgagggagaactcatccaagacctatggtgcctttcataaagccctt

SEQ ID NO: 250230 - DNA, 210 bp, Glycine max
ttctttttccgtaacgttacgaaactttacgaatttcgtaacgatgcttgttttctttccgtaatgttacgaaaccttacggattacgtaatcatccattttttgcctttcggaacattacagaactttacggattgcgcactaacactccctttatttttcggcatgtcacggaacttcacggattgtgctacaacactttcttttgac

SEQ ID NO: 250231 - DNA, 297 bp, Glycine max
tgaagaggatgctttaatggagaataagaaagagagagctgtgtgtgggtggggagcacaaacatgattgaataataaatggagagaaatggcactttgaagtgtgcctcataaaacttttattcatcaaagttataaccagtgttacacatgcttgtatttatagacaaagtagtctacttgagaagactttttgagaaaacttccttgacaaacttctttgataaaactccatctagaagctagaggttatcttgacacacccctcttataactaaccttaccttcctgtgaagc

SEQ ID NO: 250232 - DNA, 217 bp, Glycine max
gtgattctttttccgtaacgttacgaaactttacgaatttcgtaacgatgcttgttttctttccgtaatggtacgaaaccttacggattacgtaatcatccattttttgcctttcggaacattacagaactttacggattgcgcactaacacttcctttatttttcggcatgtcacggaacttcacggattgtgctacaattctttcttttgacttc

SEQ ID NO: 250233 - DNA, 379 bp, Glycine max
ctcagcttaagcctgaagggaaatagaaactaatgaattgttgttctagccgccgccgagaaacataatagaaatgttaataaaggggacggcgctcaacaaatcggactgagatcgacaaaggcgctatttctttgaaacaacacaataggagactgagttgcaaagaggggttgacaatctccaccatcacttaatggaaatgaatgaaaaaaatgacaagctgttgagcctgtatgatagagccatgcttgagaaggatgacataaaaagaactctcgcatgtttcggacatgaaagagttgaaacccaaggagatatggactgcccaaagaagcttgttgagctgatggtggcgaagagactctagagacaaact

SEQ ID NO: 250234 - DNA, 216 bp, Glycine max
aaaatatctcacaaaacgtatatatgtatgtttaggtagcaagataccttggacacacatgtatatagcaaaatacctcacaaaaatatacgtatgtttaggtagcaaaataccttatgataaaatgagagcgagcatgaatagaatacgacggaagaaaaaaaaatagaaaaaaatgtagaaaaataatataaagttgtctagctaataatcaac

SEQ ID NO: 250235 - DNA, 377 bp, Glycine max
tcaagaatcaagatcaagattcaagattcaagaatctatagttgacttaatcaagataagtctgaaaaggatttttcaaaaactgagtagcacatggattttacacaaaaacatgtttaccaaagaggttttactctctggtaatcgattaccagatagctgtaatcgattaccagtagcaaaatttttttgaaaaagttttcaaattcaatttacaacgttccaattaatttcaaaaagctgtaatcggttacaatgttttggtaatcgattaccagtgcctttgaacgttgaaattcaaattcaaaagtgaagagtcacatcttttcacataaaagctttgtgtaatcgattacactaatttggtaatcaattac

SEQ ID NO: 250236 - DNA, 210 bp, Glycine max
tctttttccgtaacgttacaaaactctacgaatggagaaccgatgcttggtttctttccgaactgttacgaaaccttacggattacgtaataattcattctttggctttcggaacattacagaactttacggattgcgcactaacactttctttatttttcggcatgtcacggaactttacggattgtgctacaattctttcttttgact

SEQ ID NO: 250237 - DNA, 398 bp, Glycine max
tcttttggaccttgaacaagcaatcaactcctctttcagaatcatgctatgtgctcgcgactggtccctttcttcccttcgcaacttgagttcattattgctaccccatagagctccgcgaaatttgttccggccatactctttcttgcgagccctcttggtctcttgttcaagggctcttgcggtaattgcattctcttcccgtaacccggcacactcctttcgaacgtgtgtagcagccaacttgaacttctccttggcgagttttgcctttcctaactcgcttttgagagcttggacttcttcgtcctcttccggtgcttcaaaattctcttcgctgacgacttttaacttggcgagccaatctatacctcgtatgcgaactttcagccattcgt

SEQ ID NO: 250238 - DNA, 457 bp, Glycine max
  unsure (1)..(457): unsure at all n locations
tggtcatgtcatctaagaaaataattctacttgttacaaggaaatcatgccaaagttaaggctacattagtgacttaaatggttacatttgataggatttcatttcacatctaaactttcattagaaactataaaaaatgattatattaaattatttaataagtgtatagtgcacatgttaactcttattattgttttaaatttacgcataccatatgataaaaaattgtactcatattataaataaggtggttaaatctatcataaatgttggttaaccttttatcatatgcggctaactctaaccttatgatattattattcaaaaatcacatgttaacaagaatttctttgtctcatgctcgaaaggctaaacttttatgagtaaagcgtgtgtcatggtttntgagggaataattctacatgtactaagagaatcacacaagttacatttact

SEQ ID NO: 250239 - DNA, 246 bp, Glycine max
  unsure (1)..(246): unsure at all n locations
ccccatattttccaatattgcgggagggtatttatcactgtactatgcccgaaatcaagtanaagtaaaaatttcgattacccacgcccctgtatcaaggagagaattcttatagaaaaaagagagaaggtgtatattcgccgataatttgtgtctttctcttgggagacacttatctcacccttactaagggcggcactctcttctcttgtgcttatttaacctcacatacccccaccactcttt

SEQ ID NO: 250240 - DNA, 391 bp, Glycine max
  unsure (1)..(391): unsure at all n locations
agaaaagatgatgacaaatgtgatgacaaaaagctcaaagatcaatcaagaacaattcaagagttcgagataagaatcaagaagaattcttgactaatgaagaaagtcttgagacacgaatgaagagaagactcaatcaagataagtattaaaaagtttttctaaactttgaatagcacatgagtttttgacaaaaccttttaccanagagttgttactctctgggaatcgattaccagattgttgtaatcgattaccagtagcaaagtggtttgaaaaagttttcatattgatttaccacgtttcaattattttcaaaaagatgtaatcgattacaatgttttggtgatcaattaccagtgcctctgagacgtgaattttcaattctaat

SEQ ID NO: 250241 - DNA, 444 bp, Glycine max
  unsure (1)..(444): unsure at all n locations
tttattggctcacgtgagcacaccatgaacactntatatatttgtttatacggntcgatccacatagttttcacagttaaacaccatttttatatttggttttgacgacgctagactgagtcaaatgcataacaggtccaatagctgaaccagacctacctatggttcgatttccaatccaaccaattggacggatctgatttttgcatcattggttgtgtgtttcgggtggtgttggcttcctttgggtattaaagagacatcactttctggcgaattttaaagtcgtcaggaagtgaaaaattacatgtgttctatcatgttaatacattagctttaatttaattttagagaaggactaattgaactgtattaaaaactacaattatacattaatttattcttttaaattaatgacatattgatattagaataattaaggat

SEQ ID NO: 250242 - DNA, 74 bp, Glycine max
gtcatgaatggttgcttgcaagtgcacaatttcttggaaaacaggttaataggaaatttgggtgaaggttttgt

SEQ ID NO: 250243 - DNA, 464 bp, Glycine max
  unsure (1)..(464): unsure at all n locations
aatgattggtgcttgtcactgtgtatggaagggatggaagttttgggcagattctaatttgaaaggaaaattctgggggcgttctatccagttagatcctgtgggtgtcctcactctacagtttgaggatggtgaaacatttcagtggagcaaggtcaccacttcgatttacaatatcatactaggtaaatattattgtgaccactacggtaccatgcacatcaagggcagtggcaactattcttgcaaactgaaattcaaggagcagtctattatagacagaaatccacatcangtaggattgtaaatgcaactaggactgagactgcatgaattatatgttgtttacatttggatgaattgatagacaagtaatacactctattttcctgagatatattatgttttcccttatttattccgacaaaacatctatctttattctttttttctccccaacttat

SEQ ID NO: 250244 - DNA, 370 bp, Glycine max
tgagccaaaatcctgactcaccataaaccttgacccattgtgagaatgtcaatccttaccctcggaagcgaaaagaatagaagggaaatttccaatcagagaaaaggaaagaaggaagatttccaatcaaagagaaagcaaaaaatgaaaagaaggaaaattcccaatcaaagagtgggagaaagcaaaaagaaaagaaagaaaattcccaatcaaagaatgggagaaagtaaaaaaggaagaagaagaaggaaagaaagctcctgatcaaggatcgaaagaaaacagaagaaatgtgcagaaaggtctttggaccggacaatatctgaacaatacagaattgtcaccaaatgaacaaaaagaatgaaag

SEQ ID NO: 250245 - DNA, 403 bp, Glycine max
  unsure (1)..(403): unsure at all n locations
tgagtgagccttaaaacaaggaaagggaaacaaggctcatataggctatcaaaggaattaattcaaggtaggtccatttggctagaggcttataagaacaaaattacctaaatcatttccaaatatggatgtgaattaagaagcatcaacaagaatcaagccaaggctattgtgcaagcaatcaatggggcaaaacacaccaaaagattataatgatggatggctcaaattctcacaaaggtaaacttatcactttcaaattgagctttcaaaattatcatgacatgtagaggaaaagcaaggatttcaaatcacaaaatgtcaagagactnttattttcaaaacaattacccatttcttgaacatattctataattcaaagaaaaatattgcaagttgtaca

SEQ ID NO: 250246 - DNA, 447 bp, Glycine max
  unsure (1)..(447): unsure at all n locations
agcttgagaccgactataagagatattgcggacatattagctagttgatcattggaaatgacaaaaccagttgtagtttctcttgcgagaacctttntctctaacaaagtaacaatcaattgtgtttgattcttccatgaaaaactatgttggaagcaacatgaaaagcatccaagttattgcaaatcagtttcatctcactgacatcntcccaatttaattgttgaaataaattgtagaagcaaagcttcatgatgaatcaaaggtgattcagatgtgttttgatgataacaatgatgataacaaaagatgatgacaaaggtgatgacaaaaagctcatagatcaatcaaagaacagctcaagtgaatcatgaacaattcaagagttcaagatagaatcaagaagaattcaagactctagagggaagttaagagtcaagaatcaag

SEQ ID NO: 250247 - DNA, 438 bp, Glycine max
  unsure (1)..(438): unsure at all n locations
ctcaaccttatcannaactgatggggacaactttggaagggaacctaatcatttttttaaatctcccgactntgtcgtctggtgcaactagcccttcctgtgttgaaaaattatttaactatacaatctcagatgacaatgtcgagagaataaagggcacaatataacaatatcttaccacaacatcgttaacatatttgtagatgtcatcaatcaagactagcagacgttgcattgatgcttacactcccttctatatcacgacggaatttngtcaactgcggttgccttcagcatatcaactgccattaccagaataaacataatatcagctaaaatcattcaaaatacagaacattatggttccatttctatagaataaatataactgcaaacgatagttacaagatgatactgatacaccattcgcattaagcg

SEQ ID NO: 250248 - DNA, 204 bp, Glycine max
aagatttgttttgttaaataagttataagaggatgctttattggaggattggaaagagatatggggtagcatgaatttgaaggagtaaaagagggatagataaggatctttgaagtgatttatataagactttcattgataagtattaagagatgtgtataaatgagtatatatatagattgggatagttttttgaaaatgata

SEQ ID NO: 250249 - DNA, 450 bp, Glycine max
  unsure (1)..(450): unsure at all n locations
tgaagttaggaatacttgcaggggctagcacgtgatccagagtctcttggagagcgtaagtgctgaaaacactgtcgtcgatttcaaccaccaacacttgcgttgcctttggcaaactcgttgccatggattttcagatgcaacgtacctctaagagactttgcctgtgtcctcgatcactggttgtggtaattaatgaggcgagatacttgggtgctacgctaactaactttactaccatgtggcgtttagcgctggctactacgtggtggagtttattcgcattctaaggaagccgcggatagaagctacaactactgccggagccattgcatcgggttcgtggatcaaacagcatcggactattcgggaatcttgtctaacattactacgtgaaactggaagaggatnctggaccgttataactgcaccaacacgtaattatttctt

SEQ ID NO: 250250 - DNA, 433 bp, Glycine max
  unsure (1)..(433): unsure at all n locations
ctctggtttagataacatgcattagtaattttattagtatgtttattctaagaaattctcaattaacttgtattaatcttaaaatattaatctgattttttaataaaaataaattatctctttaattatcttttgtcctccaattgtatcaatctattatcttatacttattttaaaaaatgaaaccatatcttttaattaaaaaatatcaaattagttnttaagtaacattgtaacattctgtttgttataacaaaatttatgaaagggaacgacgctcgttgaaacttgaaagcaggaaacacttaacaatgatatacattatataagataaatatttgtttttataattcttaaacttattatacataatatttcatattaatatataaattatattcgacatttataacanacaatttacattataata

SEQ ID NO: 250251 - DNA, 404 bp, Glycine max
  unsure (1)..(404): unsure at all n locations
tcttagtctcagatgatgcagctgagtttgtagctacctctttcctcctctaatgactatagcatcatttctggtgctaaactgatgggagttggaagccatcttctcaattaaattcctggctctagcaagaatcatgtctccaagggctccaccactggcagcatctatcatacttctctccatattactgagtccttcataaaaatattggagaagaagcttctccgaaatctgatggtgagggcaactggcatatagttttttaaatcgctcccagtactcatacaggctctctccactgagttgtctaatacccgagatatcattcctgatggttgtggtcctggaagcacggaacatgttttctaagaatactctcttaaggtcatcccanctcgtga

SEQ ID NO: 250252 - DNA, 220 bp, Glycine max
ttactaatgctctcttgctcaagacattctattaaccgaaaaaatgcacccttatacgatcaaggcagctccgttacctagattatttacacgtacttccagggggtatttgttacttacatcccacacatctccttggctaaattcacatacttgcatacccaaagcattttggggtaccaaaaattgcacatgcacacctcttggtattcctaatacc

SEQ ID NO: 250253 - DNA, 468 bp, Glycine max
attacggacacatgatactcagctctcggtgcccttaccaaacccgtgctagagctagagtaatgggtgaagtagaggaggtgcaagagcaaatgaaggccgacatggaggccatgtaagagaaaattgtctcaatgatggaggccatgatgagcatgaagaaaataatggaagccaatgcgggtacaattgccgctaccagcactgttgctaaagtgaacccgatgcccccatctggcctcaaccaaatgaatcattcaaccttatctatggtaggcaaagatttgggaagtatgaatggccccatgatgtgcaaattcaaaacgagcacgccttcccgccatatggcttgcctcccaacttacaccaaccaatgtggcgtacactcccaatgagaatgtcaataactccactcctatacttattgagagccaacaacctcaatctgatcatgcacatgtctcttga

SEQ ID NO: 250254 - DNA, 135 bp, Glycine max
actaaacacttgaccataatttctgtcctcaaacattgatttgatttttaataaatgggccatccatctctgttggtaacctctatttatattgtgtgagataactttaattgcacaatatcaaaagtcttatta

SEQ ID NO: 250255 - DNA, 334 bp, Glycine max
ctttgaaggtttcaatgatggctggggtggtggacttgatccttctgagtttgtgggtccaaccaagcctaataaaccgctagggcttggtggtgttgaattgttgcagactggacctgatgctgctcctaaagcggcgggtgaaagcggtgcaggaactccacttgagaacttgttggtgaagaaaactgacatgaggggtcctgagatgtatatctcggaggagattagtgccgagttcagggaatcgttgcttgctagggtaggtttgatgggtgttgtttacctcagaactttgccacccaaaaccactggtgataagggaaactgaatt

SEQ ID NO: 250256 - DNA, 395 bp, Glycine max
actataaaactaagcttacatacaaaaagtccttacttttcttgtttttattgacttagaagagaacttaataagttagatttagggtttactattttagtagtagttaacattcttggacttttcacatgttttgcattatgtacattgtactgaggtacaggaaatacatacacttttcgctgagccaaatctaattcgatcgggatctggattctgctaagctagccaaggctaagctgagctgattcaatcttgattttttagagtcagaatgcactaaccatgttgcaggaagtacatacacttctgacttgctttatgaggtacaggctgaggaaccttcctcttctcctaacctaggtcctcccactggtcaaccaccacccacacca

SEQ ID NO: 250257 - DNA, 391 bp, Glycine max
ccaccacaaatctgtatgagtgtatcatctctcatcactttctctatcaccttgctgcaaattcgtatgcgtatgatactactggttagttgcatatattgctgcagatcttatttgtctttcatcacttccatagccaactggtatcaatagctctaagtgctatcaaaggaaatcaatatcctcctctgaatacaaagatcaagctctgggagtcctggatctggctctttcgctgcttctttgcgagcaacatcattccaaaaatcatcgcaaacacacatatggaggcataattccatggatgaacacactcatctgtggctcacaatatcaacattgtgaacaacaactattgggccccctgctactcatttggaacaagagcgct

SEQ ID NO: 250258 - DNA, 414 bp, Glycine max
  unsure (1)..(414): unsure at all n locations
tctatctgtttccttctcaaaccagcatcttcttgtggagttcttttcagngaagcatcacaactctaccctcacacacacacacaaaaataaaaagttaagaacaaatactttcatatataaaaaattaactgacaaaaaaaaatgaccaacatgcaccttgcaaacacagaacaaaaaccaagcttaattacctgaacagcacagtcatggaagatgttcctgagccaggagaaagcagcgttcttgtggcgcttgtagagaagcttgacttgatctgtgatgatgtattcagcctgagggcatgattccttgtagaagttcataacaaggccattattttgcccttctcccgcaacagaaggactcaatgacagtgctgaaacgcatattaacacagccagaaaggtaaac

SEQ ID NO: 250259 - DNA, 170 bp, Glycine max
tatgatgcacaggaataccatgtgtgatgaataaactattacaaaagcttaaacaattaggcaaagacacgcgaatgggtatatattatatttcttaacacgccttcctaggtagattcctttcggcttgaggcgcggacactgcacaggactacctacctagtgctaaa

SEQ ID NO: 250260 - DNA, 413 bp, Glycine max
  unsure (1)..(413): unsure at all n locations
tacagctgtatgaaggcacttcctcttgtttaattaatttgtttttgtctctagctccattttgattatgaattatttaatactgagtcgttgatacaattatctgggttaggcccggctatcactgtcttccaaatgcattttaacaatttccaccatattagtttgaaacgcataaatcttatgctcttgaattttggatttgagttaaatactttcatatcattctattgcgtctgttatgaactgtggtcctcctgattgttaaaatgtctttaatgtgtaacacgatgcttgcatttcctgagtagctgctggtgatcattcaactttcatgtatctaagaccagaatgctagaactccagataaattacctcacaattttcgacaaatcataatcactnacttgaca

SEQ ID NO: 250261 - DNA, 416 bp, Glycine max
ctaacttgaatacccatgtcttgcctacagccttgttttctaacaataaaagaattggcgtcgtttggtcactgactaactcttaaccgtcttgcgaactaatataccatctaagcccttatctttttctctgaaagtgttcaaggtgttttaagagcttttcaaactatacaaatagcttttactaaagaatttgaatgtatcacgttggctcgtaacccatgtcttcaaagcttatggtatatatagattctccacaactgattggtggctctatacgaattgagttctttacttgatcttgcgtctaaagaatgtggccattggagctttaatacttccattaatgcacgtactccttatactagatatcactctagtagctttctgcaaaacttgtggatcatttctttcat

SEQ ID NO: 250262 - DNA, 340 bp, Glycine max
tgacgtgagaaagtgtggaagagtcagtcttcctacttttatttgttgaccacaaagtggtacctggagatatgtcgcggtggtcaggagaccttggggacgtcaggtggggtgctattgcccaaaaccaagcttgaccaatcccgacccaacccgggcatagtcagtcagtgagaacttgtgacgtacctaaataggcgagctcctagcagtcaaccaataaaagaacaaagaccacatgtggatgccaatcctagtgatagaggcgtcatcatctgaagaagaccctgatgaggacccagaggagttacctcccgagcctgttgtggatgctcttgac

SEQ ID NO: 250263 - DNA, 466 bp, Glycine max
ctagagcatcgccatgataaggtctatggaaggtcctgtattatctggagctggtggtggagcacaagagggtacaaaaaggtcctgacgagtggatgaagaagggatctcaactgctctggccctagccttgcgagatcttggaaagtagaccgaagtttcattcaggttccaacaatttgtcatgatatatgccaaattaatggttgggctcagggattcataagagagggaataagaaatgactccttttgccttacagagagctgtgatcaaggcaggaaattccaatctataggagttggactgagcaatgaatgaaatttgtcctgaaattaatgctccaatgttcatgtccatccctatcaccaacctatgaactaactatgcgctgtccaagttcatgtcagatgtatgagatgtatgggcgaggttagaatatgatagcacactacaagtctgtact

SEQ ID NO: 250264 - DNA, 210 bp, Glycine max
gatgtgttggaatactgtgttgttataaatgaatatatttgaaaagtttaagtttatatgtaaagactagtgaaatgggtatatattaatatttataacaaggctctatgaggtagatttttttatgctagaggggtggacaatggcaaaggtttactctacttttgtgctaatgttaaacttttatttatttgtattagatgatagggg

SEQ ID NO: 250265 - DNA, 299 bp, Glycine max
aagctagtgttacacctgttcaatatctaagcttaccctcatgccaaaatacatgaaggaagaaagctttcttgagaagcttccttgggaagaaagtgttacacccctccaatagctaagctcacccccatgggaacacgcatccctccaatagctaagctcaccccccaaaatacatgaaaatacaaaaaaaagtccatactattgagactactcataatgccctaaaatacaaggctaatatcctatactaccaaggtacccttaacttgtagggtagggtgcgattaatttgtagg

SEQ ID NO: 250266 - DNA, 435 bp, Glycine max
  unsure (1)..(435): unsure at all n locations
tgatgcttgctttggactctnggaagcagtcgaagttggtctattatttctcgacgtttatattttgaccaatgtatttccaatatgttttgttatattacatgatttcaatttattttatcttttcttttctctctcttctttaaggttgatgtattgtattctccaagctaaaagtgttttttaacacattccagcttgcggcgggtattagacacaattaatttagttagttattagaagttatctaagtaaattagttggttactcaagttatagttactagaagttatttgagtaagttaatgttgggtactcaagttagttattttctatctttgtataatacatcaattttgtaatactctgatgaatgaatgaattgaatgaatcctcaaactactattcatctatctctcatttctttcaacctaa

SEQ ID NO: 250267 - DNA, 386 bp, Glycine max
  unsure (1)..(386): unsure at all n locations
ttacttcattggcttcagtagtgcacgatctactatcagaggattttatattgcctaaaagctactatcaggccaagaagatactgtgtccgatgggtatggagtatcaaaagattcatgcttgccctaatgattgcatactgtataaacatgaatttgaagaaatgtcgaaatgccctacgtgtggggtgtcatggtacaaggagaatgatgatgacgactgcagttntgatgaaaactcacagaagggccctccaacgaaggtgttgtggtatcttcccatcattccttgggttaagcgtctatttgctaatgacgacaacgcaaaagatcttacctggcatgcacatgggagaaatctgatggaatggtccgtcatacgactg

SEQ ID NO: 250268 - DNA, 485 bp, Glycine max
  unsure (1)..(485): unsure at all n locations
agctttccaaatcttaccaagagtgtactctctgatagttgatttcttttaagtgctcaacgactactagtggtttaaaacattatgattccagatctcaagagataccaacttgtgtttaaacattcttaacttggtgtattgattacacaatacttgtaatcaagcattgtgttatcgattaaccagtgtcctaaatgctttaattttcaatattcacaactgaagagttaccttctgttgatgtgtggtaatctgatacccgtgactgatctcnaataatacatttccataagtcacagttactcaagcgacttgtttttgaagatactttcaaagtcttcactttttaagtgactagttataaacaaatttgccacgaggcttaatcttctgacttgagctatcaagagattataagtatgtggccatggcatggatttcactaatcattatctatcttcaatctctctcacatcttcaat

SEQ ID NO: 250269 - DNA, 321 bp, Glycine max
gctatcgatcaatcatgaccccggtggaccaaacgggtatttgttttctattcttgcgacataaaccttttgatatcacccttgacggcgtataccattcacgtaaacagttatcgcttaacttatgaactaaatacaattccaccgaacgtgtgaattggattatccaataacatagagcgacaatgaagtctgaccgtacggtcgagccgtagccacgctggaaataaagaaaacgagggaacactagtaatataataagcatataaacatcttttagtgaaataaagcggaagatcaatcggacgacatctctttggg

SEQ ID NO: 250270 - DNA, 218 bp, Glycine max
aaaatatctcacaaaacgtatatatgtatgtttaggtagcaagataccttggacacacatgtatatagcaaaatacctcacaaaaatatacgtatgtttaggtagcaaaatacctcatgaaaaaatgagagcgagcaagaaaagaaaaagaaggaagaaaaaaaaatagaaaaaaatataaaaaaataataaaaagttggctagctaataaacaacat

SEQ ID NO: 250271 - DNA, 362 bp, Glycine max
agcgatcgcaagaacaaattctgtttacgtcagaaagatgataaccatgaagatgatagaaaccatataaaaccagacacacgacgaacacggtacactgtgctggttataagagcacgttgaattcgcagtcaccacctaattataatgcatagacacgctcctgaacaagcaagaactagaaaaaatcacgtatttttcaaaaaccaaactcgttaatacttgcaacccgatgctacagagcaatgggtataaaagcctatcctaaaagaactcttgttaatggagctacaatctaagcaggcaattgaagcagcataaagtcaacacacagaatacacacactttcaaggtattaatca

SEQ ID NO: 250272 - DNA, 456 bp, Glycine max
caaaaactagcttatcgtgaccctctgaagatatgcctagactatattattattcttataacaacataattaaaaccagaacttaatctgcggatccctcttgtgagactaaattttgatcctgcttctaacaagttctaaggcaacagtacatttcccaatgctacctaactatgcacacaaattggtgatcagaccacaagtatacttacattaagcacttggaggaagcattgaacacagaaaacatagtcaattagatattaggtatttacattagctattcattagaaatccccaactagggtgtttagccagccattacataagaaaccctaacaataataaacttacataacctaggtatctctacaaaaagttgctctctcgctgcctctagagctcttttcccgaaataggcattgaggtgtgctcttgaatctgtgccaatcatct

SEQ ID NO: 250273 - DNA, 337 bp, Glycine max
ctagtgcacaaatgactgcactggttatagaactgtcttctgtatgcggtcatatgaatgctttgactgtcgtcacatggaaggctttctaatttctatatcatgttggcagatagttgaaagcaggagggtgctgaaatggacatattcatatgggtgctatttacctgagcatgaacatgctataaaacagtgctttgagtacttacacgggttattcttcaactcgaatttagatggaatatcttgcatttgggcagttccctacaaacgattttttccctacagtgaggacaattggttggaagactcatcaaggctgaaagaacacgctatt

SEQ ID NO: 250274 - DNA, 424 bp, Glycine max
  unsure (1)..(424): unsure at all n locations
ttagcatgggcattgtgttcatccagcatgtgacttaatctttatacaatgtcgggctgaattccagaatgttgactacaaaaatgaatattaaaatacattcataactgtaacaaagtattatgcgtcaatgattacttttttggggaattcaaataaaggattactacctcatgacattaattctattttaaacttcattttctgtgtcaaagatatatagttgtgcaaatttacgttgttttccaggcattggtaataggttgcctatcctgtggcatggttgaccatgtatcctaattgtatgaggtcctctggaatcattaattgattngtctagtttaataccagcagaagtaaaggcgaacatcatggtatatgcttgtatgttatgctgataatttttactatcaatcgtataatc

SEQ ID NO: 250275 - DNA, 492 bp, Glycine max
  unsure (1)..(492): unsure at all n locations
gacactatgaaactcaagcctatgcgcatacttctntacgaacattcacttgcacatgacatttctcatactaacgagaagatgctcaccatagttcaatacaaggcaccttcgtttacctatattatttatatgtacttccaacgtgtatttgttacctacatctcatgcacttccttggctaaaattacatacatgtgtactcaaagcatttggggtaccaaaaattgcacatgagcacattccggtatttctaatacttatgcatataccaactttgtgatgaatcttggctatctactcaagttttctttatcccaagtgtttgtactacctaaagccgcatgcaaatacaagtatattttcttttgccgactataattgtattcaataataacacgtatgtttgtaaggtattatctttacataacatgcaacatatttatatattttttgtgagacatttctactaccacaaattatatgtacata

SEQ ID NO: 250276 - DNA, 489 bp, Glycine max
tattcataatcatgggtcaatttctcttaacgggaatattcatatggctatatttcaagtgaactccagaataacgatttgttttatgtaccataataagaataacgaattattctctttaatttaatagcatttaatatgattcataaaaatataaccaagaaagaaaagtatgaaaaattgagtatgaattaacaacacacaatagctttagtattatatatcattatttaatcataaatcatcgtcaataataaatcttaaagttttatattaactaatttaaaaataatattcaccctaataactcacttaagtgttatatatactgcatatacaaatatatattttggaggctagaataaatagataggttaaatatctgcttacacaccttcatagatcacaatactgtcattcacaaagaaaatatagtaaatactcaatatactgaaacgttacctaacactacacatgtcacagagatat

SEQ ID NO: 250277 - DNA, 392 bp, Glycine max
  unsure (1)..(392): unsure at all n locations
tcttatccaagactcatcttagtggtgaagctccttcttccatggtttattccctagnggatggcgcctcctctcaccttttctcttttgtctttcgctgcatctccatggtggaaaatcaccattaaaggacctcattgaagctcaaagatccagcctccatagaagtcccacaagcaagctttcatcaagtggtaatcaaagcacaagagcttcaagtaggtgttccttaaacctccattaattttttgctttaccttctcttccattgttgattcttcattttttctccatgtatctcctcacatgtcttgtggtaaatgttgttaacatgattctttagagtttctaccgattaaacttgctatagaagctagatatgattttctatg

SEQ ID NO: 250278 - DNA, 349 bp, Glycine max
  unsure (1)..(349): unsure at all n locations
taagcttctctggntatcttttgcattatgtgatcaaaatttgtgtgtgcacaagctggcccctgttgattccattccactatacggctaagcttccaaaggccaaagccattgttgatgatgcattgaactctactcaaaaaaggaaaaaataatcccattgcttctgattcttctgggtgggcatagaaagaaattaccaatcacctcattctattcaacctgatacataatagaaagaaaaaaaaagtgtgattctttagaacaatgaagagggtaaagaagctatacccatttgtgtcgctcctacccaacaggcctaaacctcttcaaagtttcatggctgtga

SEQ ID NO: 250279 - DNA, 219 bp, Glycine max
aaacagaaacttctatccaaattattaaggaccaaaaccatactcaagatatagcacacgacaagactttgtccaaaagaattcaagatgcaaaattatgtctctcgtgaaacacaaatattatcaggaaagctttaaagcttataatagaccaacctagaaacacgttaatataaaatatcctcacgttccaccaataaaatattacaccatatacat

SEQ ID NO: 250280 - DNA, 322 bp, Glycine max
  unsure (1)..(322): unsure at all n locations
tacgcacactatnaatactcaactggctatgacttatacatacacccaatgagagaaatattgtctgtatcatattaagaatgacgataacttagctatttgaataaaggacatgaatgaagcattgctacctctatgaaacctttcatgaaagtctatttcatctacaaatctcctgaattcaggttttaaaaccctccaaaaagccttaatgaaattgaaattaaattcatcgggtcccgggcatttgtctccaccacaactccaaacagcctacttaatctcttgtgcagaaaaatgggaagtgatcccctttctttga

SEQ ID NO: 250281 - DNA, 78 bp, Glycine max
  unsure (1)..(78): unsure at all n locations
aaaaaacanaaaaaaaagacgcagacagtatcaaggagacacgaaggggaaaaacagcacgaccacgaaagacaagaa

SEQ ID NO: 250282 - DNA, 148 bp, Glycine max
ggaggaacagtgattactgcaatggtatacatttgcggggctagtgttttttgcgggcaggagactttgtcaatttattgaaatatgaacacaggaaattggtggagtaaggggatattatatgatcacagaaggcggaggataaaat

SEQ ID NO: 250283 - DNA, 212 bp, Glycine max
gttctcttgcacaaaacattctattaaccgaaagaatgcgcccatatacgatcaaggcgcctccgttacctagactatttacacgtactcccagggtgtatttgatacttacatcccacacatcgtcttggctaaattcacatacatgcatacccatagcattttgggggaccagaaattgcacatgctcacctctcggtattcctaatacc

SEQ ID NO: 250284 - DNA, 386 bp, Glycine max
ttacactgtggcaatgaggtgcaccgcgcatgatcctcaatgtacataagggccgatcaaaagatctcacccatcgatgtgtttaacacaaaaaaggggggacaaaccctaggatttcaatcgattgattaaacatcaaacgactccattgtcgtcactccaaaatggtcaaatgactaaatcaaacagaacacacactctgagggagttctccgagagatttgcaaaagataggataaaggtgcatggactatcacctctttcaaaaggacagtcaatttgtgttttccaaaataaataaaatccaatccaaatccaaatcacaaaatatggaaagaatgtcatgaacattgtacaactttccattacattccattgtgtcatat

SEQ ID NO: 250285 - DNA, 307 bp, Glycine max
  unsure (1)..(307): unsure at all n locations
aagtttaaatattgatataataggatgaaaggatgaaagatatttgtggggtggagagagtaagtgaggaaaaataggagtaggaatattaattaagtatgatatgaagtatgaagtatgttagtgtgagtattgatataaggtggaattagtgaatatagaagtgtgttntnntnccggtcaagaaaaatttattatgactttaattttattaagattggaagtcacattttaatattataaaaatgtggtattatgtcaattagctaagaattatgagctggttaagtaagagtttgtggggatg

SEQ ID NO: 250286 - DNA, 379 bp, Glycine max
  unsure (1)..(379): unsure at all n locations
ttgaattctagtacaacaaactccacaaacatattctaattctcatgcacgctttacattcaaaaccggagagttagattcctaggcatgagtcatccttttggcactttagtctagcttctacaaactacccacacactcacaatgcgcacaatntatttcgcaagctaagttcctcaaaatcatgcgcaaatgcaattgaggcatttcaccgaacacttggtgggcgcatgtgtaagcatgaaaatcaagggaatggnggcaatgtggcatgccccattatctcataacgcaccctatgccgaaggccatcctctacaaccccttaattcaacataaacaagcaataaatctaggataaatcccctcacgtttgagc

SEQ ID NO: 250287 - DNA, 455 bp, Glycine max
  unsure (1)..(455): unsure at all n locations
aatgcatgtgatttattacacattcacataaatcaagccacggatattgtgcacgccatcaatgtggccaaacacaccaaacgattatgatgatggatggctcacattctcacaaaagataactcatcactttcaaattgagctgtcaaaactatcatgacatgttcagaagaatcacggatttcaagtcacataatgtcaagaacttttatttatacaacaattacccatttcttgaacatatcctataattcatagaataacatgcacaatcttacctgcacacaaaattgacccaaaatattatactataaatgccgcgaaactaactacatttacagattaccacacctacaaatttactaaaccacctaactaccnaccaagagacactcctctcctacttaacaacacattgttctcttgtgccaattaaagatataaacattattctc

SEQ ID NO: 250288 - DNA, 322 bp, Glycine max
ccccctaactcactgaagtagccaaacaaacgcagtttctagatgatcctaggcaagaaaggctgagctaagaaccatcactcggggaacatttatgggaaccaaaggcccaatgagattgagctgaacagtcgtagggtcttggggctctagagtgagctcagcttaaagggggaaacatggtgtggacacacattatgacacccttaccacgcggctaatctaaacaagagtgagttatgaatatattagtaataaggccgttggaaaatgaggacaaatgctgcccgaaggagcatgtggagaaaaaaaatggtggaag

SEQ ID NO: 250289 - DNA, 261 bp, Glycine max
ttgtgaatttttttttatcttgcccaagttcagggaggtcgagacccactattgtgtctggctgtgtgttttgtgtgtgactgtggggagacattgttgctggccgccatttaaaaagtttgtgtgtgtgtggaagataccattagtggagttctcacggatgtctgcgtggaagatatgttgtgggtattgtgtgagtagagcatgaagttcccaacttagtgtaatgtcaatgtgcaagcaagctgtgggcacaagact

SEQ ID NO: 250290 - DNA, 313 bp, Glycine max
  unsure (1)..(313): unsure at all n locations
ctgacatctcaaacaaacaaatcaaacgttacaagacaattatagttgctggttgaatacctcacccactcaagtgtatcacacaattatggcttntctctaatgaaacactcttgccttttaccactctaattccccttgagttcttaggtaattcaagagattatggccacaacaaagaacaattcaccaatatgtgttagggaaggctagaaagacaaggaataggttaaccaagactaaggctaacaattgttttatgcacaaatgaaggaaataaaattcagaatttaggaattcaagtaacaatcct

SEQ ID NO: 250291 - DNA, 443 bp, Glycine max
  unsure (1)..(443): unsure at all n locations
tgcccaanacccacacagtttaagtttcaatattttacatattacattacantttttaagaactcttcataataatctatatttacaaccctctctaatgcaccttgaaaaatactcaggaacaaagatatttttaatgaagatattattattggaataaaaaaacatgctagataagcacaatcggtatacacataagttcaaaatggcaagggacaaagtataatcttcacctgtttgtgacctcaaactaaaactcatatgtgataggaaatcagatggaagattatataacttgccanatactgctgaagttgcttctttgattgctggtgatgagcatacaagtcataatagagatattatcattgaatagcaatcacgaaggctcaaaagaataaatgaattacatcctacatatttgtctttgcatatcccctact

SEQ ID NO: 250292 - DNA, 271 bp, Glycine max
gctgcgttataacaaaaagcaaattttatttggtgttaaacctacagactttggatggtaaaatcaatctgcgatgaaagtccaaacataaaagctgctaagggcctaaagaaatgtataactggcaggatcacataactatttcatttcacaaaagccaagatgcaaaagtcaatgccaacagcgggtattctaaggctgattcacactttgcaggtaatgacccatcctggtgcgccatcttcttgggtcatgtgaatagggactaact

SEQ ID NO: 250293 - DNA, 372 bp, Glycine max
  unsure (1)..(372): unsure at all n locations
gctttgttgtgcaaaggaagaacaatagtcagccacggtcaaataaatcatatgaaanaatattacgtacaaagataggagagaacagaacccatanatcattttttggccaaatcaatcaaagaactgccaaacccaacaaaaaagctccagcctttgggtacgtcggagaaggctcangaaaaccaaacaatttaaccttttgtcctgcgaaaagtcattataacacaaaacacagacagaanatacaaaaaaattgaagcttttgtgttgcaaagaaagaacaatagtcagtcacgggtcaataaatcaaatgagaaagataacgtagaaagataggagagaaaagaacccataaatcatttttcggat

SEQ ID NO: 250294 - DNA, 224 bp, Glycine max
atgggagttgttgaaaatattctatgcctggagaccaagagggatcaagtatagaagaagttctttttgtgtcagaaggaatacatctgatgaagtgtcgaattggtttgggatgaaactcgcacaaaaaaaagtatgtactcctctgacaatgtccattcttctatctaaactcaatactactcagttagaattagagaaagaatacatggctcatggtccta

SEQ ID NO: 250295 - DNA, 414 bp, Glycine max
ttcatgattcacagcgcactcatttggcatggaggactcacaagcctcactttgctactcatgatgggcttcaagattatactctttgaagttgggaacttggggatcggtatatattgtacccgtgtgtggcaatcattcctaacttgcatccatgtgggtgtgaagaccccaatacttgggaagcttggtgccttgtaagccttgtatgtgcaagtggacagtatttgtgccactggattgcaacgtgtgaagatagatttaatgtgcaaagtgattcaccatggtaatctatagcattctgcaagatgatacatggctctagaaccgtaatgtgtttctacaaagcctatccatggtatgaagtatatgttatatttattgtgggttgggacaaagatcccttcaacaaac

SEQ ID NO: 250296 - DNA, 240 bp, Glycine max
  unsure (1)..(240): unsure at all n locations
gagctgcagctngacaatcaacgaataaatttctcgagtcgatgatctctaatatgaaaccgaaggaacccactctgacaatcaacacataactttatcgatgtctattggtccataattatcggaacgctcaaaaaaaaccgaagcttgacaatcaacgacataccttttaccggaggcgatgagcccgcataatcccacctcgaaatgaagtgaactctgacaatcaacaaataactt

SEQ ID NO: 250297 - DNA, 373 bp, Glycine max
  unsure (1)..(373): unsure at all n locations
tctacattcaatatcgagcgcttcgatatattagaggatctgtatcatacatnccgagtaaaacagttactcgtagctttgtaagtctgttcagtagctatacgcgattcaagtctcgagccgtctcgatatatctacgagactcaattagacatccgagtaaacagttattgtcgtttgaatttgcccagagcttcggtattctatttctagcctctcgatatattactggactccatcagacacacgagtaaagaagttattgtccgttgaaattgttcaaagctcggggaatcaatttcgagcgtctgcatttattactgggacatattctgacatcctaacaaaagagtattgctgtttgaatctgctc

SEQ ID NO: 250298 - DNA, 357 bp, Glycine max
tgcagatgcagctgtgtcgactttcactatcgatggtgaatatatagctgcatgaagttgttgtgatccactcatccaacacaatcaaataacacaagagataccttaaacatcatatttgagttatcgacaatccagtgcattacaaatgtagcgatgttaaaaccattctttctagtagtgattattactactgcatagggtacatttgtccttgtgcgaacactattttacgcatcacatgtaatgtacttcaactaaaaaataagtttggtatgttaaatgtttggagaagttgctaatatacacacactcgatttctagttcaagtgcattaacaacttataactaaagatt

SEQ ID NO: 250299 - DNA, 438 bp, Glycine max
ctcaaggaagtgagcatagttattatacgggtgtggtatctattctctatcttctcagggaagttctctcacagaagcatctcaaggaatgtttctcacgaaaacttctcaggaagctacctactctataaatagaaacatgtgtaacacctgtacgaactctgatgaatgagagtcttgtgagacatacttcatagatgcatatctctccctcttttattccttccaatttcggcaccctctctctctttctctccctctatctattcctccattgaaacattcttccgagcttcttatccaaagctcatcttggtggcgaagcttcttctttcatggcttggttcctaaaggatggcgccctcctatacctcttctgctttgtcttccgctggatctcacatgcgtggaaatcaccattaaaggacctcgttggag

SEQ ID NO: 250300 - DNA, 293 bp, Glycine max
catggtggagccaagaggatatgaattaatgggggagccaatcatgaagccaagcattaatgacatcttgcctggcgattgataggaagaaagacgatattgctgcatgcaagccatgggaaaccaaaaattctactaacactgaggacacaagccaatagtatcacactcaacaaattcatgcagaaggcatatgtcttcataaaggcaggaactgaatgcacactaagaagctctgacggatcatgattattggctaataaagagaaatgtgacggaatctctaggcatct

SEQ ID NO: 250301 - DNA, 310 bp, Glycine max
gcaaggctacctgataatcttgttttcttgactgtccctcctgttgaccctcagcttaggaaacctgattcccttcttagaattgggttgaattttgaatagggggggtttgtatggaaacagttgtggttgctatagatttgcctctgagacttgttggaatgtgacatctgagaagtttttcaagtctagcaaaaaaattaaaaaagaagctagtgtgataacttaggaaaagagattggctccttgtaatttcttactttttttttaaagctatcccttcattcttgataccttcatttcaactgct

SEQ ID NO: 250302 - DNA, 242 bp, Glycine max
tatgttgaataattgattaatgttcttctctgatacaaaatctatatcagttgtgttttttgagttttggtcactatcatcattaataacattaattaatttggagatacttcttgctaccattttttatgtatcttttgaagttcggggagattctgggatgactcttaataaactatcaagctcggttaataattcactattattatcacctacttcttctagtagagacttgtgtttct

SEQ ID NO: 250303 - DNA, 440 bp, Glycine max
  unsure (1)..(440): unsure at all n locations
ctctcttcctaagnatcactctctctcaatattgtgtattgttttgttcaccgtgtgcgtgcaactgaacctgaacaccctttatatagagaaaggttatacaacaagacaaaaccccttcagtcaagaacaagaaaattactgctcctgtactctgtcacagggctgacctttacaaatacatttattacagataagctcaatgtctaatctagcaatagtaaagatacatgcctttgattttaccttttctttatgcaggatacattggtctttaactcttgcttgccttcgtaatcgtaacatcttcttcatcttggatatttccagaacagaaaatgtcagatgaatcttccattgagaaatcagctaaaaggaaaggaggacgttgttgaccatggcatccgctggcttcataaaactcactggcgtttttctct

SEQ ID NO: 250304 - DNA, 103 bp, Glycine max
gtgaaataccatgatatcaccttacccttaaggaatattggagctttggaaatgttctgggaataaactgtgaataagtgtgtgcgtgtgtgggggggggggg

SEQ ID NO: 250305 - DNA, 436 bp, Glycine max
actatagatactcatagctgtgcaaatcaagtcactcccgcattttatctctagcatgcattgtaagcggggcgcgacctttgtcaccggaagccggaacgtccatatcaccttcctaattgtacacatggggcactgcaccctcaaatgcgcaagtaagaagagataattttcctggctctcgtgtccgtaaaatgcattcatatcatgcatcgcatgatcatctcttcataacatcataatggacatattctgcattagtgcgttataatattccatcctcacattttgcatgaatcatggcatcatcatgcatatgcggtctacaaactttttgatctgcaaaatcgcataccacttattttcatgttagctcattcttcggtgtactctacaaacagtaacaaaaaatggggatcagtgaaacttccactac

SEQ ID NO: 250306 - DNA, 443 bp, Glycine max
  unsure (1)..(443): unsure at all n locations
atcgattacaatgagaccgnaatcgactaaattagagagttttaacctctgaagaaaatttctaacttagaaacttttcttcacacacactatgatgacaatcgagataacaacttatacaaatgccaagataacaaccaagtgtgtgtgaagaaatagcaagggaggtaggcatggtaaagccaaaacttctttaaagcttcttcaagctgtttcttgagccttaagatatagcattagggttgttcaccgtttgctcatggttgctcccctatctctaacaatctcctnctttttggctntgatgatgccaaacttgaatacgacattgagtacatttgaagagtcttgagaatggatcggagacatgatccttagtcttattctgaatagttcttaacacttactcatcatatatgtcaattcatcatcatgaatcatat

SEQ ID NO: 250307 - DNA, 360 bp, Glycine max
gcttctcagggagcttcttattctataaattgaatcatgtgtgacacgtagtgagactctgatgaatgaaagtcttatgagacacttcatagtgccacttatctccctcttttattcctttcatggcgcgctccccctgcgctctttcctttccgccatgaaagccattctcttcaagcctcttatccaaggcacactctctggggtgaagctcctgcatccatggctaattgcctaaaggatggtgccgccccctttccgtcacctttgcttccactgcatttcatggtggaaaccaccattgtaagacctattgagctaaagagccgcctccatatatcttcaaagcagcttcatcag

SEQ ID NO: 250308 - DNA, 446 bp, Glycine max
ctgcagcttctcgacgaccttggtacacgttctcgtgtcgcatatagctctctagctctgtatcaccaacctccttaccaagccgagctgtgtctcatgtgccataatgtagctccctcttggaatgacctgcacacaaccccaatatgggttgttctcaaccaacatcctatcattaaaacaaatcgtagagttttacatatcttcacatgcgctaagaaagtctcttatctgtcacaagagcaaaaatgcgaagcctagaaatgcatctgctttagctacttggcaattatgagacaaactactatcaaatttaatatagagtttaaacaaacacttaattcgacaataatgaaggctgtaaaaaatactatatatcttactaaaaactgattatatccataaaatttaatattaatcaaatactccactttatgaccagagag

SEQ ID NO: 250309 - DNA, 410 bp, Glycine max
agctgcaagttatcaaatttttgcacatataactactaactgacctattctaaacctattcattaatcctactaccaacaccaccccaatgaattcatgcaataaatcatacaccctgcactgaatattctcaaacatttccttatagccacaaacacaattctttcatgtatcttaaccctctcaatatatctagtgatccactaacaacttcacatgattatgctgaaacgctatttaaacaattgtctataaacttgggctagaaaacatactatggaacaagagagaatctacaacaaaaattcggccttcttttttattgaaaagatcaatctattgtgtggactaatgttcatggtcctatgtgggaggtaccaaaacattttgataagaacactctcaatttt

SEQ ID NO: 250310 - DNA, 389 bp, Glycine max
  unsure (1)..(389): unsure at all n locations
cggattcaaggcgggctgcaacaccggctccgctttcctaactgtactggaggcggttgcggtggctttatcctctatggttntctggagttntaacatgacctccgagatggaagccatttgatcttttaaggccgatagatcggccttcatctgttcctgcacgccctcttcattatccatttttctggatcgagtgttataggggtgccttgcgtgtttcttagttatgatgaaattcctaaagaaataaacaacggtgagtatgccaccaaaacatgagtatgcaaatggatgatcggagcacttggatccaccccaagattttagaatacgaatgagccagaactctcatttataaaagacaaagcttatcngtaaggtatcaa

SEQ ID NO: 250311 - DNA, 477 bp, Glycine max
  unsure (1)..(477): unsure at all n locations
actgtgctatcctttaactatcgtaaacatttgtttggttagagcaatttttaaaggattatgtctctttctgtttattccacctcgtctacctactccatagctgctcctgtctaaggagcgaggattacgtgtctagaactggaagcgctatttatcactataaataattaattttaactgagggtgtcattaaaaaaaaagagaccaaatgaatgttacaagaccacgtaacaccggcgatggccagaattattgagtctctacttgtaaacacatgcacaacactgttcattatcttattactttntattctgatctatctctcctaagcggaacgctatgagttacaccataacattctgtggtacatttatgcaaagcttatgcccacatacacgcgataaataaataccccacagaccgctataatataaaggccccgtatgttggtacgttttgtctgatactcatatc

SEQ ID NO: 250312 - DNA, 217 bp, Glycine max
  unsure (1)..(217): unsure at all n locations
ctgcagctntntttataatatactttagaagttaagtcgcattactgtcacgtctcaatatattttcgcgaaacaaaaatgagtcacgttagccaaccattatagaatgttgaaggacggagaatcatgaccatgatgagtattgaagatctacctcttcttaaagaaatcgtagactatcgttaaccttcctatggatagagcccacatctctcta

SEQ ID NO: 250313 - DNA, 421 bp, Glycine max
aaccaactgagcttgaaaaactgaaagtgtcggcttttttcctcaactccttgagcggcacttgtataggtgtcatatagaatgctgcatcttagtccatatcatatcttttgtgtatcgtgcatcattatgagtaagtgataagaaaaatttctaagttagaaaagttttttcacaaggcaaaactctgtttaatcaattacatccttacataaatcgatacataagttgtctgatgctgtagagtatatctcgaattatttaataactacggccttctcgaatcaatacacaggttttgtttgagacatgactaattattcacgagctcttattaatcgatactttcgttctataggagtcagaagtgaaaataacctctatcgagtatttgagtatctaatcatacattatctgagtg

SEQ ID NO: 250314 - DNA, 446 bp, Glycine max
  unsure (1)..(446): unsure at all n locations
tatnagatatttcctgagtcggccttcagtgtgagacatttttatacatccaaaggtgaactttcatgctattcgagtaatagatgagatgaagacatttacatctctagaacgatatttgcagccaaaaaatagatatgatgatcaaaagtgaaacttccatgctttcttggggtaggaatatatgtacaattctgtttgagttgaatatcttttagaatatgataagagtaaaattgctagtgagtttctttnttccatatagttcaaaactatgtgtgtgtgtgtgtgtggatttgataaatgtcatatccatgaatgatttcggtaaaagagaaccagaggttatacacatatgctagatgtgtgggacttgctagatggagaattcatacctgttgaaggagatcattggggcatcctattggtgggaagggaaactctct

SEQ ID NO: 250315 - DNA, 310 bp, Glycine max
cactgagctgcacttccaccccatacaggctttaaaaaatattgccagttgtctctcaggcagccacaacacagagagaccactaccatctgcaatcccgcccccttacgagtaccatttatttccatttgccactgggagatgactcaatgccacttattgctggacaccacaacactatatagggcaggcaactgaagagctttatgtcacctacttaaaaccaacccacccttccaggctacacgacattggaccattgctgctgaatagccattagcaggggacccaggccctttagagtgactaa

SEQ ID NO: 250316 - DNA, 245 bp, Glycine max
gaagcgcctcggttgtgatcgtcttcacggaggcaatttttccaggccaattggaaagagagagaagtgccaaggcgctgtacccctgccttcgtcacttcctcccctatttttagcaaaataggggacgtggttgccggccagctcacccaggcgagccaagttgcttcctccagaagcaacatccttctggaggaataatctggagggcccacgagggcctgggtgctatttgcgccccccat

SEQ ID NO: 250317 - DNA, 196 bp, Glycine max
ccccctacatacaccttagaaagaacatgtaaacactcgagctgatcccttaatgagaacttgacaagaaccctttctcccaaagaataattcacggtaggaataaactaagcctaaatcaactgttcattataagtgctctggacgcttgggttacctccgctaatcatcgaacttataatcgaatatttcgttt

SEQ ID NO: 250318 - DNA, 460 bp, Glycine max
  unsure (1)..(460): unsure at all n locations
tcctcgggcttctttgagaagctagatacttatctattcacacccttctataaactaaactaactttcttaaaaataattactgatgaaaataacgcaacaaataatcaaacatcaaacataattactaataatatatagatatatataccagggtgttacactcccagacagtctcagagatgaatctggtacaatcctaaagctcctgaggtcaagaggcagtggatttcctctttcctgatgccatctgcatcaaaaagagtcacaggaatcaagttagacaggttttatttcaactgaaattagaaaaataaaacagaaaaatagactgtgcacttagcgagactgactcgcttagtgcaccttatgaaaatcacagctcacgcttagtgcacanggtgcgcttaacatgataacacaaaaacatagacacttgctaagcgagacacacttgttac

SEQ ID NO: 250319 - DNA, 367 bp, Glycine max
atcaagaagatcctcctcgcgaaccatctagaaagggaaaccaagaaaaagttctcctaaagccaaaaatgggggttccactactaggcctttagagctcctacaccttgacccgttgggaccaaccgacactagatccctctctgaatgaagataagggccgatcatagcggacaattaaaccagatggacatggatcacgttcctaacccacaaggacgaggcctctgaaacccccccaaaacacctgaaaaagaaccaagcgaaaaaagtattctaatcgaaaaagacgaggacccataaacccagagaggggggaactgcgttaaacacacacgaccttaaaaaaaaatgcgaaaaaaacctt

SEQ ID NO: 250320 - DNA, 362 bp, Glycine max
  unsure (1)..(362): unsure at all n locations
tgtaattatgaaatagagatgtccgaataatctacctttcctagttaaccatgcattaggtaccatgttcaattatttttgttttgtggtgcgtgtttttctttttagaaatgggtttatgatcccaacatggttggctcatggtgcctaacacatgaaactaagaatgtagtgtgaagtttcacgcttccncctttctcttgttntgttttgtataggaaaacgctaggatgagctaacatgataacaaatggtatgtcaatttgcagaccaaacagcttgttgaacgcatatgcatgatgatgccatgactcatgctaaatgtgaggctggaatatgataacggacanatgcacgatatg

SEQ ID NO: 250321 - DNA, 177 bp, Glycine max
gcagctgcaagcttatatattcttgtcccgcgcggccacatgagttttgcttatattctcgagtgtcacgttatatacctcctgctgacgtgcttaagccattttacttatgtcatttatcgcttaacttaaaacaaaaatactctcccgaacgcttgaattgtattatccattaac

SEQ ID NO: 250322 - DNA, 250 bp, Glycine max
  unsure (1)..(250): unsure at all n locations
atgtcgattatatgacttccatgcttntgaagaacatcttctaccacagatacaacagagaatggcaggcaagctctggcgccattacttggtctcaaccaaaaccaacaccaacacataacacagcaattaatctaatacgaatccaagatgttaactgaaagaatgtatctaatccaagccttccaaaaagagctacgatgatgatgagcaaaatggaacccgaattgttagctaaattctgagagaa

SEQ ID NO: 250323 - DNA, 406 bp, Glycine max
gcttgcatagtcatgattacctacatgagctaattttatcatattatagagggcgatggttgacgctactccacgctcgtataggaggtagcagaggaagatgttgttgatcaatgcaagtcgtccatggtgtggaaaggaagtgctaagacataaatcatatttgggtattgttgtctacacatataaaatgagaggtacacgattcaagtgcccttgtgtaattagagcttccattcattcttcttttgagtaatttttctcactgcttttaatctcttatctgggtgagaattatgtctcatcttcctgggtaattatttagccttcacaaaccaagataaatataacccatagggttgatgcaatggggaaatgttgtactaccgtcacatgatgaaaaaaa

SEQ ID NO: 250324 - DNA, 415 bp, Glycine max
  unsure (1)..(415): unsure at all n locations
atacagaggagcatgacttacgcctaggattctaagctttgggtctggatgtaaaaaggcatgaatattatgacatgcttgagaggatattgattagaagttaaatcggctgcctcatgaggaataccttgcacctaagtagcacggaatatacctttcaatggtatgtatatatgtgaatatatatagcatggaaatgccttgtcaagtgtgtgaatgtatggcataaatataccttgcaaagtgtgaatgtatagcaaataatgcatttcataaatctgtatatgtaagatatgtagcgtaaaaaatgcctttcaaacaatgtatgtttgtgggtaggtagcataaagagccttntcaaaatgtacccatggcgaatatggcacgagtatgctttccacatgataatatgatg

SEQ ID NO: 250325 - DNA, 360 bp, Glycine max
  unsure (1)..(360): unsure at all n locations
ttattccataagaactatattacatacttgccacaaatcatgttgattcgattcacttctcctaaaaaaaacaatatttttctcaaaacactaacgtaattttaaaccatataagtgatataaacttgcttacacatattacatgtgtcaaactacaatcactcaaataattatgtaatttcaataaaataaaatcactaaaacatatttttaatttcaataacataattataacactcgcgatcacactaataataatatcattatcattgctaattacacaagtcctctctaaaagcttatcacttaacatagttaactagacagacatttccaanatctttgagttgaccttattgt

SEQ ID NO: 250326 - DNA, 452 bp, Glycine max
  unsure (1)..(452): unsure at all n locations
tctcaaggaggtgagtctattctgagaggggcgcgtgtatctaatctctagcttctcaaggaagngttctcaagaaagcttctcaaggaagctacctagtctataaatagaagcatgtgcaacacttgtggtaactctgatgaatgagagtcttgtgacacacaacttaaagttcaaggtatcttatggctctcactcttatacaaagaaagaccaaggtcaagttatctaatgtgtgacaccttctaagcccaaagatgataaggggaagacaatagaaaagcaagcccctaatgctagtatgcaagagaaaactagctctataaagtgcgttagatgtcttagaagaggacacattacttctcaatgccccaccacaaacaccatgaatatgaggtgccaagacatntatagtagccaagatgaggctactacttcaccttcctctagtg

SEQ ID NO: 250327 - DNA, 256 bp, Glycine max
  unsure (1)..(256): unsure at all n locations
ggctctataaactcgtgaaccttctacttgtctaggctaccattctcaacatcagacaacacttatccacgcttgagggcttgtattacttgtgacctctctacctgtcaaggctactgacctcgacactagataacctncattgacattagacaacctcttttgccacatgctggctcagagattgtggggcttatgtacagtccacggtccacaaaatacatgtgacatgtgacttggcactccaaaacacatc

SEQ ID NO: 250328 - DNA, 207 bp, Glycine max
cagatcaaactcctgacagcagaggacgaaccgcttcttagcatatcaccatcaaaaggcccggccgacccacagcgaaaagtcagaagagaggaacctaagaaacgccacgacgaggatcacagccaagacacctccacgtgaaaagaaaacaccagaggagaacctgcagggcacatagaactagggtacagccgtcacttgcga

SEQ ID NO: 250329 - DNA, 395 bp, Glycine max
  unsure (1)..(395): unsure at all n locations
accaacttgagatgtacactactgggcatatattaattttttgcancaccccaagctctagtaaattgaagatggtgaagtgtctaagtatgctgcagatgttaattcgagatcggtgatggagaaaattttgtcgaaagaaaaaatcattttgggatttcatgtctaaaaggactttgttgaaaaacaaaatccattggatgatataattcgagagttgtccatgactctgaaaaattactttcgaaaaaaaaattgatcatagcaattcctaaatcacccaagacaaaagtagatagtttataaatttaggtttatgctcactgaggcatctaaatctttttttaatcgaacaattgcccatttcctatcacggtttttttatactttactaa

SEQ ID NO: 250330 - DNA, 359 bp, Glycine max
atacatacatatcaattctctcacgagacttttttatcgtaatcaataacgacccgaggaggtatgcgaagcttatatcttctctcttgtaatgggacaactgatcactattaataaatgactgcgccatttgtgcttacatgcagtgcaacagctaaatgcttaaatcacaagtctcacacggtacccacataggctttcaatctatagaattcacagaagcgaagatcgtgacacctatcatatcatttgagacctatactagctgtattgggaaataattgccattaacgaggctaatatatgaaacgtttggacgcaacaaagcggccatccatatacccgactatataatatgt

SEQ ID NO: 250331 - DNA, 318 bp, Glycine max
  unsure (1)..(318): unsure at all n locations
aaatatgtgggtcatcatcgaccagtacaaggaaaagcttagcctttaagtgactcataagcaaaggctagaggacgagtacgccaaggtatcagttcttcaagcagaaagggaagcatgggaaagggtgatcaatttattgcatagagaagcaatgatgtagatggacaagcttgcctttactttgaatgggagtcaagagctttctcgactgctagccaaggccaaggcaatggcagaagtgtactcaactctcgagaaggttcacaggcctctttaattaatgcaacacatgatngatctgatggccacataatt

SEQ ID NO: 250332 - DNA, 485 bp, Glycine max
ctatagaaactcagctaacaactttttttaagatggatcgatctttttatctacaaaagctttacaaagcttgagcttggcctctgtataataaacaagccgaaataggtcgagccaaaggcttttgacaaactactcggcgcaattccatcctagtcctccagttatggacgttgactgtgacaaaaaaatgttgactgtcacgtgtcacgttcttattggattatgacaaccacagtgtctattctaattgaccaatgacaactacaatacatttcatcttccatagagttgacatccaatcagatcatgatatgtgaccgccatcatccaatatgagtgtgacatgagacaatcaacattcatttataacggtcaatgtccagctttggactatagagccaagaatgcctgatggaataaaatacgaagataaaaactgtcaatacattttaagggggaccaaaatcgaaattgaaacaacg

SEQ ID NO: 250333 - DNA, 208 bp, Glycine max
ctatctccttgtgaaggagaaggagaatccgatttgaggacaaatgctcctcaagagggaaagaatgatgaagacatgaccaacagcattggcaaggatccacttgagggacttggagggactatgaccagggctagagcaaggaaagccaaagaagctcttcaacaagtgttgtccatactatatgattacaaccccagtttcaagg

SEQ ID NO: 250334 - DNA, 412 bp, Glycine max
  unsure (1)..(412): unsure at all n locations
tttatgtaaagaaatgtactaattaacaagtttgttgataattgccacccatacgctgtntagtagtatttttgcgtaattattgtatatctgctatacttttaaattttgtttgtgctaatttgtttaataaattattttttagactagaagtttagtctttatacttgctgtatttgatctttgcttggttttgttttattttgaaggaagtactttggagagatgatttgatgcgctatcattggagcctgagaattttgaaaatctccgaagccactaagctcgcttaagtgagctaaaattntgaagcctggaaccttatatattgtgctcgcttcagcgagcaaaccctgtagagtctggtatgtttgtagagctcttaaacgagcttattagacagacccatatg

SEQ ID NO: 250335 - DNA, 341 bp, Glycine max
atagatactaagctgaagctagactcaaactcatggcctagcactctctttgttttccacacaactcatcagaatcatatgaatgctcattgacatcatcataatctatagtaaagggtatcaaaggggaagggttaattactctatcaaccctaaattcaccgttgaagaattaaagccaccatgtctaaagctaaattaatttgttgcaatgctgccaaaaccttccatacaaattttaatgaagtatgcattgtgcacacacattccatgatttaaagcataaacattggaaaccatatgggaggaaaccaactagattgtaccctaaggacataacc

SEQ ID NO: 250336 - DNA, 440 bp, Glycine max
ggccacccagctcgcccaggcgagcagggatgcttcctccataatcaacagccttctggaggaatattttggaaggcccaaatggacctggttgctatatgcacccccatttttactaaatacacccgctgccttttttggtgattctttttttcgtaaagatacggaaacttacgaatttcggaacaatacttgttgtctttccgaaatgttacggaaccttgcggatcacataatcatcccgtgtttgacttacggaatgttacggaacctcactaattgtgcaacaatgcgtccatttgatttccggagagtcacggaaccttactgattgtgcatcaatatttgtttttgaaatctggattgtcctgaacttcacaaaatgcctaatgatgggtgccaagcacctcacaaggaccaaacatatagtacatgacatc

SEQ ID NO: 250337 - DNA, 256 bp, Glycine max
ctgcagcttgtattgggattcactttgactcaactgtccatattgattttcattttcacctcaaaaggaccactccactttgacctcaacttaccactcatgagtgcgagcctatagtttacaaatagacttttctccaaccacaaagtccttcttagctattaagctgtcatggaacttcttggtcttctctttgtagaatatggaattctcataggcttctaaacggatcctatctagctcacttagttgcaac

SEQ ID NO: 250338 - DNA, 215 bp, Glycine max
gcatcctttcccgctaagctcagcttgaaagctcaacttacaaaatgaattcgtgacttatcgtagaatgacgcgcttagtgcaactataataatatttcatagagaggaagtggcgcttagtgcatcatccacgctaagcccacttgttaaggcgcaacttacagtgaagatgttgggcttagcgcaatgatgtgcgcttacctgaaccattca

SEQ ID NO: 250339 - DNA, 404 bp, Glycine max
aatactaactaaaacaaaacttataaaatctcgtgtaagtaatggtcaaatccaaatataattgatgaacaaaatcatactgaactcaaggcggtaagacacaaagcatatcaaaaggaaatataacaaagagagcgctatattaaaaatgtatggattagagatgatttatattaatatagccaaacaaaaatatttacaatgtctgaaaatgtcttacaaaatatacgtttccttggaagcattaaattgaatgcattatcctcgttagtttgaggctttttctttttacaaatttcccacatggcacatgaacctctctgagcactctatgccacttcgatccgccattcataatagcctaaaaatggggtagataatcactcgcgatcccgcacttataa

SEQ ID NO: 250340 - DNA, 360 bp, Glycine max
  unsure (1)..(360): unsure at all n locations
tcgagngaatngttattggcgntccgaattcgctactggcttcggctttaatatcgagcgtctcgatatattacgggacctaatcagactttcgagtgaaaagttattgtcattcgaatttgctaacagctcccgataaaaattcgagcgtctcgatatattacgggactctatcggactttcgatggaaatgttattgtcctccaaattgctatcagcttccgctttaaatttcgagcgtctcgatatattaccggactcaaacggaccttcgagtgaatgttattgtcgtcgaatttctactggcttcggtttaaatttcaagcgcctcataatataccggactcatccgacttccag

SEQ ID NO: 250341 - DNA, 339 bp, Glycine max
  unsure (1)..(339): unsure at all n locations
ctgcaagctgtgtgattcaattcaattatttcaagtgatatcactccttttgttcatataggacgttgggagggttatttcttatgatagccccttaattcttatcacatgacactaatagtgattcttctccctatcgatatgcagccattgccagtgttcatatttgcagatcaagctggccttgacatgttggacacaactcttatagctttacaagacatcacattggataaaatattttatgaggctggacgcaaggcattgtgtacacactctgccaagttaatggagcatgtgataattactagtgatcacaaagntttcaagttacaacta

SEQ ID NO: 250342 - DNA, 379 bp, Glycine max
  unsure (1)..(379): unsure at all n locations
acttagaaactcagactagaagtaccatcataaccaacgaatgcatattattttattatttagaagcacatctcaagagtacagtctttccatgactattcatacccacaaaaatcccatatggcattccataagaattgatctngtatgtagtatcaaatacaacaacatcaccatatttttggtaccaatcatagcacgaagtttgagaccaataaatatgctcttaacttctctcttcatcacgtgtatatgcatactgaaatataaagcaactcttttttgggtgctcacagcacttgagaagaattttggcatcaattctttcaacttttctgttggtttcacaaaaagagaccgaattccctttcataaatgg

SEQ ID NO: 250343 - DNA, 414 bp, Glycine max
acaacaaagtactttcggcacctactatatgttgacttgaccaacgctcttatcggtatgctgcgaccatacttcaacaccttattcacacattctgagaggatggtcgtcatgtgaccatatcttcgtccacatgtatcataagccatgctccatatttccttagaaaagcgatcaatccatgtcgctatggctggactcaattgaccaaatatttctacgttgtgatcaaacacatgcttgcaaggagtgtacgctacatctaatatcgtaccatcaacagttgaggtagatatgaacttcaattacttcttgtcagaaacacctccgcaattcttgacatctctttgtttgcgtgtgaattgccatgaaatgtcgcttgtgcgaccagacactgaaacatgggggtgcacc

SEQ ID NO: 250344 - DNA, 380 bp, Glycine max
atgaatactaagcttagctcttcactgcacaagctttatattgatatttcctttggaacctcacccgagaagacactgacaaaacttatcttctccttcttggacaaagtatggcatgctggaggcaagttaattatcttcccatcagaccttggatgcaactgagatcttatacccaaatcaactagatcttgaccggtattcaagccatccattagtcttgccttgaatgttaaggaacgacccaatcacactgtcacaacatttttctccacatgcataacatcaatacaatgtctaacgtccagatcacaccagtacggatgatcaaagaaaatggacctcttcttccatatgcaactctgactattatcgctctt

SEQ ID NO: 250345 - DNA, 260 bp, Glycine max
  unsure (1)..(260): unsure at all n locations
acacatgcatctacatgatcaaggcagaaagcatggtataatgaagttctgatagctcaatgactaccaacttcattattagataaaagaattttcatcaaaacttacaggaaatccacagaggtttagctctcataactgggaagcttcctttacaacatagagaagagaatngaaagattattgaaatacaggtagtggggatgtctcctccacctctatgacctcacaattactcacaaaactcttcttaagctctc

SEQ ID NO: 250346 - DNA, 277 bp, Glycine max
cagcttatgactctgtgtctcggcaattccctctttatacgacgatataaatgttgctctaagaaacgtggattgagtgggttaaaggatgcctcacatcaccctcaatatctatccttgtaaatggaactccaccatgtagaatctaaccctcatataggattgagacaatgagatcccttggcccctatattatttgccttggttgctgaagggttaacacgattgacgagggaagctatgctcaaaacactatgtcacagctttatggtgggga

SEQ ID NO: 250347 - DNA, 460 bp, Glycine max
aaactcaagcttctcgcgggtgtgcgattctcagatgacgattattacgagtgctctttaggggtgccgtgcacacattgatagtttcctcatatcaaatcagggggttagaatcacttgtggtttgatgtgactattatggacttgatgttggcaggttacacgactaattgcttatttagcactactgagagcgagggaaagctatcttagatacgtgtacaccttgcaacagaacttggaagagttctgtcctaattaaactgcgtgaagaagaatactcgactagattctaatattgtccctctgatgccaattatgtaatgaaactttgatcaactctctctctcaatggattttatttgatatgcactttctaagccttctattgtaacatgtgttataatatcaattaatcaaaatccttgtgacatgactttcatatacacgatttgtgtcg

SEQ ID NO: 250348 - DNA, 324 bp, Glycine max
  unsure (1)..(324): unsure at all n locations
cacctgcagcatgcaagcttgttattcttcttttactagncatgcatattatatatggtggatgtaattaataaatcaaacgttaagaaattatgattcgtggaaatcaatttgaattcattttctcacaaagacattttcaaggaaagaataggaattcaattttttcttagtggaagaaaagcattagtgacgcatcttatataactctttcattatcagaacatatattaagaccaactaaccatattatacgcattattacgaatcatgatctcctgtagatgactttctcaggaattatgattctgggatataaaatat

SEQ ID NO: 250349 - DNA, 258 bp, Glycine max
  unsure (1)..(258): unsure at all n locations
acacaagaaactcagctgtttacccatccttggataacctggaagtagtatcttaccgccaagaatgtgccttggataagaagcttgaagaggatgctttaatggaggataagaaagaaagaagggggtatcattaaattaaaggaataaaagagggagagaagtggaactttgaagtgtgtctcataagactctcattcatcaaagttacaacaagtgttacacatgcttctatntataaactaagtagcttccttg

SEQ ID NO: 250350 - DNA, 380 bp, Glycine max
  unsure (1)..(380): unsure at all n locations
tgcggcatgcaagcttcaaccggtctcgacatcntcattcgtcttcatcggtctctatcttcaacgggaagtaccttgaccaagcttttcattcattctatgtacccgagtggccacattgagttcggcattttattctatttgttacttttatccccctgtgacggctcagccttaactaagtattttcgctaatcaaaaaaaataatttcaccgacgttnaattgattatcataacttcgcaaaaaaatccgaccgtcgctggccgacccgtggaatcaaaagagtaaaatatatatatcaaagacttttataaaaaagcgaaataatcgacgttctcttggattctatctaatcgattgataaactaaaggaactaa

SEQ ID NO: 250351 - DNA, 298 bp, Glycine max
aacattggtatccattaccagcttctggaaatatatggaacgctgctaaatcaatttgaaaacttttcaacttatttgctactggaatcgattcatcatatgggatcgataccaagagtataactcttgcaaagggttggcaaaactcatgtgctattcaagttgaaaaaaattaaacttacctgatgggctctctcatcttgatcctgtctgatcttgaaactggaactgaatctgattctgtcggaacttcctctgatcttgactctgactgtctgatctctgaatggagtcttgt

SEQ ID NO: 250352 - DNA, 417 bp, Glycine max
cactataaatctcaacctgctggaataggagttcccatcacatgtggtacttcgttgtgttcgggcgatggagcacaacaagttctccacatcctcaaagcgcgcttaaacccaccatgctcctgttgcccacacctcatctgagctcaagttactcccacgtagcccatatactgcgttctatcaacacccgatacccatcaatcctcccaagctatcacaacatccatacagaacaacattctaacaacacgagctattacatgctagcaaaatatggcaaaggcacaaaactctgccaatcaccaaccatagcacagctttcctacttaagacccccgaacaattccttcatccaatcgttaaccgtgaacgaccccaaatgactggagtctaagacataactcattggaccgt

SEQ ID NO: 250353 - DNA, 392 bp, Glycine max
  unsure (1)..(392): unsure at all n locations
ggcatagtcggtcagtgagaacctgtgatgtacctaagcangcgagctcctggcagtcaacagataaaaggaacaaagaccacaaagcacggaggcttgtggtggctggccaactcttaattttgtgtgatatgtggagtatgtgcctctggtaatcgattaccaagggtgggtaatcaattactaggcttataaatgaagacaggagactaagatggtctctgtgaatcgaataccaaggggtgtaatcgattaccacgcttgaaaacgaagtcaggaaactaatggagcctctggtaatcgataccagccagtgtattaattacacagagggatgggcactggtaatcgataccaggtatgtgtaatcgatacacagtgcatttttgcat

SEQ ID NO: 250354 - DNA, 450 bp, Glycine max
cggagaggatgcttcaatggaggagaagaaagagggattatatgagagaggcgggagcattttattgatggaagaaaatgagagagaagttgaactctgagttgtgtctcacaagactctcattcatcaaagttacaacaagtattacacatgcttctatttatagacttggtagcttccttgagaagctttcttgagaaaacatccttgagaagcttctttgagaaaacttccttgagaagctagagcttagctacacacacccctctcataactaagctcacctccttgagaagcttccttaagaagattcctaaagaagctagagcttatctacacatacctctctaatagctaagctcacctccttgagatgagaagctagagcttagctacacaccccctataatagctaagctcaccccatgacataaaacatgaaaattcaaa

SEQ ID NO: 250355 - DNA, 171 bp, Glycine max
  unsure (1)..(171): unsure at all n locations
ctctccatacaatcattgcatgatcagagaatgctccataaatgataacttttgctcatcaccacaaagttcttgacggagtacaggctgggaagctcatgcttactgaagatcccttcggcaccatgtaaaatagtggagtgatgtcagcgactctgntgtctttttgac

SEQ ID NO: 250356 - DNA, 386 bp, Glycine max
  unsure (1)..(386): unsure at all n locations
ttagagtccanattcactctgacagtattcgattatctataatggggcactattcaagctataacagcgacgctcagtgaatgattaccatactcgggttgaacgtgtatcgaaacggatcattggtccgtcacccacgatgccactgagctgttatatttagggcctttactcggacctcctgctgaaaaatcaggctctgttacctatagtcataccgtaaaccgtgacgcttgccaagttgtacgaagaaaaaattcagcaccgtcgttgccagttctgcacatcctataccccatctgggccgtcaacttcgattgcaccacacactgtgggagctttcatcggtcttaccccgatacgcccttcatttaagtggctttcca

SEQ ID NO: 250357 - DNA, 429 bp, Glycine max
  unsure (1)..(429): unsure at all n locations
tcttgtcaagcgagcctaccaatagcatttgcacatcnttgtttacttctcatcatttctcaccattgtctctccaaaaatcaaagcgtggaccttcattcttctccatttgcacaaaatcttcaaggaggaagagaccatcattttattcttctttcaagctccataataattttcataccctaatttcgcctatgactatcattcgtagatcttttgatccttgctagttgacttacagagttgaacaccagttatagtgccaagcaaagaaccattcagtgattcgatcataaatgcaaaacataccacaaaggaggggcaaaagggtctttttattgagtttcctgggccccaaaagattcaaggtgaaagtaccagcttgcctggcgagctgccattgcccaactgccatttttctattaatac

SEQ ID NO: 250358 - DNA, 349 bp, Glycine max
  unsure (1)..(349): unsure at all n locations
gcttcttgcgtagccgctcttggtgctcanaaaatcccaaaagtatatctctctcttattactaactatttgaattctttagatcctgaatgtacaaccttcaaactgttgcttgttcccctctctgtntnctgcaaaaaagaaaatcaatatgaaacaattcacgctgaatcgttatcgttattattactcgaaccataaggaataacatctaaacacgtcatataaaatgtaacttcttaaatattcttgttgttgttaattacaactttacttcaatatctcattttttaatctacttaggtcggttttttaatctaagactgtcgacacattaaagagtgagatg

SEQ ID NO: 250359 - DNA, 441 bp, Glycine max
  unsure (1)..(441): unsure at all n locations
gcgacctataaatactcaagctgcacacaagattctcctgcctggcaatcaaaaccttctggttgtgtcatatagatgccttcctctcacacctcatgcatgaatgcaattgtaacatctacctgctccaagtgaagattctctgcaactactatactcagagaaactctgatgatagtcatttatacaactggagagaagatctctgtgaaatcaattccttatatttgctgaaacctgtttaccacaagtctcgccttgtttcttcttctacgcgttacagtctatctttagcctatggacccacccattntgtaacactttctttgcttcacgaaatctagttaaagaccacctcttaatcttctcgagggatgtcggctcattgttcatcgctagctcgcactcaataatgtctttcccctgcctaccctcactgaa

SEQ ID NO: 250360 - DNA, 131 bp, Glycine max
atcttatcatctctatctgacacaatggtcccaggcaaaccatggagtctcacaacttccctataaaagagttttgagatatgggaagcatcatccaccttatggcatggtataaagtgtgccatcttgct

SEQ ID NO: 250361 - DNA, 362 bp, Glycine max
agggttaaaagtcttcatattctcatttctgttagcatgaaaatatctattctatatgctaaagaaactcttataagaatatccgtgaagctgaaaagcacaataagtcacataattaatggtatatgtaaattagtcaatcctttttatgcatgtacgatgtagagaaatcacaatcaactcctctaatcgaggttagcattatgtaagagtaatgttctttggacacccacccagagagaagtgagagatgtatgagtaatgattttatacattcatttttttaacaccccatcacatctctcatttctctctacttcttatcacatcatattacctattatacttgtatttttctctca

SEQ ID NO: 250362 - DNA, 278 bp, Glycine max
cacctaataaagagcaaactcccgatcacattgaacatgctacaatggcaacctctaacgagagaattgatgtgctcaaacatgatttcgagaacaaaacagtgcctatgacataatgacaaactatatactggaagacctggatgggaatagggaactagctactctatcatccaataccaaacaaagataccgggcctacttgatattacgacttttatgatattttattctgatgcttcgcaactctgacggacctttgtaataaaatctcaatg

SEQ ID NO: 250363 - DNA, 312 bp, Glycine max
atcaatgaatggtggagaaagagagagaaatgttgactactcacatatatccttgtaacttgctctctaatcaaaaagattcttttgtcaagtcagatctaccgcacattgactatagttcggataatggacacaatttttaggttatttcctgcaactgcaacatttatttatggaataaatccattgacacacaaaaatatgtctattgctatggaacacaaattcaacaattcttcttaaaggccaatgatatcaattattaatttgttaactattatcagtgaaaacgatttgaactcaatttttctc

SEQ ID NO: 250364 - DNA, 427 bp, Glycine max
  unsure (1)..(427): unsure at all n locations
atttctagacttgagaagtgaaatttataatgaggtatattgaagcaaactctcacctcacaccagtccataacatcaatctaaacttgctcaaactggatttacgcttaaaattccaccgaatcacaatttgactcctcaacacccaactttgccctagaaatggctctttgttcactatgatcatatgtttttctctctcgcacagaccaagctttctcccagtcctaaatgaatttcaagctatattaactcacttaacctccatnactacagaatcagacttaaccttcactcttaagactactcttttcactataaatcacatctcacttctaacctaggtatgtctaccttatcttaacagttccatcacaattcagatataacatccaacatatcacaaacctaacagatggatgttact

SEQ ID NO: 250365 - DNA, 427 bp, Glycine max
  unsure (1)..(427): unsure at all n locations
caaatatgcatgtgaattangacgcatcaacaagaatcaagccacggctattgtgcaagcaatcaatggggcaaaacacaccaaatgattataatgatggatggctcacattctcacacaggtaaaatcatcactctcaaattgagctctcaaaactatcatgacatgtagagaagaatcaaggatttcaagtcacacaatgtcaagaacttttattttcaaaacaattacccatttcttgaacatatcctatagttcaaagaanaacatgcaaagtcgtacgtgcacacgaaatngacccaaaatattanactgaatatccgacgaaactaacaacattaacaaattaacacaactaacagattaacanaaccaacanaactagcanaaccaaagaacactaccccccatacttatacaacacatt

SEQ ID NO: 250366 - DNA, 423 bp, Glycine max
gcctggcttctacattataaacagaacctcttatagtgttactcttcatccttagagggacacaacactacagattagtcttccatatagtctacaatagctgacaacgtatatgaaactatgagcagaaacgtaaatgaagctaaaggcacaaaacgtatatgaagttaaaagcataagaaggaacctaatcgaacatgcaattgaaggcagaaaatgaaataatgcattcacgtgaacagtaatgcaaagctataaacgttaaactctatccactcagcttgggtattgtctcctgaataatggaatcccttttcacgaatcccaaagcttttatttataagggtcactcaaagtcactgggcctaattacattattctggcccaaacgatataaaactgactaataaataaattgcaatt

SEQ ID NO: 250367 - DNA, 402 bp, Glycine max
tgacacagaaagcgtgtctctgctttgcgcatgggagaatgtacggtgacaccttgcatgctcgattcttttcactacaatcgataatattacaaaactatgtatcagcatcgattatctataaaattatctacgttgtaaggggattttcgccactccaaaatcttagttgataaaacatactctcattatagggaaataattgtcaaaatcacccatattgtaaataattctaccaaatattcattttagtagaaataaaatagtggtgcatgcaccttcgaaatgcaatagatattatgagagtaaagattctattatagagcgtgtttttatcaaactcttatgtactaacacagtacaatataactctcttcagacttatcaaataagaaacaattt

SEQ ID NO: 250368 - DNA, 445 bp, Glycine max
ttaggcaaatataaagataactgaacataaaataaggtatatattcgtcatactcagacatcaatgatgatcttaagttagcctcgatcttacgttttcctttagaagatgcccacaatcattgcaatgtccttatcataattatatttaaacatggcatacgattgacttgtactgatccactgatatgaacaagacataacaatatatggatagtgtaaacaggctttgttaataatataagatattgcgatgaggacaaaaagttatggtcgtccagctagttatcagcctagaaatccaagacaagtttgattgtaacttcataacttgatcgttaatgaaaattctaaacttttttttatctcgatcaaagacctatcatgctcacatacatgaatattgctaggttcaaacatatattttatatgatgggaattcaata

SEQ ID NO: 250369 - DNA, 380 bp, Glycine max
gcattatgtcccatgttcaattacttgtctctaagagaaacgggtttatgatcccaacatggatggctcgtggtgcctaacacatgaaactaagaatgcagggagaagcttcacgctcccccctctcttgatctagtattgtaaaggaaaacgcaaggatgaccacacatgataacaaatggaatgcaaatttgcatatcaaacaggtagatgaacgcatatgcatgatgatgccgagactcatgctaaatgtgaggctcgaatatgataacagacatacgcatgatatgtccctaatgaagtaatgaaagagcctatgtggtgcatgatattaatgcatattaccgacacgagaactccgaaataatactctcttactt

SEQ ID NO: 250370 - DNA, 338 bp, Glycine max
  unsure (1)..(338): unsure at all n locations
tcggatctcagagcaccgcggctgcagcttagtngttatgtatggcgaaggaggtttcacctcttgtgctcgtcatgaagacgacaacctttaatcgagtgtgctaaaaataaagtgactgtttaattatctatctttccttgagaacatgagttatgttcgttatatcttttgtgtatttaggaaaaaaacacagtgtatttctatttcttaggaaaaaaggaatttatgctttcttttagtttcttaggtcaacaaggggtttgccctcgctcgtacatatctttaggtgcaatgagaaaatcaaacttacatagctctttgtgtagaaaacagtt

SEQ ID NO: 250371 - DNA, 352 bp, Glycine max
agaacatagagttatgtgtcgttatatctctttgcttatctaggaaaaaaagaaagtgaattttatttttttatgataaaatgaattttattgtttttttttagttttttaggtcaacaagggggttgccctcgctcgtacatatctttaggtgcaatgagaaaatcaaacttacatagttctttgggtagaaaacagtttgtgtgttgtgctgatttttcttgaaagattcgtataattgcgtgacaagagtcgtaaggcgtgtgccttgaacgacgtttaatttatgaaacagagagagaatccttaggcattgaccttgaacgactcagtatgtcaaatttatggaaaa

SEQ ID NO: 250372 - DNA, 342 bp, Glycine max
ctaacagcaaggtctagtaatcaatcagcttggttaatttttttgaaacaattctcaattcaaatgccctttattaacatagagtatgatggatgatactattactacccacttatgcttgctgaatattagagttaaaactcattaaaactcattaaaaaaagacttcaaattactggggctacatcactccactataattcatttctcttgaaaacttatgaaaccacccaacttggattttaaccctcagcataccaaacgtgacctcacagacaccacatgcacgaatgcaagagaactcttgttttctttttgggaaagcaaggaaacaaatgagca

SEQ ID NO: 250373 - DNA, 395 bp, Glycine max
gctttgtcgccccttggacgtcaagatgtactgtttgctatcattatgcaaccaaaacacattggttgtgtccgtcttgctggagtcagtgtcacaaacaagcaatactttggatcggcttcaaggtgctctcgcatgtctgagtccatggctctcgaagacttggagctactgacacaaaaactaagggaccaactggaggagtcaatcacagaaaaagtgactcaacaactaatgttgtccttcaaccagatgcaatcccagttgcaatcgcggatgcaatcatagggactcgcactgtctcttaagcctgaggttggtccttctgctactcgtgtcagcacaaagaaaagttgttttaatcccttgtggcagaacccaaacatgggtgactc

SEQ ID NO: 250374 - DNA, 334 bp, Glycine max
  unsure (1)..(334): unsure at all n locations
actaacttgatgaccctacacctcgataatttacatattttcattaaaacattttaaatgatatttaaataaaaatttaccaaatccattttgatttatctcccaatctccacctaatacatactttaggcggtaactgcgttgggatggactgttaatatatatanggggcctccgaaattaagaatgcccgggccttccttttgcttcagggggaaacaattttttggggttaacattttttttatcccatcccaaggcctttacattttaaaacaagccgattttcactattttggaaatttccaaggtctttttctataaaaaaaaaaaa

SEQ ID NO: 250375 - DNA, 387 bp, Glycine max
  unsure (1)..(387): unsure at all n locations
agcttttaaaattgaattanaacgctcaataacttctggtaatcgattaccatatatgtgtaatcaattacacagtgcaaattgtgaatacaaatattaatagatgttgtaaatcatttctggccattggtaatcgattacatcctctggtaatcgattaccagagagtaaatctcttgaaaaaaactttttaacttaaatttcttggccaaaccttttgctacttcaactaggaattcccttcctatttaatatacccttcctaagactctagagactgtcttgatcatccatcttgaatatctttaatatctttgtcttgaataaagctcatgaaaacatgtgatcctttggcatcatcaaaacaatcagctcggtcctttgtct

SEQ ID NO: 250376 - DNA, 96 bp, Glycine max
gaaaggaataaaggaaggagaaaccagggcggcgaaccatagaccaaaacaactgagaccaaaacgccaagacacggaagggaaaaacaaaaggaa

SEQ ID NO: 250377 - DNA, 452 bp, Glycine max
  unsure (1)..(452): unsure at all n locations
agcttccaaccaacatgtgggagtatatgctgtttatctacatgcangaatacagcgaanaacgttggccatgcaatcgcctctgccaatgcttttccctcgacgaaatcaaagccaccacaaacaacttcgacaacacctcagttgttggtgaaaggggattcgaccatgtgtacaagggctacatagatgacagttccatcccagtagctatcaagcatctcaaaccatgatcaaagcagggctttgaagagttcctggccgagattggaatgctctcatagctctgccaccaccatctcgttcctcttatcggatactgcgacaaanacaaggagatgatcatggtctacaatttcatgacacatggcaacctccgcaaccatctncacaagtacaacactaacaaaccccctctatattggaactacgcttgcaaattgtattgcatg

SEQ ID NO: 250378 - DNA, 469 bp, Glycine max
  unsure (1)..(469): unsure at all n locations
tttgngtccaagggcctctngcatctccttcaatgacttcttttgccgctgttttggctacatggtgtccaagaagaagtacatctacaccattgatgatgactgctttgtgagttttttctttatttgcctttctggggggaactcaattctgttaataggaccaaacctacatggcattcttttaagtgttttttaatgccttctgcaatcagaattaccagaattaaagtnttacctcgataattctcataataaaagtgattttagtatttttttttctccaattagaattatcagaatcagagtttcacctcgataattctcataatanaagcttacattaaatgtcagcgtaaattaccgaagtgaaactcatatnttgataaaaaanaaacaaaacanaaacacctaagaaactgcattgatggtttggtatttgtttaattgctcaatgttcggtgagatc

SEQ ID NO: 250379 - DNA, 496 bp, Glycine max
  unsure (1)..(496): unsure at all n locations
agctcgtgactcttggcaatttctttataactagtcacttaaaaagttgtgacttttgtaaaaatcttccgaaacaagtcacttgaagaattgtgacttttggaaatgtatttttcaaaatcagtcactggtaatcgattaccattaagatgtaattgattacacatcaacagatgtgactcttcattttgaatnttgaaaattaaaacatttagaagctctagtaatcgattacaagtatcgtgtaatcgattacacacagttaaaatactttaaaactggtttaaacataagngtaactcttgaaaattgaaatcttaacattttaaaacacagggtaatcgatactaccttctggtaatcgattaccagagagtaaaactcttttgtaatgatnttgtgaaaacttcttgtgctactcaatattttgaaaaacgttttagtacttatcttgattgagtcttctcttgattcttgaatcttgagtcttgaatct

SEQ ID NO: 250380 - DNA, 173 bp, Glycine max
  unsure (1)..(173): unsure at all n locations
tgcctcanagaggtccaggaaggacaaggcggctgaatttctagttccgctccggagtacgacagtcaccgctttaggagcactgtacaccagcagcgcttcgaggccatcaaaggatggtcgtttctctgggagcgacgcgttcagctcanggacgacgagtatactgattt

SEQ ID NO: 250381 - DNA, 374 bp, Glycine max
agcttcttatccaaggctcatcttggtggtgatattccttcttccatggcttattcactagtggatggcgccgcctcttacctcttctcctttggcttccgctgcatctccatggtggaaaatcaccactaaaggacctcactgaagctcatagatccagcctccatagaagctccacaagcaagcttccatgaagtggtaatcagagcacgagagcttcaagtaggtgctccttaaacctccattaattatttttgctttaccttctcttccattggtgattcttcattttttctccatgtatctcctcatatgtcttgggctatatgttggtaacttgattctttagagtttccaccgattaaacttgctat

SEQ ID NO: 250382 - DNA, 399 bp, Glycine max
agcttcatccgcagatccctcttggaagactatatctagactaaacaacactattggaacaacacaattaagaccaaaacttaatccgcagatcccttctgtaagactaagtttcgatcctgcttcaatcaaagtctaaggcaatagtacttttccctatgctaaagtcacctaactatgcacacaaatggatgatcagaccaaaagcttacaaacattaagcattgaacacagaagacataatccattagatattaagtattacatcagttgttcattaaaaatccccaactatggtgtttagccagccattatagaagaaaccctaacataataaccttacaaacctaggatctctgcaaaagctgtcctcttgctggctcagacttttttctaaaa

SEQ ID NO: 250383 - DNA, 180 bp, Glycine max
ttcctgttcttcataatatgaaacacatttgactactcttgttacatagaaaacattataataattaggttaatccaaggcatgcttgggtaatacatgaaatgatatggaatggtaggtagcgcacgcactgagaactttaagttactttatataaattgttgatactttgatttccta

SEQ ID NO: 250384 - DNA, 254 bp, Glycine max
ttccttgtggaacctccacccaacgataacactgacataaacttatcctcttctcgttggagaaaggatggcaggctaaggcaaatataattacttcccaacagaccttggatgctactgtgatccgtagcccaaatcagctaaatcttgatgggaatcaaaccatacttaggcttgcctagaatggaaggagcgtcccaatcacactgtcacaatacatttcttcacagtgcatacatcaatacaggtgtaac

SEQ ID NO: 250385 - DNA, 358 bp, Glycine max
catagaggatcttctgtgtaacaaatctgtacagtttcttgcacaataagagatataggtggaagagagaaatgtgaaatatactgagtggcataatatacgaagattatgagaaaaaactctatcggttgtgcgttaccataatggaactcagatacatatgctattctgagccatagatgtcatagcataatataactaaatgctattctaacttctaagtcataatatctggtaatagccgtatcgctgaatgtttatccacatgacagcagaataagcccttctctcatgttaatattaaatatccgataagatcacttctatctcagatatgtccattaaagcttttgatgtg

SEQ ID NO: 250386 - DNA, 151 bp, Glycine max
ttttaactaaaagagaaaatattcaatttgctcttttctttctctacacaattaggaaattgcattattccctctatcttaaagttgacaattgcttatggtttacatatttctctttgaatcgctttattttagtgagaatttaggtttt

SEQ ID NO: 250387 - DNA, 358 bp, Glycine max
tttctttctccaccaaagaaattagggtgttaggcttttctcctgtaagtgctttcttctccattgtcatggaagggaagacctatatgaaattacatgttttggggggattgaaataactatatacacggttacaaaaccttctactttctttgattgtcactaaaagtttctattctctcctatgtctaagattaggggtgatgggacaaaaccagggcttgttatcggcttctttattctctcctttatataagtatgacccttagaagattgggttccattaatcagagctaatgagcattgctattaagctgggacacacaacccctcttaattagtgtgacgttggtcatat

SEQ ID NO: 250388 - DNA, 251 bp, Glycine max
atgtatatagtagtagcttcatgtacacactgcttgaaaatagcttttggttgcacagtttggttctagcttggcatgatttgggtgtatgggtctgtaaatggaccttgtgctggggtgaaaatttacccacccctaagggttccaaataggaatatattttcgtttgcaaatgttcatgctattaaggcatgtttatttgaaatggaattaaaccctggataacttcacaaactggaggaatggttact

SEQ ID NO: 250389 - DNA, 432 bp, Glycine max
  unsure (1)..(432): unsure at all n locations
agcttataagaacannaatgcctaaatcatatccaaatatgcatgtgaatgangaagcataaacaagaatcaagccaaggctattgtgcaagcaatcaatggggcaaaacacaccaaaagattatgatgatggatggctcaaattctcacaaaggtaaacttatcactttcgaattgagctttcaaaactatcatgacatgtagaggaagaacaaggatttcacatcacaaaatgtcaagagacttttattttcaaaacaattacccatttcttgaacatatcctataattcaatgaaaaatgtgaaaagttgcaaacataattgacctcaaatattaaactataaaccctacaaaactaacaaaatttacaaaactaacataactagcataaccaataccaaagaactccctccatacttaaacaacacat

SEQ ID NO: 250390 - DNA, 103 bp, Glycine max
gacttaaagacgccgctcaacttaactgaccattcaccataaaatctgttgtgacaaaatgaaaaagtatatcaactgacttctaatctctaaggctgaaaga

SEQ ID NO: 250391 - DNA, 326 bp, Glycine max
  unsure (1)..(326): unsure at all n locations
tggaccttaagtttcatgggatatatttttcatttggttttaatgaaaaccccatggatcaatgcatataccacaaggtcagtgggagtaaaatatgtttccttgttctatatgtatatgatattttacttgcagccaatgatcagggtttgctacatgaagtgaaacatattttctctaagaaatttgacatgaaggatatgagtgatgcatcttatttcattggcattaagattcatagagatagacctcgaggtattttatgtctatcataggaaacctttatcaacannaatttagagatactttggatgaaagattgttca

SEQ ID NO: 250392 - DNA, 150 bp, Glycine max
ctggaagaagaagtgtacatggagattccacctggatatggtgccactaatggaggaaattaagattgcagactaaaaatggccctatatggtctcaagtagtctccttgggcttggttcggtaggttcactcaagctatggtatctttg

SEQ ID NO: 250393 - DNA, 343 bp, Glycine max
agctttatgagatcgcagttggcacaacgagatgtatttttacttgcatgaagaacgcccacagagaataatccactatgacattaaaccaccaaatattctcttggacaggaattgcaatcctaaagatgctgattctgggttacccaaacctttgtgacccgggaaattacacatctaaccttgaccaagagtagggggactcctgtttatgctgcacctcgactatggatgcctaattttcctgagactcacaagcgtgatgcttacagctttggaatgctgttattagaaatcataggcaggagaagataccttgaccgtgaacttgttgaaagccacg

SEQ ID NO: 250394 - DNA, 151 bp, Glycine max
  unsure (1)..(151): unsure at all n locations
tgtccgtacgttntaacgctntctctcaactaattattctgtgtttgacctacttatccctgcctgccttaggaagatagcccgtactgattggacttaaaatacttcacgtgggactaatgttaaaacccggccttatcttcattatttt

SEQ ID NO: 250395 - DNA, 387 bp, Glycine max
  unsure (1)..(387): unsure at all n locations
agctnttcgcanagcttacggtaagatctgngacctagccatggcagaggcctccacagaggccattgcctccctcgtccaatattatgaccagcctttgaggtgcttcacctttggggacttccagttatcacccacggtggaagagtttgaagaaatcctgtgatgccctctgggaggaaggaaaccatacctcttctcgggattctatccctctttagctagaatttctaagatagtccaaatctcaacgcaggaattagactgcggaaagcaagtcgaatatgggatggttggagtaccaaggaaatggttggaagcaaaagcaagagtcttggaggtaaaggcgaatgggccccgttcatggacatcctgacacttttgatc

SEQ ID NO: 250396 - DNA, 454 bp, Glycine max
  unsure (1)..(454): unsure at all n locations
ntatcctcagatccctcttggtggactgggcttaatttttactgccctcctaggtttagactaacttaaactaagcttcatccttagatccctcttgttggactagacttagcttaagtagcttacgaaagtttagcctaatttagcctaagctttgtccctagattcctcttgttggactatgactagaccaaacagcattatttgaacaacatacttaaaaccaaaacttaatccatagatccctcttgtagactaagtttcaattctggttcattcaagttctaaggcaacaatacatttcccaatgttaaaatcacctaactaggcacacaaatggctgattagaccaagagcatacnaaatttaagcactgaagaagcatttaacacaagaaacaatatcaattatatatgaaaataattacatcacctggtcattagaaatccccaat

SEQ ID NO: 250397 - DNA, 318 bp, Glycine max
gaatcgtaataatatccatatcggtgagagagagagagagagagagacctgttactcgtggatgttgaggcggcggagtagattgtgctgtcatttctcggcgaccgagagggagcgaaagacgagcttgttgagcatccctctcaccattgtgtgtggtggatttcaagatcggacactcacacgatcaaaaattaactcgattcgatctacaaagagaaatcataaaaagagaaccactgcctctacgctctccttcaacgttcagacactgcgcagtctgtgccaaacgcaaagaccggaccctagcaaattttt

SEQ ID NO: 250398 - DNA, 131 bp, Glycine max
  unsure (1)..(131): unsure at all n locations
ntggtatgtctccagctctagaaacattcaatgtctctcacaacaagctagaaggtcctgtcccacaaaatggcgtgctaagaacaataaacccgaatgatcctgtgggaaatgctgggttatgtggtggc

SEQ ID NO: 250399 - DNA, 299 bp, Glycine max
cctcacaatcactcataaactcatctcatgctctcaagatgactttctcttcaagctcagttctctgccaggcttcgcacaacaaaagctctcaaaaccctctggaactgggacccttctctctctagaaatctttaaaaatgcagaagctccaagaaaagcccaaactccatcttcatttctgattataggcttaaataggtagccttggtggtgcttgcacgcttagcgcaagtctggctcgcttaacgtgcataagtgaatttcggcttggcgctcgtcttcttgcttagcggatg

SEQ ID NO: 250400 - DNA, 439 bp, Glycine max
  unsure (1)..(439): unsure at all n locations
tgttacaacctggtattatntgtcctaccaagccactactggctctaaaacaataaaagatcttttgttgtttgctcaatgactaacacacaatcatcttacataagaacatacaatcacaacatttagtctttttctctcaaaatattcaaggtgttttgagaggttttctatacttttacaggaattaacaaaaagctttttgaaaaagtattttgaatatgagcacttgggtttgtgttcatttcttcaaagcttctagtaaaattaagccttcttcaatagttggttgtgtctctaaatggaagattccttcctctagctaacgtttgaaggatgtgttggttgaacatttaatgcttgcagaaagcatgtcctcttcatgatgaaaacactatcttactatcggatgacactcaatagaaatatgtctttgcgt

SEQ ID NO: 250401 - DNA, 424 bp, Glycine max
  unsure (1)..(424): unsure at all n locations
cagctttacaacatgagaangangnctatagcttgtcatttgtgataattntataggtgtcatatgtgttatttatccatattaaacattattgatgttcttcaattataattgtttatatttataataatatataaagagaatattccttatatttgttaaaatttagaattgacgcacattatgataacgcgactaatgtggactcaataacttcacacgtcgactttgagatatacctttattagaaagatagaagggaaatatgcacaacaaaagatttcgatgttcaagtaagtatatgagctacgagaaaaagagagtatgaaaacacgagtatgccagcacagatgcatgcatgtgtgttcgcgatgtgttgagaggtgtgcatgtgtgttggtatgtgttgacattcataagagtg

SEQ ID NO: 250402 - DNA, 196 bp, Glycine max
  unsure (1)..(196): unsure at all n locations
ttacggacactatgaaactcagcttttacagagtcgatgctcanaaggtgatcatatatcatggtgtaccaagcccttggcgctcgctttaggccatagaaagccctttntagtagatagactttatcttcttcacctcgcttcacaaaaccctttaggtgctctgcatatatctcttcttgaaaactccattaaa

SEQ ID NO: 250403 - DNA, 459 bp, Glycine max
gctcggaccctaagcgactgagctgcagcttaactcttcactgacaaggctcttaatatttgtatagtatcctctgggaaccttcacccgacgaagacactgacaaaaacttatcttctcctttttggacaaagtatggcaggctaggggcaagtaaattttcttcccatcagaccttggatgcaactgtgatcgtatgcccatatcagctagatctggatgggtattcaagccatccttcgtcttgccttgaatgtaaagagcgtcccaatcacactgtcacaaacatttttctccacatgcataacatcaatacaatgtttaacgtaaagatcagaccagtacggaagatcaaagaaaatggacctcttcttccatatgcaactcttactcttatacttcttttgggtcttcccacatacaatattcaagagttgaacccgctcatatacctgctca

SEQ ID NO: 250404 - DNA, 408 bp, Glycine max
  unsure (1)..(408): unsure at all n locations
agcttagctgaattcatatcgaatttaagatatcttagctctacctttgtgacatcctggaaattctacccggaatatttgtaaacggtgcattttggatggttatacatatatgagtattattcagcgtatgtatatatgtatatactcctggtataagtaagtatattgtgggaaagatacttggattatgcttattaacgaagagaaattcataaccggatggtaataggttaattcttcattaattagtctaaaaatcatcgttntgcgtgcaacttaggaattaacaaaaccaacctctgcaccacactcggtaggttattctgagcatttcgatatatatgttgcctactttcgaaaactgtgcccgaccggcgtatagaaacgctaaggactggaacctaa

SEQ ID NO: 250405 - DNA, 75 bp, Glycine max
gagcacaagacttagtagtgtcttaacctcaataatttttttttcctttcttcatgtggttttattttctcatgt

SEQ ID NO: 250406 - DNA, 422 bp, Glycine max
gagcacctgggctgcagcttacatatataaaggcatcgctgggattcctgctatatctcctcgcaaagcgattcacagcttcaggaacatattcttgttcaagagtcatgtaaactacttctctgtgagtcggtgagaagaaacaatgccttagggcaacaatatttggatgatccagcatttgcataatttgcaactctctattcttgaatcggtcgtcctgaagaactatcttgatgggcacatattctactgtttctctacattttgcctaatataagcattgataaaacgaagaaggtatcatcagtatgtcatacatcaaccgcatggtgtttagaagagatatgaaaagctaactcacctgagaaacaacgccgaaagagccgtgtcccactacatgctctgcaatataactaaca

SEQ ID NO: 250407 - DNA, 142 bp, Glycine max
tgcacactcctacattataaatggcttgtttggtaacttcttttcaaaaatcaaactcttagatgagacacatatcctatcctagatcgaacgtagtgtcactagtattgacacgctctagtgtgtactgtacccatatccc

SEQ ID NO: 250408 - DNA, 347 bp, Glycine max
ccatcataactcttgatcaaagtacatgcctactctatcacatttcaaggatagtacgtgatctcaaaaaacaccctccctgcgacgttctcacctatttggtcccatatcacgtctaactgtgggggattgaaaaaagaaattcttcaatgcccgccatatcggtgagtacacaattattaagaataataaattcagataatttggcactcttattattaatctgcctataaagaagaatatatataggccggatcctaaaaacggactttaaaaattttaaaaaaccttaatctatggagggtagaaatattaaaatattgtctggaaaatgaaaaataatttag

SEQ ID NO: 250409 - DNA, 389 bp, Glycine max
  unsure (1)..(389): unsure at all n locations
agcttgtgctgtctaaaacagattattgctaatcttatgatcataccaagattgtgtggcttcaatcaaaatcgccttacaccattatgtaaggtccgctacatggatcatattacaccttagacttgattaaaaaccaaattcttaaaagatattattcaccttgaggtcatatcaacaaataaagggatcagtttgtttaaacttaaaaaaaaatcaatttaaaaaaaaacactttttatataagcgcttttataagaagcatctagaatntgcttcttaaaaaaagcaggaaacactaacccaagaagtctaaccttttatcattacttaaagagaatttattntaataaacatactacagaacaganacttcaatcttgaatatt

SEQ ID NO: 250410 - DNA, 115 bp, Glycine max
tgaagaaagtttgactttcacatgcctaactcccttgagtggcatttgtattcggtgctatcttgtatgttgcatcttagtacatatgatatcgtattgcatcatgtatcatcat

SEQ ID NO: 250411 - DNA, 493 bp, Glycine max
agcttgtgtgaagagatagatagaataagacttttatatttttatgcaagtggctattggtagtcggataatactactaactcttgtgtaagaaacttgcgtaaattgtatataactcctcccatttataggcatttgggaggggtctaattactttttgttaaatgtaggaaataaacactaagtatccccattttgcgtatttaaagaacattccttttcaaattcatgctaattcggcaagtttggtggaagtgttgattttgagctgctcactaagccatttctctagcttagcaagccatccgctaagcacaacagtttatggttaagcgcgtagaatatcttggaagcacatgatttgcatgatgcgctcaacgagaatacataacaaagcacaccgcttgtacactccagctgaacgagcatgactggcgctaatctataagtcacttacacacacatagcgagcctatttccgctaagacacgcc

SEQ ID NO: 250412 - DNA, 300 bp, Glycine max
actctatctttatttttatgtgaaaacacatcaccacaatcaagttatgctgtctacaaccaagtagtttcttggccatcttcttctgcaacttaaatatcatcttggaactgtgcacccaccggatcacttgttcaaagaaccaatgctgtaaaaagcttcattaatcacccttcactttttgttcaaacattccccattccaaaaacctcaacacaatctttcaaatgatactatgatcccctctaaatttatctgctgactgcacggaaggtatcctactgtgacttgatccaccac

SEQ ID NO: 250413 - DNA, 372 bp, Glycine max
  unsure (1)..(372): unsure at all n locations
gctgcagctggatgcttttnatgtagaacacctttataattaagaagaacgaacttcagaaggataatcagcatatatagttcaagcaacattaactttgataccaataatatttcatcatagagaacacgatcagaacccactgatgaaagcacataagtggtaacagacctaatcactaacatcccagctaatgatctaaagattagatccatagttttggacctcaatcgaaaaggaagaatctgaatatgtcggagttggaccacaattagccataatttatctacagctgaacaggagaaggttcatcatataaccataagtcactattgcaacatcacacggtatagatagcttccatatacacac

SEQ ID NO: 250414 - DNA, 362 bp, Glycine max
  unsure (1)..(362): unsure at all n locations
tgcttcagatatagctgatatttccattaaagaagaatcttcttatgcatctaatactgctcaagataatgctttacccaatcagaaggaggctaccggtgngtcttagtctttcactggtactagcacagcttctattcgcgcaaatgaatccaccacaaaaatagtaccaactcaggcttacatttcgtttctaaagtcaccggcaccaaaataattccgtaagaagccaacggttcgggccaaagttccttttgagaaaggctacagtcaaatggactggctcaagctcacccaaacacatcctgaccttgcaggttctcatactcaattnttttactatgacaattcaatcattatct

SEQ ID NO: 250415 - DNA, 401 bp, Glycine max
  unsure (1)..(401): unsure at all n locations
gtcacctgcngcctgcaagcttaaaacttcaagatctgaacctttcttccttgacaatatcttgaaagcttcatttaaggtaagggaagtctctttcacttcttaaaccctaacattgttgtctttggaagctaggcttcattacatgttgtgatgtttaaaatttcgtatatgctgccatgactggaactggatgatatgttgtcttttggaagttttaaggctatatgtgtcttctttgagtgttaaaacatatatttagccttatatttcacttaaatcggcattttctagcatacgttacgaataaaacaggtttaaaacatttactggataaatctgcccaaaaataatttgcagtgaaactgatggctgtnttcttaagtttgacctcaaatgag

SEQ ID NO: 250416 - DNA, 376 bp, Glycine max
ttcgttatattgctatacaggataagatttggctcttgctctattggacacaatatatgatgatgattctaatagttgactctttttgcaccttttagacgtgttattttgcttaccccttaatgcaatccacacaagtctcaaaattagcaaaaatccaaagtactaaatactccctcatttaccaatcttttaattctctcgatagagatgtgtgctaatctacagtgctacaacatagaggattgctcattcacaacacatcgtttaaccccgatggtaacatgcatagaattataagcggtatcattttgcaattcaatatagtaaagaccatcgagtaatgcaccagaaccaataattctagatttattaa

SEQ ID NO: 250417 - DNA, 353 bp, Glycine max
gtcaaatattggtatttttggccacagaaaaacaaaactttgacggataaccgttatgatggcaaataataagagttcaaataaattatattttccaccctaatcataatctataatgataggtagaaaattgttacgattattttaaccactgttgaaaagttcactacctcgccaaattaaatcatgccacgagacgtatcatatcccatcttcagattggtagacaacttgaagaagacggtaagggatgctcgaccccaacctgggaatttctggctgcccatgccctggaattgagaatttatggaaagcgtatagaaaaccaagaccggactttaacggagaatggt

SEQ ID NO: 250418 - DNA, 189 bp, Glycine max
  unsure (1)..(189): unsure at all n locations
taacactaacaagncttggttcttgtagtcctttaaacggtttgaattatcaagtttctgactaagttaagagttacttcctgagaagaacaaaaccgatcgaaaactcgggaaacttttttttacttgttggatcaaaaaaccccaaccttgtccttgttaagctctaaattcgacaaaggcttttgg

SEQ ID NO: 250419 - DNA, 417 bp, Glycine max
  unsure (1)..(417): unsure at all n locations
taagcgactgcagctgcagcttgtttacagaagaatttatattatgttgacatatttatgaactttctaaacccttcattnttaacaaacttaaagcaagtgtatcaataattatcatctttgcaagcgctattagagtatgctcttgattaaaatcaaaaagtttcatactaactctatcagataaggttgttgtcctagcccttgatgtggtggagtatcatgtccttgtggtagagaaggagctcttgtcccttggcgtgatggactttgagtatgatatggagagagtgctaattggtggaatnggagatgaatcattaacactccatgtaccttttttcttttccaattgtctcatttgcaaaatctaatgaaccttatcacaatanaacattacacagnttacacctttat

SEQ ID NO: 250420 - DNA, 367 bp, Glycine max
  unsure (1)..(367): unsure at all n locations
ntttctgtacacgcattagaactcttctccttacgtcacacggtctatacacaaaccctatttacactcaaagatttttttcattttttccaacacacacttatagttcacacaaaagtttcttcatatacactcgttgctcacacacacaagatttcctttccgctctatcctttacacacacaagatcctttatacccattttgccttttcacataccgggttgaaaaaaaaaccttgtcctttttatatgaacatcacttttattcacagcgcttctctcttatattaagatctttgtgacattatactttggggacagcgtccctaaatgaaaaactccacacgactccggantttcaacaaa

SEQ ID NO: 250421 - DNA, 489 bp, Glycine max
  unsure (1)..(489): unsure at all n locations
atctctgagtcacctgcggcatgcaagcttgctcaggaagcctatattcagttacaactctgtgtgtgagtcaagtaacaaagcatttaaaattaatatgacgcatgggatttaaggaaaggaatgtccaaacatgccgggtgctgatgagctgtaacaataaatagaagaggtttgcagcagctgagcaacgtggagaagaggagtggatgtattggtagggcaactataataaacccaaaaaaaaaatgttccaacttccatcccctacccccaaattgggcagggaggggggaatgaaggtgagtantggaattggatggaatgaattttattgggttccatgtcatgccatcttttttttacaatccaaaccanacaatggaatatgatatcatctccttcctccaatccaaacataaccttactaaacttaccctttttgagaactggaaaaactaaacagaaatgattataattgtgctaaac

SEQ ID NO: 250422 - DNA, 143 bp, Glycine max
tgaatgtgacaatctcagatcttttcgcacacgaatggaggaggccaaagtgagtaacagacctcaattggatagtggggatctttgtactcttgttgaagaaattagacaagaattggagtacgagaaggagctgaatgcga

SEQ ID NO: 250423 - DNA, 92 bp, Glycine max
tacggaccttaatctaacttatcacagcttttgttatggggtaactctgttttatgacttatgcattacttggcttaaaagcttggagaaga

SEQ ID NO: 250424 - DNA, 492 bp, Glycine max
  unsure (1)..(492): unsure at all n locations
agccttgcagaagaaaatgagatatntaacaaacattgtgtttgttaggttttcattattaattgtaatgttagttctagggggaatgtactctaggtaaaatgtgtaatagcagcttttgatattgtaattgttgttttgctgaagaatttgtagtatgaagtacctctcgtagtgtaatagcagcttttgttgctactgtcaattgtcgttctgctgaagaacttgtaataggaagtagcttttgtagtgtaatagcacgctttgttggtactgtcaattatccatttcaattaaatataatctgctggtgaaatatgttgctgaaatttgccgtttattaaatataatttaataaaagaaagagaattagataataagaagcaacttataatgtatgttgggatggattgactactccactccaatccacacaagtataattataaagaaaagagaacatgacttagatcattcacataaatttgcatc

SEQ ID NO: 250425 - DNA, 474 bp, Glycine max
acaagctctatatccagaaggatggtatatcttttcatcttaagaaaaggaaagaagttgatatttaaattattttgagcttcttttcattgttcaatattattgattgaagcttgagagtttattttgcataactttagtctacaactttgactgggtacattacctataacttggttttcttctttttagggttaaagttaaactctagatctatgaacttattttatgttgtaaaccaaagctagtacactacactctgaggaagttcatagccagctaaaagtcaattcaaactttgatacatatgtacccaaaataaggactgaaactccttctataactgcctatatcagcaaatattacaaacatcaactggtcaattaatcatacatatctttttctaattcacttaactcatacccctatcaaatattagacagacatcgactgaactgtgattgcacttaacat

SEQ ID NO: 250426 - DNA, 122 bp, Glycine max
ctgacttctactcatagatccattccagtgctcatggtgatccttctcatcattaccttctgaagagaaagaagtgatcatcaagtcttaaaagtggattgaaagagtatcaaagatatctt

SEQ ID NO: 250427 - DNA, 196 bp, Glycine max
  unsure (1)..(196): unsure at all n locations
gtacgcgacactatgatacttagcgtgctttggacagcaaagcccactcagcatttgatttattcctgacatctcanccaaccattaaacgtacaagacattatgttgatgtttgaacctcacccactcaagggatgacacaattatgggttttcttttatgaaacaacgatgccttttacccactttatttccct

SEQ ID NO: 250428 - DNA, 423 bp, Glycine max
  unsure (1)..(423): unsure at all n locations
agcttgttgaaatgccactgttggatgagttaaacatacccattctcgtttanggttnttgtgatgatgtntgtgatgtttatatgctgaaattgctgatggaaaactgttagagatgaagggtagaactaacctagggttagaaagtgagaatgtgatgttatgagtggaaaaagagtgaggctttgagagttggaaggctaagtctgaattctgtggtaaatggaggttaaagtgagttaatactagctcgaaatgtcatttangacttgggagaaagcttagactgtgctatagagaanaataaatgaccaaagtgaacaaagagccatttctagggcaaatttgggtgttgaagagcaaattttgattcggtgagatnnttatgtgtaattcagtttgagcaagtttagaatgatgtta

SEQ ID NO: 250429 - DNA, 173 bp, Glycine max
  unsure (1)..(173): unsure at all n locations
ttacggatntggtcttcaccgggtaaaggatcaaagcgggtttgaaaagaggcaaatntaatcatcctgcttagacgaatgagaaaactggggcaaatgaagagggtgagaataagggagaaacccatgctgtgaactgcatttctatacagccaagtttccaccaacctgac

SEQ ID NO: 250430 - DNA, 487 bp, Glycine max
  unsure (1)..(487): unsure at all n locations
agcttctanccaaatggacttaccttgaattattttctttgatagccctttngagccttgtttccctctccttgttgtgaagctcactacaagccttaagtgaaaaaccatgatattaccatatccttaaggaattgtggagctttggaattgtcttgggaataagtgtggggggttttttgtttcattggacaacttgttttgttggctatgcttcatgatgtatgttgggccatacttgatgtacattgtatattggttaaatgttggacatgctgaatgaaatgttgctctcacaggctaaagagtaaagaaaaaatataaattctaataaaaaaaattcataaaagaaagagaaagcaataaagttgagtgaataagatcttatatggcacaagaatgatgaaactcttggttctactcttcatgttgaattntatcttacttcttttatcgtctattttttgtctaaatcgcttattccctt

SEQ ID NO: 250431 - DNA, 172 bp, Glycine max
atttgttacttacatcacacacatctccttggctaaattacatacatgcatactcaaagcattttggggtgccaaaattgacatgtgcacatcttggtatttctaatacctatacatacacaaacttcatgacgaatattgactatctacacaataaagtgctacatttcat

SEQ ID NO: 250432 - DNA, 360 bp, Glycine max
gagctgcagcttgctgttgatgcacaatatgatggtctagtttgttgggaaacaatcaccaacccggaatgggtttatgcaaagacaaccgcggcataactagcttgataaatgccaaaggaaatcgtgggaagtatggtttatgctataaacccactcaggcggatataataaggagcatcgcagatagacagagcggtggtcaaagctcgcggttgatgcaagaaagtgaaggaagcccgccttgccacataagtagatactttataggcgcaggtctgggatacgaaggtcaagtggtcgcgatatactaagatgatgttccgagtacattggatttgtacgaccatgccctcctga

SEQ ID NO: 250433 - DNA, 190 bp, Glycine max
  unsure (1)..(190): unsure at all n locations
tagtcgatttcgttaaatatgatgaaatttcggtagcatttttgcttgatctccaagtacacgacataaaagcggtgagattaattccctgacnatcaagtatgcactcagagaactagaaatgcattgtacttgaaattcatcaaattcaacaaaattatctaaccttaccgcatgaatctaccataaa

SEQ ID NO: 250434 - DNA, 421 bp, Glycine max
  unsure (1)..(421): unsure at all n locations
acatctgacccggatccttaagtcacctgcggcatgtcaagctttgtgtgggatacccaatgtgagcatattttctatacccttaaggaaagaatgacaaccactccagtgcttgttctgcctaacccgagagaaccattagaggtgtattgtgatgcatcaaagatgggtttaggaggagtgttgatgcaaaatggccaagtagtggcctatgcttctagacaactcangacccatgagaggaattatcccacccatgatctggagttggctgctatggttttcgcccttaagatgtggaggcattgcctatttggctccaagtttgaggtgtttagtgatcataaaagccttaagtacttgtttagtcagaaagagttgaacatgcgtcaaaggagatggttaaagttcttaaggatat

SEQ ID NO: 250435 - DNA, 456 bp, Glycine max
  unsure (1)..(456): unsure at all n locations
ngggctcttgcctcactcaccgcctttttgggttcatttctatctatcttatacttatcccaagtttcagaatttctacacctagaccactccttgaaacactcctttnttactctaactttgctctgaacattttcattccaccaccacgaatctttacccctatgtccaaaacctctaaattaccccaacgtctcttatcccacttaaataatctcttgggacatcttgttccacatatcatttgcacttccttgtgattgtccacaccaaccctcccatatcttttgttggaagattccttgtttctcacccttcaagtgccaccatttgatccttggtgctaccagaggacttcttctctttgccctatctctaattcttacatccataacccaaactctatgttgggtagtcaagctctctcccgggataactttacagttcaagcaatac

SEQ ID NO: 250436 - DNA, 120 bp, Glycine max
  unsure (1)..(120): unsure at all n locations
gttctggcacgcgccttataatggatacggcttatgtatttatacagncaacgaagacgatcatcaacaagaccgtcgatgacttcgttcgatgttattataaaattgcccctatgtgac

SEQ ID NO: 250437 - DNA, 367 bp, Glycine max
cacggaatatattgttgtgttattataaagttactcactggacatctatcaaagaactaagcgtgaatacccactaaaaatactaatatctactacaacttccatggatgaatatccagtggatcaagcattttatttaattaagaatgagacaatgtattgtatatatatatgtacatatatctatatgtctatttataattatctcttaagacctcaatctctcttatcagagtttatgttgacttgtatacgtgaccttgtttagattctagttagatatgttgtacaattacaatttataccgcgaaaagatagttcaaactcctcccctttttaatctaacaaataaaatttttatttttac

SEQ ID NO: 250438 - DNA, 334 bp, Glycine max
tttagttaaattattaaatcataaatattcgataatatttattatcgacatagactaaaaaatataaaataacataaatgacatatttttttaaaaatggtataagaaaatcaaataaatattttaaggataaaagcctataagttagaaactaacattttataaaacactacttcaagtagtatttgaaaatgttagaaaatactattagtaaaaaaagtttaacataatatatatccttaatatacggataaatatataaaaatagtctaagtataaacttttatttaatgacgcatataattgactaataattcagaaacaaacaatgtaa

SEQ ID NO: 250439 - DNA, 120 bp, Glycine max
aaccagcctcaaaaccagacaccccaagcagacttatttttaggccacacacaaacgggggagccgaatgaacacgcaaaaaggcagggcaacccccacaaaggaccacccgaaagaaga

SEQ ID NO: 250440 - DNA, 424 bp, Glycine max
  unsure (1)..(424): unsure at all n locations
agcttgaataggatgctntaatggatgaaaagtattatagaatgtgggagcacaatactgaaggaataaaagagggaaagaagtggaactctgaattgtatctcataagactctcattcatcaaagttaccacaagtgttacacatgctcctatttatagactaggtagcttccttgagaatatttcttgagaaaacttccttgagacgcttctttgagaatacttccttgagaagctagagcttagctacacacacccctctcataactaagctcacctccttgagaagcttccttatgaagatcctaaagaagctagagcttagctacacatacctctctaatagctaagctcacctacttgagatgagaagctagaacttagctacacaccccctataatagctaagctcacccgcatgac

SEQ ID NO: 250441 - DNA, 191 bp, Glycine max
tcaattaccttttgatcatacacttgtagtaagatgaatttttagcttactattcttatttttatggaggatggtgtggtcaaactataggcttattgggggactaaaacaaagttctccttaaaattcttcccgcaactttagaggaagttacgattaccacaaaactaatggaatagactgtcagtcat

SEQ ID NO: 250442 - DNA, 449 bp, Glycine max
gctctatatccagtaggatggtttaacttttctttttaagagaaggagagagagggatatttaaattattttgagcctctcttcattgttcaatattatagatggaagtatgagagtctattttgcataactttagtctacaactgtgactgggtacattacctataacttggggttttcttttaggatatagttaaactctatatctatgaacttagtttatgttgtaaaccagggctagtacactacactttgaggaatgtcaaagccagctaatagtcaattcaaactttgatacaaatctacccaaaataaggactgacactgcttctataactgcctatatcagcatatattacagacatcaactgggtcaattaatcatacataacctttttctaacttcacttatgctcatacccctttataaaatatctagaacagaacat

SEQ ID NO: 250443 - DNA, 382 bp, Glycine max
  unsure (1)..(382): unsure at all n locations
agcttacaaatctgttntaagtcctttcctatatacgatatataataaaatctggacaagataagataagattggatgaattaaaatctggacgaaataaaatctacatgaaataaaatctggatatgataataattgataaaatatatattgtctgctctcttcaagtacaatctcaattccggatacaagcccaattgcttataattttcctgaaattaaattaaaaacacaaaattagtcaagttggcccaaatgataaaactgcataattaaattgacaattaaggctaatcattaattaaaatgatgaccataaggattaagatataggagataataatgactcatcaaatcccccgtcacttagccctttccactc

SEQ ID NO: 250444 - DNA, 395 bp, Glycine max
  unsure (1)..(395): unsure at all n locations
agctgtccataaaaataggattctgaagtttatcatttcaatntctcattaagtaaaatggatcattttcaaggtccaacgccttataatgatcaccttttaagtaaaaaagaatcacttgataagaaagaactacgtaggtctgatttcctcatcgcaaattgaggaatacgtacgagcacagggaaacacccttgtctatcactaaaagaaaaacatatataaagggtgtaaaggatataaggacataaaaagggaacataaaanaatcaaagtcatgtttgcacattcgattaaaggctgtcgttccttgngacggacgtgtggggtgctaatactttccccgtgcgtaaatacaactcccgaaccttncacttaaagttcgtagaccgcgt

SEQ ID NO: 250445 - DNA, 122 bp, Glycine max
  unsure (1)..(122): unsure at all n locations
tcttatccaagacactctctntggggagaagcttctccttccatggcttattctctaggggatggcgcctcctctctcctcttctcatntatcttctgctgcaactccatggttgaaaatca

SEQ ID NO: 250446 - DNA, 467 bp, Glycine max
  unsure (1)..(467): unsure at all n locations
gcagcatgcagcttttggattgaaacaaaatacttactcttggcactgaaattcctgactctcgaattgttcaaaaaatactcgtaacaattccagaaaaatatgaagccacattgacttccttggagaactcaaaagatcttactactatcaccttggcagagcttgtgatcgcacttcaggctctgaaacaaagaagactcatgagacaagatggtactactgaaagggctttggtagctaaatcactggacaaaaaaaagaatggcaagtcaggaagtctcaaccacaaaaagggtagcaaatcctctcatgattttccatcatgtccttcttgtaagacaaacaatcatccacagaagaagtgttggtggaggccacatgtgatatgccatatatgtggacaattanggcatgtggagaaaatctgcacgcatcacaaaaccagagaatgtacaactgtattg

SEQ ID NO: 250447 - DNA, 150 bp, Glycine max
aatggaaaatgttttttccctaaggaagcctagtattattccttacttaacaagaatacctatacctcccaaaaaccataattggaagagtcgaacaattacacaagtttatacacaaagtaggcgtttcaccgactacaactccctaaa

SEQ ID NO: 250448 - DNA, 453 bp, Glycine max
  unsure (1)..(453): unsure at all n locations
gctnggatgcatgaactttgatccgaggaatattaataacatttaattctggtagagaaaaatactataaggttcacgagaataacttttgaatattngaaaataaataagaaatcctaataggaaaaggaaagtttgaggagacatggaagccacgtggcgaaagacgattgacacaatgagatccggatacagattcagcttaagaataatatgcatgaggtgtggtaaatatcttaatactttaattggattcctatagtacagattaaaaaaatattgttaactgtattggttagtgacctaaaaagactattgtttatttaanaaaaattaactgatcatgtaaccgcatcattctgttccttttaatttattgtgtataaaaaaaataataatttgtaatttaaaatgaaaattttctttattgaaagtcagtgtgagaagtaaagt

SEQ ID NO: 250449 - DNA, 169 bp, Glycine max
  unsure (1)..(169): unsure at all n locations
taatntaattngggtatgtgttaaaacactctnttcaacatgtttacaattaacattttaaaagaatgtattagccatgtgtcctatttcagcctctgccccttgtgaaaccaggtaaatattatatagaactctgattctcttctagtcttcttatattaaatattat

SEQ ID NO: 250450 - DNA, 363 bp, Glycine max
agcttccaatcatgcttctgtacagactttgatctacactggtgccagcttcatcctttgacagcttcaagtgagtaggtgcaggtgttcttttatggctggcattttccatcccaaacttcttgacaatgttctttgcatacttgctttgagagaggaacatgaagtcttccatctgcttcacttggagtcccagaaaataagtcagttctccaacaagactcatttcaaattcagattgcatctgttgaacaaaatgtcgaagcatctcattcgacatccctccaaacacaatgtcatcaacatatatctgtgctatcatcaagatttaagcatcttgtttgacaaagagagtcttgtcaa

SEQ ID NO: 250451 - DNA, 137 bp, Glycine max
  unsure (1)..(137): unsure at all n locations
ttttggagtanaaacatgggaccaactcattntatttgtattaagaagtcgtatccagtcaagggctgagagaccataccatttttctaacgatttctaattatgtgggccattaaagcctatcttatgctgacaat

SEQ ID NO: 250452 - DNA, 94 bp, Glycine max
ttcatgttacgccctattctctctctcaacaccttatatttatgtatatggccctcttatcttttccaaaccaaacatagaaccctctgtccta

SEQ ID NO: 250453 - DNA, 467 bp, Glycine max
accaaaaactcactatctacacaggacatgccataagatggatctgtgcgcccaaaagtctcaacaaagccagagaattgttttgcattctgaatgccaaaattaatcataccgttattgacttcttctgttgaaccccaaaacacgccacttaaaaaaactgaacatgtctaagggaaatttgggaatggagggggaatacgttttctaaaattagtaggaactccttaagacttaaaaagggcatttcaataagcacaagtcttgtcacctgaaccaaatataactaattaaataccatgactaccaagctaacccatgacctcatcccaatgttgacaaccaactttgaagtgaattggaatgcatcctatggcacaatcatctttaatgagtcaatgagaaaacggattggtaaatctcaatggtcggcatctaattgtccagcactacaccaaagtcacatt

SEQ ID NO: 250454 - DNA, 359 bp, Glycine max
  unsure (1)..(359): unsure at all n locations
taactagggatcgaggtttantaatttaggctatagtatagaacacaacagcatgatngattaaagaaacatctttatatccatcagctagtcagttagaaagacccaacacttctacctattgctgtcaattttacttacttgcatttttactgtttttagcctagacttagtttaatcctattctaaatcatcaattatcaatatttctttcaacaatgccatatttctgaatttaaacctgtcttagactagttccctgagttcgatactcggattcatccattttaattntaaatacttgacgatccggttggctttccggcaaaccggatttcccttgaacatatntgtataaa

SEQ ID NO: 250455 - DNA, 58 bp, Glycine max
gacactatgaaactcagcttaaaaacagaatgatgaagtccgattcaaactacccgtg

SEQ ID NO: 250456 - DNA, 399 bp, Glycine max
atgcaagcttaagcgctattaattctcaattaagcgaatatttgtcttgaggcaagggctcttctctataacctagcatgcgtaagcaatatatttctgagcttaagccgtgattggttatgcacacttttgatattctacaaaacagtttcaaaaggcttccaaatttctccaatccaaatatcacatatgtataccataacataccatattattccacacccaaaaacaacatttcaagaatcagacattcatacaaagcattcaatcaaattaaagtttcctcttacctaataaataacccacaaccttgaagacagagcaatggaagagacttggtattcaaggatgatctttactcaactttgtatggaacaactatgaggaacctataccatt

SEQ ID NO: 250457 - DNA, 474 bp, Glycine max
  unsure (1)..(474): unsure at all n locations
gcaagcttgcatgcaatacttaaaattgagatagattcacgatgttaaagagatgcattcgatccangacacgaaaagtgaatattttgtagcgtaactaagtctgggtaagcgaaaagagatgatacctgttcttactagtcggcagaaaacagaaactgaaggttgattgggtgtagagagataaaactatgaattgagccatcagcgtcaaccaagttgcaatttgcaaagacttgttagttatctcaaaaataaaattacgaggataagagagagagatacaataatacgaagggctcttctcactacaatgtcggagccactgtgaaacgaagcagaattcacagtgaaactattctgctacttacgtgaagagaattaaagaataacacagtacatgtatggaataataaccctctattattgaatagtcaagttctgatatctgctccaacttgttcctattactga

SEQ ID NO: 250458 - DNA, 243 bp, Glycine max
tctggattaactcacaaggcttcctaaaaatgacttgcacacttgttcccgtgttttctttctggaatgccatatttgggggtaaaccgcctttagataattgaccccttggaatacacccttttctctcacgaatataataacctgcggcatacaattttgtttggaataagctgtggtggacactttctgttatatgccctttattgtggggtttaattatggttataataattattccta

SEQ ID NO: 250459 - DNA, 459 bp, Glycine max
  unsure (1)..(459): unsure at all n locations
gcgagctgattcaaccttagtttcatttatatattanccaatccaattaagaatgagaaatcccatagagagaacgcccaatcgagtttttcgcttcattttactaaaagatattctattattattatattattactttatctctttcttgatttccaacatggatacggcacgaccgaacggtcggaattcattttaaccgaaattaacggatgatacacttcaaatgatcggtggaaatttattctactttttgattaggcgagaaacgacttaaataaatgactgacgcacgtctaaagggggtatagaacgcgagaataataatacatgaaacaaaatgtggaccaccacgggtacatagaatgaattaatagctcggttggggtcttaccgctgagactgaagacacgaaaacgaanatgaatgtcaacacggttgaaatcttcgcgtatactc

SEQ ID NO: 250460 - DNA, 330 bp, Glycine max
cctatacctttccttataaaaagaatgcacatgaaaaattaaatgagttgtttcccacctttttcttggcccacatgagctttaactctttaatcctctattgttcaactgtcccttacatcaaaaaaaaaaattacttgctttcaaacttttaaacccaggtcacaagagaatcaatgctaaaaactatatcttcctttggcttaattactttagtgtggcaatttttcccaagcttctctttatttttcttataaagccaacctttatctttattctaaccattttattttttttcgggaaatgtttctttgtgaatatgatgatcat

SEQ ID NO: 250461 - DNA, 405 bp, Glycine max
  unsure (1)..(405): unsure at all n locations
tctctcatataattatttgaacttaattactatagtaattgaaattagttccagaacaatctatatgtaaaatttagaaacttcatcatcaaaattcagtgaacccacaagtagtgatggaaaaaacaatcttctataatcatatattaggcactattttatccaattttgagtgcttattctgttccacaagcgtcttganaaaccaaaaggcacatcctaaacattcaaccaatattaaacgtttacaccaccaagctatcagcaaatatagcacctaatagttagaacttgataaataataattaagaattctgccaaaggtgtattctaagcccgactacatctagatatgtncatcaaagtggagaggacatacaagaaggtcactactcatatatgatg

SEQ ID NO: 250462 - DNA, 406 bp, Glycine max
  unsure (1)..(406): unsure at all n locations
agcttcacgcattcgctcggggaatgacctgattatcgccttcattatgcagtatcaatataatactgatatggctcccgataggactcaattacaaaacatgagcaaacgggaacactaatccttcaaggagtacacctattggatttcccctgcgggtacattttgttccactttttcttcgtacaaatatattcaagggaaacccggnttgcctgaaagtgcaccggatcgtcaagtatttaaaaattaaaatggatgaatctgagtatcaaactcagggaaactagtctaagaccgggttaaattctgaaataaggtattgttgaaagaaacatcgataattgatgtgttaaaactgaattaaactaggtctaggatacaaacagtaacaatgcaatgtaat

SEQ ID NO: 250463 - DNA, 314 bp, Glycine max
agcgagagtaacaagaacacctttggccttattgtactccttcctaagaatcctaatagcacgaatcctcttcactctctctttgtagatcctggatttctcataggcttttaagcgaatctcttcaagttcttgcaatgaagcttcttccaacccgcttatcaaagccagtacaaccttcaccgccataagtgcagacctatctccccggaaatggatgccttccaaaccccataatggaacatccccaaaggtaggaagctatcttggggccataagctacaaagtcctgcccatcctctatagagcactac

SEQ ID NO: 250464 - DNA, 313 bp, Glycine max
agcttatgctacaaacatttataatatatcccctcagtagcaaaaccaacaacagcagaataattatgatttttcaagcaacagatacaatccagggtggagaaatcatctaaatctgagatgggcaagtcctccacaacaacaacagcctatccctcctttccagaatgctgctggtccaaacaagccatatgttcctcctccaatacagcagcagcaatagcagcagtcacaacaaagacaacaagcaactgaggctcctcctcaacctttcttataagagttagtgaggcaaatgaccatccagaatatg

SEQ ID NO: 250465 - DNA, 329 bp, Glycine max
  unsure (1)..(329): unsure at all n locations
cctttaaactaactttgtctgggttgatataacatgtgtattaatttttggcctcaattgagtagcttccttggtctcccaaatttaaaaaaattctagtctcattttacaagtaaattttttagattttgttcgagggtggtttatagctttgagtcttgaaaattttaaaataactaatcattctttagttttagtttgaaaacagaattcaactaaaattttaaatatgattagtttaaaataactcatcttgaaatttcatattattttaaactagttaagagtgtttacggtggtggtaccantatgatgatgatgatgatgtc

SEQ ID NO: 250466 - DNA, 396 bp, Glycine max
  unsure (1)..(396): unsure at all n locations
tattacccacaccatacacctaatctatctatgttaagaaaatgacatcggcagaaatgcagttgagaagggaaaggggcctaagctctacttgtgatgacaaagatttcccctagccatcgttgtcctaataagcaacattttgttctacagtgggaagaagaggatgatcctgcattacaaccagatccaccagacgaggttgagacagttggtgaccccagttttcaaactcatcatttggcttataatgctttaaaaggctcatcaggtcttggaataatgaagtgcagattgcgagtgcagattctactagatagtgngagttcagataacttcctccagcctagactagctcaatgcctgaagttacctgtacaaccaattcctaatttg

SEQ ID NO: 250467 - DNA, 458 bp, Glycine max
  unsure (1)..(458): unsure at all n locations
tatcttacctatntatctcccagttgtctttgcaaagattctaatagataaaaacatgaagttctaattcaagatgttttctttgttgcatgggcataatgcaatcactctatgtctagcaatgattttattaagatgtccctacctttgagttctactaaaaattatcctctctcgagcgactaatctctaaactgatgccatataaaaccttcattgtttttttactaaggataacccttttttaagcgccaaacccctaaagatgatgcanggatgaagcatataatacatttgttggcattttaggcctgccaagccctaactaaaggggtttagcctttcattgtcatgagagacttttacactttangggggttgatattggatggaagaaagatggatggatagaagaagaaaagaggatantggacatatatagaaagtgggtttccatg

SEQ ID NO: 250468 - DNA, 420 bp, Glycine max
  unsure (1)..(420): unsure at all n locations
cacactcttagcctagggtttcctcatccctgccattgcctccattctcctttctccatcctactcatctttatctttgcacattttgcttgagagtgctcagaatgtcgtcgttcagaggaggcgctgggccgtcctcggaggctccgccgccgaggcggatcatgctgactcanactgcngggaacctgggagagtcggtgattgacagtgaggtggtgccttcctctctggtcgagattgcgcccattctttgtgtcgctaacgaagttgaaaagactcatcccagggttgcttatctctggatgtatcgtttctctcttcactttccgtctaaatttctttctttttatttagagtgtatgtatgctgaactttgcatcgcaggcccgtattatggccttgagaaagctcatatgg

SEQ ID NO: 250469 - DNA, 318 bp, Glycine max
  unsure (1)..(318): unsure at all n locations
tgaaattgaacaacggaagctctcgagaaattcagatggtcataacttgtcacacggaagtccgattcaggcgcgtaatatacagagacgctccaaattgaacaacggaagctcttgagaaattctaatggtcattaacctttcacacggagggaccgantcaggcgcataattttccgagaaccttgaaattaaacaagggaagctttccagaaataaaaatggcattaactttcacactgaacaccgattcaggcgcataatatatcgagactctccaaattgaacaacgaaagctctcgagaaattcatatggtc

SEQ ID NO: 250470 - DNA, 150 bp, Glycine max
gaccacacccaacagctctaaattatgagcgaccgactcgggtgcagttaaccattgaatgcttggaccccgtgataattcagacgctatggattatgcccttacgacttccgttgacaaggatgaccgtggtattttcgaagctttgtt

SEQ ID NO: 250471 - DNA, 287 bp, Glycine max
ctcagcttgaatgaacaaggaagctctcgagaaatcaatggtcataacttatcacatggaagtccaattcaagcgcataatatatcgagaagcttgtaattggacaacggaagctctcagaaattcaaatgtttaactttcaacggacaccgatcaagctctaaatttcggactctcaaattgaccaccaagctctccgaaaattaaattggtaaaacttttaaacgaagtcgattcgaaccatatattcgagagctgaaatgatcacggagctctcaaaaatcaat

SEQ ID NO: 250472 - DNA, 436 bp, Glycine max
  unsure (1)..(436): unsure at all n locations
agcttatgtaatggtgcacacttataaaaggttatacttgttattgactgcgccagacacaccccaagagtttggttatgagaatagttaaagaagacgacattgaggagtcttcaaattcattttgtcttgcctttccttaaggtggagcgtggaggtgctcctctcactaatacacctgagggaataagatattttggttaaattgtgccccgaccttcggcatcatcagtcttaatctttcaataattaatctaaaacaaagtagttatggccatgggtttctctctctgttactgatacaaataattatgggtccaaacaataacaantgtgtaacctcaaaagataatctgttatattctattgcaaactacaacttggtaaatattattcattattcgtgaacatcgatttggatacgtttgcgattatt

SEQ ID NO: 250473 - DNA, 390 bp, Glycine max
tatctagagtatattatatcgaacccatccatcctttatttaaccaataaatatagaacgattacacaattccaacctaaggcattttggccatattatacgctcctggtcgtttagtcaatctttatttgcctgagaaggataatacaagttagtgtttcaaatcaagatgctcgccgggggattttattcaattggtccaagtcttggcatttttaattttaggtaaattaatttttatcctcaaattatattctacatttattggacatttattctttggggtgattcgacctttattttaaagtgataaattaatctctatttttttagacaattgactttactttaaatagtaaattaacctacccaattattgatatctgcatt

SEQ ID NO: 250474 - DNA, 304 bp, Glycine max
  unsure (1)..(304): unsure at all n locations
gcttgaatattgttcaacttaaccttgaactattcttgttttattctctaatgactcggaaatatatggaatatcctttccatgaatttgtctaactagaatggagaaaatttactaatgtggaaagagaagtttcacgaatacgacagcctatccttcttatcagatgcatggggttcaatcctaccatattgtactatatacttgatgcantatttaatgatagagactcctatagctcacactctgttacataggggcgattaaggatacaatctaatctaatgacttgatgaatccaaat

SEQ ID NO: 250475 - DNA, 427 bp, Glycine max
  unsure (1)..(427): unsure at all n locations
cagcttcatcggatgacgcccatcgaacatttcctatacgacgtcatgcgaaaatctgatcagggatatgagttgagaacctcgttagggcgacactctgtgcgtgagagtaagcgacactgagtattttatctagccgacgattgcaccaacttcttatatataaaaagcatcgctgtgacgattaatgcgactttttacaggcagaagacagttttcttgttttggtgttgccataaaaaagttacaatgtactttcgcctaggattttcgtgcgaattctaccgacattttgtttcgggcaggaaaacattaacccacctctgcaaaanaaatatatggtgaccgtcttcacgcatatctcattctaccgaggaatagaaaactctattgccgacaacggtcgtgacatagttctgactgatat

SEQ ID NO: 250476 - DNA, 418 bp, Glycine max
acgtgacctataaaactcagcttattttagacctcatcgtcatgttcctgccgatgtcactgcttttttcaacatatcgtgaaaatattttttggcagagggctatatttcctgccaaataatggaacatggcagtttcggccacaacaaaagtcggttgacctcccacaaaaaacctatcccacctacattgaatttttttttgcacccccaaacatgaaaacctccttgccgtaaaaaaaaacttatcggccagcgagcgtttttaaaaaaaattgtcaatgctgctgaaaatatagacgggctacttacgaggatgcggtattgattataatcaatccggaacaaattgcatgatgtcgtaggaaaatcatcccatatctgtgagcttttttttgactcatcggcatgttctggc

SEQ ID NO: 250477 - DNA, 403 bp, Glycine max
  unsure (1)..(403): unsure at all n locations
agcttgatgggtcacacacataaggttntgttttgaaatactgaaaaatggtaaggacgatatatcataggactagaaagagtccatatcatatttccatgattcacatattcataaagtttcagtaaatgatgaatggctttgtatataggactaatgttataaaaagaaattgattgatatttatatatcctcccaaaaaatgggcaagagaaatcaacagacattattctgcaagagagattaattctacacaatacacagaaattagggtatgtttggtcttaaaaacattttctacttttgttttctgttatcataaattattaaaaaacatccccgtattttcactatgtttactggtttcaaagaattctacaagaaacaatgtaaacaacaaaat

SEQ ID NO: 250478 - DNA, 456 bp, Glycine max
  unsure (1)..(456): unsure at all n locations
tgacatcttatgtgtggacatcttgtacttctatgggttcttttacatcccatgcacattatgttgatgcacattgttagctgaattagtaaatgcttagtttttctcattttccctctccacacttcggacataagatggcttaaagtattatattggttttttgaaagaatgggtgaatccaggggaaatttttccatttaactttggaataagggttccttttaaggaataaaatgccaaactatttgaaggaaaaacttcctttgcgtgataatgattcagtaagtgatggcgaaatttgtccatattcgatgtggttctcacattcaaaccttattgttcaagagggattgaaagtagctagtcctgctgtaacaaaattagagaaacatttatatgtcagaaaagttaagggtgaatgaaagttttaaagcngtgttgctaagttggtgt

SEQ ID NO: 250479 - DNA, 465 bp, Glycine max
  unsure (1)..(465): unsure at all n locations
agctngaagaagttcttttgaagaagttttgggttttacatgcccaactcccttgagtgacatttgtattggttgttatcttcattgttgcatcttagtacgtttgatatctattttgcattgtgcatcatcatagtgtgtgtgaagaatagtttctaagttagagaaatttcttcagaggcaaaaactctcttgtttaatagattaaagagttgtcgtaattgattacaataagttgtctgaagtttaaagagttaagtctcgtatcgatttaatcgattactgatatctcgtaattgattacattgntgtttgagacaatgattgatttattcaagagtctctacttttatcgattaccaagtggattaatcgattacttctctcttanttagttgttcagaggtgaacaagaaccatttaatcgattacttaggtcatctaatcaattacatcggtattaag

SEQ ID NO: 250480 - DNA, 445 bp, Glycine max
  unsure (1)..(445): unsure at all n locations
taacaacccaagcttttagtttcgatgcaaggaaacatagtttatatctaanaatctgcaatttggttttaaaagtagaaaggcatgaaagttatgatatgcttgtgagagtttttacccgaatttgggctgccccatgaggggtactttgcacctaagtaacatggaaaataaccttcgatggtatgtaaatatgggtgtaaatattaggtacattgaaaaacacttttaattggtgtgtttatatgtgaatatatgggataaaatttcctggcaaagtggaatgagttccagaaaaatgtctttaacatatgcgtatntgaggataggtagcattangagccttttagaaagtgacncatgtcaaaggggcctangacgcttcctaatgatatatgatgccttgaaattctttcaaatgcagtatgtcatgacgtaagtactt

SEQ ID NO: 250481 - DNA, 272 bp, Glycine max
  unsure (1)..(272): unsure at all n locations
catagaattcaataactcaccacagtgcctatttctggaaaagagctctggaggaagcaagaggagcagtatttgccaagacacctangttttgtaatttattattgttggggtttctttagtaatggctggctacacaccctagttggggatttctaatgaatagtagatgtacatacttaatatctaattgattatgttttctatgttcaatgcttcctacaatgcttaatggttgtgtgcctttggtctgatgtctgatcatccatttg

SEQ ID NO: 250482 - DNA, 446 bp, Glycine max
ctaatgtgtattaaattattttctaacaatttaaaatcacccaaattgctttagtagattccccaaacggtcagtacaaaacactccaaaattttaaatgaaagcaacacacaccaccctatcaaaagattcacatgtagcaaacacaattgtgagtagctaacagtttaagtgccttatgttaatggataattttattatccacaatcaatcacgaagtgtgcctgtatgggtgctttggtacgaaaattggtaaatcaatattcaatcaatcagttgtggacgtacaatgctatgcacgaacgctttgttataaaaaatggtaactctgacaaaatagttttccagcaataccatatattcgtatagaaaatgaattgggtgtgcttccatcccatccgtcacgaagccaccaaacacagccagccagaacatcaccaattctg

SEQ ID NO: 250483 - DNA, 340 bp, Glycine max
  unsure (1)..(340): unsure at all n locations
ggaccttaaaactaagcttcggccgtgacctggccacgccaatagtagcttcagactcaacctnggaacctgcatctgctcaaatatccgcagggaactttcacttgcccagataaggccaaacagagctttcaaacactccgaaagaacagctggactagtgtcctccatctcacccaatggggtacccacttcattggcccctttcttgtgggattgatttctggaagggccgcttcttttctgacaaataccttcttcttaagattgctcagcttctttttcacgagaacacacaaatgattatctatcattgctccaagtcttttcacgtaatcag

SEQ ID NO: 250484 - DNA, 392 bp, Glycine max
  unsure (1)..(392): unsure at all n locations
tctcaagctgaatctgaacaagcggagaccaatctatttgatgcngagactggaaatgaaacatctgaactaagactggctcaacttcagcatcaacttccttctaatgaacctggtgcactaatgcctcctgttgaggaagcgactggcgaagataagaagaacatgatccaaagactgtaaaagctctttaaaaaaataaaattcttcgtaagcaggagggaagacctttgattttttaaccccctttttaaaagtattccagacatggtgggaattggctcatatattgctgagccatccattttttggaagaaagtatgatagattatgagatatatagacacatttaaaataactcaactatacagtcatattggactatctatgca

SEQ ID NO: 250485 - DNA, 370 bp, Glycine max
agcccaccatcttttcatagtggagtaccgataatgtgtctaccatcacgattatcgtctccctttccattattgggggtaccacctgtgccgccagatccctccaccttatgggcgtgttctttgaaagatccgtccccctttttgcacatgttctgtagttgcatcctattcagaaccatatcaaaattgtactgatactgcctaacacaggcaaccattaggtccttccaagaatggactcgggaaggttccaagttagtgtaccaggtaacagctaccccagtaagactttcttggaaggaatgtatcagcaattcctcatcttttgcggattcccccatcttctgacaatacatctatagatggg

SEQ ID NO: 250486 - DNA, 390 bp, Glycine max
  unsure (1)..(390): unsure at all n locations
tctgcatgtctcaagagttctagagagagaaaggtccaagttccagagagtttaagagaatttgggtgtgtgaagatttgcaaagaaaatagctagaagaggaagccgtcctgagagcttgagatgagtttgtgagtgatacagaggtcctagaagtggagaagaccttcccactacttgnatttctggaacctttcttcttctcatctttttgttgaaaggaaacttcccaatatggaaagctaatctctgttgatcttcttgtngtacttgatgtaaaatctttttatctattaatgatgtttgtgtgtcactgtctatcaaacttcatctacatgctttgcttgatccgtgatcatgtgtttangatcttcatagtggaactgtcta

SEQ ID NO: 250487 - DNA, 386 bp, Glycine max
  unsure (1)..(386): unsure at all n locations
gagtgaaacagtagctgtgaggctatggttaatgatccttccttgatatttgtcattcttactagcttatttcagctgcgtttcttaataatcatgttcacatctttgaaaagctgcatgtcttctgagaagctttggagcaaacaccttgtaaataaccattgtggtgttgtcacttgaagacaagtgaactgttctctcttcgcttgaggacaagagaaactgtaaacttgtgggagttggttagacatcttatatgactaactttngtataaaaaactattactaaatgtacatattctccccaattatggttcttttgtaggattgaaataaatttgctttttttatctggccaatagaaccttggaatggattaatgcaat

SEQ ID NO: 250488 - DNA, 337 bp, Glycine max
caaaaataaaggctaaatcaaagcttacctcaaacatctatcttacatcatatcaactctttaccccaatttttttattcaccaacaaaccgggtgtccggtgcttacccaataaatcaaaattgattttccactactaacaccactggtagggtagtggaagggcaatactggtggtggtacaacattgttcacgctgacacctactattaacaggtcaccatctgcacaccacaatcacaaactaaagataactaaaaattctatcctacaatgctcacgaggaagatcacacaatccacatagcttcgagcgaataacataccgtgagaacgag

SEQ ID NO: 250489 - DNA, 417 bp, Glycine max
accactggaatggtccacctgtacctggtgacatgcctacctcctacacatttcctgcagtggatcttcattatcacagttgggtacacaattcctcttatttgttctcctccaaaaagcggttaagcaccttagaacaaacctctggattcacccggtaatcaacaggcctgcccggggtgggttaatatgtccaaaatccggcgctttttatcattcctttctttgttggtcacaggtgcctctttgtaccttactaagatgctttagtattagtggaagttaatatattgctcaagccttaaatgtataagctcatattgttgtatgctgcaaatacgtaaagaaattggctaaatacttaaattaattgctagattgtaacgacctattagcatttttgctagctgtgaaatt

SEQ ID NO: 250490 - DNA, 434 bp, Glycine max
tgaagctcggagaaaagctcgaagatgtcttgtcttttacattcctaactcccttgagtggcatttgtaatggttgttatattggatgttgcatctttagtacatatcatatcttttatgcatcatgcatcatcatgagtaagtgaaaagaagaatttctaagttagaaaaagtttcttcatgaggaaaaactctctatttaaatcgatacaattctatcgaaatgattaccacaattgctgaccctgcagaggtatggctcgatctatttatcgaatacaaccttatcgtatcgaatacccattgtttcaaggcaatgactaattattcaggtgctctgtttatcgattacctgtgaataatcaatatttcttttctttagaattcagatgtggacaaacactttaatcgataccttcagattaatcaataca

SEQ ID NO: 250491 - DNA, 94 bp, Glycine max
ctcagctttgggagaacatggaccactcatttatttctatatggtggatctagcccaaggctaagaatccatacaagtttcctaaccgattcta

SEQ ID NO: 250492 - DNA, 57 bp, Glycine max
tggacacttgaagtcccctctgtaaatttttttatacatggcaaccaaattatcatc

SEQ ID NO: 250493 - DNA, 370 bp, Glycine max
  unsure (1)..(370): unsure at all n locations
tgcaactttaaccattcatacgacataactttttttctgatgtatgattgagtcccgcaatataacgaaacgctcgaaattgaatgtttaaactctgagccaattctaacgataataacattttactcggatgtccgattgagtctcgtaatatatcgacacgctcgaaattgaatgttgaacctctaagcctattcaaacaacaataacgttttactcggatgtccgattcagtgacgtaatatatcgggacgctcgaaattgaaagttgaacctctgagccaacccaaacgacaataactttttacttggatgtctgattgagtaccgaaatatatcaagacgctcgaaatngaaagttgaacctatg

SEQ ID NO: 250494 - DNA, 376 bp, Glycine max
cattcatttcagcgctcgtaattacggctaatcaacatccggtaaaactattgtcgttgaattggcttaaagcttaaacattcaacttttgagcggttcgatatattaccggacctaatcagacatccgagtataaagctattgccgcgttggaatgggcttcaaaggttcaaaaattcattttgaacggtctgaatatttccggactcatcagacatccgagaaaaggtattgccgttgaattggctcagaagttcaaaattcaatttcgagcgtctcgatatatatcgggactcaatcagacatccgagtaaaaagttattgtcgcttgagttggcttagaggttcaacattcaatttcgagcgtcccgattat

SEQ ID NO: 250495 - DNA, 454 bp, Glycine max
  unsure (1)..(454): unsure at all n locations
agcttctatataagctgaaccattttatcaattaacacaagtggagtgttattcaaaaaattagagtttatctcttttatcttagtgagagtgattctcctaaattcttgagtgattcaagaacaccttggctgtatcaaaggactttcacaacctttgtgtgttgccctcgctggaaagagtgattctttccttcctttcatcatcacccttgttctttcaaaccacaattccagaaaatccacctctgtccagaattatctcgtggccataactcccattttacgcactcaaattaagtgattcttgagcctaaattgaatttcaaaacgagacatttcacctcgttttggaatcacctcatttggagccctgtagcttcagttattgccatttctatatntcttgtccagcaccacttaacctacgtntaccatcccatcatccatttatg

SEQ ID NO: 250496 - DNA, 441 bp, Glycine max
  unsure (1)..(441): unsure at all n locations
tttccttaccctagtaacaccgaaaagagaggattttctacttcattgatatggaattatcacaatctatggctaaatgatattaacatcataaaaagaaatcttaagaaaaaattatagctccaagataaaacttttaactaaattacgaaaattgcgcatattaatttcatatgggccattccccatcaatataatagataatttatcttttacctttaatatcacaagtttgactgatgggtcattctcatacaattctagatttttttatttgacacatttgaaaaatagtaaagaagccactgtcattctttttcaacaaaagaactatatttttttttacttattttaacatcatttctttgtttaatacaaaatatatntaattactggctcatccttgcagctagctagcagatgaanattgatatatcaata

SEQ ID NO: 250497 - DNA, 308 bp, Glycine max
accttgtaaacaaaacttgtgttattcatctttttcattcccttctccctttgccaaaaagaattcgccaaggactaaccgcctgaattctttttgtggctctcttctcccttttccaaaagaacgaaagactaaccgcctgaattctttcgtgtctcctttcttccttgtcaaagaattcaaaatgacacagcctgagaattcttttgattcttccctttcccataaacagaagttttcataggagtaaccgcctgagaattcttttgttttccccttcacaaagtttcgaatgactaaccgcctga

SEQ ID NO: 250498 - DNA, 407 bp, Glycine max
ttgcatatcctgtgataaaccttagatagtaaccagtgttgtctaagaaacctcttagctgcttgatattgagtggtgtatgccactccttaaacttgcctgcaccttaagtaacatccatagcaactccttcaactggaactatattgccccaggtctctattttccatacacccaaaaagccttttaaaccccttaccaacaaaaaatgttttttaaatatttgaaacaacctcttaatggcgtaagtgttcatgccatgtggaactatatacccatatatcatcgaaaaacactaacacatattttcttaaagcatgttggaaaatatggttcatcaaacacttgaaagaagtcgaagcattggttaaaccagatggcattattgggccgaaatttgactatga

SEQ ID NO: 250499 - DNA, 351 bp, Glycine max
acggacctatgatactcagcttagctcgtcttcagacatgccttgaccctgatgattctttcccctctcgagctgagcccctatgctgcctataaagccctcaaacttgcttggtcgggtccttcttcaggccctctggttctcgtccaagcttcacggggcatattgagcccctattcataaaccttttaacttgatgctatggatgaactctttcaatcccagctttcagcttgcttaggctgacccatacttctccaacttaacccacatcttcatagcttaattggagcatcaatctggtcgtcttaccgtatatgcgcagaccatatactcctactttgcttctac

SEQ ID NO: 250500 - DNA, 286 bp, Glycine max
  unsure (1)..(286): unsure at all n locations
ntatcaaatggatgttaaaagtgcttttctaaatggctttattcaagaagaagtatatgttgaacaaccaccaggttttgaaatgttggataagccaaatcatgtctataaattgaaaaaggctttatatggcttgaaacaagcccctaggtcttggtacgagtgtctaagtaagttccttttagaaaaggacatttcttgaggaaaaatagatactactttttcataaagagaaatcacatgatatctattagttcaaagttatgttgatgatttatttttggat

SEQ ID NO: 250501 - DNA, 417 bp, Glycine max
  unsure (1)..(417): unsure at all n locations
cttccaccccccagagggntaatgattgctccttgcagcaccttaagtcacgcagctgcactgaacggcgcggtaaaaataatgttgtttttccggagcaaacacttaggttctaggagagcatacacccattccttatgtgctcgacaaaccatagataattcttttatctcacaaccctcaaccttattagggtgccacactgaatagcacaccaaaattactcgatacacaataggtgccagcgcttatgtcttaaactctttttttgacgatgatactagatcacaacaccacacaatgagggcctcatcacccgttgttggtattatggccctgaacaaaaattacccaagacacctgcccaaaattggaacaaactctgtttagaccataagagtggtccctataacctaa

SEQ ID NO: 250502 - DNA, 304 bp, Glycine max
ggaccctaatcgacgcagctgcagctttcgctatttttgcgggtgtcttttttgatcctcaaggcgacaagttcccatcgactgctcctgatgttctttgcgttatttggtctagggggtaccttaaatggttttttctgacatgaagcgttagtgttaattactagaacaatgggtaattgcctcattgaggaaaacttcgaacacgtcatgtgctgttttgaggtaataagaaaatggataacacgagcctaatgagaggttgaatgcatgaaatgcatttgaactttcgagactctatact

SEQ ID NO: 250503 - DNA, 380 bp, Glycine max
gcttcacttatagagagtactttctgcttatcgcaacaagcgcgctaagagttatccaagaatcaaaacccctaagagattggcgcttagagcttcctggcccgctaagcccagcttaaaagctcaagttacataatggatgtggggcttaacactgctaccataaaaattttcccgagaagaagtggtgcttagcgcatcatccacgctaagcccactggttaaagttcaattaccacaaagatgtggggcttagcacagtgatgtacgcttagttgaactattcagccaaccaatcaggggtctatgcgcttaacgcgagcaagcttggcttacagcatgaagactgagcgcttagcacatagtatgccttactggat

SEQ ID NO: 250504 - DNA, 189 bp, Glycine max
  unsure (1)..(189): unsure at all n locations
tcccacccctctataccncccccctccctccccccccccggccnccgccccggcggggcgggcccccnnnnntccccccccccccntccccncaacccctcttctccccccncctccctnttcncgctcctccttcttctacccaaaaaaaaaaaaaaaaaaaagggtgnctnaaagagaggggggggg

SEQ ID NO: 250505 - DNA, 392 bp, Glycine max
atatgcacgtcgaatacgacgcaccaacaagaatcaagccaaagctattgtgcaagcaatcaatggggctaaacacaccaaatgattataatgacggatggctcaaattctcacaaaggtgaaatcatcactttcaaattgagctttcaaaactatcatgacatgtagagaagaatcaaggatttcaagtcacaaaatgtcaagaacttttattttcaaaacaactacccatttcttgaacatatcctataactaaagaaaaaaagctaaggcgtcgtgctccaacatgagccaaatattatataaaaatccgcgaaacaacaaccttacaaatacacaactacaattatcaaccctcaaactatcaaacaaaaacactccccctccatact

SEQ ID NO: 250506 - DNA, 429 bp, Glycine max
agcttgtacgaatataaaaaacatcttcttttaccttggtgattcttgactccatctcattgaagcccatgtccacttgtaactccaaagtatcaaacctttcaccaacaaagaggtgaagatcatcaaacctatccaaaattttttgaagaagagaggaatcttttccaccatgttcttctttatcaataggtcgagcaccctcttttacccaagaaccatcatgctctttttgatatccaaaggatgcaatgacagcagcgcctattaaaaaagatctcttgattggaacataaaggtcacaatcaagagggatgttaaagtgttgaaagaagaaggtgactaagtgtggatatggccatggaggatttaatcgcaatgccttatgcatgcgatatctgactaagtgagccaatcaatttgtcgact

SEQ ID NO: 250507 - DNA, 378 bp, Glycine max
  unsure (1)..(378): unsure at all n locations
agctttgaaggagtgcgacccaccatcttttcatagtaagagtaccgacaatgtgtctaccatcacgattatcgtcttcctttatgcacatgttctgtagttgcatcctatccggaaccatatcagaatagtactgatactgcctaaagaaggcaaccattaggtcctttcaagtatggactcgggaaggtntcaagttagtgtaccaaggaacagctacctcattaagactttcttggaagaaatgtattaacagntcctcatctttgcggatgcccttaacttccgacaatacatctttggatggttcttggggcaagaagtccccttgtacttggtaaagtccactcccttgaacttgggaggggtgatgatatt

SEQ ID NO: 250508 - DNA, 390 bp, Glycine max
agcttcacaagcacacttacattactaatcatatttttgttattccaataccatttcataacaatgaccagtttttaactactcagtcatcaacccaaagttgcaaccacaaaatggaataaatatgtgaaagaaaatccgagaagttataccaattaccaagtgacactccaaaatcaaataccattctgaatgacaattcaacaaaaatgacaagtcaaaatcactaaaatagatctatacctacaaatttacaagcataaacactctcacctaacatatccacatgcgcacaagaatgaattccaactaggagaagcaacaatatttattagcattacatgcatgaagtaggcaaactcataaccaaataaaaacaattttgaacca

SEQ ID NO: 250509 - DNA, 429 bp, Glycine max
agcttgaacttcagtcatccataaacctatttgtatcattgcacatgaatatcgataatcatatatcataaagaatattacttatgagtcaataaaaaagagattgtgtaattcaatttacttacatcatccccaactgtagtatacatatgttcaaacatttgtcacccgatattattccagttacatctgcatgtataatgaagaaagatgcttgtacactaagaataccaaattctgtctcatcccacgacaactcaacaagcttctagtaaacatcaaacaagctcctaatcaattctcccaatggatcaactctagtaactatattggacctttcaacagccccaatcggttctggcacacgattatgcgaatcctatatggttaatgaaaaccacaattaggtctattttatgaaacaatctt

SEQ ID NO: 250510 - DNA, 389 bp, Glycine max
catgcgctcaactgcacaaagagtgagcttgtttttatattcgccttcaaactcttagaggtgactttgagcgtctgtttatggacgaagccgcctcaatttttgattatttttctcgagtattggtcgtagtcaatcaacttaaaagaaatggtgaaaatgttgatgaggtgaatgtcatggaaaaaatacttcgaactttaaatccaaagttttgacttcattgttaccaacattgaagaaaacaagggtttaaagaccatgactattgagcaactcatgggttccttacaagcatacgaagaaaaacaaaagagaaaaattaaacgaaaggaggctacggagcaactactacaactcaacgtagaggaagcaaactatgcaaatta

SEQ ID NO: 250511 - DNA, 68 bp, Glycine max
  unsure (1)..(68): unsure at all n locations
gcgggggggggccccgcgcccncccccgcccccncccccccccccccccccccccccccccccccccc

SEQ ID NO: 250512 - DNA, 393 bp, Glycine max
agctctattcaaaggatatgcatatatgagtacattgtgaacacaaggagaacctttctagtcatgaaagctttatccggatctgcaacaatgggggagagagttccatcttagtcaagaaaaactacgacttgctttcctttggcactacatactatttgctcaaacgaggcaaagctgaaggaggataaacccgcaaacagtggcgaaataacaacatagtcgggtgatcagcatgaccacacatagaaacacaaaccatgtgaccaagtcatcatatcgtgtgcgtaccaaccaagaactcttttcttggctttctgattcggcaccagtaggcgaagaagctctcatagaatcaatccaagcactaactttacttctctcaccttttac

SEQ ID NO: 250513 - DNA, 297 bp, Glycine max
  unsure (1)..(297): unsure at all n locations
agcttgtagaacggctatacatgatttttgtttggtcgtggtttgcccacccgttcaaggatcaaggaatgntctacattattttcatgacacgcgtgcatcaatgatgattcagaaattttatgcgcaaccggtcatgcatgcacctttgtggacactcaagcatcaagtgttgtggttgtctgacactatggctcaggattcatttctcctattttaaggcaacccagtgctttcaaaacatgctcttttatcaattcatgccttcctataagtccattttgggagtgcggaaaa

SEQ ID NO: 250514 - DNA, 476 bp, Glycine max
atccttaaagtcacctgcagcatgctagctttaaatcgaccaagatcatcttcttgtacctaaagtggaaacacatccataaaagattgatatggtccaaactttatatacgctttacgaatttcatcttgttgattaaccggataattccaaattggtgggcgttttcaaggatcatgtatcaaagtatccatattaattcactcttgttcaatcttcaatttaaaagtagatggctggacaagttgttctatggttgttcttggtcaacaatactttgaacattagtatctaaattggaagtaaatgcattaaacaccacgtgtggctcttcattatctctttctcttctcttataaaagataacaaagtattcctcttaaacatctgtctacctaaaaaagtatagaaatttaccacaacaaacttcacataatattccatatttcaataaataatataattagatgaataat

SEQ ID NO: 250515 - DNA, 90 bp, Glycine max
  unsure (1)..(90): unsure at all n locations
tttccccgcggggggggcgggccccccccccccccccncccccccccccccccctccccccccccccctccccccctctctattattctt

SEQ ID NO: 250516 - DNA, 480 bp, Glycine max
  unsure (1)..(480): unsure at all n locations
acctctaaancgacctgcagcatgcagcttgcatacataatcaagcaatagttattttaatccacaaaaagcatactatctaagccaactatactgtgtaaatcagacatgaaacaaaacaatgctcttatcttcaacacattaaacaaagtaaagagcaatatgcttgaacatactctcttgcatacatacacatacttcaatgtcaaatcaaatttgatctcaaagaccacaaaagttgggtgtggatgatgtatagtatacattaaaaaaacatatggtaaaaagaaaagattctcattaaaaggaaagagtcgaaagggttcaaagaaagagaaatatgcttgaacatactctctngcatgcatacatatacttcaaacataagtgtaaccnataacaaagaaagaacaaggttagcatcaaatttaagatgggttccaactcaacctagatatgtatagggcacacacaattgct

SEQ ID NO: 250517 - DNA, 256 bp, Glycine max
  unsure (1)..(256): unsure at all n locations
tctctccctcttcccccttnntctcnctctcttctttcctctctttcttcctatttctnntctcctctnnntttctttccccccnntttctccctctnncctnccccttttctttcccctccnnnncnccctnttncntctctttccctacctctcttcctttnnnnnntcctnncctntnncacccttcntgcccccntctcntnnnnncccccccggggccggcccggcccccccccccccccccccccccccc

SEQ ID NO: 250518 - DNA, 302 bp, Glycine max
gagatcatgatatggtattgttagccacatccttggccacaaagggttctattgggatggcactaaacacatgatcacagttgagaatgaaaaatgcttggaatgaatattgcactgtaacgattctttactatattgcttattgttattccaagcagattggatttgactcttcttttttttcccatcgcataaattggctaaaccatttcgatttaaggtgcttcaacactacgatgaaatattgtatttgtgtgctaaagattaagtcactggtcattgagctggaactgctattgatg

SEQ ID NO: 250519 - DNA, 341 bp, Glycine max
tagctttgcggattagggctttcccagtgataagatcgatgtgggtcccaaaagaagccaatttgatcattctactctgacgactgagaaaactggggcaaattaatagggtgaggataagggagaaacccatgttgtgactgtcattcctgtacgaccaaatttctcaccaacccaactatatttttactcaacccataacaaaccttctccttacccaccacccagggttccacaaaggccattccttaatctaccacaaagatctgtctaccgcactttcaatgacgaacacccccttttgcacaaacctcaaaacacccaccaagaagtgaattttg

SEQ ID NO: 250520 - DNA, 437 bp, Glycine max
agcttattactagaaattagtttgtaggatataattgtgattcatattattatacgcaatctcgtcgaagaatatcttggtttaatttgtattagtctattttagaatattatgttgatgatattaaatgaatcaatcttactagtttcaaacatttgataatattgtgtgtactgtattggatatttgaatgaatcatgatatgaaataatagttctaagaaaaaaagatcaaatctaaatgggtaacccgttggcccgaaccgaatctaaccgttcatgaatgggttgagatgggttaagcttcaaaaaaaggtattgctaggggcacccaacaacattgttggtgacccaacaatgtttcataaccccaaatacccctaacgtatttgtgtcaaaagctggtagttgcttttggtacatagtgcttcttgttct

SEQ ID NO: 250521 - DNA, 354 bp, Glycine max
  unsure (1)..(354): unsure at all n locations
ccctaagncgactgcagctgcaactctcaggaactacctatcattttttttcttggtacacttgtcgaactctgatgaatgagagtcttgtgagacatacttcaaaggtccacttctatacctcttgtattccttcaatttcaggctccaccctctctctttctctccctctttcttctcctccaatgaagcactctctccaagctttttatccaaggcttattttggtggtgaaactccttgtttcatgcgctatttcctaatggatggagcctcctttcacctttattcctttgtcatgccgctgcatctccatggcggaaattcgccattaaaggacctcattgattctca

SEQ ID NO: 250522 - DNA, 316 bp, Glycine max
cgcactatacccctagttcattactaaactattctctattaatcacacccacgatccagatatccttacctcatgcactagtgtataacgactacccgaaaaggggaagaaaagccagggtgcctcccagtatcgcacttttaacagcactaactggacgcatcgtcctgttatccacaaaccagaaagttcctactttaaggacctttcatacatgtctcttttcctccatcacatgcactctaaaacaaaccatttggctaggtggatcctttgtctactgaaacaaaacaaagctaaccttctgatcttctaa

SEQ ID NO: 250523 - DNA, 57 bp, Glycine max
  unsure (1)..(57): unsure at all n locations
attttctttttacttccactcttttcttttttagcaaccttcatttntcctctcccc

SEQ ID NO: 250524 - DNA, 390 bp, Glycine max
  unsure (1)..(390): unsure at all n locations
tctgtgaatctgtgaacacaacgtagggagaaggaagcgacaatggatgcatgctacatgaggaactcgggggcaatgtggtgggcatggtgcggggaggggtgacataatgactgttggtgtttatgaaagaaaacacgttcggaattacattgttttataatttcttaaataaaacacacatagccatgatttttacattaaccccactatctaaaatttattttttaaaatttaaacattgaccaaattcaatgttttaccgaacaaccaaataaattctcaaacatctcgtttgttgaaacatttcaacacgaactcaattaactctatttacccagctgcattatgcttacttttatccacangggtatttaatatcaattatat

SEQ ID NO: 250525 - DNA, 360 bp, Glycine max
atttcagaagtctatgggataaagatggtcactgaccaatccctctcctatgatttgacccaattatctagggacggcataccatctgaaggtgcattggacgatgattggaagtctgattgttctgtacataatgcccgctggttggtttgcaccaaccaagtggatatgaccggaaggctccttgccgattcattggctcttgaaagaagcatccttcactatcttattgtgtcgatcggactcccaagatcttcaaaccttgcttaagtttctgaagaagatcttataatcatgggggcttcttataccgaccgacaaattgattgagcgcatttagttcggtatccgcatgcataa

SEQ ID NO: 250526 - DNA, 335 bp, Glycine max
agcttctagccaaatggacttaccttgtattaattccttcgagagccctcttgagccttggttccctttccttgtgtggaagctcactacaagccttaagtgagaaaccatgatattaccatatccttaaggaattttggagctctggaattgtttcaagaataagaggggggggtatttgttttattggacaaacttggtttgttgactaagcttcatgatgtattttgggccatacttgatgtacatttgatatcggttaaatgctggacatgctgaatgaaatgttgtttcttacaggcgaaaaataaaaaattcgaaaaaaaattcgaaaa

SEQ ID NO: 250527 - DNA, 114 bp, Glycine max
cccccctccccggccggcccccccccccccccccgcccccgcccccccccccccccacccccctccccccaaccctcatatttatttttttttatataaaacgctcgccccccc

SEQ ID NO: 250528 - DNA, 455 bp, Glycine max
  unsure (1)..(455): unsure at all n locations
ctttgacttcatatctcaccgcataattttattcctttcacataatcaaccaacgatacttcccttctatattaataacttctcaaggggagaaatactatcgtccttggttnttgtctatgagctactccctaatttaagtcattttctcccgcaatataattgactcgatccaaactttttcatgtacatctcttactttattacattagttgcatattttttttttttttaagaatctacattccatcctcatataatatactcttggaagaaaaagggtaaactttaaatgtaattaaacatataatttaggttaatcctacaccacctnacagactgaatttataaaaatatcttgaatctcatcagaaaatcaaaactctaattagattagtgaaccaactcaaaactctattagatagttgaccaaaaatatcctttgtcttcccttt

SEQ ID NO: 250529 - DNA, 496 bp, Glycine max
  unsure (1)..(496): unsure at all n locations
cctctaagtcacctgaagcatgcaagctagaagaattgtaatcaacaatgtaggcagttatgttattcaaagattctcccataaaagatgtagattgtataagctagattntgtacaatagtattcctactatcattgctccaaatccaatgttgtatactcatttcttccatgcttcactctgagtagactccaccctttaaatatggtaaaggcaggtacatataaaaagcacgcaaccattcctctctgtccttatcttcataggaagaggcaattttcaatattgggagcacgtaagatctaggaatcatgattgtcttcttagctcagcaaagaatgaatataaggttattgggttcacattatgggtggaggagggtaatacaagaatgaggtatgtttatgggtaccccacacattaaataaaataaaatacaataatatacatatatcttatttgatgagagtgccattattaaacagcaaaatatac

SEQ ID NO: 250530 - DNA, 94 bp, Glycine max
  unsure (1)..(94): unsure at all n locations
cccgccccccccctccatccccccccnncccccctacccccccccccgcccccctcccccccaccccccccccccccccccccccccccccccc

SEQ ID NO: 250531 - DNA, 390 bp, Glycine max
gattggtgaattgctcaagtactactccaccaagagtggtgataagatgacgaaggtcagagtgaaatctactacatcacaggtgagagcaagaaggtcattaagaactctccattcttggagaagttgaagaagaatggtgtactgtccaagacccacaaaatttatgtgacatcctacttggcccttacaaacacatgtcaaccttccacgtcagccctgctacaggagcacagacgcctgactcttagtagtcgggctccccaacaaataggttatctcaaacctaactaatattcaaatatatttgaatatcttatctattggcaggtgttaaattatctataacatcatattatctacaaaggataaatgtatgattatcttcta

SEQ ID NO: 250532 - DNA, 459 bp, Glycine max
  unsure (1)..(459): unsure at all n locations
agcttaagttctaggagagcattcacccatataataacctctctttntcattcattcctaccccatactcaccctttatttaggcacttagccttcattcattgaattactgcatacacacttattaactttattcgtacttacaattgttatgaacacagaaaatgttatatacataaacagtgtgcgtatactattttctttgaccgtttcaatacttacccagtgccttactctaatttgggacaaattttctttgaacccaccttatagggatgatgctctcctacaacctaatataaggcagcggaagatacaatttaatacgcttctagcgttagtagatgaacaccactaactcttgtgtataaaacctgtgtaaatcgtatcaaactcctccaaatcatggcttactcgtattgcagaagctacttttggtatagatagatgaaaatactt

SEQ ID NO: 250533 - DNA, 275 bp, Glycine max
  unsure (1)..(275): unsure at all n locations
cttccttccnncttnnnnncctnttccccccctncaggctccnaaatttttccgccatctcttccttcagcctcccnnctcttnncaancctcttctnnnnnncctcttttccnnncccncacactcctcccaccttntncnncacggaccttctccttcnnnnttccttcctaactcctttaaactnnctcttgctctccggcgtgggggcgtccggccctttccttnccncccnnccaaccccnaaaaaacattaaaaaaaaaaaacaaaaaa

SEQ ID NO: 250534 - DNA, 73 bp, Glycine max
  unsure (1)..(73): unsure at all n locations
tttttttgttttcctcccccgcttttgtcttctncnccttnnccncncnncccccccccccnnccnntttttc

SEQ ID NO: 250535 - DNA, 231 bp, Glycine max
  unsure (1)..(231): unsure at all n locations
agtgattggaactgtcggttcgctacattggattggaactatgntcaccccanttttgcaccttaaatctctatcaaatctgcgaaacaaaagacccatatttatcttattctaagactgtgatcaccttcaaactttacgtacaggagaccatgtatataattcttcttaaggtataattaatcaatttctaccctggataataagggtgtggaacaaatagagcatttt

SEQ ID NO: 250536 - DNA, 392 bp, Glycine max
  unsure (1)..(392): unsure at all n locations
agctnancatctattaatactattatcttttgtcattcataaagcgccacaagaagccatttttattctctgcaacctttaacaacgcacgggaatgcaaatatcaaagttatccaaggtacatacataatatggttcactttgtcttgtaaatgaggtatttgaaacacgtaatgatggntaacattggttcttaagtgggtatgttaatagttaacctaaccatgtccttctgtttgagcttgagtatttgagaaggaaaagaacaatgcattaaccatatgttagaatcattgcaacatatctcaagaaactattttcgacgatcattcttttgattattgcttacatagttggaggaatcatactntatctgaaaatatgatttccac

SEQ ID NO: 250537 - DNA, 134 bp, Glycine max
  unsure (1)..(134): unsure at all n locations
gggggcggggggggggggggggtgnccnccccccctcaccggccttccccgcaaaacttcccccccccccccgcccccctccccccctccatnccaaccaaaaaaaaaaaaaaaaaaaaaaaaaaggggggggg

SEQ ID NO: 250538 - DNA, 349 bp, Glycine max
caagtgactgcagcatgcaagctcttatctctcaagtctcaacatatataaatctcttagccctctcactgaaactgaagagaaacccaaatggtaactagctgccatatcactggaatctctctttttcaataaccctatgaacattgatgcaatttgatattactctcaaatgaggagtctctgcaacgtcactgaatagcaaagtgccctgtttctatagtggctcctgatgttttataaagcacacatgaatgacctacaacatgtgtattaagcgggtcaaaataagatatatattttattgtctaaagcagataagaatttctgaaaacatacatggaaacgc

SEQ ID NO: 250539 - DNA, 441 bp, Glycine max
  unsure (1)..(441): unsure at all n locations
agcttttanaatttaaattcaaatttctaataangtgttacaaacagtttaaacttctgataatcgattacataccttgtgtaattgattacaggatcttaaattcaaattcaaaatttgcaaattgtttcagaaatcaatttagcgactagtaatcgattacattctctggtaatcgattaccaaaaaggaaatattatatttttgaaaagataattgttcttcaaaaacttttgtaaaatattttctttagccaaacttgtgcaacatcaattaaagaatatcttttaagatcctatcaactaagtacatcattctttttgcacttctgaattcttgactagaaccgcactcattttttgcatcatcacaacttcatatcatatatgcttctacaaaggccttctatccttcttttcttgtgctttctaagtttcttct

SEQ ID NO: 250540 - DNA, 355 bp, Glycine max
taagccgaccgcagcatgcaacttcttaactcagctgatgaatattgtttcttgactacttcatgctctcttgtaatgacaatagcatcatttctgacactaaactattgagagttggaagccaccttttcattaaatttctggcttcaacaagggttatatcttcaagggctccaccactagcaacattcaatatacttctttccatgttactgaggtctccataaaaatactggagaataagctgcctataaatctggaggtgagggcaattggcacaaagtttcttgaatctttcccagtattcatataaactctctccactgagttgctaagtcctgaaatatattttctg

SEQ ID NO: 250541 - DNA, 57 bp, Glycine max
  unsure (1)..(57): unsure at all n locations
cttcttcctncttctccttctttttnncctncccctacttctcctcttgctctttcc

SEQ ID NO: 250542 - DNA, 90 bp, Glycine max
  unsure (1)..(90): unsure at all n locations
cccttccctttttcccncttttctccattttcctctnctctnttctcttttcccctttnnnnnnccccnccctactttccctcttctatt

SEQ ID NO: 250543 - DNA, 448 bp, Glycine max
  unsure (1)..(448): unsure at all n locations
agctnttggtgctcaagcctacttctcttcttttagtgaatctataataatttaaaaaacataaatgctagttacttagtttcaatttcagcttctaatgtttcataatttaaaaaacatgaatgttaattacttacatgctcaaaagtactccaattacgctcacatcccgatgaactacaagtcaaacttaaaactttcagtcattgatttcattgctacagtcataccaaacctctcttcagtagcaattgtttgtgaacttcaactacaaaatcatcatcttcactaagcctatcaatacatttgtagaggtcatccaccacttcattatcattgtcaatgtttggattggtgtaaaaaaacttttgatttagatataacccgttgatgcaacggtggtgaagttacaattcatctttatcatgatgcaagaatcctatacttc

SEQ ID NO: 250544 - DNA, 162 bp, Glycine max
  unsure (1)..(162): unsure at all n locations
ttttcccccccctttatacctcttnattccnnnntccccnnnncnctcccccctncctcnntccaccccctccccctgncctgtcggccccaccgctccccgtccctccgcctccccccccccctccccctcccctccccccccccccccncccttattaaa

SEQ ID NO: 250545 - DNA, 224 bp, Glycine max
tggcatgcaaactcctatcatcttcacctctctctctatagtggaaaggggggatacagtggagtcttaattcttgctagcgaaaaggaaacatatctccttccttttcttttctcaaagctctaactcatcctcccttctgccttttggaagacgaagaaaaccactaacctttgtggtaaaacttgggtaaatgtatccacccctccacctatgtcattttg

SEQ ID NO: 250546 - DNA, 361 bp, Glycine max
agcttggagctctctgcatgctaaggctatttgttaatgtttgtgaaccacctcaaatgatattcaaatatgttctactcttatatctgaagtctgtgttatcaaaaacaagttattttatcttgtactaacatgttatataaatctcatcaatcattttaacttatttatctggtaaataactgtttagtttatgcatgtttgaattatcttttttaattaaaaaaacatagcagacatatatgaaaaagctttaacagacaagtgttcttgaatacacgataaattaatgcacatatttgcgtgcacttttgattaattttacatatgctaattgtgtaaacatgagtaaacaataaaa

SEQ ID NO: 250547 - DNA, 402 bp, Glycine max
cttaagcactgagctgcaacttaatgaaagtagtttcacttggttttttttatcctttatgggtgtagtaattcttggagaaaagttttctcttcctctgtcttaaccatgtcggattgtgttaacctctattttgcggaaaggctaaatcacattttgtttgccgtacaatctttgtttctcttgtttacaattagaaagaccctttctaaaagccaaatacgtgatcatttgagtcatggcgaattctacgctggacaagcaaaatacgtgatccacgggtgaatcactcagttttataacctttttaatatgttaaaaatccatttaccctaagaaaaagaaaaaattcacttctacaatcatcttttgtctctgtcaccccaccttcattcttgttcg

SEQ ID NO: 250548 - DNA, 330 bp, Glycine max
  unsure (1)..(330): unsure at all n locations
gacctgcacgcagcaagctttgcatcacctaaaaatctttttttgttccatgccttgaaaggtctnttccgcttttattggtctaacgcggagttttaaagcctaaaatcaacacctaactgtttcacctcttttataaaaccaagagatcatcactgggccaacgcctcaatgttgtctctcctttcaaaagaaacgacagatcatttaatggcgccacaccctacatgaccgctcattcaatcaaaaaatatcctgcgaaaaaaagataaaaacaacctaaccaacggtcaggtctataagaactacctaggtgtgatttccttatca

SEQ ID NO: 250549 - DNA, 295 bp, Glycine max
ctttgagtggcattagtattgcgtgttatattgaaagagcatcttagtccatatcatatattttgtgcatcacgcatcatcatgagtaagtgagaagaaactttctaaagttagaaaatttcttcagaaggcaaaactctgttttaatctgttatagccttatcataatcaattacataagttgtcttaagcttgcaaagttatgtctcatatgttggatcgagtggcctctaaataattaagaaatggcggctgaattaatctattctataactttaccaataaaaattactct

SEQ ID NO: 250550 - DNA, 176 bp, Glycine max
  unsure (1)..(176): unsure at all n locations
agcacccagcttagagacacctcctctctctcttattcactcaancgagcctcacacttcctcctgtagacacacacggacttcctttttacggcacaaaataagtggccttcccaccggcgacgagcatggcaggctaaatactcaatcaatccaagcaacgctaaaatggagct

SEQ ID NO: 250551 - DNA, 330 bp, Glycine max
  unsure (1)..(330): unsure at all n locations
agctttgaagtttgaagaagtttatcttcttacatgcttaactctctgagcgacatttgtattaattattgcatcttagtctttatctatccatatgtacactatgcatcatcatgtgaagataggacgaaggtttctaaaaattacaaactcccttcatcatctctctcgttagacttgagctttgcgcaangaacgcgtagtttttcttaaagattggaagtaatctttgtacccttaattatcccttttaataatatatatgagataatctcttgtgctcaatattggagaaattattcaactcataatgcttgattctatttgaac

SEQ ID NO: 250552 - DNA, 257 bp, Glycine max
gccataagtgctaaggtaaaaaaaaaaaaaaactttgaaattatggctgaaaaagagaagtgtcattattttcaaaaacaaaagtgttgtctgaagaataaaggctaaaaaataaatcaccctaggcaggaaataagtgaaaatctttctaaggatgcatgctctcttataatcctaagtttttgaaatcccagaaaaaccataatttctttgttagtcacgccctgttattaaccaataaaaagccttattgatcc

SEQ ID NO: 250553 - DNA, 344 bp, Glycine max
ttctcgtatgaaattagtcgggaatgcccaaatcaaatattctaatcaccctcacaaaaagctcacaatgttcaaaatggcaaagatgcacactatgcctaacaaattatgtaaggttctattctattccaggatccaagggttggaaatcacctagatggccgctagtacgccctatagcagcaataaagcgtttctaacacgcacctacgagggggaaaactacagctatctcaaacctatcaaactgagtgaaatttcggaggacaccctatattctgaaagatacacacaaaaatttcacaaattcaagcctactatagaactcctcacgatgcttaaca

SEQ ID NO: 250554 - DNA, 265 bp, Glycine max
catcctcttgacacggcatcggagaatctgcacggggtccacctagacaatctcttaaagatctatgcgataatatggattttgtgctgtaatagaacccaaaaaccttacagaagccgttatacatgatcatttgacagtagccctgcgcgacgaattaaatcaatttgaaacaaatgatgtatgggaataatatagaaaccttcaattatccaatcataggaactaagtgggtatccagaaaccaattggatggaaatggtat

SEQ ID NO: 250555 - DNA, 416 bp, Glycine max
  unsure (1)..(416): unsure at all n locations
agcttnctccacgtattcctccatacctataactttaaaccttcgattctcactcgatgcttcaccagatcacgtaccgtaaagcccaatcttcctcttttacactcctctttcacttccaccgatcaaaattcagaaaaacttcatcaaatggcagagccatcaaagaagagaaagggatcatcctccaccgctaccgctgctgctcatcgccggcacggtccatccggagcacccacagcacctattcctccttccttgtcatctccaagatcatcaacattgttttcattcgaagatcaacgtctacggtacctctctcagttttcttctagaataatcttagaccctaagtacctacacgtagaggtctttaatgatgaaaccgttgattgctatcaagcgggtcaaaattc

SEQ ID NO: 250556 - DNA, 440 bp, Glycine max
  unsure (1)..(440): unsure at all n locations
agcttctttggtgccatcttcctctaccaacaactacaccaaaacccactcacacaaaccaaatccanagtcgacccactctcacccacgatgcctgcctctcccatgttgtcataaacgccagctagtctagaatgcctattgatcatgggtaactacaactttgacctcatctacaaggctcacctttccatcggtgccccctcggtggtgtcaagaagctctccatggaccccccccatagcttccgcaagttcacagaggagatggaaatatcccaagcaagctccaccacaccaagaacacacaagagttttatactttttttttatcaatctagtgtttatatatttcaacttattttatggtgatgttcgaacttaatttgggatttgttaatatatgatgatgttcgaattaaattttgaaaaggcaaaaaa

SEQ ID NO: 250557 - DNA, 201 bp, Glycine max
  unsure (1)..(201): unsure at all n locations
tcttccatatccatnttttnctcctatcctcctctatacttnctattcttccttctgttantaaagcacttccntattctcttnccgagcttctcgggctccccngcgcgcggcgctcgcccnnccncccccccncnnncccccccccctccccccccccccccttccccccccccgttcttcctttaaataaaaaaaaaa

SEQ ID NO: 250558 - DNA, 381 bp, Glycine max
agctagaaccttgaatcttgagtcttgaattcattcttcttcttgaatctcgaagagctcttcaacttttcctcttgagtcttgaacttgtttttgatttcttctagaacatcttgaactcatcctttgattgacctttgagctttttggcctcaccttttgttatcatcattgttatcatcaaaacatattcgaatcacttcttattcaccatgaagctttgcttctacaagggaagcccttaaaatattgcacacattgagtgttgaccattctatttcctgaaaagaccaaccctatctacaagggcctatgtgttaacccccctatgtcctctctgagcacttgactaagggcactgttcctcacttactgtgacac

SEQ ID NO: 250559 - DNA, 349 bp, Glycine max
  unsure (1)..(349): unsure at all n locations
gaccttaagcaccgcagcatgcagcttcaaaatgatttgaagatgtcaatgttattcacagatcattcaagatgaattgcgacgatgaagaaagcaagttgtcaagcaaagccaatatcacaacataagaattaagactcactctctgaaaagtttttgaaaagcacaaacgattggcctagtgagttctatcttaacaaagacttctccaagaactttactctctggtaatcgantaccagagggtgtgaatcgaataccagtggccacacagctttctggacatgtatccaaacttattctcaaagttctcataagccatacatcgattatccaatgcttcaaaacc

SEQ ID NO: 250560 - DNA, 137 bp, Glycine max
gaccttaagcaccgcagcagcagcctaccgcatcaacggatgaatattggtggcaggccgaaatactgtaacaaatatcaaaagcgcttgcttactgcactcagcggaaaagcccctcccagaaactagaggacccc

SEQ ID NO: 250561 - DNA, 119 bp, Glycine max
  unsure (1)..(119): unsure at all n locations
atcccctccccccgcnnncccnctcgcccccgcccgaaaaatcccacaaacccccccncgcccccccnnccctctccccccccccccnccccccccccctccccccccccccccccccc

SEQ ID NO: 250562 - DNA, 262 bp, Glycine max
caaagatgcctctccgaaaaatatgggggtatccgcaaattggaggatagtaacttcctcatgatttgaagccactgagaaacccctgaataaattgtatgtcgccgcttttgtaccagcccatataatgcctcaacaacaatattgaaaagaagaggtgctaatggatccccttgcctaaaccctctgtgtggaaagaactcaggctaagggctaccatttattagtaccgcaaataacgcggatgttaacaccccttatc

SEQ ID NO: 250563 - DNA, 314 bp, Glycine max
  unsure (1)..(314): unsure at all n locations
agcttgttgtactatttttnttgtagggtgtatcataagcaaggacatttccaaagcattggaagagagttctactagtcccatctgtccaaaataaaattatcaacttaccatcctctgtaaccatgtatcttgcaaaaaaatagcattgttgtgaccttttccttgcagataattaattgcagccaggacatctcccttcttgactttgacacgcttcacacgctgaatatgagtgatcacatctcttttgttgaatccaacacttatgtggccccctcttgttatctagcatataccccctaatatgacat

SEQ ID NO: 250564 - DNA, 364 bp, Glycine max
ttttataagcaaattcccttagcaatcccccaaattaagaacttatcataacttgaaacccttatactctcttagaaccctaaaacaagatcaaggttatcaaaattatgctcacgggtttattcaaacaaatcattattacttttggctcaataggggtgcaagggataaattcatcacaggttggctttttggctgagtggctaaaataaaaagaaacatggccttgatcatatccaccttatgcaaataatcaaataggttaagaatgatgcaaaattaggaatttaaaaacaaatgttctcttataattaagttcacacagctcaccttgacaagaataagttatcggcttaccggacca

SEQ ID NO: 250565 - DNA, 466 bp, Glycine max
gacctgaggcatgcaagcttggagaggacgctccactggaggataatatctagtgttagacacagagatgtggatcacgaatttgaacgactacatgacgcttttaagcggaactttgaagtatgtcttacaagactctcattcatcaaagttacaacaagagttacacatgcttctatttatagactaagtagcttccttgagaagctttttagaaaaacttccctgaaaagcttctttgagaaaacttccttgagaagctagagcttagctacacacacccctctcataactaagcctcacctccttgagaagctttcttaagaagattcctaaagaagctagagcttagtacacatacctgtctaatagctaagctcacctccttgagatgagaagctggaactgagctacgcacccgctataataactaagctcaccgccatgacagaaaaacatgagaata

SEQ ID NO: 250566 - DNA, 70 bp, Glycine max
  unsure (1)..(70): unsure at all n locations
cccccctcctcccccctccctccccccccncncccccccctccccccccttcctcttccccccccccccc

SEQ ID NO: 250567 - DNA, 372 bp, Glycine max
  unsure (1)..(372): unsure at all n locations
agctngagcangggcaaaagcacaagatggtggcgccttggatcaactatccgcgagattccgggttccctgacaagtgaccacaaggtcatcgaagctccaacaattcttcttaatataagccaaaaaataaatggctgggcccaaagatccaaaggtcagagaattagatgtgacttctcacgccttacacaaggcagtgatgagggcaggaaatcctagcctccaagagtcatgctaagcaataagagtaatctgactcgagatgaggtacccgaagttcatgtccatcttctgaataatcccatatattaacctgaccttgtccaaagtaatatctgaagtgtgggaagtaggggccaagttacaaaa

SEQ ID NO: 250568 - DNA, 420 bp, Glycine max
  unsure (1)..(420): unsure at all n locations
agctagcttctacaagtttcatgtattcgtttactattgaccaaatttgatttcaaaatgtttttaactgatttccaacgttccacaatatatttcaaatggtgtcaccgattacactatattggttatcgattactagtgtctctgaacgttggaattcaaattctattgtgaagaattacaactttttataaaatgcattgtgtaatccattacatgattatgttaatcgattaccagtgataacttttgaataaaaggtctaaagttgtaactcttaacatgattttctcaaggttatacctctttcaatggttntcttgaccagacatgaatagtctataaaagtaagacctcgacttacattcaaaataactctcacaactcttcttgttcttcctttgcacaaagctgtctaac

SEQ ID NO: 250569 - DNA, 310 bp, Glycine max
cacaagctcgccagtcatccaatgcgacaacactagcactcggtgagcttgcgtctaacccagtccttcatgctcacaccaaacacatggacctaaaccctgctttttggtcgggacaaaagcctcaacatactgctttagagatgacacacttcattgaaatgcggcttattcgttcagatcaatgattaaacctacttacttttgctctcagatgccatccagaaacaacttctattgcctgagtcgcggggaacatacccaagctgtttcagattgaggggtcatcaatttgtcaacttaagccaag

SEQ ID NO: 250570 - DNA, 171 bp, Glycine max
gcctgactcacaagggtggttaatgtttcttcgacgctaacgtcatcctggcacttgtatatttattgtagaagcctctgtcggaatagcctacatgactcatcaataggagctttattgcttcttcgtcacaaacgcaagggacatgatccatgggtctaggattcacaa

SEQ ID NO: 250571 - DNA, 361 bp, Glycine max
  unsure (1)..(361): unsure at all n locations
agcnttgagactaacctgtcatgtgcttgttgttgatcggaacaaacattaatcttcaaacagcataatttcttttttcatttgataaataataaagatatgtcaaatgaagaaaatttaaaattattctttcattctctttgtgtggcacatctcactcattggccattgcattacaaaagaggtacgtgaaatgatgatcggctccggcctacttcaaataattatcaataattcttcatctacaaatagttgcagggggactgagggtagaaccggccatatctttcatcaacgaaatatattcgcatattcttttttataggactattttatattatatataaacatctttttaaaa

SEQ ID NO: 250572 - DNA, 372 bp, Glycine max
  unsure (1)..(372): unsure at all n locations
atctttgaaagagcgcaccccaccattctttataataaaataccgataatgtgtctaccatcaccaatatcagccccttttccatcattggggggaccacttgggttgccagatacctccacctttgggctgattttatgaaaaaacccagccccctttttgcacataatttataattgtgtcccatcctaagccattatactgactctgccttacgaaagcaaccatttgcgcctttccagcatggacctaagaaggttccaagctaagtgcaccaagtaacacctatcccagtaagactttcttggaaggaaagtatcacgcactgcccatcttttacactangcgtcctttctcccgacatacatcttt

SEQ ID NO: 250573 - DNA, 104 bp, Glycine max
  unsure (1)..(104): unsure at all n locations
tcttctcctcttcccccttnntctcnctctctttctttcctctctttcttcctattttctnntctcctctnnnnntttccttttccccccnnntttctcccctc

SEQ ID NO: 250574 - DNA, 376 bp, Glycine max
  unsure (1)..(376): unsure at all n locations
agcttccttgagaagattcctagataagctagagcttanctcacacatctctctaataactaagctcacctccttgagatgagaagctagagcttagctacacaccccctataatagctaagctcacccccatgccaaaatccatgaaaatacaaaaaaaaaaagtcttactacaaagactactcaaaatgccctgaaatacaaggctaaaaccctatattactagaatggccaaaatacaagctcaaaagaataaaaaacctatcttaatatttaccaaaaagagtggacccnacctttgcccatgggctcaaaaaatctacccttaagttattagaaccccaaagccttttttagcagctctagccaatcctct

SEQ ID NO: 250575 - DNA, 431 bp, Glycine max
  unsure (1)..(431): unsure at all n locations
agctgcatgatgaatcaagaatgatgatattatagatgattactaataactaaaaagtcgagaacacttcatgataacaaagatgatgatctcaagaatcaaagaatgagttcaagattgagtcaagtacacttcaaggatcaagtggaaagttgaattcaagaatcaagaatcaacgttcaagaattaagttccaagaatcaagatcaatatcaagaccaagattcaaaaatcaagagaagactcaatctagataagtattaaaaagttttttcaaaaactgagtagcacatgaatttttctcaaaacctcttaccaaagagtttttactctctggtaatcgattaccatcagcaaaatggttttcaaaaaactttcaaactgaatntacaacgcttctattaatttaatacactgttgaatcgattaca

SEQ ID NO: 250576 - DNA, 62 bp, Glycine max
  unsure (1)..(62): unsure at all n locations
gggccggccgcccgcccctcccccccccccccnncccctcccccccacccccccccccctcc

SEQ ID NO: 250577 - DNA, 434 bp, Glycine max
atcattaaacaatacttctttatcttgatataagtaacaaaaaaagttacttgttaagaaggttacatcacgttaaggactgccaaaatcataaccaaagtaacggcggttactgttcgatgttagctaattctctgttctttgaatatggattttggtactccttgtacaattattaaaaaagtattatttgtcaataaaaaaatactatcttgtgtgtgttaaatataaagtcaatattaactaattttatcttatttaataagacatattctaaaatattttttatctaataagattaaagatatttctatgctttgagatcaatccccaatgaagaataatttatggacgcagtcttaactgggatatacataatctatgaaaatcactaatttattaataaaggcgaaaaatgttttcttcttctataa

SEQ ID NO: 250578 - DNA, 211 bp, Glycine max
  unsure (1)..(211): unsure at all n locations
ctcccccntncttcctccttttggtcttcccttccncctttccctttcnnnnnntnnnnnnnntnacccccctcccccnncccttnnnnttcccgcngcggcgggcccctcgggcgcccccccccccccccncccccccccccccctcccccccnnccccccccctacccctaccccccctccccccccnccccccctctcccccttattt

SEQ ID NO: 250579 - DNA, 370 bp, Glycine max
  unsure (1)..(370): unsure at all n locations
agctnggtatctataacacataattgggatactaattgtctatccgcatgttcagattgccaatccatatatacgaattacaatttctgtttaaaaaataaaaaaaaattttttacaaattaatggcccatgttggattcaaacactatagccatataccgagtgttattggggttccatcacacaaaagtgatattaagccttgattgtgccttattggatcccaatcaatcattattgtctactgtacactaaagccatatgggaagagaattactttgtgcacctaacatatgttctgcacacccaacaaatgtattaaaattccaaaagtatgcctgctaataaacatacggagttcctatccata

SEQ ID NO: 250580 - DNA, 259 bp, Glycine max
tagcctcctcaacaacctcactagctatcaagactccatgtggcacgctgttgacccttaacatatgctgactgtctttcatcaacaagatgatccacaaccttacttagcctattatataggatttggcacacatcttgttaacacatcctatgagagatatacgtctgaagtgactaatactgtgaggatccttgatcttatgaataagagcaatgaatgaagaattgatgcccttatgaaaagcagcattcacatg

SEQ ID NO: 250581 - DNA, 384 bp, Glycine max
agctttagacggactatactatgctctattaaccagagacggagaatgatctatatatatactcgctaagggtagagagaggaagactagagatttggatcacgtaacagtgtgttaaggatgaaaaaggcaaagtcttattgcatgaaaaacatatcaaggaaaggtggaaggcgtacttccacaacctatttaatgatggatatggatatgactctatcagtctacacacaagagaagaggaccggaactataagtactatcgtcggattcagaaacaagaagtaaaggaagcgctgaaaagaatgagtaatggtaaggcgtgggggccagaccacatatctcattgagtgtggaaaactctctgagatagaggtcttgagt

SEQ ID NO: 250582 - DNA, 357 bp, Glycine max
agctagcatagttgcatataacattctctattgtctaactcaacccatttctaaaaaacacaagaggaaaataacccacaagggcaaaatggtaaattaccacacctgagggggaagaactggaatgaggagtgaaaaacgcgaaaacttgacctgttgggagtgctattgagagtgtctggtagagccatggaccgaagaacgagccaatcctctaagtagtgagagaactgctaagaaatttataaaaataataaacgataaaatctgggttaacacagaaaacagagtggtatatgagaggagatattccggcgaggctttacatggtacgatgccggaggcgaatatggagat

SEQ ID NO: 250583 - DNA, 438 bp, Glycine max
  unsure (1)..(438): unsure at all n locations
taagctgcattnggaatagcgaaatcctcactctatcattaggattagtacctgacatgctaaacaaacaaattcaacgtaacaagacaattatagttgctgtttgaatacctcacccactcaagagttcacacaattatggcttttctctaatgaaacactcttgccttttaccactctaattccccttgagttcttacgcaattcaagagattatggccacaacaaataacaattcaccaatatgtgtaaggtaacgctagacaaggaaaaggttaaccaagaaaaaggctaacaatgtttctaggcacaaatgaaggaaataaaattcacaatttacgaattcaagtaacaatccttcatgcaaccaatatattaccttaaagagttgtgtttgtaagttttcagcatgaacattagcccaatctttttttttta

SEQ ID NO: 250584 - DNA, 443 bp, Glycine max
ctctaagtcacctgctgcatgcaagcttgaggtaccattgttgaatgttgaatctcctaactaggtggcacaaggataccaatcttctattctatcccacacaaggtaatggttctgtttctcgaaacccattggatctccttgttgtcctttttgggccatctgaggcataggcccgttttgttgctaaacttaatcaatacaaatataaaataataaaagaattattttattccttaataactttttggagaaaaaaaaaagcacaattaaaatttttatatatgtaaacctttcatacgatcttacatcttttgtttataaatgactccatgatattaatctatttttcatatcggttcacgaaatgccacttatatatatatatatatatatatacatacatatacatatagatatatatatatatatacactacccct

SEQ ID NO: 250585 - DNA, 397 bp, Glycine max
  unsure (1)..(397): unsure at all n locations
agcttgtaaagagaaaatgtagaaaggtgaaacttcctgcttntattcgcngaccacagagtggtacctggagatatgtcgcgggggtcacgagaccttggggacgtcatgtggggtgctattgcccaaaaccaagcttgaccaatctcgacccaacccgggcatagtcagtcagtgagaacctgtgatgtacctaaacaggcgagctcctagcagtcnacagataaaaggaacaaagaccacaaagcaaggaggcttgtgtggtggctggccacctgtgaatcttgtgtatatatgggttatggcctctggtaatcaactaccaaggatgggtaatcgattacaaggcttaanaatgaagacaggagactaagatggtctctggtaatccattacc

SEQ ID NO: 250586 - DNA, 67 bp, Glycine max
gaaggggaaggtgctcccacccggatctgactgaccccgacccacacgagcgcacccgccccgccaa

SEQ ID NO: 250587 - DNA, 84 bp, Glycine max
  unsure (1)..(84): unsure at all n locations
ctccccaccccggcccccccccgcnccccccccccccccccccccccccccccccccccccccccccccccctcccccccaccc

SEQ ID NO: 250588 - DNA, 462 bp, Glycine max
  unsure (1)..(462): unsure at all n locations
agctccatgttgctcattgactccagattgctgcaaagaaggacatagatctgtatggtgatctgcagaagaacatagaccacagactcttgctacaggtgcagatgcaccctcttaaggtcatcccagctgaaaatagacctgtgagcaaggtagcatagccaatcttttgccactccctccagagaatgaggaanagcctttagaaagatatgatcttcttggacatcagggggcttcatggtggaacaaacaatatggaactccttaagatgcttatgaggatcttcacctgcaagaccatgaaacttgggcagcaaatgtattagttcagtcttgagaacatatggaacaccctcatcacgatattgaatgcacaatgctcaaaatcataatattcagaatcacccttcacacaatgctatgaatgctcaaaatgcccagaatgaccacgatgctcac

SEQ ID NO: 250589 - DNA, 398 bp, Glycine max
tgacaaaagacattgaagtctttgaaatgtatagaagagattgaagtcttgacaaaagacattgaagtatttgaaaatgtaaagaagacattgaattcttgacagaagacattgaagtctttgaaatgtaaagaagacattgaagtcttgacaaaagacattgaagtatttgtgaatgtaaagaagacatttaagtcttgaaatgtaaagacataagacattgaaatcttcgtaagacaaaagacattgaagtctttgggaatgtaaaaaaaacaaaagacattgaagtctctgtaagacaaaagacattgaagtctttggatttagaaatgtaaaaaatagaagacattgaagtctttgaaatgtaagacaaaagacattgaagtctttgaaatctt

SEQ ID NO: 250590 - DNA, 388 bp, Glycine max
tcttgctcttaatacgcttcacaattcaagtatacatctaatgcgtatttagagtatatttttagctcatcaaaaatatgggctaaacaaattgcccccaaaaaatgtctgcttcgattcgagatcgaaggaagatgagaagttgacattttttctcttcttctaccagttttcctgaaatggcgccatgattgcacgtttactgtgtaatcgtcgcctcgatctcccactacccatcattaattccacttttctaggcagagtgggacacgtgtcacgctggggagtcggaaaggaaatctgatttgattgatttttgacaattgattattattatattgtttctccctttttaaagtgaaactccataaatagcgcccaaaacttc

SEQ ID NO: 250591 - DNA, 362 bp, Glycine max
catacccaactcatctccggcgggacaagagccggcagttcatcttacatttgccgaaaatcccccctcatagagagtaacaccgagaacgctgcgcacaacacactcggcactgcctgttgaacaagacgcggaaccgcagaagccccgaaacaacttgcgccaatccgacgccacctccattggaaaagacacatgcggaggagcaactggaatgttcaagtggccaaatgtaacacttgacctatgatcagcaggccacatcaagactgcactcatcctataagccgccgaacactctgacgttcgaaacgataaatcggatacatcatcccacaactgactgaagcccatctcgcgca

SEQ ID NO: 250592 - DNA, 394 bp, Glycine max
taatatcagaaagggacccaatattcattagtttattctatcacgagctcttcaagttgtatgggactaaactgagtatgagcactgcttaccatcctcaaagtgatggacgaactaaagtgcttgattgagttttggaacaatactagtgggtgttagtgcatcataaaccatcctaatgggaaaagtttttgtatcttgctgaatggtgctacaaccccactactcaattagccactaatttaacctcgtatgaaattgtttatggtaagccttctcctaatatttccaattataaagctggaacctttgccgtggaagcaattgaattttttttgacatttgcgcccagagaacattcacctacttatgaagaagcttgaaaaggcctatg

SEQ ID NO: 250593 - DNA, 375 bp, Glycine max
tatgtgaatactctaagcgacctggctggcggtaaaattatcgacctaccgcttgcgattcgtgacttccaagagggggaatccctttaggtgcaacttgctttattaaatccttcagttcatctatggttcatgttgaaggaatttgaaatttcttttggattttttcctgtgaacgcgcatccaacaaatttgttctggggtggcatgttccatttcccgttgtaatacaagatcgcgtcatgagtacggggcatagtgcgttgaagtaagtttattactccacctggtgttcttccaacggtgcataataactcaatcagaccaacacatgaaaattgatcattacacattaaccttgtgttgacatcgtca

SEQ ID NO: 250594 - DNA, 329 bp, Glycine max
tcacgtgaagacttattaagtgcggcccatgaggataagtgccattgtcccatgatagcaacttgacgaatggtcctggtatagagacatctacctgagacagagattatatacgtttattcgaatgtgtccgttgagatctaacttgcaataactatgagattatagttatgcaccatggaaatgactttgaccactctagtcttctttgtgatacagactaaaagactttttgggcttctaacacctattttatcttatcacttataaccctaacttaagcttggaaggggagatacttgcataggaaccacatgtgatttgatgcg

SEQ ID NO: 250595 - DNA, 170 bp, Glycine max
actcacaaaaacttggctcaaaacattggcccgaaaaaacgtcttttatgaatcccgaacaaatgaggagaacatattgacatgtatgatcttatggtcccaaactgaaaagtatggcgcccaaagtagggaatttactgcctacacctctaaccttatctaccacaacc

SEQ ID NO: 250596 - DNA, 375 bp, Glycine max
  unsure (1)..(375): unsure at all n locations
ggacctatnaatactcagctttatggagctgaatcttgagcttaatgatattcttcaatggtgattttccaccatggagatgcagcacaagataaaggagaagaggtgagaggaggcaccatccactagggaataagctatggaagaagaagttttaccacctagagagtgccttggataagaaacttatagaggaagcttcaatggaggaaaagaaagagagatagagagagggagggttggggggagcacataattgatggatgcaaatagggagacaagtttgacctttaaatgtgtctcacaaaactcttattatcaatggtacaacaagtggttcccatgtttctatttatagcccacgtaccttccttg

SEQ ID NO: 250597 - DNA, 191 bp, Glycine max
tatgccttgatcaagtcattatgtgttttagtttttgtgtctacatttccttgttattataagcacgatacaaagattgagatgtcgcttttatattggtactacgtggaatctcgttctaataaacataaaatggcgatatactatattgctcttagattgaggggaaagaaaacgatgaacttgagatg

SEQ ID NO: 250598 - DNA, 371 bp, Glycine max
ttaaaatttgaattaaaacgtccagaaactgctggttatcgattaccatatatgcggaatcgattacacagcgcaaattatgaattcaaattttaatagctgttgtaaatcagatttggccattggaaatcgattacatcctctgggaatcgattaccacagagtaaatttgtttgaaaaagactttttaacttaaatttcttggccaaaccttttgctactccaattggaattcccttactatttaatataccctttctaaaactcttgagactgtcttgatcatccatcttgaatatctttaatttctttgtcttgaataaaactttgaaacacatgtgaaccttttgcatcatcaaaacaattagctt

SEQ ID NO: 250599 - DNA, 380 bp, Glycine max
tagcccaataatattgctaacaataatggtaatatcaatatttctaactccctcccctaaactatagttcacttagcatcacacttgttacaaagtattagaatgtcgcaacatctttaatgtatctcagaatattgttaggatcatattgcaaggtatgaaagttgagtctcacattgaaagtttggcatttaatgtagggttttttaggcctccaccttcatttttccaactacaattgatggcttttatggtgtagttctggtaaggtcttaataattggtattagagcttcttcagtgttgttaaatggtggcgctacggctaccatggctgaatggcatcatggtttttttgtcaaccaccatatgaaatttgtg

SEQ ID NO: 250600 - DNA, 371 bp, Glycine max
tccactatcaaggacatcttaatgctccgcttgttccccatggagacctttactatccctttctttctgagggaggcaaattttgatacgcctgaaaaggttcaggaccattggaacccattttaaccactgctaaaactaaaaaaactcttatatgtgcccataaggcacacttgtcatattttcataaacggggcttttcttaaaggctgaaagaactttgccgataagtccttaaagcttttataagcctctaatgtgccctaacatatcttccaaataatccactacccaaatacctatgaaatcccttaagacatgatgaacgtgccatcataaggcgctttggggcttattgagccccacaacat

SEQ ID NO: 250601 - DNA, 358 bp, Glycine max
cattattatgataacactttcgcggacttacgctgtcttcacgggccctccaggggccataatcgaccgtcattgagtttggacccacggtcattcaatgtgcaactctcggtagtgctactgtgctatatagaagaaacgaaacgaaacgctatggcgcttaatagtgctgtttgagtttttacgttgagaaagaaagaatgacaccgcgaccaatactgagaacagtggtggttcttcttcgcacgtgcgagcgtgcttaaccatcttctgagcctgcaggtgtacgttccagcgggttggtggtggaaaacaaacaggtgcgttagatcacgggctttgagggaatgaacactga

SEQ ID NO: 250602 - DNA, 391 bp, Glycine max
tcatgtcttcattgtaacttacctgtgttgtatattgaaaacctaggtctgtttcgggaactcgtggttaacccaaggaccttttttggtttatgctgcaaggattgaggaactcgtgacctgaggtaccaggtaagcttcatgtctttgtgtcattgtcactgatctcactgccaatcttgttgccattgtcactgttgggttcaaggtaagctttgtgcctccgcgtacgtgctaaatttgagaagcaatgctacctttttctaactcatgagggatacatagacaataatatatttagaaatgttgcagtagttctgtttgtttcactcgctcaattttaattcaaataaatttctttagtaccaaattactacactttatttccata

SEQ ID NO: 250603 - DNA, 383 bp, Glycine max
  unsure (1)..(383): unsure at all n locations
ctcaaacggagctacatcagaaagatttgtgtgtggcgataatgangctgaggggccagttcatggaaaaccttctgctaaagtttacgtttatgaacaaagttcggtggaggtctaagtgcacgattattaaattttgacttcaactctacaaccattatggttaggatgtaaaaatacatcaaaattgtttgttgtagctcacatgttgagcaaaaaatttacacataacatgtcacaggcctgcgtcaatgatgtgatgattttttttaaagagtcaaaccacaatgacaatgtcatttcttctagtttcaaaaaagcagagaaacttgtagtatggctacgtttatcgagtttaaaaatagattgctgcattgacgggt

SEQ ID NO: 250604 - DNA, 400 bp, Glycine max
aactcaagcttattgctgattgaactatagcatattttttctatactatttatggataaagtagggaacagtgttgcctttggcttgttgggggatggcgccctagtaatggcgggtttctactttttagaacacaccaccccccgaaaataacattgccttgcatgtatgctttggcggaccggattttaaatttcaatagaaaaatatacactattaccattttacccttttggttattttaaaaaataaattaatttctattcttaatatttaatctaataggtttaaatttccctccttaaagtgagttattatcgaaaaaacattctttagtcattgaaaagtaaataaatcaaaaattcaattttagtaaaaaaacatatatattttgaattac

SEQ ID NO: 250605 - DNA, 264 bp, Glycine max
aattatatgggtcattaattctatcacatgctgacaatagctgagaagtctatggatctcctatgaggcggagtacgtgtccgccattgttatgtcctttggaagcaatcggggaagatctcgactctcgtctaaggtaagagcgaatcggcccatccacatcgttgcctcttaatgtaacgaggcgaacaccccttctctagcctcctttttgcatacactgggcatactcgtccccacctctatgcttgtggggcgcggcta

SEQ ID NO: 250606 - DNA, 292 bp, Glycine max
aaacttaagcgcatactcttgtgcgaacgctcaccggcacacgacattttttataccgaggaaacacgcacccacctacagacgaggcaccttcagaaccgagagtatttacaagaacgtacaaagagtattcgaaacctacaacacgcacagatcctgcgctagaaccacaaacaagcatacactaaagccgcgggcgggtaaagactgcatacaaacacatctaggagtttctaatacccatgcaaacgcgggcaacaagaagagaagggtgtatcaacacaataaggag

SEQ ID NO: 250607 - DNA, 417 bp, Glycine max
actatacaatactcaaacttgagcattcataatttacgtacgaatgcccgggaatcatatataagtagcgggctagctagcctatagaatgacattaattgtactatctgtgtaattctttctatctaaattaattaatttatctatctataaacatgctaccgactagaatattgagatacaacagacgacatgtacttttgagctaacttttaggtaaatattccacataatctgggtggttgatcacaatacataagttggctgacattaaatttgcgtggctgaacttggttgtcaattcaacacgtccaaacaattctcatctttttggaaatcaccacgcactgggtttcatgtacatcacacaagttccttctcatttgaccttataacaataaagccaccaactttgct

SEQ ID NO: 250608 - DNA, 419 bp, Glycine max
gcgacactatacaataactcatcttgccacccatctcgcccaaacgatcaaggctgcttactccaaaatccacatgcttatggaggaatattgtgaacggcccatcttgaacaggttgctatctgcacccgaatttttactaaatacaccccctgacttttatggggattctttttttagaaaagatactgaaacttacgaatttcggaacaatacttgttttctttacgaactgctacggaaccttagcgattacataatcatccacttttttgacttacagaatggtacggaacctaactagttgagcaacgatgcttccatttgattcccggtgtgtcacggaaccgtacggattgtgcatcaatattctctttagatttccggcatggaccagaacttcacaaagttgctaatga

SEQ ID NO: 250609 - DNA, 337 bp, Glycine max
agctcttactataacaaacaaagagataacaaataatgcacataggtgatgtcattcaaagcattcttttattgtatccatacctgagaattgtcaaagtcgcgagctggtatcttgtcatcaaacttcttcatgtcttcccaaggtccatcaccaactccaaccacaataatagaaaggggatatgaactggccgcacacaaagtacaatacagaaaattaatggttgattaagcaactgcgtgtgttgttttaatctaactgttgtggaatacgatggtgtaaaaagaccagaaagatctctatcaaataagccacaccaatccacataactaaa

SEQ ID NO: 250610 - DNA, 335 bp, Glycine max
tcaaaccggagaaaaagcttcatgaatatcataatcttttactcgagggaaacccttaacaaccatttggccttgtctttgttgatagacccatcagcattttcttttacacgaaatacccatttacatcccactgcctgtctcatgaatgattattcctgagagcaacatactcctgctgcatggcagaaacccaattggaatctgccaaggcctgtttgacatttttaggttcaatgtgggttaaaaaaagagaaggatgaaatccacactttgaccctgtttgcatatggtgttgttacaaagtctacgaggagactcagaatttgagtgtg

SEQ ID NO: 250611 - DNA, 360 bp, Glycine max
  unsure (1)..(360): unsure at all n locations
tgtaccatattcagntgccggagacaaccagtctgatttttattctacattgcggcttaactgtttgagtatgaatgccatattcaatgtcagaaatcattagattctatcgattgtgtacatatcagtatttagtacatggggttagtatttctggctcaggtgagtggatctatgcaacatggcggctttagctagacctctacccatggatagttctttctgagtaaactattgttaattattacatttttcctgctttggggaagtttaaacccactagagaatatggagtcacactttgatcggagatgtgaaaacatagaataggtgcttatccaataactacttattgacttg

SEQ ID NO: 250612 - DNA, 171 bp, Glycine max
gacggaccaaaacgagtcactaaacaggagtacctatcagctgcaccctacaacgaaacaaacacgcgggaaactaaaaaagcgaacacttaagtcaaataaccggagtgcagctaaaaaaaagacataaacctaaccgatagggaaatataacaggaccgccaaaagacc

SEQ ID NO: 250613 - DNA, 394 bp, Glycine max
ctgcctaccaaggttaagcaactcactctccttcgtttgacaaacaatcctcataactaaaatgaacataaaattaatactaattgttaataatactttttaggttattattattattatttctctctcttcaagtctataataaataggccacataattaacattgagaactaatatagtaaaatttgaatattatatcttgagcttttaaatttctagataagaaaataatattttctaaaacaaattaaaatttaagaatgaacttaattatgatacattcctttaactattcggatatgaatttagatacagaacagtccgtttaagtttttattaaaaaaaaaagtgattttcggataaaatgatttagccattaacttctccaattct

SEQ ID NO: 250614 - DNA, 242 bp, Glycine max
cacccaaaaatcagggctatgtctaagcctcactcctttaatgagaatttcactaaacacaaccacaaccaccaccactagtttaccaacaataatctcaacaaggttatcattacacacagcttcacccaagctcttgtagaacacaatggatccttaatcaatgtacactaccttaaggtcacaacacacttgcttcctcacaacaacaccacaatttgttcttgggttggagacttaac

SEQ ID NO: 250615 - DNA, 308 bp, Glycine max
caaggttcatcaacctccatttctccgagaatacgactcgaacgcaacgtgtgcttgtcacggagaagccccggggcgttccattgagcatggtagggctctgaagcgtaaggtgcaaggtctaattgatgcaggctggctgaaatttgaggagaattgcgtgtaaatcctgacattgacaagagatgccacacatggggcaattttgaaagctgttgttaggtgtccctaatgactcatcagggtttccaagtttatgccattattgtaaaccacagctacaatgttaaatgaaatggataaagttg

SEQ ID NO: 250616 - DNA, 387 bp, Glycine max
aagcttgcacgaaagcgggacctcccttcttttgtcggaggcaggctgttcgccttcctttttcatgtataggtgtctgtttgaggtcttgggcctcattcttcccttgactgccttttagtgtgctcttcttgagcacttgagcgtggccccttcccaacttaaaccaaacaattgggccatggtccaggcctttgaaattttgtgccctttcttcaacattcagcctagtgtgtcagtcttcttgtttttcttccaaatgaaattgattggccagattggtcgcgtcttcttaaatagcatgtccaagaagctattcgagtttgactctaatgtctttccccgcttcaaggacccgtatttcaaggtactggctattgatgccat

SEQ ID NO: 250617 - DNA, 331 bp, Glycine max
tcgaccggatccgcaaccgcgagctatttcgattcctgtcggaaatagagcaaccgcttccgaagaacccaaaccgaagaacgagaacaacgcgtagacttcacagcgtcccccgcaaattcccaacaccagtttgcaaagcaacgtgcctttgaacagcaagtgttcctctgattcatggtcatcaacaaccaaaaacgcaactgcggctggaaggagaaacgtgaagcgtaacgggtttaagcctgtaagagttgtgccagacgccgtcgatgtagcaaccatattgccgcgctctaagagatgcgccggtccacctttcacttccggc

SEQ ID NO: 250618 - DNA, 407 bp, Glycine max
  unsure (1)..(407): unsure at all n locations
tgcctatgaaactaagctatccaacagacccttcattgcaatgcacttgttgtgtatgtttgtctagntaaaggaaaaaagaaaatgacgcgtgaaactttgccttatcaattcaagatagactgtttctgatttcatgacatgtagagaagtgatactgtgatagtgatatgtgctcttcacactttcttcctgtcaatctcactaaataatttgggtgcacagcacgctctattggttgggctagcatgggatttcatcctttattagtatatattcagcgttgaaattaaacagtatgttgctagcatttttctaacatggctttcaccctgcatttgcatctttctcaggctcataaggcctcctatgaaaccaaaagtttgtaagatattcttgtttattct

SEQ ID NO: 250619 - DNA, 384 bp, Glycine max
tggctcattcacttaaacgagcccaactaatttatagtttgctctcggcttgctacaaaacagaagcttgagctcgactcgtctaactcatttataacctatgattcttgctcttaccatttgataaattatttcttaactttatcgattaagcatttgataattactttaacaccagataactatttactacttaaaaaatgtgcttaacatgtgatatgtggaatcaaatttttttagactattaaaatagctcatagcttattgacctttacacaaaagaaacttcaacatcaatttaacattctcaacaaagttcaaactacatatcttcataatcaatatctaaatcacaaagaccaataaaatcttcaccaatttctt

SEQ ID NO: 250620 - DNA, 373 bp, Glycine max
taagcaaccagctcgctcgcgtgagctttccttgcaccaaatggccttttcctatgaatagccctgcagcggaagggtttaacgggctggaaaaccgaggacagaaagcaaaaaatcccaacaccgtgatcgagggcaagcagctagctgagcccaggggctgccacttccaaccgtggactgataccaacaccctgccgcgctcgccttaaacaaccgcacccactacccccactgccgtacaatttccgtcgacgtctccccccttctcgaactccctccccccctgttccgctccatccatttctctactctcgagccgtactctcccctgacccacactacctcatccttcctccctctaccacccccc

SEQ ID NO: 250621 - DNA, 283 bp, Glycine max
  unsure (1)..(283): unsure at all n locations
agcttgaagacattataagagaacgagcttgtgatttgaagtgtgactgaaaatgttagtcagtttgtcagaatgattgcgaaggaatgcattaaccgtattccagtgagagtgtgatccttaaatttgagagaaacgactatcatttagtactaattnttgcgcgaatctctgaagtatggactgaatgcatggaaattgaggatgacgaacgccatgtttgattgcgatagccacttacccacaaagctaaccctgcgctcgaatgaattatcccttgtac

SEQ ID NO: 250622 - DNA, 359 bp, Glycine max
aagctttaaccaaggggagatggaccatttatgtgcttgacagaatcaacgacaatgcttacaaagttgagctgcccgatgagtataatgctagttccaccttcaatgtctctgatttacctctttttgatgcacatggagaatccgatttgaggacaaatccttctcaagagggagagaatgatgaggacatgaccaagagcaagggcaaggatccacttgaaggacttggaggacctatgacaagggctagagtaaggaaagccaaggaagctcttcaacaagtgttgtccatactatttgaatgcaagcccaagtttcaaggagaaaagtccacggttgtgagttgtatcatggcc

SEQ ID NO: 250623 - DNA, 198 bp, Glycine max
tctagagctggcttagttcaactgagcagagattagtataaggtctatgtaaccattgtgagacgattattgccatactatgtgttgaagctcattacaagccttacgtgaaaaactatgatatcaccttacccttaaggaattttggagctttggaattgttttgggaataagctgggaataagtgcgggggggggg

SEQ ID NO: 250624 - DNA, 111 bp, Glycine max
atctgaggatgaagcttagcttaagttagtctaaacctacgagggctgcgtaaattaagcctagtccaacaagagggatctgaggatgaagcttggattgattcagtctaa

SEQ ID NO: 250625 - DNA, 344 bp, Glycine max
ctattaaggacctattgaactcaagcttacaaccgctcgttggtgagctttccctgtccgaacgatctttctataagagcatgctcatgacgggtctaacggttggacaactggggccagtagggaaagatgattttaaaggattcagggagaaactcattagtgagcctcagagtagtcactgatcaactttgaattaaaacagccaacaaggtagacgttcccaaaaactatgttgcttataaattttacatggctggcaatttaaacaataggaacccacccagaaagggaacactatttattttaggcttagccatgcgatatatctcgccttgcttcca

SEQ ID NO: 250626 - DNA, 390 bp, Glycine max
ttagttttgtttaagaagctatatccaaggcatatggagacagagataaagaattccattgccaatgcagttcatggtatggaagttggggagtttgctacatttatggcacttggtttgcacttcgtggtcttgcagcagcgagtaaaacttacactaattgtgctgccattcgcacaaccattaaatttctactttcaacactgaaagaggatggcgggcgcgcagaaagctatcttttatgctcaaaacacgtttggcatactatggttcctgccaacacgatactatatgtctcatttaaccgcactctccaccttctgtattctcgctccctactccatctccctcttctcacttccactacctcctctcttggtctcaccttcc

SEQ ID NO: 250627 - DNA, 207 bp, Glycine max
attccttgggggccattacagagacttcattccttggcctttcaatctcccccctggaggaaactaaacctcaagctaaaattcacaaaaggctatccagttctatacaaacttgcttattgaaccattacttgatgaagcagctataagccgacggcggtcgttggcccttctctgtggctgtagaccatccatgcatataaaaaa

SEQ ID NO: 250628 - DNA, 349 bp, Glycine max
tttgcctttcaagacatccaaggctctggtaatgtattaccaggcagcgcaatcgattatcagaaaataatttctaaaaaatagcttttagaagggttttgaaatttgaatttaaaagctggaaccgattaccattgatgcgtaatcgattaccagcaatgaaagccttgagattcaatttgaaaagttatgacccttcaaaacataactgtgttatcgattaccagaaacttgtaatcaattaccagcgaagaatttcataaaaaaaccctttgaaaagacacatcttttcaaaccattttgaaaaggcacgaagggcctatatatatgtgggtgtgacctcaaaaag

SEQ ID NO: 250629 - DNA, 249 bp, Glycine max
acgcagagcagtttggctcgaagagctcctttatgctttgatacttctcatcacaccaggagggagtgcccgcacaggccatacaaaaacaccgagtgtccgacagcacacacgaccacgatacactccccaacgctcgaaggcacagattttttgacgctacagcactgaaccgggcacacttgacctccatacggcctgcctctctgcatctgcgcctagcccgtcgccaactcaccttatcccccc

SEQ ID NO: 250630 - DNA, 235 bp, Glycine max
taagaaagctatttatggacttaaataagcaccaaggttatggtatgtgagacttagcaacttccttcttgaacaaaactttgagagaggaaaagctgataaaacacttttcattaaagagtcttctcatgacattttacttgctcacgcttacgcggacgacatcatttttggcttcactaaccacaccctcttgtcaccatcctacccactacatgctccgcctcccaccccc

SEQ ID NO: 250631 - DNA, 377 bp, Glycine max
ttacatcttcaacattctctattacatcttatttcattggttctgatttgtcaccacgatccatcagtataatcaatctcgttgtattgcgcttgcattggatgatgcccttgatatccataaacaacatctcctccatagccactcccaccataaggatttggactgccaaatagataatctgcagtaccttgccacatgttctcctgacaattgctccctctataactcactttctcacaacaacatttcctcttcttcttcatacgatccaaacaaggccaatatccaaacaagctttcacatatgtccatagctttcaatccatatcccctacgatactgcggcacaacacgaaccacttgcttctcatgctc

SEQ ID NO: 250632 - DNA, 395 bp, Glycine max
ttagatattttattacatgttattcattaagattgtaagacataatgaaggatttctatagatattctattacttagatttcaatgagacttatctctagaaaattgcttttgatcattaagattttatgaaattgtggattcatggtaggtgcatccacagtcaagcatagtaaggattttgcaagacatagtgaagctggttgggctctacactatgcaacataatggtgattgtaagttgtgccatgctaattaagagtaaccttagcacgtgtcacaaccaggctggggcaggtaccccactcccatatatgatgctagatatcaccactcatcatatcccattaacttcctaaaggatcatgactgactaatgcccaaacatttttctat

SEQ ID NO: 250633 - DNA, 391 bp, Glycine max
  unsure (1)..(391): unsure at all n locations
ctatannaaactcaatcttgtaacgaagagctatgatgatgagaaagaacaaagctttacattattgatgttgtcttctcacaactattcaccaagggttctccaaatattgccctctatttttgtacttggtcccacaaaataaaagcatagtcaatgaactccatggatgccacgcttatctttttatctttagaataattgtggcatgcaaactataacaacccgtctcatcgctatgatatcactaactctaaaatgtgtaattataatttttaaatgaaatctccattaattcgattatgaaaataagagtaaattttcgcgatatacattcaccacaaaatacacacaaaatttaatatacacacacacacctatacgtgtgtgt

SEQ ID NO: 250634 - DNA, 376 bp, Glycine max
tgcagctgcttgggggcttcatggggtggattttggcttaatgaggtccttcgatggtgattttccaccatggagatgcagcggaagacaaaggagaagaggtgagaggaggcgtcatccactgaggaataagccatggaagaaggagcttcaccaccaagatgagccttggataaaaagcttggagaggatgcttctatggaggaaaaaaaagagggagagaaagagagaggggggagcacgaaattgaaggaagaaaaaaaggagaaaagttgaactttgagttgtgtctcacaagactctcattcatcaaagttacaacaagcgttacgcatgcttctatttatagactaggtagctttcttgagaagctttc

SEQ ID NO: 250635 - DNA, 358 bp, Glycine max
atactgaggatgcgtctaccatcacgattatggaaaccctttgcattattgggggtaccacctgggccgtcagatccctccaccttttgggcgtgttctttgaaagaaccgtccccctttttgcacatgttctgtaggtgcatcctatccagaaccatatgaaagaggtactgatactgcctaacaaaggcgaccattaggtccttccaagaatggactacaagaaagttccaagttagagtaccaggtaacagctaccccactaagactttcttggaaggaaagtatcagcaatctcctcatctttttgcgcatcccccagcttctgacaaaacattgctagatggttcttgagaca

SEQ ID NO: 250636 - DNA, 377 bp, Glycine max
  unsure (1)..(377): unsure at all n locations
actttcgtaagctatttaagctaagtctagnccaacaagagggatctgaggatgaagcttaatttaagttagtctaaacctatgaggggtgtctaaattgagcccaatccaacaagagggatctgaggatgaaacttggattgattcagtacaactagggatcgaggtttagtaatttaggctacaacatagaacacaaaagcctgatcgattagagaaacatccttatatgcattacctggtttattagaaagacccaacacttctatctactggctggcaatttatatacttgcattgntactggttgtatcctacacctagtttaattcaagtttaaaccatcaattatcaatgtttctttcaacaatacctta

SEQ ID NO: 250637 - DNA, 300 bp, Glycine max
ctaccgcatttaacagaatcgaagcactgccttacatagccaatcttaaatctgaagtggaggatcttaggacatcctttcaaaccctataggtaactcaggcatactcaaaccggcatatattcatttctctgggattatacatgctaatgtctaggtgataaaaagacgttctgaaggcttctagtataatcctgtcgaaactttgaatgcttacaacatgaatagctatgctttaaaaaaaaaatttggtaggaactagaaagtcgtttttttcaggtgtgaggaattattgaatgc

SEQ ID NO: 250638 - DNA, 317 bp, Glycine max
atgcaagctacaaatatgattatcgggcccaataaggtctgattggtttattattaaaatgcatcccacaaaccaaataaaataaaactggacgacaaataaaaatgtctgctctcttcaaggccaagccggttcaacctaatttcggatccaagcccaattgcttataattcttctgaaattaaatcaaacacataattattcaagtaggcccaaatgataaaagtgcataattaatttgataattaacgctaattactaattaaaatggtgacagaaaggggtaagaaatatgagaaaataatgacacatcaaat

SEQ ID NO: 250639 - DNA, 390 bp, Glycine max
cttgtgtaatcgattacacttatttggtaatcttattccattgactgtttcttaataaatcaaaagatgtcactcttcaaaaggattttgactttttcaaattggatttaagattttctaaaagttataactcttctaaatggtcttcttgaccccacatgaagagtctataaaagcaagactttgttttgctttttcaattcaattaattctttcacactttacttttccaatcaatcctttacaagccttgaatctctttgaacttattcttcttctttataccaaaagctttcggaagttttctggttttctaaaccttgaaaacttgtgatattcatcttttcattcccttcaccctttgccaaaaagaatttcccaaggactaac

SEQ ID NO: 250640 - DNA, 362 bp, Glycine max
tcttcattcctcacactacccaaaggaccccttatttactgtacatactattcacacacgctgtctccacacccaatcagctgttgccaccaagacatgccaagcatgtcggggattcctcccacgcttacacctcgctattaagttaccattggtgaccatgcatggaatatttcaaggttattttggttttcttcacacaatatatgtatatatgcgccaaaatgctttaactgaaatcaataacacacacgtgagatcgatcgacctctcacagtctcttacttcacacacacgtacgatcgagtttgtgtaaactcaaacacatgcagggacaggtggttagtggctttgaaggacac

SEQ ID NO: 250641 - DNA, 260 bp, Glycine max
  unsure (1)..(260): unsure at all n locations
tcagtggatgagcgaagccctaagncatttttttgatattagtggctactggaggagaacacggctgaacgtaacattgactatttacatgttgacacgaggacaaaagctcggtctatattccaaggagggccagcctcggggaatgaaataccctctagcgaatactctccaataatacctctgcccttgtattctggttctcccatcttgctactcccctctgagtagcccttccctttaataaacccctttcttac

SEQ ID NO: 250642 - DNA, 294 bp, Glycine max
  unsure (1)..(294): unsure at all n locations
tttcagtttcttaccaagnaaaatggatcattcttaaggtccaacgccttgaaatgatcacctttcaagtaaaaagaatcgcttgattcacgcttaaggaagaactacgtaggtctgatttcctctttgatggagggtacgtaggagcaagagccccgcttttgtcaacctcaaaaaataaaaagaagtaaaagtaaagggaacacaatttccacaaaatgaggctgttgtcctttgagacaaacgtgagaggtgctaataccttcctcaaacgtaaatacaactcctgaactt

SEQ ID NO: 250643 - DNA, 375 bp, Glycine max
ctaagcttgcttgtaagctttatggagctggatctttagcttaatgagggccttcaatggtgaatttccaccatggagatgcagcggaagataaaggagaaaaggtgagaggaggcgccatgcactaaggaataagccatggaagaaggagctttaccaccaaaagagtgccttggataagaagcttatagaggaagcttcataggaggaaaagaaagagagagatatggggggaacatgaaattgaaagaggaaaagagggagagaagttgaactttgaagtgtgtctcacaagactctcattcatcaaagttacaacaacctgttacacatgcttctatttatagcctatgtagctttcttgagaaactttgt

SEQ ID NO: 250644 - DNA, 396 bp, Glycine max
tgttgcaaagcagctagagtcatgagtaagggtagtttttcaaacttgcatgaagtcatttgacacatttgtaagaatcctgctatgtacttgtagttgtatctaaacaaaattcttacctaagagtgtgctttggatttccaaatgggtatgtcaagcacgaattattgcaagagtgaggtaacgtatctggagaaaaagtgaggtaagttcttcaaatttgcattaacttgtttgtgctaatccttttaagcacttacatctaaacaaaagacttgacctaagagggtaatgagtttgttaaggataaatcatgtaatgcccggagtatacggaactgaagtaaaaatttgcaggagctaaacactagataatccaatatccaaactcatctat

SEQ ID NO: 250645 - DNA, 321 bp, Glycine max
  unsure (1)..(321): unsure at all n locations
agcttcttatccaaggctcatcttgggggtgaatctctctcttccatggcttattccctagaggatggcgcctcctctcacctcttctcctttgtcttccgctggatctccatggtggaaaatcaccattaaaggacctcattgaagctcaaagatctagcctncatagaagccttacaagcaagcttccatcattttatatctcaatctcaactggcttctcatatataaagatgtgaacccacccctataatataaagggacgagtgcgctaagacccgccatcttcagaatgagccccactctttcctattactttct

SEQ ID NO: 250646 - DNA, 293 bp, Glycine max
atgcacccccttaatgactatggcatcatttttggcgctaaactgctgagagttggaagccctcttctcaattaaatatctggcttcagcacgagtcatgtctccaaaggctccaccactggcagcatctatcatacttctctccataatactgagtccttcataaaaatattggagcagaagctgctctcaaatctgatggcgatggcaaccggcacactaatttttaaatcgctctcactacttatacacgctctctccactgaggtgtctatacatgagatattttcctg

SEQ ID NO: 250647 - DNA, 398 bp, Glycine max
tcttaacaaagtctatgaacgaacaacaacctatgttgtgcttcactgcttgggtatcttactcatcgcttcaatattctcaaaaaattataaataaacataagatcaaatacttttttattttttagagataatcttattttctaaaaatacaaaaaatactttgattctgattcatatttttattaaataatttatcatatggcattatcaagataatgttccaagttagtcttacaattatatgtatttcattgtttataaaattttaaaacataaataataatagatatcgatactaaataaataaaactattttataaaatatattatatatttcaatcatattaatcatagctgtcatcaatatatgtatacaactatactatatatttaat

SEQ ID NO: 250648 - DNA, 386 bp, Glycine max
tagaacgctatgacttaaaaaacacaacttcgatcaagtggcacatctattgcagtaaacgccacattatctgcatcaaggaagcgactctaattcaatttgacaagcaaaactagtcattttgctttctttattggaaaatttcagcatcaaagtcatattttggcatatccttcgattatacttttgactttcactaaggtcaatccaaattgtgcttttttttcgcaacatatttatcagagtgggaacagggaaccaatacacactttgcattcaagcccagaaaaacgatgtttttttgcttatcacaattaccactaaaatgaaacaccccaaaagcaaaaacctttgatataaaatcggaatcttgaacaacctatttt

SEQ ID NO: 250649 - DNA, 276 bp, Glycine max
ttttttaagcatttatatcctcgaccaatatttaaaaatatagaacacaaatatttccccaaccaaacacacccttattattcttggttaattcagatggcaaatcaatcgcgactcgctctatatattaagaaaaacaaagcgggtgaattctcatccatcccagatatgtggattagaacttaaaatttggagactaatgaagagggaacgtgcattgtcttgaacccgacgatcaccaacaccacacgtgtgctctcttctctgacaaaatat

SEQ ID NO: 250650 - DNA, 348 bp, Glycine max
attacgagccatttctagggcacagatgggtgatgatgagtcaaattttcactccgcggaattatagagtgtaaatccatgtatgagcaagtctatattcgacgaaataacacttgtgagaaggtgagatgtatgctcccaatataccctcatactaaatatcacttctcactcctagaaaacctattgatttgaggggcgctggacacctatattctgtgctgctgtgcttcaaagcttgactttcgtttatacacgatcgatacatgattcgtgacttgtaggaatcgctttggtcccgattggatgagaggaaccgtgatttcctaaatgtgcacttacgcaaaa

SEQ ID NO: 250651 - DNA, 355 bp, Glycine max
ttacccagattcataataatgatagatttcagattttcatttcagaaaaccttatttctctctctctcagacaatcctagtttctacaagaacaaagtatgattagaattagacatacagaatttgaaaatacaacagagaaggggggaagattaagaaccaaaaaagaaaaagggataggaaaaaagtatagaggaaaaagacagcaaagggaaagaacagaggatgaaacacaagttcagaaaagagacagaaggagaaagtgaacaagtgtaaacagagaaggagaaaagggggacagaacaaaaagagagaaaggaaaataatcgaaatcttcttaaagtgggaagactac

SEQ ID NO: 250652 - DNA, 390 bp, Glycine max
taatggatgaagggttaattggtgtatgtgttgtctaatcacatattgacagccctaagttggttttcgcttagtaaattaaaatagggttggattaagtggttaactgttagggacgaattctccataacctaggacaagagagtggcttctgaataagaggaaacaacccatttttaatactattaattttgtattctagtttgcttgttctttatttcacaaaacaaacaacccccccctaatcgttactattaatgcaagtatattatgaacatttggtttatcattgctcgttgggaaacgacctaggatcacttcctagttattgcattttcatgtttatttgattcgggtttggtctcaatcacatattcaactatttttgct

SEQ ID NO: 250653 - DNA, 379 bp, Glycine max
tcacgatgaatcaagattgattcaaatagtttttttgataacaaagatgatgaccaaaagctcataagtcaagaacacttcttgataacaaagatgatgatctctatagaagcaaagcttcatggtgaatcaaaggtgattcaaaggtgttttgatgataacaaaagatgatgacaaaggtgatgacaaaaagctcaaagatcaatcaaagaacaactcaagtgaatcaagaacaattcaagagttcaagataataatcaagaagaaagtttaagagtcaagaatcaagattcaagattcaagactcaagaatcaagattcaagattcaagactcaagattcaagaatcaagagaacgcttaattcagataagtatgaa

SEQ ID NO: 250654 - DNA, 349 bp, Glycine max
gcttctatacttcaaatactttacaaaaccattttatttgtacttttacaaaatgaacccttccttacttcggggcatatccgataaagttagcaagttgaccataaacggggtcaaatagtggctccaatggctccttctgaatacgaacacctaaaaacttaagcctagtttctatatgccagcctcgtgaatgtacatatgatttatagagaacctaaacacccttgttatcacaaggaatagggatgttttcttcatatataacataagccgtctagctgggtctataaaccatattatttgagtaaaacaaccctgctgtggatatatattataactctacagg

SEQ ID NO: 250655 - DNA, 431 bp, Glycine max
ctgcagcttgcagattctcacgaaacgttctgtttctttctgaagcgcctcggcttataatttcttcacggaaacaattctttcaagcaaattcgaaagagagagaagtgcctatggggccggacccttttcttctccacttcctcccctatttatagcaaaataggggaggtggttgccgcccagctcgcccaggcgagctcagctcgcccaggcgagcagggttgcttcctccacaagcaaccgccttctggaggaatcttctggagggcccaaatgggcctgggtgctatttcgcaccccatatttactaagcacacccccctctgctatgttttggagattctcttttcgcaaaggtacggaaacttacgaacttcgtaacgataccttgtttctttccgtaatggtacggaaccttgcggatacat

SEQ ID NO: 250656 - DNA, 374 bp, Glycine max
tcagaaagaaactctggcactacagactgatatatagtttgttaggagcttgtatgaaaattcctatgaaaagcactgggaaattgaagaccagattacacaaatgcagaaaagggtttgcagcttgcaagatgagtttggaattaatacattcatagaagataacgatgctcgagctctgatggctgcaacagctctgaagtcatgccaagagaccctggctaagttgcaagaggcacaggcacaattttctgaagaggctaaagaatcataccaaatgggtaaggaagctcacagcaagattgaaacccttaaaaacctattcatttttaaacataatagtcaactagacccagttacagaaccaaaaagca

SEQ ID NO: 250657 - DNA, 366 bp, Glycine max
tagagtttatctcttttatcttaaagagagtgattctcctaaattcttgagtgattcaagaacaccctggctgtatcaaaggactttcacaacctttgtgtgttgccctccctggaaagagtgattctttccttccaatcatctccacccttgttctttcaaaccacaattccagaaaatccaccctctgccaaaattatctggtgaccataacctccattttacacactcacattaagtgattcttgagcctaaactgaatatcaaaacgagacctttcacctcgctgtggaatcacctcatttggagcccctgagcttccgttattgccattactatatttctgtgcagccaccacttaaccta

SEQ ID NO: 250658 - DNA, 174 bp, Glycine max
acttgcatcctatttagcttgaagggtacctcggacaacaaacgaccatcctcaagtcgttactgttgacgtaagaatacaataaaaagttggtccaacagtggccgaagggaaagaatacacgatcaatctactagctggtgcagacaaagtgcataagctgttcctgaatgg

SEQ ID NO: 250659 - DNA, 342 bp, Glycine max
tactcatactcaacctcgggctagaatacagaacaatgagtattttgttcaaaacacagcaaggagcagaaacctgaactctcaagtataacccacgtcctgagagaatattctgccctcaaatgaggaggagacatactccccactgtgaatctatgaaatgctctcaaaccccttcttctacttgtaaaaggagcgtccctgagacggaaggctaaacccaccgttgaggaattctgccaagcacttgacgccaacactcatcatatctatataaagacgccatcatgagctcacggggcctaaccaagctatattaacgcatgcctgtggcctgaacac

SEQ ID NO: 250660 - DNA, 236 bp, Glycine max
atgcttgcattaaaaagcatatatttggtgctggacaatcactcttcttcgctaacatgctgaacactttaacagaaaaccactttcttttggattacaacaggtttttgaagctggacgtttctcttgatgacgataggcgaattttatagcttatactttatttattcttcttaggataccaaaaatcctaggagaatgtctctgtaaacaaattctgacacaacagataaata

SEQ ID NO: 250661 - DNA, 393 bp, Glycine max
tatacttatgtggcacggcgggctacctccactttcttgcctcaaccgcgagctccgaccagcgctcttacttgccgcgatgcttctctttatatctgcctgagcgggctcatagcctaaaccatacttcccatgattttctttggcatttatcacgctagttatgccgccgttgcctttgcctaaacccattccgggttcgtaaccgttccccaacataactcgggccatcactactactgcatcagacaggccaggctgcccagagaaagagttcacggaggaaatgcttaccacctcaaaacactggaaagcggtttctagtgactcctctgccggcttcacataatgtataaaggatgggcagctcaccaagacggctcactcgcctga

SEQ ID NO: 250662 - DNA, 251 bp, Glycine max
tattatcgccatgcgcaattccttacggccataactgaggtgcgaaaagctaagtgccagccatggcagctaagcaagattcattgcgtaaatatgagcgctaagcaagaacctctcagctaagcgcacgctcctttgtacttaagaggcatcattctatctaaactggccacagcaaggcttatcgagagttgcaccttttctaatctgcgaacctcgctaagcggacttactttcacactaagccgagc

SEQ ID NO: 250663 - DNA, 289 bp, Glycine max
actgagctgcagttttttggggtgagaacttgtgccaatatggatgatcgtgctgactattctaattagctcagtgctttcagggcttaacttattttccctgtgacattaaaatgctggttgggctcacccatttaacatattcatgaatggtcaagaaccaggggggatttttaataaacttaactctcacgcttactaagatcgcagggactgtgaagaaagatgcagttccttcgggcttgattggaatattttaaaatttacacttttccagttcaacgtacct

SEQ ID NO: 250664 - DNA, 318 bp, Glycine max
  unsure (1)..(318): unsure at all n locations
tactcagcttgcgagatattcgatgcagaaccatactattatacttttgatagaggcccgaagcctatggaagaactcaccaagctgcagcttggacccaaacccaagcaacggacacaacgtagcaagaaccctactagccacgagcacaaacacctagccgatggaaccctggatcatggatccaattattagcaccaccaaactggggaaccaaattggggctctacggaactgggacaacctgagacaaacgcgaaanttaataacgagatggtaagaaccacgacacaatcttaggagatcgccacatgagga

SEQ ID NO: 250665 - DNA, 297 bp, Glycine max
tatagaatatataataaaagaacaatgacaattgaagagtctatacatgcttcctttgatgagactaatgccattcttccaaggaaggattttttagatgacatttcagattccttagaagatagacatattcattgaaatgactctaaagaaaaagatgaaggaagcaacgaagattcttaagataatgtagttagagcaaataatgaacttccaagagaatgcaaagcctcacgagatcatcccctccacaccattatcggcgccatcactactgggctaacaccacttcattct

SEQ ID NO: 250666 - DNA, 392 bp, Glycine max
  unsure (1)..(392): unsure at all n locations
tgaaggtaaactagatgcctcggntaacctgttaaaccaactggccatgaataaaaaatctgcacctgtcgccagactctgtggtttatgctcctctgccaaccaccacacagacctttgcccttctgtgcaacaatctgaagcaattgaacagcctgaagcttatgctgcaaacatctacaacagacctcgtcaacctcaacagcaaaatcagccacaacataataactatgacctctccagcaataggtacaatcccggatggaggaatcatcccaaccttagatggtcaaatccttcacaacagcagcaacaacaacaacaaacttattttcaaaatgctgttggcctaagcagaccatacgttccttcaccaatctagcagtaacaac

SEQ ID NO: 250667 - DNA, 358 bp, Glycine max
  unsure (1)..(358): unsure at all n locations
tgcaagcttttgaatgaaacaatgtgactcttcacatttatatttgtatttaacgntcaagggcactggtaatcgattaccaaaacattgtaatcgattacagccttttgaaaatatttggaacgttgtaaattcagcttgaaaatattttcaaactcattttgctactggtaatcgattacaacaatatggtaatcgattaccagagagtcattcatggtttaaggcctactttcctcaaagatctttctaaataggtgacactttcttccaaacaaggtgtccctcattgaatttacgtgggcacacctcttttgttgaacatgttcttcattcttctttgatacaactacccatg

SEQ ID NO: 250668 - DNA, 404 bp, Glycine max
acgtgacaatatctaagctcgagatctagtgcttgattcgaggacgcatatgtatgttttgtgtagatgcaactccgcgtggagctgtgtgactgcggcaagattacactgtatttgttgtaataggaccacaacagggtatggagcagatcttagacataaccgcttagaaggcattaaatcatgctttaattaatattggagataagcttctataatgcgtattaagggtgttattatgagaattatatgagttaactatgggaaactttattcttgattgcagaacgacaatcaaaatttgcatataaattctatcctttttgatagattggttatggtgctattttttaaataatgagatttaggctttgattgctaaagtttgttgcggaatttttgag

SEQ ID NO: 250669 - DNA, 176 bp, Glycine max
  unsure (1)..(176): unsure at all n locations
agcttgaaagacaaagacaaagacaagcttgttattgttgtattaatcacactctattacaaatatagaagttacgatctctctcctgtatgaagctggaattatgttctctgacattcatgtgctacaaagnttcttaagtatagaacttcttctccgattcttcttccagtttt

SEQ ID NO: 250670 - DNA, 149 bp, Glycine max
tatcaacaaggtccaccttgatatcctctctcttttttttttcatccacacagacgggtagagctgcggtccctttactattacgcgtatgcagctatttagggcttggcttcactagacactcgttttagctgcaacatatattctct

SEQ ID NO: 250671 - DNA, 170 bp, Glycine max
gctgcaactttttggacctgaacaacatacctcttttataacagctaggccggatgggcctttcttccttcgaacttgagttattactgtaccccatagagctctggaaatttgttccggccatactctctcttgcgacgcctcctggcctctcgttcaagggctctgcg

SEQ ID NO: 250672 - DNA, 164 bp, Glycine max
  unsure (1)..(164): unsure at all n locations
agcttctccccaattntntataaataggtggtgaagtgtatgtataaaagggttcgaccccttaggcacttctctctctttcgaatttgcttaggaaaattgtttccgcgaagaaaatccaagccgcggcgcttccgtaacgttttcgtgagtgatttcgcgaa

SEQ ID NO: 250673 - DNA, 379 bp, Glycine max
ttgtgcaatcgattaaacatatctggtaatttttttccagcggttgcttccgaaaaatctaaagatgtaactcttccaaaaggttttgactttttcaaatgggctttaaggttttctaaaagctataactcttcttaatggccttcttgaccagacatgaagagtctattaaagccaggctctgttttgcattttaattaaaaactcttacaatcctttacaagccttgaatctccttgaatttcttcttattctttgtaccaaaagctttctgaagttctttggttttccaaaccttgaaaaactgaggtattcatcttttattctcttcccctctggcaaaaagaattcgccaagggctaaccgcctggatcttttt

SEQ ID NO: 250674 - DNA, 103 bp, Glycine max
  unsure (1)..(103): unsure at all n locations
tcttgcgacttggtctctttctactatctttntttgaaactaaaagagcgggaagttcttgcacaactttaaatggacctacatcagngcctctcctatgaga

SEQ ID NO: 250675 - DNA, 141 bp, Glycine max
taagtagttaagctgaagctctgtgtatactgtttattatagattcgcatggaaggtgaacgaaacaaatgatcaatagaacacctagtgtgacagtgctgtagacaagatgctctaacctcaacacttccctcttcttag

SEQ ID NO: 250676 - DNA, 174 bp, Glycine max
  unsure (1)..(174): unsure at all n locations
agcttttaggttcataccacagcctgtgtcgtctacttctaaccaaagtatcactttgctatctttcacagaagntctctttgcatgcgttgcacttggcctctctatgcacttttgtaaactccgagatttcttctggtcacgaggactaccaccgtcagaattttgcgttct

SEQ ID NO: 250677 - DNA, 332 bp, Glycine max
tctgtgacatgattacactatcaagtatattcttttgtctgctaacgacgctgctgatgcgttcggcagacttctcccgcccgaggccacctgcttatcattgactatgcctaacttcactttttttgcatcaactccatcacactttgccataggatccccaatatgttgacctcctggataacattaaattgcacctagatgctcactttgacctcgccattcataaggaccttattttccgacaaggccatatttggattcccttcccaacaccttttattggctaactcctaaaggaatctcattcatctctcctcggcgggcacaca

SEQ ID NO: 250678 - DNA, 167 bp, Glycine max
  unsure (1)..(167): unsure at all n locations
ttgatgttctatccaaagacaaagtaagtagttttcttcagtctttcattctgatgnttctcatcaatatttgtcatggacaacttcttcattcaacaatattgcatttttttatgttgttggctcttcctttctaatgagtggcaacatatggaaggtgaagaact

SEQ ID NO: 250679 - DNA, 154 bp, Glycine max
  unsure (1)..(154): unsure at all n locations
gaggaccttttaagagcatgcgctctagagcagaagggaagctgtgagagtcntctctcattgaaagacgtcacttataataacaggtttcactctaccattggcatgacctcctatgaagctctgtatggtagaaggtgtacgacacccctat

SEQ ID NO: 250680 - DNA, 245 bp, Glycine max
  unsure (1)..(245): unsure at all n locations
ttttggagtagaaacatgggaccaactcattttattttttataggaagncgnatctaggcaaggtctgagagaccatacaagtttcctaacgatttctaattatgtgggccattaagtctatcatatgctgacaatagccgtgaagcccatgaatctcttcgggggcggagtaggtgtctgccatcgccttggccttggctaacaatcggggaagattttgacccccgctcatgggaaaagcaaa

SEQ ID NO: 250681 - DNA, 320 bp, Glycine max
agcttcggaagaaagtgatgaggtacaagctctataggcagagcttgaaagagcccgagtagtcgaagagaagttcaagtccatagccatcaaagtctgataagagtatgatgaactaagggacgtcaatatggccaccgctgaagccttggaacgagaaaccaagaaggcccgaacggaagaacacgtgccagcaaagttttgaggggctctatagggcagcaatagtaagctcaagctccgaagaggtgaaaggaatcatcacgggtcataggcatgatcttgaaggacgagctcaaggcttaccttatgtcgcaaag

SEQ ID NO: 250682 - DNA, 328 bp, Glycine max
tgccgcccagctcgcccaggcgagcaaggttgtttcctcaagaagcaacaaccttctggaggaatcttctggagggcctatgagggcctggttgctatttgcacccccatttttattaaatgcaccccccttctattttttttgcgaattctttttccgtaacgttacgaaactttacgaatttcgtaacgatacttattttccttctgcaaggctacgaatccttacggattatgtatttaatcttttttagctttttgaataagctacggaatctccttaaatgtggaggaacacctcttttaaacttccgccaccttaccgaacc

SEQ ID NO: 250683 - DNA, 224 bp, Glycine max
  unsure (1)..(224): unsure at all n locations
agcttgcaagtgtattgactgtatatcgatgtattcttttttttaggtctctatctttgcgcgaggggagggtcactaggtcccatgtcaaccctctaacatgcgcactaaaaaatatgagttacgtaaggataggtcattcaagtctcttttctaattgaatgcagntagtatcactttcgtacagtatccttcttattacggtaatgcgaagtgacgaataa

SEQ ID NO: 250684 - DNA, 151 bp, Glycine max
ctcgaggttctatccaaagacacgagaagtagtattcttcagtctgtcaatccgacgtggcacatcaatatttgccatggacaacttcttcaatcaacaacattgcagtttttcatggaggtggctcttcctctccaacgagcggcaacac

SEQ ID NO: 250685 - DNA, 383 bp, Glycine max
  unsure (1)..(383): unsure at all n locations
aaaactaagctttagaaaaagaagaagaacgcatttcatttattttgtggaacnancgctcatcaagtatgtaataaccctgatgctcatgcagatcctttgggtatgattagggtgtgagtagacttgggttgtcctgggtttgggccttacaaagtgtggggcctaccatggtcactcatatgtgtacacaatcagtccatcttgttattagacgatatgcattcttccttttacaaagccctaattaacttctccatatccatggttttactccgtcattatccacagttgataaatattgcaggtcttccaaaaatattctcagataattaacttcatggaaatatcgagtatattgacctccttcgctaacttccaca

SEQ ID NO: 250686 - DNA, 315 bp, Glycine max
agcttacccccactattacccacaaccacccatcttacctatcaatggtaagaaaatgacatcggcagaaatgcacttgagaagagaaaggggcctatgctttacttgtgatgacaagctttcccctagccatcgttgtcctaataagcaatattttgttccacagtgtgaagaagaggatgaacctgcattacaaccagatccaccagacgaggctgagacagctggtgaccctagtttgccagatcatcatttgccttataatgctttaaaaggctcatcaagtcttcgaacaatgaagcttcacggatcaat

SEQ ID NO: 250687 - DNA, 397 bp, Glycine max
tcctccatcctctattgaaggatgtctcaatcgcaatcatggctttattgatctccacatgcaaagagaaggagatacctaagtgctgagcaaaacaactaagggccacccatctaatctctaaagatacctagctccacaggaaacaactctaggtgaacccttggcaggctcattaatattgcatttgacctagccacaaaggggagggtcaagggtgtcaggtaatgaacttgaatgattttaattaggtgctttgcttacatgacctacaactgaaagcaattgtaatttataatattaaagtcagaaatactgctagagttgccaccaagtgacagatccagatttcctgagaataataaaaaggatacaatcaaggagataatgctttggt

SEQ ID NO: 250688 - DNA, 386 bp, Glycine max
  unsure (1)..(386): unsure at all n locations
acttntatccttggcttactatggaggngagcttgatcttttttcatcttctccaagaaaagatgttagtcgggtaatacaactaacttttgtgtaaaaaaagttgcgcaaattgtattcgactccttccatttacagttcttttggcagaattgaaagtactttttgtaaatttaggtaataagtatttagtatcccacttttgtgtatttaataaactttccatttcaattttagggaaaataagcaaatttggtgaagttgatttttgcaagtcgctaagccattctcttctggttgagtgcataatctgctgggcacaacatgattggctgaatgcataaaaaaacctggaaaaagatgacctgtacaggtgtgctgaacca

SEQ ID NO: 250689 - DNA, 309 bp, Glycine max
  unsure (1)..(309): unsure at all n locations
tggcgtgaacactggctgacatattctcaattagctcagttgcttctttcagggtcttcagctttatttttccccctgcataaacctctaatagttgcttgatttgtggtctcagcccatctatgaacatattcaattggattggctctgaaaacccatgggtgggagttcttctcaataagcctctaaacctctccaatgcttcatttagagattcatcanggaactgatgaaatgaagagattgcagctntcctttttgcagtcttggactctgggaagatntctttagaaactattcaacaacttc

SEQ ID NO: 250690 - DNA, 451 bp, Glycine max
  unsure (1)..(451): unsure at all n locations
tattgcacggaaatgtaattatgaaattgagatacccgaagattcactcatttctagttaaccatgcattaggtaccatgttcaattattttgttttgttggtgtgtgtttgttttttttttttttagaaatgggtttatgatcccaacatgtgtggctcatggtgcctaacacatgcaactaagaatgtagtgtgaagnttcatgcttcctttttttgtttttgtttgtagaggaaaatgcaaggctcatgcatgagcaaacatgaaaacaaaaggtatgcagtttgtagaacaaaaagtatgttgaacgcatatgcatgatgatgcaatgactcatgcaaaatgtgaggctggaatatgataacggacaaatgcaggaacgatatgttcattatgatgccataaagagatgcttatgcatgctatagataaaatgcgggagtgacttga

SEQ ID NO: 250691 - DNA, 438 bp, Glycine max
  unsure (1)..(438): unsure at all n locations
tcttttttttttctctctacaacctctatgcaataggagcatgtcccatcattatattctatttctgtgccatcgaagaaacaacccaccctatttactccatcaagaaaaaattcactgtgtattgatgtgaagagaaggattgggaatgcctagtgagaatgcgtcttcaaggctntcctgattttgttgttcactaccatcgatacattttacctggctaaatcaacataaagatatactacttggcatggatttcttctctaatattatgacatcaaatgatctctaagataagacaacattaattgattagatattgtttgagttgacaaaattattttatgccactcttatactaaccaatgtgaaggttataaaagctaataactagattttttctttgttatattgagagatgacaaaaggtttcattgt

SEQ ID NO: 250692 - DNA, 363 bp, Glycine max
gttattataagagaacctgagcatgcctatggaatccatcgcataaaacctcaaatctataccctaaaaatcccaccgccgatctcatctcttcttccagttctcacctcaccgttgcatcttcacgtcgtctctaacggtaatacgccattatcctctatgcatcgtgttctagttatattccgccaaaaacaaaggcgaagtaggtgattcaccgcaatttattcccttttccaattacataagatatttgaaggtgcactacctattgactcgatattcataatcgattcccattagaggtcaattaacgacgtgtgaaatcgcataagcatcttcgttgtgctgcgagggaaaatgagt

SEQ ID NO: 250693 - DNA, 416 bp, Glycine max
  unsure (1)..(416): unsure at all n locations
tctggacgggatcagtatattcattgacatatattaaagtattaagatgttgtgcgtgacatattttacagtcatcctgatgtagtcaaattaaccaatgtctgtaatttgatatttttgtccaacccaaacatatgattctaaccataatctgcacattaaaacagttataatcatttatgtaagcgtttcaaataatacttcaatcaatctcantttaataattcataaataaaatggttattatttgttcattaacttttttattactttaatatattcataaattcatataccaattctgttttcaaatatatagagttgacaacactaattctaatataaacttaaagtaatgaccaaagtaaaactacaattttggcatacggattaccaactctgataaagcgtacgga

SEQ ID NO: 250694 - DNA, 64 bp, Glycine max
  unsure (1)..(64): unsure at all n locations
agctnttctttgtgggttgatgaactctgtcgcatacatatatcatgatcgctgtctgacatat

SEQ ID NO: 250695 - DNA, 374 bp, Glycine max
  unsure (1)..(374): unsure at all n locations
tacacttgcctgtgatgatcccgtatctaatgtacattaatggtatatggctaaaacgcgatctcatctctttcaaagacttcatggataaaagtacttggacatgaagatgtgacttttgtttcttgcttcctttataccagtatgtatagcgttgattgacttagagtcttacaaagttatcttcaaagggttggcatgtctacatatatgttttgaagagatttgagctgctttgttgttggttaagttaatatctacatatcattctcgagtgtgcttatataccacatatttttttatcttgacatcttgcattttagatnttaggctttgaacaccaaaagttacaagtatttcattaatcaaattaa

SEQ ID NO: 250696 - DNA, 390 bp, Glycine max
caccgaagctctcgagaaactcatatggtcatatcttatcacacggacgtccgattcaggcgcttaatatatcgagacgctcgaaattgaacaatgtatggtctccagaaattcaaatgttcataacctgtcacacgatagtccgattctggcgcataacttatcgagatgctctgaattgaacactggatgctctcgacaaattctaatggtcattacatctcacacagaagtccgattcatgcgcataatatatcgagatgctcgaaattgaacaacgaatgctctcgataaattcaaatgtgcataactttgtacactaatatccgattcacgcgcataatatatcgagacgctcgaaattgaacaaccaaagctctctagaaattc

SEQ ID NO: 250697 - DNA, 230 bp, Glycine max
  unsure (1)..(230): unsure at all n locations
attacggacactataaaactcagcttgannatgaacacagaagctgtcgagaaattcaaatggtcataacatatgacacagaagtccgattaaggcgcataatatatcgagacgctcgacattgaacaacgaatgctctcgagaaactcaagaggtcataacttttcatacagaacgtcgatctcagtgcataatatatcgagacgctagaaatgaacaacggaagctct

SEQ ID NO: 250698 - DNA, 438 bp, Glycine max
  unsure (1)..(438): unsure at all n locations
tctcnttgaacttcttcttcttctttgtaccataagctttctgaagttttctggttttctaaaccttgaaaacttgtgctattcatcttttcattctcttctccctttgccaaaaagaattcgccaaggactaaccgcctgaattctttttgtgtctctcttctcccttttccaaaagaacaaaggactaaccgcctgaattcttttgtgtctcccatctcccttgtcaaagaattcaaaacgacacagtctgagaattcttttgattcttccctttccctaatacaaaagtgttcaaaggactaaccgcctgagaattcttttgtatccccattcacaaagtatcaaagttttaacagcctgagatctttgtctcaacacattggagggtacatcctttgtggtacaagtagagggtacatctacttgggtttgact

SEQ ID NO: 250699 - DNA, 57 bp, Glycine max
tgttactcgcttatttacacccaacgtttgtctcgttcccccccatacccccaattc

SEQ ID NO: 250700 - DNA, 394 bp, Glycine max
  unsure (1)..(394): unsure at all n locations
tggcaagtgcttggagaggctggttgccaagctcctatatgttttctattatnggaaaagggcgaggacccgcgggatctttacaggattcgagtggtttgaagctagagatgaatacatgaatgtttatccatactatggtgattattagtggaagaagtagaaggtagtccattgcgctttgattctgttgaggtttgtttctggcgtatatcggtatatatagatgacagaaatgaacccggaatagtgaaaaaaatcaagaaactaacttcttctatatatatagaatatagatgttggaacaataccaatatctattaaagtaagagactactttccatatagatactcttcatacacaaaaacctgaagaatcaatgtttgatcacat

SEQ ID NO: 250701 - DNA, 175 bp, Glycine max
  unsure (1)..(175): unsure at all n locations
gtcacctgcggcatgcagcttccggtctacctgatgatccactctgaggctgttatctactccaaacattcaagattngtggaggctgtcaacactgctaaggaaatcgtgtttaatcctttgagaataactttattaatgctattgaaatgcatctaagtaggagcacagcagc

SEQ ID NO: 250702 - DNA, 262 bp, Glycine max
  unsure (1)..(262): unsure at all n locations
tgttccggccatactcttgcttgcgagccctctnggtctctcgtcaagggctcttgcggaaattgcattctcttcccgtaacccggcgcactccttccgaacgtgtgtagcagccaactagaacttctccttggcgagatgtgcctgttctaactcgctattgagagcttggacatcctcgtcctcttccggngcttcaaaattctcttcgctgacgacatttaacttggcgagccaatctaaacctcgtatgcgaactttc

SEQ ID NO: 250703 - DNA, 148 bp, Glycine max
agcttataatacctacatctggaaccccaatccaagtaggccttcccttgactctactttggactcttcgctcacccctaatctcaattttacggattaactaccttataaggacgaatcttcctctgttgcactaagttcaaaaacc

SEQ ID NO: 250704 - DNA, 396 bp, Glycine max
ttgtgatgttatatgctgaaattgctgatggaaatcatttatagacgaagggtagaactaacctaaggttagaaagtgagaatgtgatgttatgagtggaaaaagagtgagactttgagagttggaaggcttagtctgaattctgtggtaaatggagggtaaagtgagttaatactagcttgaaatgtcatttatgacatgtgagaaaggttaagctgagctagagagaaaaacaaatgaccaaagtgaaccaagagccatttctaaggcaaaattgggtgttgacgagtcaaattatgatttggtgcacatttaggtgtaaatcccagttgggcaagtttagattgatgttatggacttgtgtgaggagagagtttgcttcacattacctcattc

SEQ ID NO: 250705 - DNA, 510 bp, Glycine max
  unsure (1)..(510): unsure at all n locations
accgcttagcgacaccttatcctnggctaagcgcgactcagtgtcgcccagcgcaattccttacggccataactaaggtccatgaagctaagcgccagtcatggcagctaagctgaattccttgcggcaatgtgagcgctaagagaggccttatcagctaagcgcatgctcctctgtacttaagatgcatcattntagctaagccagccatagcctggcttagcgagagttacaacttttcggatctgcaaacctcgctaagtggattgatcctgtcgctaagccaagcctctgttaaaagaaaaaaaactgacttttgaattgaaacgtcggctaagcgcgcaggtccactaagcgagcctagttgagaaaccaaatgtctctctggctacttagagcagggtccactaagcgaaagtgtanaaactgctgaagtgagtgaacagcagtacactcacacttgccaaattggaactcttcttgactcttctttctcaaattgccatttga

SEQ ID NO: 250706 - DNA, 451 bp, Glycine max
  unsure (1)..(451): unsure at all n locations
cttcggctgctcaatngctccaggttgctgcatggaaaggcaaggtctgtattgtggtcagcagaggagcacaaaccacatacccttgcaacaggtatagatttctggttcaaggccagctgggttaccaagttaaccaatgcatccaatttgccttcaaggttcttagtttcagatgatgcagctgagtttgtagctacctcatgcactcctctaatgactatagcatcatttctggcgctaaactgctgggagttggaagccatcttctcaattaaatttctggcttcagcaggagtcatgtctccaagggctccaccactagcagcatctatcatacttctctccatattactgagtccttcataaaaatattggagaagcagctgctctgaaatctgatggtgagggcaactggcacatagnnttttaaatctctcccagtattata

SEQ ID NO: 250707 - DNA, 502 bp, Glycine max
  unsure (1)..(502): unsure at all n locations
agcacctgagctgcagcttatgatgaatcaagatggattcacagagttctgatgatatttatgatgatgacaaacagcttacaagtcatgaacactctatgataacaaagatgatgatctcaagaatcacagaatggagtctagattgaatcaagaacacttctaagttcataaggaaattggaattcaagaatcaagaatcaaggttcaagattcaagttccaagaatcatgatcaagattcaagaatcaagaaaagactcaatcaagataagtattaaagaagtttttcacaaacttagaagcacatgaatttttttanaacctctaccacagagttttactctctcgaatcgttaccagatattgaatcattactatacaaatggtgtcaaaactttcactgatttcaacgtccattgataaaaaggctgatcgatacatgattgctacaataccagggttgacgtgaatcaatctatggagagccatcttcacaaaac

SEQ ID NO: 250708 - DNA, 461 bp, Glycine max
  unsure (1)..(461): unsure at all n locations
tgctcgggtgatctactacgcttctagaactctggatgctgtccaagctttttacactaccacagagaaggagctattagcgatagctnttgctcttgagaaatttcgttcatatttgcttggtactcgtgttattgtttatactgaccatgcagctctgaagtacctgttgaagaaggctgaatcaaagcctagattgatcagggtggatgcttggatccaagaagtttgattggagatccgtgatcagagcggtacacaaaacctcatggctgaccacctgagtaggattgagcgtgcgcctgaggactcacccattcnggatgaattttcagatgaccattngtacattctgtataagatctctgatcctctcccactccttggnttgctaatattgngaagttattggttgctctgttttcctccttacatctaagctcaactgataaattaaaacg

SEQ ID NO: 250709 - DNA, 517 bp, Glycine max
  unsure (1)..(517): unsure at all n locations
ctcagcttatatacacagaatcttaagcctttgaaagaagacgaatactcataatcagtgagtaagttccaaccttagcttgcagcctgcactgcacacanacattgcagactatcagcatcaagggttcccttttccagtggtacaatccaaaacaggaccaccaaaagtgttccctactaattattgcctgccccatgaattnttcttaattccatccttaacaaccccttaattctttcccatctttatcttcttttgtcccttaacctatcatatatcccatattattgatttcttattcatcataatcaagataaaaatattatgttcatataatatcaaagcaagagaagagccaacatatgagcaatgattcctcaagataatgcatccatctcgtctctttatggattagagcacgtatcctctctcccactaacatctttcttttggttttatagattggcctactagcatttagtatgaatattggctgatcatagcaagctatatg

SEQ ID NO: 250710 - DNA, 457 bp, Glycine max
  unsure (1)..(457): unsure at all n locations
tgcagctacatattaaactcaatgtcaaggatgaagatgatgatttactctatcatttcataagtagcaagctatttgtttatgaggaaacttaacatagaaattggaattaattctcaagttcaagtgctaatttatatttaatttaagcaccggacgagtaacattctaaaaaaaactaacaattaacattgactctgaagaaaaataggcatcaaacaagcagtaatatagcatattacattgactaatttatccttgtgttcacaaaaggagcatgaacgagaattacatggaagacaatacaaagacaaaaatatgatgtttacataatcctgacgctatatattctctttntcgcagatgagaggggaaaataaggaatcgagacacacaaaatcattggtcattataataaacaataacactctgacataattcaatacatatgcactct

SEQ ID NO: 250711 - DNA, 402 bp, Glycine max
  unsure (1)..(402): unsure at all n locations
ataaagctagaagtggcattangggttgcgtgaatctggtttggataatgctgatcgaatcatgcttgaagtttcatttacgtgcttttccatcattgttatataatagaaaatcctattaatgtctgtttggaagtatgaaggtgttacctgtcttgcaaaacctttgatgacatggtaaagtggattgatcttgttgcaatgtgttaaatagctgttataacggtgctatagtgctattgtgttgcacggaattccttgaatcaacatttatgttggcaaaactttttgttgcctatgggtgggtgtgtgggtgtggcacacatcatgcatcctcttgtcatctttgacgaatctccagtcaatngaactttttgagttaatattgtgccaatttttatg

SEQ ID NO: 250712 - DNA, 482 bp, Glycine max
  unsure (1)..(482): unsure at all n locations
catctacctcttcaagaggcagagggaaaggcatagacagaagtggttttttcataggacggngaaatcacaacaacaatagtggaaggtgagatcaaaacaacaacggtggctgaggtagaggacgaatatttataatgaatgatatactgttacaatgtttattttggtattttcggacaatatttattttggataatttatattgtgatagataaattatggttcctaatcacaattattgatattattattnttgttttaaattatgtttgctaaaatatattttaagtgattattgtgatgctatccttgtcaagataacaaaaaataatgaaaatctatcataaaattatatcttatcctaaaatgaaacaaaattaacgattgtgaagattatattntctccatcacaacgatagttgtattataatgaatgtagactagtatctaagtgtgatgatcaccatcttgagtatatt

SEQ ID NO: 250713 - DNA, 357 bp, Glycine max
  unsure (1)..(357): unsure at all n locations
ccaaagagtatgggatatccttcacaggcacagatggtgcttccttcctcgcctctctagccatctggctcttggtcttagagattaagacctcaccatcaatctccttagaattntttttctttttctacttctttatatttctcttcttctaaagctctctcgctattctcaacctctatcttgtgtctctcatcctctactttctctcttctcacatattatcctacttcctcaactctatctgtcttttctagaccctctttnttcctcatacttctagtgaggactgccttgcacttatccttttgggttttctttgtgtagccacaaatatccatttgattttcagctact

SEQ ID NO: 250714 - DNA, 330 bp, Glycine max
  unsure (1)..(330): unsure at all n locations
ctcttctccctttgccaaaaagaattcgacaaggactatttattctcttctccctttcacataaaacatcttgtgattgtcttcttcttcccaacactctataatttgcgctgtgcacttcaattatcggatttacttttgtttaagcctctatttatgttatgtactttctcaacttagtagtaaaaggataattgaatctagtaacattaagaaggataagttntctaattagtacaggttcattgatgattaattcaagccccccttcttaattattccgagaccacttgatccaacacacactactaagaaaatattttttatgat

SEQ ID NO: 250715 - DNA, 420 bp, Glycine max
  unsure (1)..(420): unsure at all n locations
gacctatgaaactcagcttctacattcatttcgagcctttcgatatattacgggactcaatcggacatccgagtaaaaagttattgtagtttgaatntgctcagggcttcggtattccatttcgagcgtctcgatatattacgggactcaatcggacatccgagtaaaaagttattgttgtttgaatttgctcagagcttccgtattccatttcgagcatctcgatatattacgggactcaatcagacatccgagtaaaaagatattgtagtttgaatttgctcagggcttcngtattccatttcgagcgtctcgatgtattacgggactcaatcagacatccgagtaaaaagttattgtcgtttgaatttgctcagagcttctacattcaatttcgagcttttcgatatattacgggac

SEQ ID NO: 250716 - DNA, 412 bp, Glycine max
  unsure (1)..(412): unsure at all n locations
tgatgctngctctggactcttggaagccgtcgaatttggttttatatttctcgaagcttttattctgaccaatgtattttcgacatgtttcgctatatttcatagtttcaaattttttctatttttttctctctcttctttaatgttgatgtattgtattctccaagctagaagggttttcaacacatttcagcttgcggcggggtattagacataaagttaatttagttagttactataagttatgtgagaaagttagttggttactcaagttatagttactacaagttatttgagtaagctaatgttggttactcaagttagttattttctatctttgtataaatacatcaactttgtaatactttgatcaatgaatgaactgaatgaattccaaaaatatcattcattt

SEQ ID NO: 250717 - DNA, 466 bp, Glycine max
  unsure (1)..(466): unsure at all n locations
acactatanaannactcagctcggatctttagttnttctatctctaatctttaatccctgaactttctattcaagttngnaaatcgaactttaatctatctttaatttcgtcctaaagatagatcgccaaatctgttgctaactgcacattaatctgttaaagatataacagatttatgtgtccagtattttcgggccagatgttctggacatcgtatccgacatcttggatcctgcagcttcaattcttcatttgacattttatcttgtcttgtgcattgtgcagcccgatcttattccttgacatatacgtggacatcatgtgcagcaactccagctgtccttcattgtctaagtgcttatgtttaacaatattttagccaatcttgtaatagcttcataaagctaagcactaacaatctctctctttggcaaattttgtctaaaacatacttagacactttct

SEQ ID NO: 250718 - DNA, 451 bp, Glycine max
  unsure (1)..(451): unsure at all n locations
tgccacccagctcgcccaggcgagctagggtgctttctacataatcagncgcctcctggaggagaattttctagaggcccaagtgggcctggttgctatttgcacccccatttttactaaatacaccccattgctctnttttggtatttttttccgtaacgttacgaaactttacgaatttcgtaacgatgcttgttttcttccgtaatgttacaaaaccttacggattacgtaaccatccattctttgccttccagaatgttacggaactttgcggattgcgcactaacacttccttttaattttcaacatgtcgcgaaactccacggattgtgctacaatttgtggttgcttatgctcaattatcttgaataacacaattcaagagagcttaagaattatttgattcacanatgcagccacaactttgcaccacaactcaactttatta

SEQ ID NO: 250719 - DNA, 304 bp, Glycine max
gctgtgcaatgacactcccacttaagaagatactatgttgtaattatcgaggccaccctaccgtgcacaggctactcccgctccccctcccccacggtgatcagcttgagtctcaatggagttccacaccaagtgacacacccccagtataagtatttgttctcacgagaaactacaagtacttactgggcaagttacactattgtcatgtcaaatgaggtacaaaacatgggcaccatcaactgcaacgaccatggataaacaaaagatcctatgccatctccctcaagagatgcttacactc

SEQ ID NO: 250720 - DNA, 359 bp, Glycine max
  unsure (1)..(359): unsure at all n locations
ttacacatatactgtgatcgattaccagagcagattntcagaaaatattctcaacagtcacatctttntatgtggttcttgaatggctatcacaggcctatatatatgtgacttgagacacgaatttgcttagagattttcagaacaaaaaggtcttattctcttataaagcgaaatcgttatatcctcgttcaaattccttggccacattacttgtgattcaatatggaattatttgagtgctcaaatagctcaatctatctctttcagagagatctcttctattcttcttccttattctgaaaagggattaagagaccgagggactcttgttgtgaaagaattctaaacacaaagga

SEQ ID NO: 250721 - DNA, 361 bp, Glycine max
  unsure (1)..(361): unsure at all n locations
agcttcaatgaggtctctttatggtgattttccaccatggagatgcagcagaagacaaaggagaagaggtgagaggaggcgccatccattaaagaataagccatgaaagaaggagcttcaccaccaagatgagctttggataagaagcttggagaggattcttcaatggaggaaaagaaagagagaagggggagcacgatattgaaggaataaaagagggagaagaagtggaatttgaagtatgtctcataagactttcattcatcannagtacaacaagtgttacacatgtttctatttatagactaggtagcttccttgagaagctttcttgagaaaaacttcttgagaagcttctttg

SEQ ID NO: 250722 - DNA, 423 bp, Glycine max
  unsure (1)..(423): unsure at all n locations
tcatcgagatacaatgagtgggtctctatagcttatcataggatagtctctccttggacgtttaaatcaaaaagctgcagcaactccaaaggtcagacatgcattgacatgagaaacctgtttgtcatggagttgactttataggaaagatttaggaagagataaaaggatctttagaatccttttcaaaagagcacttgcgctaaaataagtgtcataaatcacttttcacatatccattgaaagcctcaaggaatcacttaatcatcttttttttattctccgngtgatatttgtctcatatgaaactcttaanagcaccattatgttttacttggttaaaatatttgaactatttatcttctgtaccaaataacattcttctctacaacctaagagtccagacctatcccanaacacatt

SEQ ID NO: 250723 - DNA, 443 bp, Glycine max
  unsure (1)..(443): unsure at all n locations
gcttcacccaagctcttatagcaacacaatagttccttaaccagtgtactcacattcacccaaaaatcagggctatgtctagtcctcactctttcaatgagaatttcactaaacacaaccacaaccaccaccactagtttacaaacaataatctcaacaggtttatcattacacaaagcttcacccaagctcttgtagtaacacaatggatccttaatcaatgtacactaccttaaggtcacaacacacttgctccctcacaacaacaccacatcttggtcttggcttggagacttaacaatacaacaaagatntttggtgaatcactgcacaaaacacagaatctccctaacaaagggttccactcaggaaatacaacntcacacttctcactttttacaataatgaatagcctaaatgagtattacaaaagtgggtcactc

SEQ ID NO: 250724 - DNA, 510 bp, Glycine max
  unsure (1)..(510): unsure at all n locations
ttgagggagagggagagggagtttttgttctccgagggactttttaccctttttcttccatattntctcttcatatcttctcttaaactctcaaagtatagaaatatttcatttaaacctcataaatcatggattcttgttctattttttaatgttgtgggtgcttggaatcatgaaatatcattggactttagttctatgttgcaaaagaatgaaactacatcaatttgaattttgatctaagaccttgctcagtttttatttaaattttggagtataatttttgtaaattttagtcaatttttaggttttcggngtctctagatcccgtggtaatgtttttggaattgtttgagcactcctcccaattntaatcgattnttcgtttctctttttctaaacaattatttgtattttttatatttatacaactacttacataatatntatacaagtatttntatatttgtattacaacaattgcaacatttaatttccatatttattata

SEQ ID NO: 250725 - DNA, 437 bp, Glycine max
  unsure (1)..(437): unsure at all n locations
cttaaaactcagctgctgccaagcaattacccgattgcaatcattgcctagtgggatcatggtaagactatgtgatactatggttcacgaagttnttgaactcacaggttatgatatggtgatggcttataaatttcatgaggatgatcatggagaggtgattgctgagataacaaagcccggtcttgagccatatctgggtttgcactatccagccaccgacatttcncatgcttcacgctgtgtatttatgaagaacaagttcgtatgatagttgactgtcatgcaaaacacgtgagggttcttcaagatgaaaaactccaatttgatttgattttgtgtggttccaccttaagagctcctcatagttgccacacgcagtacatggctaacatggatacaattgcctccctgtgtttggcagttgtagtccatga

SEQ ID NO: 250726 - DNA, 275 bp, Glycine max
tgtgtctgaacttctcaaattgatcgagcttgacagctgtagtcatcatgccagccacttgttcattagtattggcgtatttgaggtgaactacttgatcattcaccagatctctgagaaagtggaatctcactgccatatgctaacttcttccatggagaacatgattctcggatagctgaattgtacactagttagcacacacaatttcagtggcttctctttcttgtaacccaagatgcgccacaattcttgtaagccaaatgcattgacat

SEQ ID NO: 250727 - DNA, 479 bp, Glycine max
  unsure (1)..(479): unsure at all n locations
actaagctttgcaactttcgtccctagcacaatggtcaggattcaaactatttctgcactggacgagtcgaaccaaccaattccaaacaaggtcatattccattgacttttttggtcattgaaggcatgcattgatgcgtttgcattttgtaaacccattgtgcaaatcgatggaacatggttatatggaagatacaaagggatgctattaattgcatttacataagatgaggctaaaaacatatttccattggtatttgccattgtcgagggtgagacagcagatggttgacacttctttntttttttttgcaaaacttgagaacacatgtgacaccacaacatggtatatgcttaatctctgacaggtatgagtcaatcaaaagtgcatacagacgacctgacaatgggtggacagtagacaacttgtcacatgtgttctgtattcgacacattggtcaaaattataaaaaacaatt

SEQ ID NO: 250728 - DNA, 227 bp, Glycine max
tgagctactactccatgcctgacgaatgcaggaggaaggtatctggtgtggcatcctaagttgacgccgaaggtcaacgtaacaagcaagtgttcattaatctgtggatacaaagacaaaatttatgttgacacatagaacgttgggatatgatatatatacaaacgcgaatgtgccttccacttttgagacactatggcgagtccattgggcaggtatccactttg

SEQ ID NO: 250729 - DNA, 388 bp, Glycine max
  unsure (1)..(388): unsure at all n locations
actaagctttaatgatgtcttgatntctaagcttctaaattcttagtttctaaaccccgtttctctccccctctggcaacatcaaaaagccgaagtacatggtaagcaacacaaggcagaagaataataaccaaatataactaaagttcatataatcatttataagtcaaaaccaaatataatccaatcataaaatactaagtgccaaataccgaaatataaccaaagttcagaaaatgataacttaaaaagcgtagccaaatacacggcttgaaataaaggataataataatctaaaactaggaaggtggtggaaggtcaaagcaccgacgaagataagtcacatcctcttctagctgggtgatgcgagtatccatgccttcaaagc

SEQ ID NO: 250730 - DNA, 467 bp, Glycine max
  unsure (1)..(467): unsure at all n locations
tgtgccgatctcacatggttggaacattctctcacaatagagtgaccctgattggtttgcctatgatttcacttagtgagagtgacctaacttactcatgggctaagtatgagcccacttatctttgtacatattagattaaggattcattaattttgggtcttgtatttatggatccataatgtaggtagggtaccctagaaatatatgatttttcagcccttgtattttagggcatctatactagtttntgtattaggggtagctttgtaatttcatatgcactaagtgaatatttgatgtgtgtggatggaaataaacttaattgaattggtagaagcccaatccaattaaattttagagggggaggtgagcatntgcttactacaccccattgccacatcatatagacacactttgtgcatgtacttcatgctttacatgcctcatgacacctaagcacactt

SEQ ID NO: 250731 - DNA, 454 bp, Glycine max
  unsure (1)..(454): unsure at all n locations
tgcttctacaatttactttcagtcacaatcatgatttggttgtatcaagtggcctcggaataattaagaagagggggttgaattaattattaacgaacctttactaattaacaatctacccttattaggcttttactataatgttaagaaagtaaagaacaaaaatagaaacttaaccaaaagtaaaagtgataattaaagtgcacaatggaaattaaagagtgtatggaagaagaagacaaacatatgaattttatactggtttggcaacaacccgtgcctacattcagtccccaagcgacctgcggtccttgagatttcttttcaaccttgtaaagtcctttacaagcaaagatccacaanggatgtaccttccctagttctctttgaacaacctagtggatgtaccctncactagaactgatccacaagagatgtacactctcttgttctc

SEQ ID NO: 250732 - DNA, 455 bp, Glycine max
  unsure (1)..(455): unsure at all n locations
ctatgaaactcaagctgtatattaagcagagtggtggataacatcacttttcatattcctatagaagttagtgcttttcgtaggggttaatcttgaatactggcatggagtggttgaccccaaaatgggatagcggataatgagatgaccactattcttatatgtgtaaaacacagtcaattaatatagaagtaaaatagtacatgaaagaaagaataaaaagcaacatagacctctttgacatgaatactgaatagaaatacaaaggatgtgaacagagggaggagaccagggaacaatgttntagagttccaatgtgcaagttagctggaaactccaccagagtgatgggttggtcagaaattccgttggccactctaccagaatgcaatgnggttgcctgaacttcattagagtgccatgggttggccagaaacacaagttggagctttatg

SEQ ID NO: 250733 - DNA, 235 bp, Glycine max
ctgagctgaactctaagggatgatattatttttggagccaatgtattgggcatatattatattgacattcagaatattgaacacattttagtgaaaaaatgcattatagaggtgcttaagagagtgcttgcttatatctttttaatcataaagtcttttcattggtgcctatattttatgtctagaaaaatcggaagtactaactactaatttatgcacaaatcatctaaacttt

SEQ ID NO: 250734 - DNA, 270 bp, Glycine max
gaaatattgagtataaactatgctataatctttcttattatagaatcgtgggtgtcaattacgcagcttaaaactcaaactaaaaaattcaaactctcaaaaagtcatgtgcattctgtctttgtaatcgaccatagaagattaccagctcacaaataatttaatttgaacagatcaatctttcatagaaatattttagaacaaactttgacgcccgaaacttatagcgatgaatatgagaatcttttaaaaattgacacaggccttatc

SEQ ID NO: 250735 - DNA, 357 bp, Glycine max
  unsure (1)..(357): unsure at all n locations
tcatcaatcacttaactntaaacttcgtctcttgcatggattgttcattgtacaagaatggtatcaagagccatgacttcttcaaggcattcaaacagataagtaacttggtgtatccaataaacctgaagctcattgcactactagaaaacggtcagaatcgcgattcaacaacggtgcttgaccgtttntaattataatgatgttgaaacttaaaaatttcaacaacggtccataaacaaacgttgtagtaagctttggtttttttttttctaaatcggtgctatattattgaccgatgtagaaaccttagttagaaatacgtcaccaaagtcaacaagcttagtttctacatca

SEQ ID NO: 250736 - DNA, 383 bp, Glycine max
  unsure (1)..(383): unsure at all n locations
tgcagcttattcagacaagaaataaagatattcagatttatgatcaagacagtctctagagtcttaggaagggtatattatataggaagggaattcctaattgaagtagaaaaaggtttggccaagaaaatttagttaaaaagtctttttcaagagatttactctctggtaatcgattaccagcggccaaaaatgatttacaacagctattaaaatttgaattcaaaatttgcattgtgtaatcgattacacatatatggtaatcgattaccagcagntattgaacgttttaattcanaatttataagcttgtaatcgattacacacacactgtaatcgattaacagaggagattntcagaaaatattctcaacaatcacagc

SEQ ID NO: 250737 - DNA, 449 bp, Glycine max
  unsure (1)..(449): unsure at all n locations
ctcagctgggtgggatctctgtcgggcttctatttgttgggacaacatcttattttgagccaagggttcatcttgagtggtgagttctagaaggcttctctttgttggtgcatatgtgcgatcatgaagaatggcgtgatcattatctgccatgttgtctatgagttccattgcctccttcggtgtctttagcttgatcttccctcctgcggatgcatccaataattgctttgattatggtcgcaggccatctatgaagatgtttagttgcatcggttcactctacccatgtgtaggtgttttccttagcagtccgcggaagcggtcaagtgcctcgctgagggattcatcgagaaattgatggaaggaagagatttccttcttccctttcatagtctttgattctggaaagtatttctttaagaatntctctacaacttctttccatg

SEQ ID NO: 250738 - DNA, 288 bp, Glycine max
tgagctgcacttgaccaatctactacctaacctgttatgtgaaagtcatcttactcgagcaaaaaataaaggaattcatcacaaaaaaagaaagaaatcccatgagaaaaaaaaaaggattccatcagatggaaacaaaaaaaaaaattccccaaatgaaagaaaaaaaaaaactccgcaaaactaaaagcaaagtttgacaaatttaacatcattgccatacaaagagaagacccactaatgttttctatacacaatcccctcacctttttccccttcaaaacaaaa

SEQ ID NO: 250739 - DNA, 481 bp, Glycine max
  unsure (1)..(481): unsure at all n locations
accatgaaactaagcttcatgcagcatcaattatctcggtacttaaattctctttctatctcacacacaatgctngcgaagtatacaattgaatagataatcctagaattagaataatacagcttgtgcattcgaaggccgatgcctcaatcagttttaactgcagcgattgagatctggaatttagcttttgcttcataattatttttaccatcaactgatgcaaatatagaagaatatcttataaaagcaaagcatgatatgtgatagtaaacatttacatttaacagagactcaatttattaattaaattacaaggagatcaaatttgtgagctgaaacaaataggaggagtaaatttagaataaacttatctttgtaaagtgtgttcactattcttgatctttggattagtaatttaagtatatattatgaattcaatttgaatgcctgattagattatgtgtaatttataatgaca

SEQ ID NO: 250740 - DNA, 471 bp, Glycine max
  unsure (1)..(471): unsure at all n locations
ctcagcttgaactanagaaagcttgaaaaagtttatcttttacatgtccaactcccttgagtggcacttgtataggttgttatattgaatgttgcatcttagttcatatcatatcttttgtgcatcatgcatcatcatgagtaagtgagaagaaaaatttctaagttagaaaattttcttcataaggcacaactctctantttaatcgattacaatcttatcgtaatcaattacacaagttgtctgaagcatgcagagttatgtctcatataattttaattgattacaaccttatcataatcaattacacaattgcttttgagacaatgattgatttatttaggagcctttgttttaatcgattaccatgtgatataatcgattacttctctttctataagttgttcagaagtgaacaagaacactctaatcgcatactttgaatatctaatcaattacattgttcttatg

SEQ ID NO: 250741 - DNA, 239 bp, Glycine max
  unsure (1)..(239): unsure at all n locations
tgttccacttggacttttctatctaaatgtcgtgctagagaatcagaatatgaanaactcgttaagtntaaggaggtacctttgggatgccacaagcctacatcggttgcgcccttaagatacttaatgatccttttaacaacagattagcgagattccttaggattacattggtaccttgcacataagtaaacacttagcatgatatccagtctacttgcagttaggtagagaagtga

SEQ ID NO: 250742 - DNA, 357 bp, Glycine max
  unsure (1)..(357): unsure at all n locations
accttgaatctaagctggggaggatgcttaatggacganaagatagagggagagaatgtgagatgtgggagcacgancatgaagggagaaatagggagagaagctgaactttgagttgtgtctcacaagactctcattcatcatagttaccacaagtgttacacatgcttctatttatagactacggagcttccttgagaagctttcttgaaaaaacttccttgagaagcttnttttgagaaaactttcttgagaagcgagagcttaactacacaccccctataatagctaagctcacccacatgataatatacatggaaatacaaaataattcctactacaaagacaactcaaaat

SEQ ID NO: 250743 - DNA, 308 bp, Glycine max
atatgtcctgaaaaatataaaccatttaaaggtgaaggggaggggggggcagatactcaatagaactggtcatcatagtgatttgatattctgattacctcacgaacagcatgcgttgcagtggcagtcaatgccatgacaggtacatctggaaagtgtagcttaagagatcccaatccccgataatcaggccgaaaatcatgtccccatcggctggaaagcataattttcaatttaattgtaacgagtgaatagtagataatgtgatatctcttgttaacaaaaatcacatagcttctaaaactcca

SEQ ID NO: 250744 - DNA, 199 bp, Glycine max
  unsure (1)..(199): unsure at all n locations
gcactgacacacatatcgaatattagggtccaacctttgccaccaatactatcaagtcgtgatggtttataaaatatggggatgatcgntgagaatgatcatcacagatggatacatcgtgtaccgattctcaagcttccaactcaaataacatagtatcggagctcattacgaataacaaagtgagacctgtgactta

SEQ ID NO: 250745 - DNA, 296 bp, Glycine max
  unsure (1)..(296): unsure at all n locations
accgcgatctcagagtcacctgcagcatgcagctgtaatgacaacggaagctctnagaaactatatggtctacttatccacggacgtcgattagcgctaattatcagaccttaaatgaacaagttggtctcagaattcaatgtcataacttgcacacgaaagttctattctggcgcatcacttatcgagatgctctgaattgaacacctggagctctcgagagattcaaatggtcataactatttacacagaagtccgattcaagcgcataatatatcgagatgctcgaaattgaa

SEQ ID NO: 250746 - DNA, 133 bp, Glycine max
gaagctgtcgagaaattcacatggtcataacatatgacacagaagtccgattaaggcgcataatatatcgagacgctcgacattgaagagcgaacgctctcgagaaattcaaatggtcataactttttacacg

SEQ ID NO: 250747 - DNA, 511 bp, Glycine max
  unsure (1)..(511): unsure at all n locations
ntgaatctcagtccaaactctccctctagaatctgatttcatgtcttaataggtggccttgttcgtgctcgtgcgcttagcgcaattatggaccgcttagcgcacattagtgaattttggcttagcgtgtgcctttctcccttaacagatgaactgaagcggtgcgcttagtgagatgaagcagtgcgctcggcgaacctgtacaactcatcttcttccagagtcttcctcgcgcttagcccatgagtgttgcgcttagcggacactcgctaagccagcagattgacttatcgagaaggtgaaaaacaacactgttcaaagcttgcctaattaacctgaaattgagagacaatgattattaaacacacacaatggaagtactaagtatctattacctatacttaacaganaatacttataacactacaaaataaccatatatgggaagagtttgatacaacttacacaacgttnatacacacaagttagttgtattcaccgactaacacat

SEQ ID NO: 250748 - DNA, 466 bp, Glycine max
  unsure (1)..(466): unsure at all n locations
ctaagcttgcttctacacgtatgtatcagctccaatagatctttcgctctccatgctctgcttngtgagaaagaaaatcggtgttgcttaccaaggagacatcctttacacacttcattgttctcctttatgcttggaagatctctcatcatgttcttctcatgtaacaacttcaaggcatgtgtgttgaagtggccaaatcttctatgccatagccatgaatcatcaacttgtaccttcatgccaatgtttgttgcatatttaaatttagagggaagcttctattgctcttattcatctntacttgggctatctcagaccttntattttgttgtctaagattntgcatacacctccttcaaagtgaagtgtgtcgcctctctccatcatttggcagatgcttagaagaatttcttttatactgggaactagtaagacatcatggatgagtcgcatacctttatct

SEQ ID NO: 250749 - DNA, 365 bp, Glycine max
  unsure (1)..(365): unsure at all n locations
ttatgttaggatctgtattatattctatatgctgttaggatattcgatgtaagagaactaattctgttaggaatgttggatctgattctcagttcttataaaagctttgtaataattcgttgaaggcaatgaaaaagttcactaattncatctctctctctctctctctctctctctacganctggaggcttcttggtcctcgaataccaagagtaacattggtgctttcattgcacaacaatggcggacgtgactcgttccaaggtgtccgcagatcgcctcgaagacgcaatcgcgaaacttacagcgtctcaactcgccatgaatatgaagaatgacgatcttcttcagcgtatgtcgcaac

SEQ ID NO: 250750 - DNA, 404 bp, Glycine max
  unsure (1)..(404): unsure at all n locations
cttgaccaatggtgtagattgtctaaccagtgaagagaagaagtatttatgggcttgcttggaaggcttagnatgtgaagaaaatatgcctgcaggggggaccagttntgaagaattgaaaagcggaagtccacctgagaagaccaaggtggagctaaagatcttacctaaccacctgaagtatgttcttggaagagaacaagaccaagcctgtggtgatcaatagtaagcttacaacagaagaagaaataggttgatagagttcctcaagagacagaaggaggcaattgggtggcacatattagatctaanaggaatcagcctgcctactatatgcacaagataataatggaggaagaatatagacctgtcagacagccctagagaaggctcaacccatcaat

SEQ ID NO: 250751 - DNA, 372 bp, Glycine max
  unsure (1)..(372): unsure at all n locations
agcnnataacaaattaagggggcnatgagccaatttagttacatncatangttttgccgagcaaacagaaacttgccattcctgatcttgatcagagaatgtccaagaccctttagaaatatgacgatacatactcttaaaatctcctaaagggtcatccttcacctgtgaaataagagtgttagttcattactgctatgtaaagctacccaattacatattaatcaataatctaatgaacactaaattcgtcgtcaatttaaatatgcattctaattcgaataatatagccatgctagttttaattaatattattagttagctggtcaattagttagttaattgattacttaataggttaaatcactctat

SEQ ID NO: 250752 - DNA, 373 bp, Glycine max
tatgaattaatacttccaaatattacatgtgttactgcaccttaaaaaaaagattacatgttggaaccgtttatcaattaatatgaagaaaaacattatggcattaagaaaattctctgcaccttaagataaatgtatacctgctgtaatctcgtgctaatttagtatgcagaaagaaatattaacatgtcaatatgtagacaacattaacatgtgcttcactttaacatatcaatatatttttattgctgccgttgtgttatactattacaacattcgaaaagagcagtatatctttataataacgctacatggcacaaaaatgtaattatatcaatatattatctcagtaatacaacaacctctcacaata

SEQ ID NO: 250753 - DNA, 389 bp, Glycine max
  unsure (1)..(389): unsure at all n locations
attttcgaaatcagtcactggtaatcgattaccattaaggtgtaatcgattacacatcaactgatgtgactcttcatttcaaatnttgaaaattaacaccgttagaagctctggtaatcgattacaagtatggtgtaatcgattacacaagtttcaaatactttataactatntaaacataagttataactcttgaacattgaaatcttaacattttaaaacactggtaatcgattactaccttctggtaatcgattaccagaaaagtaaactctttggtaatgatcttgtgaaaacttcttgtgctactcaatattttgaaaacaatttaagacttatcttgattgagtcttttcttgattcttgaatctttagtcttgaatattgat

SEQ ID NO: 250754 - DNA, 264 bp, Glycine max
aacagtatgagtcctgccgatcataatggtttctgttatttatctcaacaggtctcctacacaatgactgccacacttgttccccgtttgttattctttctggatatgccatatttttgtggcttataactgtcattttaggattatatagacacctttggattactactctctctctcttactgctatatcaatatacatgcggtcatacgaatctttctctgcgaagtaaagctggctgtatggacgacattcatgtctata

SEQ ID NO: 250755 - DNA, 339 bp, Glycine max
  unsure (1)..(339): unsure at all n locations
cagacctatacctttcaccccatcaccatacccagaacaaccctttcttgatctagactactttcttattgacatgaaataagcattgcaccaatactcttagtttgatagttgctgtttgcattccagatttaaaggagtttaagtcctatacagtaagaggtctattgatcaaaacaaatgattgatgcttctcccaaaatttattgaaccacattaacatagcatttgtcttcatanggtctgtcattctttacaactctttgtgagagtgtctaagaactgctacaatcttatttgcaatgtaattgtgacaactcaccatataattagcttact

SEQ ID NO: 250756 - DNA, 460 bp, Glycine max
  unsure (1)..(460): unsure at all n locations
tgaacatacgaactagtataaattactgggaattggtcactactgtttttgtactgaaaagtttaatgaattttctagacatcttgaccaaaattataaaaagagaaccaaacgatttggattaaaggaaaaaataataaaaatcgcacaagttggcagaaaaatcagtgtccaggaaaaaaaagtgaaaggaaagtgtgcttgttgttatggctcacactttgttctataattggtgcctattttataccaatcctagttctgaaatttaaattgaatattattgtgaaaacaagtgccaaaactagaggtttcttgagtcttttntctttgaggttatctactctactctagagccattctagggttctctttgagttctagcctggctttgtgtgctcttcattgctctaattgctgaataatccttgaacatttgtcttgtttaaactatatttgg

SEQ ID NO: 250757 - DNA, 242 bp, Glycine max
  unsure (1)..(242): unsure at all n locations
agcttcattcaccccanaaccttccacaacgtacaagagatatataatcttgcggaaatcatgattatgcagcgccgcacccaccatttgtgtgctatgctgccattatggtnttcttgctcactccatacaagcaaggacaccatcctttggttctttagcttcccattgaagcatatttgtgctgtaaattatatgtatatgctcaaatccgagaagcaatttgcccttgaatccatgtt

SEQ ID NO: 250758 - DNA, 505 bp, Glycine max
  unsure (1)..(505): unsure at all n locations
actcagcttataanagttatatggcttgaaacaagcaccgaggcatgtgtttctagaagtttaatgagtttatgagcaactcaagattcaacagatgtgacatggaccatttttgctacgttaagaaatatactaataactatgttatccttgttgtgtatgttgatgacatgttgattgcaggatctagtatggcagatgtcgcaacctacccttcggcgggagggcgacgcgagactcgcgggatgcgtgttccacgaaaggaatacgcgcggagtcgccaccaacgtttattcgaggaaaacgtcggaaaaaccggataaagacgcgatctacgaacttttaagttgaaaggttcgggagttgtatttacgcacggngaaggtattagcaccccacacgtccgtcccaagggacggcaacctttaatcgaatgtgcaaacatgactttgattnnttatgtcctttttatgtccttatatccttntataccctctttttatat

SEQ ID NO: 250759 - DNA, 379 bp, Glycine max
  unsure (1)..(379): unsure at all n locations
atgcatacatgattctgatgattgtcaaaaacaatctaacaagactgcgtttaacgataagcatttgcttcaagaataatccaagattgcttcaacaaacacagccttgtttcaagattcactaaagaccaagccttgccttaaaacaatgtgctttcaagacatgcaaggctctggtaatctattaccaggaagtgtaatcgattaccacacaacagggttgagaaatatctgctgaagaaggctctgaatttgacttctcacatgtaatcgattatctgatgtctgtaatcgattaccagcaacgaaactttggnacttcaattcaanagcatacccctcaatttaactgtgcagtcattctccacttgtatcgata

SEQ ID NO: 250760 - DNA, 383 bp, Glycine max
ctttataaatgatcacacaaagacagtacatataaattccacatttatgaaaaaacatatttgtcctattataaaagaaaacagaatgaaatggaagaatgagaaatcatgagaaaaggggtagccatctttgattaactatagagtggcggagtcaaccttgatccactatatatatgaggggggatgatgtaaacaaatgagattgccttctctaaagttagggattcactagatggtaaagtgagacattatagccatcattaaaaagtcaacagtatataacaaactatgtagtggcagcttaaatatcaaccattgattttcaataatagaataactcttacttatgaatcctcacttaaggagtaaaagcacaacat

SEQ ID NO: 250761 - DNA, 410 bp, Glycine max
  unsure (1)..(410): unsure at all n locations
tagcgcanatccttgcggcaatggttaggcttagctggtgcttttcagctaagccgattatgcagaagctgaatttctgcaacttccgctaagtggcttcacatgtcgctaagcggtagtgtgttttttgtgaaggccagctaagaggaccagggctcgttaagccgccaatgcctttttcagttttatttttcagtttttgaatttgaataacttgtgtcttgtttaactgtttggttcctttatttgcaaatggcttctangaaacgcaagagtgttggttcaagacccacaacacaatatgatacaaggagattttcctccttagatgcttggaactggtacacggataatgtccctgggagaaacattttgcctgagaggaaggtggagctctaccacactgagct

SEQ ID NO: 250762 - DNA, 511 bp, Glycine max
  unsure (1)..(511): unsure at all n locations
ctcaagctggaagagaagttgaagatttggagactctcactcaacgcaccatatgtgctagcgngacgcagtcgcttagcggacaacactcacttagcgcaaagaagccacatggagagcttgatgtcatgtgaaggcacacttagcgcgagtcgtgcccttagcgcgtgaccacttactcctcgctcaacatagagaagtagcgcttagcgcgaggtcgcgaaaaataacagcacaaagctgcgttttaaagaaggggaaaatggggaacatatgaaaggagttcttcacaaaattattttgcttcccacagagagcacaggctatggatcatgcaagaagaaggagaatcaatcattaggagccatttcgtcccttcatctctattcttctccatttcttcactcctcttcacaccttttgcaattgtaagcctttcattgctaaatcactcattatggggagnttagcaaccaaacactctggatgtagtgactcttactatatattt

SEQ ID NO: 250763 - DNA, 317 bp, Glycine max
agcttccatcaagtggtaatcagagcacaagagcttatatttgtgctccttatacctccattaatcttgttgctttaccttctcttccattgtgggtgcttcattattctccatgtatctcctcacatgtcttggtctaaatgttgttaacatgattctttagacgttccaccgattaaacttgctatagaagctagatttgatattctatagtacaacattcttgctcttgttcttgaaccatgaattgtgttgagttagggtccttcgagtcttttcttgttattttttgtggctgaacctaaccataaattctt

SEQ ID NO: 250764 - DNA, 276 bp, Glycine max
  unsure (1)..(276): unsure at all n locations
accaccactttggactcaactctataaatagagatgtaatgctttcattttcagaagtgaataatatttgagggttactccattgagtgagcagaacagtggctcctctttttaaatcttggagtagaacatcctttgaaacttatcaaaaggtcccatacctttgaggtgaatgcacgcttggttgatcactctcctagagtgaggngccttctttatgatttcctgactttttcatctattctatttcttttcttctttcaaacatcttggact

SEQ ID NO: 250765 - DNA, 169 bp, Glycine max
atgatagccgccgatgataccattactggttcccctaagctctctgtcctttcttcacgccgcataccatgccttgcgaactccttggagtaccctcgcgttgtggtcactgaaacctcgtgcgatgaaaggggtgatgctatcgtctgatggcacttctctcatggga

SEQ ID NO: 250766 - DNA, 416 bp, Glycine max
  unsure (1)..(416): unsure at all n locations
ttttggagtaganacatgggaccaactcattttatttcanaagaagtcgtatccagtcaaggtctgagagaccatacaagtttcctaacgatttctaattatgtgggccattaagtctatcatatgctgacaatagccgagaagcccatgaatctcttcgggggtggagtaagtgtctgccatcgccttggccttggctaacaagcggngaagttcttgactcccgttcaaggtaagagcaaaccggtccatccacatggntgcctcttggtgtaaagagtcgatcacccttcctctagcctctntttccgcatatacttgagcatactcatccgcgattctatgctcgtgggccgtggctagacctaactcttcttggtacttggcgatgatagctagcatggtggtctccgtct

SEQ ID NO: 250767 - DNA, 503 bp, Glycine max
  unsure (1)..(503): unsure at all n locations
tccatcataaccactctatttcccctaccagtgatatccaacttggtcactgcactcnccatgtacatacacaacatacatcatcacaatgacattatcaacatcaacaacatctcatctcaatgtcattatcatcatcaacatgatcccatctcaatgtcattctcaacatcaacatcatctcatctcaatgacattatcaacatcaacatcatctgatttcaatgacgttatcaacaatagcaacatcatctcatatcaatattataattaataacaacatcatctcatatcaatattatcataaacaccaacatcatctcatataaattattatcatcaataacaacatcatctcatatcaatattatcataaacaccaacatcgtctcatatcaattattatcatgaagaacaacatcatctcatatcaatattatcataaacactaacattgtctcatatcaattattatcatcaataacaacatcatcaataatcac

SEQ ID NO: 250768 - DNA, 83 bp, Glycine max
ctgcagcttgcgcacgagtttccacatgctctggtgtttcagctcaaagaagacagaatagaccatggtgtctggcgaataaa

SEQ ID NO: 250769 - DNA, 420 bp, Glycine max
  unsure (1)..(420): unsure at all n locations
taaattcttgagtgattaagaacaccctggctgtatcaaaggactttcacaacctttgtgtgttgccctcgctggaaagagagattctttccttcctttcatcttcacccttgttctttcaaaccacaattccataaaatccacctctgcccagaattatctcgtggccataactcccgttttacgcactcaaattaagtgattcttgagcctaaattaaatttcaaaacgagaactttcacctcgttttggaatcacctcattnggagccctgtagcttcagttattgccatttctatatttctgtccagccaccacttaacctacattttaccatcccattcatcccatttatgccaagaaccacctaattaagacccacgaaattaaccaccttagtttccatccttaccttaatca

SEQ ID NO: 250770 - DNA, 312 bp, Glycine max
ctcttagaggcgactttgagcgtttgtttatggaggagtccgagtcaatttctgattatttttctcgagtatgtggtcgggtcaatcaacttaaaagaaatggtgaagatgttgatgaggcgaaggtcatggaaaaaatacttcaaactttatatccaagttttgacttcattgttaccaacattgaagaaaacaaggatttaaagaccatgactattgagcaactcatgggctccttacaagcataccgaagaaaacaaataagaataattaaacagaaggaggctacggagcaactactacaactcaacg

SEQ ID NO: 250771 - DNA, 433 bp, Glycine max
ctcgccaggcgagctagggtgcttcctcctgaagcaccgtcttctggagaactttctggaaggccaagtgggcatggttgctatttgcacccccctatttactaaatacacccccttgcctttttttgctgattctttttctgtaacgttacggaaacttatgaattacgtaacgatacttgttttctttcccgcatgttatgaaaacttacggatcacgtaatcatcccctcttttggcttccgcaatgttacggaactttacggattgtgctacaatgctttcttttgacttccggcatgtctcggaacttcacgaattacctaacgatgggtgttgatgtaagctccgttggagcttgtaggcctaggatcttcttcatcaatggaattcctttgttcttggaagatgaatggcagtggaatggagaaag

SEQ ID NO: 250772 - DNA, 402 bp, Glycine max
  unsure (1)..(402): unsure at all n locations
gaagcgaaaagaataaaagggaaatttccaatcaaagaaaaggaaagaaggaagatttccaatcanggagaaagcataaagaaaagaaagaaaattcccaatcaaagaatgggagaaagtaaaaaaggaagaagtagaatgaaagaaagctcctgatcagggatcgcaggaaaacagaagatatgtgcagaaaggtctttggaccggacaatatctgaacaatacagaattgtcaccaaatgaacaaaaagaaggaaaggaaaccacgacctaaaatggtcttctccctttgattaccaaccaaaatcccgtgcgctagcgactttntcgccccgcactanacaaaaacagaaacatgaccataaaaatttgacacttgagcgtncgcatatgcgcatgcat

SEQ ID NO: 250773 - DNA, 342 bp, Glycine max
  unsure (1)..(342): unsure at all n locations
ctaaatatacacgtactactaagaaggaatggatgtgccttgattaggccagtctaatctacctgattaaaccaattacacaaagcaaagcccaaatttgcagcccaattattcaagtgcagaggttttgacttccaagcccaatttgaccctcgaaatgatagaattggcccaagcttatttttgacaaaattcaagatattnttcttagctttccagggattgcacacatgctccatttagagttctgaaatttcctataggccctgcataagttagataggtcaagtaagcaaaaaaaaatcctaanataagtcacaattctcaattaagctcaatcat

SEQ ID NO: 250774 - DNA, 308 bp, Glycine max
  unsure (1)..(308): unsure at all n locations
agcttctagccanatggacttaccttgaataattcctttgattctcctttngagccttgattccctgtccttgttttgaagctcactacaagccttaagtgaaaaaccatgatattaccatatccttaaggaatactggagctttggaattgttttgggaataagtgtggagaggttttgtttcattggacaactagtttggtggctatgctcatgaagaatatggccatactgatgacattgatattgttaaatgtggacatgctgatgaatgttgttttaaagggctaaagtcacaaaaaaaaaaa

SEQ ID NO: 250775 - DNA, 251 bp, Glycine max
gagcttgttagattctgtgtagtcgaagagaagttcaagtccataaccatcaaagtctgaaaagagtatgatgaactaagggatgtcaatatggccaccgatgaagccttggaatgagaaaccaagaaggcccgaaaggaagaacacgaccaaagcaaagttgtgaggggctttatatggcagcaatagtgagctcaagctccgaagaggtgaaaggaatcatcacgggtcaaaggcatgatcttgaaaga

SEQ ID NO: 250776 - DNA, 344 bp, Glycine max
  unsure (1)..(344): unsure at all n locations
aaatattgtcgtctgaattggctcacaggctcaacattcaattntgagcgtctcaatatattacgagactcaatcagacatccgagtaataagttattgtcgtttgaattggctcagaactttaacattaaatttcgagcgtctcgatatattacgggactcaatcagacatccgagtaaaaagatattgtctcttgaatatggtcagaggttcaacattcaatttccagcgtctcaatatattatgggactcaatcagacatccgagtaaaaagttattgtcgtctgaattggctcagaggttgaacatttcatttcgagcgtctcgatatattacgggactc

SEQ ID NO: 250777 - DNA, 434 bp, Glycine max
  unsure (1)..(434): unsure at all n locations
caacgacaataacctttactcggatgtctgtttgagtcccgtaatatatcgagacgctcaaaattgaatgttgaacctctgatccaattcaaaggacaataactctttactcggatgtctgattgagtcccgtaatatatcgagacggtcgaaattgaatgttcaacctatgagccaattcaaacgacaataactatttactcgaatgtctgattgagttccataatatatcgagacgctcgaaattgaatgttcaacctctgagccaattcaaatgacaataacttattactcggatgtccgattcaatacagtaatatatcgagacgctcaacattgaatgttgaacctctgagcaaattcatacgaccataactttntactcggatgtctgattgagttccgtcatatatcgagacgctcgaaattgaatg

SEQ ID NO: 250778 - DNA, 338 bp, Glycine max
  unsure (1)..(338): unsure at all n locations
taatttttgatgatgacgactacgaactgttcggttggcttcatccggtgatgctnnttggtatacctcgactggtaatctttcttggccgatgtcgcatcggattatattcgatcaatgtttgtaatggagtcttttctctgttgaggtcggttaccattttgtttgcctattcaattaccgcagtccaatgtcacccgaaatgaacatctgttgagtgtgcacaaaataccataggcgaccttgacggaaaactttttgagcgacaatgaataagaaaacatcctcgatggacgaataatattatggccgagctgatggaaataaaacattgacaa

SEQ ID NO: 250779 - DNA, 414 bp, Glycine max
  unsure (1)..(414): unsure at all n locations
gactcatggncactatttatgacaaattccttgggataaaggtagtggtgccatgttttcaaaacccgtactaaggcatacaactccttatcataagttgaatagttaagggtaggaccacttaacttttcactaaaataagcaattggatggccttcttgcatcaacacagccccaatcccaacatttgaagcatcacactcaatttcaaaagatttttgaaagtttggcaacgcaagtatgggggcattagttagcttttgcttaagaacattgaaagcttcttcttgtttctctccccatttgaaaccaacatttttcttgagcacttcattgagaggtgctgccaatgtgctaaaatccttcacaaatcgtctataaaacttgctagccatgaaaactctccctcggcac

SEQ ID NO: 250780 - DNA, 464 bp, Glycine max
  unsure (1)..(464): unsure at all n locations
ngagagaagcccggtagtcgaagagaagttcaagttcatatttatcaaagtttgaaaagagtatgatgaactaagggatgtcaatatggccaccgatgaagccttggaatgagaaaccaagaaggcccgaaaggaagaacacgaccaaagccaagttttgaggggctttatagggcagcaatagtgagctcaagctccgaagaggtgaaaggaatcatcacgggtcaaaggcatgatcttgaaggacgagctanaggcttgccttatgtcgaaaagaaatttgtcccaacagttaagcgagactgaagggaatatgtgggccgtcatcgatgagtgcaaagagaagctaaatctagcggcgactcacgagcaaaggctagaggatgagtacgccaagatatcagcagaaagcgaagcaagggagagggtaantgattcatggcaccaagaggcaacaatgtgga

SEQ ID NO: 250781 - DNA, 437 bp, Glycine max
  unsure (1)..(437): unsure at all n locations
gacctctaagacacctgcagcatgcacttgatctactattattgaaccaaaatagatgctgactggtttgctccggcactcttcccatttgtactggacaatctgtttatgtatcgtaccgcaactgtgtgacgtcaatatcctctatttggtctctattctgttcacaatcacatcatgcatcataatccttagaggtccctatttagtatagcattttgcgggttggctaatgataatgaactgagcccaaatgcgaatgacgctctgtaacagtagacaataggctgctaactgataatgaccaaactgtattcggagtcggactcttagtttgttttcactacattaacttgtcgcggtgcatagccatgcttaatttatggtatattttcaagacagtgctaatattnaactattattctttaagttgatga

SEQ ID NO: 250782 - DNA, 260 bp, Glycine max
catatatagattactattcgtggaatataaaccgcttatggtttcgttaccatcggatatgcaggattcgctgagctattctgacttttcatgctcactcttttcttaactaggtactagtattatctagtaaccgctgattttattcttttgagaatcatgattcatttacagcgagaaaagcatcatgcatcattcatgcttgtttcactgtaaccccagaatttattctggcatcaagatacttatggtggaggcga

SEQ ID NO: 250783 - DNA, 458 bp, Glycine max
  unsure (1)..(458): unsure at all n locations
gacaaaaatatttctgaagaggttgtaaattcgtaatgcacggttgatttgcgatctatagtaattattggtgttattatttttagactttgtttgagttaacttaagcactttaatttttggagaagttgaacgaaattatagtgcttttataaaagctaaatacataaattgatttttgtacctttacattttatattttatttcatataagtacttatgaagaacttgatccaaataggtcttaatagaattacgtgaagctctttatataaattagtgaaaaccacgtgacaatattgacattttaagttaaaaacatttatactgaaaacatttaaagtttctttggcatcaattttttataattnttaaagtaatgatagtacagataaaattaattttgtgtttagattatgagttgattataagaattatatttatatttaattggtata

SEQ ID NO: 250784 - DNA, 348 bp, Glycine max
  unsure (1)..(348): unsure at all n locations
ctgcaagcttatgtgcaaaaattataatagacccncttagcagtaatatcctacaacaacaaaataattatgatctttcaagcaacagatacaatccaggttagaggaatcatccaaatctgagatggacaagtcctccacaacaacagcagcttgtccctccatttctgaatgttgctggcccaagcaagccatatgttcctcccccaatgcagcagcagcaacaacaacaaaggcaacaagcaactgaggatcctcctcaaccttccttagaagagttagtgaggaaaatgaccatccagaatatgcatatttagcaagagacaagagccttcattcagagtctga

SEQ ID NO: 250785 - DNA, 490 bp, Glycine max
  unsure (1)..(490): unsure at all n locations
gctggtgtttcacaataagcttagaagcgatctanaatggcatatcacttaattggcttcaacacacagtgagcttgataaattgaagcaagaaaatgaaaaacttgtttcaagttataaagcaaccggttgtgtttgtgcttctacatctcttaatatggattattgcaaatctttgcaagatgagtttgaaaagtttaaaaatgatcacgatgaagaaagtatgaagttgtaaactgagatttcctatcttanagatcatttgaataaaggaaagagtgatcttagtcacttactcagtgtgcaaaagcatactaccaataaaactggtttggggtataatgagcaaattgacttttataagaaaactatagttgcaccctccaaaaaggtgaacccaaacaaagtctccaaaaagaanaacatagtgcatcctaagcctatagcanagacttgccattaatgcatgaaaataggacatacatcttat

SEQ ID NO: 250786 - DNA, 358 bp, Glycine max
  unsure (1)..(358): unsure at all n locations
tggaaagacgtgcctctactctctgtgcacaagaacctcgcgccagaatccgccgcanaagacgacgtcgtcgcccgtcagagggtcacagaaagttcttacccccatgccaacgactaaaagccaacagagaataataatgcttccccgttttcaaacctacaacaaccacgtggagcaaccatcgaagcattccgattcaaccaggtcctacgacgatgacgagccactcctctctcccacctccggcggccggattattccaattcccgaagccgacgagaatgccgaagacgacgaggatgaagaccccggcgagttccatggcttcttcgtcaatccccaaaactcatcctcg

SEQ ID NO: 250787 - DNA, 439 bp, Glycine max
  unsure (1)..(439): unsure at all n locations
actaagctttagaaagcctatgatcaataagngatcatttatcttggttattgcttggtttangccatagagaaggtnatttttgtgcaaatactcttgtctctctagcttcttctaacactggatcttgttggcgggaatttattcctcattctttattgaatgattactatagatatagatgtgatctcccaaactacaggttcaaatggatagtttggtggtgcatgggtcatgttcttgtcccccatgatgctttgtccatccctttatttatttgaacaatactcttattggcttgttgtattgcttgggtgcgctttccgatgacaacctatacggatctcggtactttcttttaacatcatctcactctgtttatacaacaaaccttgcttcacaaatcttctggttgtccacatatatctcttcttgtaaa

SEQ ID NO: 250788 - DNA, 397 bp, Glycine max
gcgacatatctccaggtaccactctgtggtcaacgaataaaagcaagaagtctcacccttctacacttactcatatcaagcttgtaggattatggagtacccatcacatgtggtactacgtgacggtcgggcgatggtgcacaacaagttctccacatccacaaatcacgtacaaacccaccatccgctgttgtccacctccaactgagctcacgcactcccacgtagcccttatcctcattcctctcaacgccgagatcccatcacatcttccatgcttccacaacatccaagtgattgcacgtccattcattatggactaactaaaccaagcataacagggcataggcagaaaactctgcccagaacacaactcataatcacagcttttcacata

SEQ ID NO: 250789 - DNA, 350 bp, Glycine max
  unsure (1)..(350): unsure at all n locations
atcaaatcctatcttatccagattctattctatgtagagtttattttatccagagtttattccatctaaattttatttcgtccaaattgtatttcatccaatcttattctatcttggtcagattttattttatttcggacttggacttaaaagtagattgtgagcttngaggctgaggacctatataatagcaccaatattttagnttatggatttattttcggagaggagaataattctagggatttagatattccagttttattattggtcatgcacacttttcacgtagaataaaatttatnttctgcaaatgtggttcggcttcaatctacagatgtcgttctact

SEQ ID NO: 250790 - DNA, 482 bp, Glycine max
  unsure (1)..(482): unsure at all n locations
agccttagtttcactctggttattattcaattgatccaaggaaacttccaaagaaaaacgtccgattganttttttattattttattcaaagatattttgattattttattattatttttcaagatattttgattattttattattattttgcttttttttgtttaaccgagattacagagtgaacgatcggttagattttgttttaaaagtgattaaacgatattacaacacaaatgatcggttgaaattcattttatcatttattaggtgagaaaacggcatatataaacggtaaaagcgcgttaaagacggaagaatagaaaatcgaataagaaggaaataaagatgaaagccaaanaaacaagaaatgaattgaaagtctcggattcgaaaacttactcgttgaagaacgaagaacgaacgacgaacgggtgaagaacggtgaagaacgacgganaaccttcatggattcggtcacgg

SEQ ID NO: 250791 - DNA, 442 bp, Glycine max
  unsure (1)..(442): unsure at all n locations
tangagctgcatgcacccattctgacccanaattaataccaatttctatacagatagtaaccattcttgatggtaatgacaaattaatcatgggagagaacatggacaatagtgaagattggagacaaacaaatgcttgcttcaattattgacatgtaatgaagctgaaaaaggtgccaggtcagagtctgaatgacataaatcagttgcagcatgtgagataagagttgatgactcattagcatgctacaatggtcaggagacaaaaaacctatataatatatgtatcagacatctcaacctttattatataggaccccgaagcttatgcaatgactcatgcatattntgtctaaaagaatatacagaacttgtatgagacatagcactgtaaaaaccctgcattattgtgggtacttcaatgtccgtaaaacaccatatg

SEQ ID NO: 250792 - DNA, 406 bp, Glycine max
  unsure (1)..(406): unsure at all n locations
ggaagccaagattacatctctgttattgtgatagacttaaaggctcanagaaaaattaagagaacgccattaagtgatgtggtttacatctggcatatcttcattggaagctattgagttattgtattttaaaatcattggcactttttatcccgtcagtttttcaccagggctaagctaagttatatatgctaatatttgcactttacaaggataccttcagcttggatgagttatcactctgtctctgagaactttccaagcataacaaaggttttttttttttttaaatgttaagagccaatattgtgttagctaatcaattgatcagctcattgtctcttacatacgcaccttggagacactcttaaattttatattattttggttacgttaagagaaaaaa

SEQ ID NO: 250793 - DNA, 200 bp, Glycine max
  unsure (1)..(200): unsure at all n locations
agctngagacgctgcaatgggccaaacaaccaaattttatctcttcttctatccaacaaccggaagacaataataaaaaaaataattttattaacatacagtatttcaaaagaatcttattttcatgtaccttatatntacctaataaaatgtcaacacacatgcttcctattgaagttgtaccgtaatttttttaacta

SEQ ID NO: 250794 - DNA, 414 bp, Glycine max
  unsure (1)..(414): unsure at all n locations
taaatagcaaatgcaacacctatcgagtgataagcattttcaagttaatttgcacacctacccacaacagccaagaaataccttataggttaatttttagattccgttagtgtaaaacttcaattagcttcaaaatttgtcccaacccaatacactcatgaccaattccccctaaaaaaaacaattccaaaacatcctacaaattaacctagctaattgcctatacattatcgccattcctctctcttgtcacaactctatatcataattctactgtaaattattttccctccacttcatatctttctccatacacctctatcgaggcattcacgacttttattntcacaagtgataacctagacctatttgatcgaatattccttttattcattcttttctatctcttcattc

SEQ ID NO: 250795 - DNA, 502 bp, Glycine max
  unsure (1)..(502): unsure at all n locations
actcagcttggttcaagagattctntctntagtatgctaaaattgaacatcttctctgatgacaaccaacgtgggttcctttgactttccaaccattcatcaacaagagcaggagaagatttcaatatttcattttgttgctgggtttaggtggtagtaaatacaaatcaatctcaagggtgttgtttttgtatgtattacagtacactgtattttccaattttcaattcttcatcgnttntttttcttttctttagcgaacatggtagatgatacaaggaacacctgcacagagaaagagagagagatttacctctcagtaaaaaacaaagtcactgggcgtgttattttaatattaaaaacttttccctagaagtttgtaaacccatgtgtgatcaggtgggaaacggtcggatttgtttgcttgtgagaataaacaatggcacagaggtgaacaatgaactgcaatgataatgagttcgttttttgtattgagtataat

SEQ ID NO: 250796 - DNA, 361 bp, Glycine max
  unsure (1)..(361): unsure at all n locations
gagtgtagagcttntcattgagaaagtggcctggcctggagcccgaccttcttttgtgggacataatgaaagttttacagcccaggcacctcataagcatgagccagaaccagaaaacgatcactcatctgaagccaccatccctggagctggtgatattgcaaaaagaagattagagacgagatctaatgaggctgctcatcctggaccagtgccagcatcagctgatgcaccattttatctttntgtgaaaaatggatgtatgatttcatttagaattgagtgcataattgtgatggagtgtgcgtttcctttcatgagtttgagcaaatatgtatgctagacaaagaaagaacaagaa

SEQ ID NO: 250797 - DNA, 342 bp, Glycine max
  unsure (1)..(342): unsure at all n locations
tctgaggatcacttanaattagtgagaaaatttgtttccgtgaagaaaatccaagccaaggcgcttccgagacgtttctgtgggtgatttcgtgaagattttccaccgttcttcgntgttcttcgtcgttcgtcggtcttcaatcggtaagttcccaaaatcgaacttttcatttcattctatgtacccttagtggtccccatttgtttcacatgctcttattttcatttcatttacttttcgtaccctctattgacgtgctctagtcatttatttaagtcatctcttcgcctaatcaacaaataaaataacatttcaccgatcatttgaattgaacatctt

SEQ ID NO: 250798 - DNA, 471 bp, Glycine max
  unsure (1)..(471): unsure at all n locations
tctacttatgtggcagggcgggcttncttcactttcttgtccccaacacgagctttgaccaccgctcttncttcccgcgatgcttctctttatatccacctgagtgggcttatagcctaaaccatacttcccacgatttcctttggcatttatcaggctagttatgctgccgttgtctttgcctaaacccattccgggttcgtaaccgttccccaacataactcgggccatcattactgctgcaacggacaggcaaggctgcctagagaaggagtccacggaggaaatgctgaccacctcaaaagactggaaagcggtttctaacgattcttctgcggcttccacataaggcatagaggatgggcagctcaccaagatgtcttcctcgcctgacacgatgaccaagtgcccctccactacgaatttcaacttttggtggagtgtagagggcacaactcccactgagtggat

SEQ ID NO: 250799 - DNA, 330 bp, Glycine max
  unsure (1)..(330): unsure at all n locations
gggaagatactgggtaagaattgaaatggtcaaataaatagcatacacacactatttttgttatacacatactcattttgcatatatgtgttaaaataactaattatggattaatttaataagtgcgtatgctgtaattccatgaaataaagttgagtgcctaaataaaaggcaagtatggggtaggaatgaatgatnaagtgatggcttatctatggatgaatgctctcctagaacctaagctctctgaatctaaaaanaccatgatttgttggcagcctaaccccattacaagcctagaaagtccttctgattcattntgtgtgttca

SEQ ID NO: 250800 - DNA, 250 bp, Glycine max
  unsure (1)..(250): unsure at all n locations
aaattctaggatatgaccattttacccctttccttatggctttttggtttttggatctgacaatcaactaccaaaccctgagtgaccctttggacttgtgctgcaactggtgccaaacacctaaattcaattagcaatgatcaaaacatcatatctgaatgataaaagtattatacccagatgaaattatggtctgacaatgccaaatcanacaacatntatacatctcttggcttttcttctctttcct

SEQ ID NO: 250801 - DNA, 485 bp, Glycine max
  unsure (1)..(485): unsure at all n locations
agtacctatnacacactagaagcggcggttgaataatgtgatggataaaacttagtctttcaaaaactgtgaaagctnttctcaaacagatatcaatggatgatgggtttcatccatggggttcaaaatcactttgagctttgaaaaccagttcacaaaacttggacacaatagtgtagaagtaaactatataaaagaactagttatatagaagcagtaaagaaaacacagagattntatactggtttaccccaactcctatgctacgtccagttctctttcaaaacatgaagggctccactaatcaattctttgattacaaccaaatattctctatgccatttctgactacaatgagtactctctaggccacttctagcactacccttaatctccccctgagattaagacctaagtattctttgtcactaagccactcttggtntcacaacaatacatgtttataaaaatgtatctatcactca

SEQ ID NO: 250802 - DNA, 481 bp, Glycine max
  unsure (1)..(481): unsure at all n locations
gagtccaattctaagcaagaaccatctagagagtcatatcatttgagacccctcaaccaaagtccaaacaagaggatctcttagacaacaaggtttcataactctcattntagaagtggaaaccaagcatattaatgatgctatggaagataagaactgggtaaaagccatgcatgaggaactagaaaaattcaagaaaaatgatatttggaagcttgtagaactaccacaagaaaagaaagtagtgagagctaaatgggtgtttagaaacaagttggatgagtgatcgacgtcgtacccgaatcatataaacattaaaatgcagtaactatgaagtgatcctatgtcatttcccaacgagcaatgatagaccaaatgttcataacagatagtacgaaatagtaacaaattcgggggggaggggggttcttttgctttgacatttatcacgagtaaattgattacaaatacagaataaata

SEQ ID NO: 250803 - DNA, 494 bp, Glycine max
  unsure (1)..(494): unsure at all n locations
tgtangaacgcgggaatccttangggagaatccatgtttctgttcatgttcattcaataaataaaatcattctttgggttgcaaacaaaactggaatatatctaagcccctatagtgatctatcttctcaacctcacccaagtacacacataaaatgatcaaatgggaaagaaagtcaaactatcaaacaccataccggcaacagttaataagtctcaatgaggagaaaacagaataaaagtcgcccacctagaacctgaacagcaataatgtgtttctttggatcctttataagcattatgccaacaaggtccttagcacntgttgatatgcttggtcatggaatactntcaaaatcaatatgaccttgcaatatggcatcaaatattcccttttccgtctctacaacacatattatataagacataagtcaactgtaaaacagggggaaactaacctctaatacaaggaaattatcctattatcaacatatc

SEQ ID NO: 250804 - DNA, 410 bp, Glycine max
  unsure (1)..(410): unsure at all n locations
gtcagtttatcagattgattgtgaaggaatgcattgaccgtatactagtgagagtgtgatccttaagattttgagagaaacgactatcatttagtactggattttgcgtgaatctctgaagtatggactgaatgcatgaaattgaggatgatgaaggccatgttngattgtgatagctattacgacccgcctcgtcgctacggtatccacactctaatattcgataatttcaattnttataaaaagaactctctttaattttgcttacganaatcaaagtgatgttgtcacaacataaattcatcaacaacacaccattacttangtgaatangcataattacatagaaacaataattcggtacatgtcatacacataacgaanattanatatgttcatatatataatta

SEQ ID NO: 250805 - DNA, 410 bp, Glycine max
  unsure (1)..(410): unsure at all n locations
cacaagtatattcaccaggaaaacattgttgtggaaggaaattgtagtgttgtgattcaaaagatccttttacccaagcataaagaccttgggagtgtaaccatttcttgttcaattggagaagtcactgtgggaaagactcttattgatctgggagccaatatcaacttaatgccactctccatgtgcagaaggttgggagagttggagatcatgcccactaggatgactttacaacttggtgactgctccattaccagaccatatggagtaattgaagatgtgttggttagagtaaaacattntatcttcccagtagactntgtggtaatggatatctgtgaagataatgacattcctgtaatattgggaaggccattcatngtaactgcaagctacaaagttgatat

SEQ ID NO: 250806 - DNA, 362 bp, Glycine max
gaagaaatctgtttagaaaggaccgaaatcaccgtcctcaataagcgcataggagacgaataaaccttagtcctcaaagcggaaagtcttcatttgaagagaccaagttaacaataactggagaactaacaagtggagcaagataatgtggtcaaggaagactatactatcatatacaaaggaagtaaccttaattttttaaatgacaccaactataatgtgtgggaataagaatagcgcgagtcaataagcaaaggccacaattaagacgactcgctgtacatataacttcctattccacccaaaaataaaagggtggactggccatttcaaatgggaacgacgcaaaaaaacaccagaca

SEQ ID NO: 250807 - DNA, 101 bp, Glycine max
aacacgagcagcgaccaaggaggccccgagcaccgcaatatttttgaaaaccggaagaagggcctccctaggaaaacacagcagccccggcgcaacaaaag

SEQ ID NO: 250808 - DNA, 393 bp, Glycine max
  unsure (1)..(393): unsure at all n locations
gtattcaactcaagccgagctcaagcttaatataacttggtttaacttgactcatttccatccctactcctactaatacatattaacatgaagtttttatgggattttaaagagcaatagtagaagagataagaagaaaagacgtgtatttaaggagtaagcaatatttatctttaggcttaatttgtttcaatgtattctattttaaatgtgtaacttggattaatgataaatttcctttatacaatgaagatctttgaccatgagtatgacttgcacagttgcacgtataaaaaactctagtcaaaacaataacattatgtaatttacaaagtgatagttcgattattcttcccttccaaaaaaaagtttgatttttnttctttcgtgcac

SEQ ID NO: 250809 - DNA, 389 bp, Glycine max
  unsure (1)..(389): unsure at all n locations
atactttcttttattccatgaacataaccgatatggtagtttcttttatgcctggtgattaagtcatctacggttttctggttaatatcagtgaaggcaatgaggtctccaacctcaagctcatattttccattcacatcattgctgcttctgttcacagatatttggtagaacaagctcttggtaggtatgaaacttcttgacctctccagttcaatgcttgagatttcgcaaaaggaagcccgcgacacacctttcaagttcgaacatagatcgctccgagttttctcaatcagtgaaggaatgaacgagttcaagtaatctgctgttgacaggaatgtctgtgggatcttcagtacctgagtganaccatgcctcaagctacatat

SEQ ID NO: 250810 - DNA, 203 bp, Glycine max
attgcacatgcctgtgatcaaagcaggaaaccccagggccctattggacttctccggttccactgggtgtctaggaggcgctatccctacaaactgatacatagcatctgagatcagctgggcaacatgtacactcacctgagtcaggatggcgtagaccagctgatacttcgacagggggaggtctaagttatggtcgttgg

SEQ ID NO: 250811 - DNA, 349 bp, Glycine max
  unsure (1)..(349): unsure at all n locations
ctaacctcactgtctctcacagtctntagaattgggagccaatccaatccttgtgtccggactctcagccacttatgatagccgccgatgatcccattactgcttcccctaagctctctgtcctttcttcacgccgcatcccatgccttgcgaactccttggagtaccctcgcgttgtggtcactgaaaccccgtgcgatgaaaggcgtgatgctttcgtctgatggcactcctctcatggggtagccaagctgtcttatggcgaggacgggnatataattaatacaaccccttgttcccatcaagggaacatttggacatccttcacatgaagatagaatcatgattc

SEQ ID NO: 250812 - DNA, 312 bp, Glycine max
  unsure (1)..(312): unsure at all n locations
tacccgagagtaataactctggtaacttagaaaatgttgagaaaaactcttgaaaacaaaaccgtgctatgtttgtgttttgaaaaatcttttcaatacttcccttgtgaagtcttcctgatttcttctcttgaatcttganatcaaacttctcttgagtcttgaatcttctagatatcttgtcatgaaacttgaaattaatcttgatcttgaacttgttgactcaatcttgaaatcattctcttgggctgtttgtcatcatcacaaattcttgaatcaacttgattcatcatcatgaagcttgcttctaca

SEQ ID NO: 250813 - DNA, 271 bp, Glycine max
gatcccggtgagagtgtgaactctaaatgtagagagaaacgacaatcatttagcactgaatttcgcatgaatctctgaagcatggactgaatgcatgaaattgaagatgatgaaagccatgtttgattgcgatggccactcatccaaaaatctgaccacgtgctcgaatgatgtataacctgcacccaatttgagctgaatgaactattgattgattgaaccttgaacctataacaggtgatctcccaccaccctgccttaagatgtagga

SEQ ID NO: 250814 - DNA, 300 bp, Glycine max
  unsure (1)..(300): unsure at all n locations
aatgattatttggactcaccangttcactagagcagacttggctgtaactttttcagacagcttcaaattaattccatgtttcattatcaaattgatatgaagcacatgatcaaatctttcagtttttattatagtacagagattagtttcacatgaatggatgttctttttaatataaccaatgatttttattagatatatgtttcaaagatttaattaaaaaaatcaacatgtcattatttattagaagaatctgatgaccaaattgtgagaaacctatctgatttttcttcggtttc

SEQ ID NO: 250815 - DNA, 499 bp, Glycine max
tcgtgtcaccaggaagtttcccaactcgtctcttacttaatatgtcctctcttatgtccacgattttatctttataaccctacataataaattaaaagataaaaaacattgaagtcaatcacgtgggaagagattcaaaatgatgggacgtttaaaagctattaataacatataatctctaacctgtttcaattcgtgcccgaattcatgtcttacatgttccatgaaggacctctcattctttgtgggatgaggataatttattatcttgtttgatttctataaggttatcttgtcttgtgtaattattatattttgatattaatcactgtatttggctatcgttttatgacatttgaggacttattatttctttttaatatttggctaatttgactgaacaattatgaattatgccatatgacatatggggctatatatatttatatatatatatatatacattcacggttcctgcctcatgattggttatattttt

SEQ ID NO: 250816 - DNA, 494 bp, Glycine max
ctaactttcctgacttcagcttacacttaagtggtctccatgtttctcatgttgctccacttatctctaacaattagtagcccattatgacttggagctacatcagatggatgtgaatactacctttcttaatggagatttagaggagaatgtttataaggaccaaccaatggggttcttaattgaaggaaaggaacacgtggtgtgcaaattatagaatttaatatatggtcttaaacaagcttcccgccaatggtatttgaagtttaatgataccattgtttcctttagattgtaggaaaatactattgatctatgtatgtatatgaacgtcagtgggagtaaagatatttttctaattccgtatgttgatgatatcttgcttgcaactaatgatcttgggcttcttcatgagactaaaaaatttctctctagtaactctgaatgaaagatatggggagacaactatgtgatatgatagaaatattcaaata

SEQ ID NO: 250817 - DNA, 401 bp, Glycine max
  unsure (1)..(401): unsure at all n locations
gggtatggtattgtaagtgacatccttgaccaaagtgggttcgaagcacataatcacattcgagaatgaaaatgaattgcactgtaagtattaatatattgttatttggtatgcaaaacaaattggatttgactttttctttttttttctagttcctaaatcggctaaaccgtgtttcgattcaaggtgcttcaaaactgggatgatacagtggatttgtacgctaaagatagatccactggtcatgaagatgaaactgttatggatgttgttgatgaagcgatgagtacaaatacatgaagtggaattcatgggtttaatagacttagaataaccaaactcttatacaaaggaatatgaaagggtcaacttctttggacacattcnacattctcacaaca

SEQ ID NO: 250818 - DNA, 386 bp, Glycine max
  unsure (1)..(386): unsure at all n locations
ggagacaatatctgctcgggcaacagtacaacattcttaaccgatcattanaaccttaatgagctcttgactcaggtcattcaaaccccacatcaacatatgtatttagccacactcatgggttatgattattgcatccaaaatcggtctggtaacactaatttaaaggctgatgctttatctcgaagatccgagaaaacagaagggtccatgttattattgtcggtgccatgcttggcatttttggaagaaccgaagaaacaattaactcaggaagcaactttcattgaattcagacagatcataatggcccattccgatacattccatggatattctggttcacataaggtaattgtgcatggaaatagcatttggttaccaca

SEQ ID NO: 250819 - DNA, 407 bp, Glycine max
ttatctctagcatgcattgttatgtggtctcgtcctttgtccacgaagccggaatgtccatatcaccttcttaattgtacacatggtgcactgcgcccccaaatgcgcgagtaagaagagataattttccgggctctcgtgtccgtaaaatgcattcatatcatgcatcgcataagcatctcttcataacatcataatggacatatcctgcatttgtccgttatcatattccagcctcacattttgcatgagtcatggcatcatcatgcatatgcgttcaacaaactttttgatctgcaaaattgcataccatttggtttcatgtgtgctcatccttgcgtgttcctctacaaaacaaatacaaagaaggtggaagcgtgaaacttcacactacattcttagttcat

SEQ ID NO: 250820 - DNA, 223 bp, Glycine max
atcgtgaaaggagagcattcttggagtcgtgaaatgcgtggctactagtgggacttcgaaatttcaagtctgggtggacttctttctctattaaatttcgtgggtatggggttttgggagatatgatgggtggttttgctaatatctgctgtgcgagattatttggaaggattgctgaaactgtgaaatgcacttgatggttaacaacccattgttaggtttg

SEQ ID NO: 250821 - DNA, 267 bp, Glycine max
tggtctcttgttccaaggccctggtggtaactatatttacatgtgtcagttcagcattctcctttcacatcgtaagaagtgctgatttgaacccttccttgactgtgtgggcttggtcgagttctgccctaatggcctgtacctgttcgtcttgcttcggtgcctcaacttcctcccctttaatggttctcaaactcgggagccaatccaaaccttgcatgtgggcttgcaaccacttacgagttccgccgatgggcccgttgatac

SEQ ID NO: 250822 - DNA, 446 bp, Glycine max
  unsure (1)..(446): unsure at all n locations
cttattaagntagtggaaattgattatttgttaagaattggacgtggttgagatgaaccaatataatttcttatctggttattttctcttatgtgctttaaattgactcaaggttcgaatttgatctttgcttctgaaaaattttgtttgttttacaaaatctaaaactatcatctaaattggcctatgaaaatttgatatttgttttcttagatactcatcattagacgataacatcgttattttctaaaaggttttaagtttaataaaaattataattcaatccctcttcttgtgatattcctttacaatattaaaatttatttaatttttaacttttttcttcaagaagggcctgtgattaaatgttagttaatttcaaagtcgagtgaaagataagagtgtattagattctcgnaagtcaatgtttgtgtagatcaatatgt

SEQ ID NO: 250823 - DNA, 374 bp, Glycine max
  unsure (1)..(374): unsure at all n locations
tgaaaatggaggacaaatatgaagaaaagagaggtttaagaagtttcttaccacagctttgagagaagaagtctcatgaacactattatggtgcttacaagaagaatgaaatggtggcctatcctcccatgaagatctcatgcgagaggaagaagaatgaggttccaggtttttcatttgtgaaagaaatgatgagttaatgacctaaggctagtgttaagctaattgacacatgaatgatcctttgtggcatggtacggcaaagggcctatggggcttgatttacacaatggtataactaanaatgtaaatccaccaccccatgatctgcaagaattttaactcatttttattatacatcacccccccccccc

SEQ ID NO: 250824 - DNA, 342 bp, Glycine max
atttgtaggttcttgtgttatatggtcttaacctgcgatttgcgcccactacaaaaaagcatttcaaataacaaaattcaaatctaaaaacccttttaaaattagaaccatgtgaacgtcaatagagaactctgttatcaacattctacagccacacatacaaaggaaagaagctttattaaggtgtgaaaaccagataattaattgaaggaaaacgtacttcttggttagtgttatatcgggtaacaaagtcaaatgaatatggggttacaaagtcaaatcaatgcaaatgcatatagaccaatcgcaaaaataactgggacccataaataagatactaat

SEQ ID NO: 250825 - DNA, 425 bp, Glycine max
tgctacttacattgtatctttagcacggcaataatcacattaatcactgtgcccacattatatcctttttccattatcatctttgcgccaaaccatacagccaaagcataaccacagaaaataacttacatatctgtgcctagaccagctccagctatgaaaccttcatgaactcctgatttgtaagcatctacaagaaatttgctataactagatactgcttgcttttccccagtgaatgatgcaacctggaaatatacacagggaaagaaaatatgatcatcatagcactgtcaagacataagcaacaagcaataagcacattctcaaccgagaaattattgagttccacagatatctacttaagttgtcaacaaacaacatacggttcttattgatccaatggtctgttcaactacatgtgc

SEQ ID NO: 250826 - DNA, 406 bp, Glycine max
gtagataattgtaccttgtggataatgtgtagtcttgtagatagttgaatacttgggtctaactgagcccttctatccatccatacaaagaaccgattcttgtgcaaagcggggtcgactctttaaatgacatcgtttgcaaatcgagatctattagagaaagtcatcgaatcatccttgattcctcgatttcatttcgctaatcatttggtaaaagctatgaaaaggtcaccccgtcatgatattccaagccagccttatcttctcttggatatccaaaaaggcaacattacattaatagatgacaatatattttgaataactaaatggttagagataacatatctggtgagaacccgactgcttatggctggacatctgtgctcttgtgtcatagctgacattg

SEQ ID NO: 250827 - DNA, 480 bp, Glycine max
  unsure (1)..(480): unsure at all n locations
tactatggatgatgtttctttggtcttcctccaagaagtaaaatatgatatggtgtttctttccttcacccttgagaagaaaaataaatgtctattgcttgagtgtctttgattctcagtggtatacactctgcatttggtattaattnttatatgagaatacagattgcgactggcttttgatgaattatttcatatttgtgctccgtattcctgatatttgaaatacgaactaatgatagcaaatttctatgaacaggcaatgttgcacttttggctctgatgaagtaactacagaatgaccatcttagacgaccaatcaacccacttactgtattacatgatgtatatatgtacatacggtttgtatacacaggaattttttatgatagaattgaatttagtaccagcaaatgtatgcaatttaacaacaacgtctggttatactatgcactagaatgatggcatttataaattttt

SEQ ID NO: 250828 - DNA, 350 bp, Glycine max
tcaatacctcccctcaagctatagcgtactaagatatgaacatgttacacataaacccttctagaaaaaaagataaaaaaatatatgtgtgactatgaacatgttgcaaataaacccttctagaaaagaagatcaaaagatatagtgtgactatagaatggcaggaccagactgctctatctggggctgttgaaggccaggatgattttctgggatagttgagggaccatgatgaatccatatcgattctcttggaatggtgtggggtggggttgattctctggggaaactatgaacacaatgggagtcagacaagattggtgcaatctaagcaatgtctcaagatggat

SEQ ID NO: 250829 - DNA, 338 bp, Glycine max
tcctgactcaccatataccttgacccattgtgagaatgtcaattcttaccctcggaagcaaaaaaaaaggggagagggaaaatttccaatcaaagaggaagcaaaaaaggagagaaggaaaatttccaatcaaaggaaaaaaagagaggaaagggaattcccaatcaaagagtgggagaaagcaaaaagaaaagaaagaaaattcccaatcaaagaatgggagaaagaaaaaagagaagaagaaagggaagaaagttcccgatcaaaaaaaaatatatatgcagaaaggtctttggaccggacaatatctgaacaatacagaattgtcaccaaatgaa

SEQ ID NO: 250830 - DNA, 283 bp, Glycine max
  unsure (1)..(283): unsure at all n locations
ttagcgacacttaaatactcaagctgctctanattacattgatgtttgtatctatgggaggaggttatatgtccattttgctttaaagagtaatgtcccactaatactaactttccaatagtttgccttcgcatgaatggcaccgtagaaacttgcctcaaagaggtccatgatagacaagcggtcgaagaactagttccgcccgtatcgacgtaccgttttgacgtgacaccacagcgcttaacctaaggaggcgtttccgacaccgtcctaggacaattac

SEQ ID NO: 250831 - DNA, 266 bp, Glycine max
taatctacttgaaagtcttacaattgctataacacttctattcccaattacggttgctgtctcaacaaaaagaaagttacttgtctaagtgtaaagacgggccaatcaaaaaaaaggggtgatatcggaatcaccttgaatgatcctggaagcttaatcattattctacaacggcattttcaaattaaaccagtatagagtccaaccggaaaagctattagcctgacaaaatcaatgaaggatcatcaaccaaaacctcacagtca

SEQ ID NO: 250832 - DNA, 311 bp, Glycine max
ttcataggagaaaaataatcctcagcttatcaagttgaaagaatattattcgcatcataactaaaaagatgactgaataagataaatagctgatatttgaataatattattaaatatttagaatactttgattagaaaataatgaaaatcaaaaaaattatatgtaattgatatattttaatcttaattagttgggttattccaattttgtgtatctcaagttccaccactggttggaaagttatttcgatcattcaattttcatttaaataaaagtgaaacttgaaattgttgtatttgaacatgaattc

SEQ ID NO: 250833 - DNA, 356 bp, Glycine max
ctatcacttaactacttccgcgaaagacgccattcaagatcaactgatgacaatcctcgattactgaaaggaggggaccccgcttaccacagctagtaactacgtttaaacttatatggccagcttaaattttctttgtaaagcttggctttgttttgaattataaacaaggatctttcttcatctgttcctggtctctacccattctcattcatttgcatgtttacttctttttctgaaatggcagatccgatgacgagtcccccgaatgtactaatacctgggacccgtctatcgacttcgagcaaaaaatgaatcaaacggaagatgaacgaaatgaggatgtgggacttccc

SEQ ID NO: 250834 - DNA, 301 bp, Glycine max
caagtccataaccatcaaagtctgagaagagtatgatgaacttaaggacgtccatatggccacagctgaagccttggaacgaatatgggaaatgaatcatcacgggtcaaatgcatgatcttcgaagatgtgaaaggaatcatcacgggtcaaatgcatgatcttgaaagacgaactaaaggttgccttatgtcgaaaagaaatttgtcccaacagttaagcgagactgaagggaatatgtgggccatcattgatatgtgcatagagaagctaaatctatcggcgactcacgagcaaaggc

SEQ ID NO: 250835 - DNA, 361 bp, Glycine max
tgactctcttcagtgtttcttctacaagctatgaggaatatatggagctgctctattggagtgctgtggaaacaatggcgactctactgtggattaagcgaaatttattttatgctttgaatggcgccgtatcaatatctcttgaatatagttatccctttgtgtacactggctcacagtgatatttatcatttccagtctccatataaatttcaactgtatgatggagcatgggttgcttgcgtttcctgattgtattcgctggatttactttattctagttggttgccttttcctaatacatttgctattttatttttccggtgagacattttcttcattgacatgtttacagggaaag

SEQ ID NO: 250836 - DNA, 366 bp, Glycine max
cctcttgattatgccaacctaaaaatatttaacacacagactctacctatgaattatgcaatacacacaactactcaattgttttcaaaatctcaattattttccaaaattattttaactcattgcacctcaagtgactaaacacatcaggttcccaccgtggaacccatcacaactcatcccgcattaactcgtcggctttaaagggtcttacaattgtgtgattgcataattcatagctcacaactcaatgcatacaacatcttaacacccgtgtatttcacaattcattacatacataatgtttgtcacttacacacaatctcatcacaattttcttaatcccaataaacaatttattacact

SEQ ID NO: 250837 - DNA, 343 bp, Glycine max
atgatgtctggacatttgttccaatgccagataacatgatcaccattggaacaagatgaatcttcataaacaatgtggatgaacaaggaaaagtagtatgctacaaagctaggttagtagctcgaggatataatcaacaaaaagttatagatttctctgaaacctctgttcatgttgctaaacttgaagctataagaatcattttagcctttgttgctcacaaaaacattaagctgtttaaaaggatgttaagagtgcctttttaaacggtttcattgaagaagaagcttatgtcaaaaaacctctgtgttttgaagatcatactttgtcataccattgtttt

SEQ ID NO: 250838 - DNA, 398 bp, Glycine max
  unsure (1)..(398): unsure at all n locations
tcttctctttaaaggaccataagacattactcactaatgttagttgcacacattcaaaaaggagagactactactctatttattgcgctttgccaccttttgttttggtctttttctatctttcacattctcgtgaatattgttatcgaataatgaattctgcggctttttattcaacactttacacattttgacactcaattttaaaatagaaaattataaatataatataacgaagccatatatgtataaaaaggtgagtgaaaaaaatacacaaaattgtgaanattagtagcaaaatgtgcaacaaaaaaatagtgctaaaatggtttgctagtaaacactactaaacaaagcgttttctacaacaacataacgacgacggttcgacaagaacc

SEQ ID NO: 250839 - DNA, 457 bp, Glycine max
atgcacatcttctttatattgagtattgtctctctaattaaacagaataaatgctacacatccccagtttgccagcaacatggcatcataattgtcagacatgcacaaaattagtcaaataaatctgaagcagtctataagagagctacgatctataagttggtcataacttataatcagcaagtgagtccaagagtgttgaactccaaatccgctcattagccaaaaactaaaatgggtttcctcatgataagaaagacatatgcagcccttcataaccctaatatgatactgacgatgagggacttgaagaataccatcatgtatcactctccatgaatcgatttcatgggtgttgttggtatattatataatttcatttgaattatctatatgctggtataaaaagaaaaaatactctcacatcttattatatgaatatttgtataattcttac

SEQ ID NO: 250840 - DNA, 242 bp, Glycine max
tcatcatcatcataaaaaacaatgtgcataatctaatatgccatctgatgaatacttattttcgtgattggaaccttgtcaactcttaaacgaattgcctcatccacagagtgcggtatgttgactcctcggagtttaagaatgacatacatatatatatgtatactatagatatatttatatacatatcgaaacagatatatataaacatgtaacaacatgcgtagtggctcctgaaatca

SEQ ID NO: 250841 - DNA, 403 bp, Glycine max
  unsure (1)..(403): unsure at all n locations
gcggttttcagagcacaagagcttcaagtatgtgctccttatacctccatataattttttgctgtaccttctcttccattgatgtttcttcatttttctacatgtatctcctcacatgtgttgttctaaatgttgttaacatgattctttatagtttccaccgattaaacttgctatagaagttagatttgattttctatggttcaaattccttgtttgtgttcttgaaccatgaattgtgttgagatacgctactttgagtttgtcttgtatttttgggctanaccctaccatatatcttacaaaatttaaataaagaaacctctatatctaatgactgtccctatgtttttgcataaatcatgcatctgaactgcacataattctatgtggtaattattct

SEQ ID NO: 250842 - DNA, 410 bp, Glycine max
  unsure (1)..(410): unsure at all n locations
cacacacacatctaatatctaagctcacctccttgagaagctntcttgagaagctagagcttatctacacacccctataatagctaagctcacccccatgacaaataaacatgataatacaaaaaaaatcctactacaaagactactcaaaatgccctgaaatacaaggctaaaaccctatactactataatggccaaaatacaaggcccaaaataagaaaacaacctattctactatttacaaagaagagtggacccaaccttggcccatgggctcaaaaatctaccctaaggttcatgagaaccctaaggccttctttatcaactctagcccaatcctcttggagcctcttgctcatggctctggtaactggtcctttcctaaggaggattgcatcatataggactat

SEQ ID NO: 250843 - DNA, 362 bp, Glycine max
  unsure (1)..(362): unsure at all n locations
tgaatgcactattcaatggagttgacaagaacatcttcagactgatcaacacttgcacagtggccaaagatgcatgggagatcctgaaaatcactcattgaaggaacctcaagtgaagatttccagattgcaactcttggctacaaaattcgaaaatctgaagatgaaagaggaagagtgtattcatgacttccacatgaacattcttgaaattgccaatgcttgcactgccttgggagagaggataacagatgaaaagctggtaagaaagatcctcagatccttgcctaagagatttgacatgaaagtcactgcaatagaggatgcccaagacatntgcaacatgagagtagatgaactca

SEQ ID NO: 250844 - DNA, 397 bp, Glycine max
  unsure (1)..(397): unsure at all n locations
tgggcaacttggtataagctatgcatatggcgctaactgattccttgagcaacgtgagcgctaagcgagtccttatcagctaagtgcatgctcctctgtacttaagatgcatcattttagctaagccggcccagatcccgtcttaatgagagatgcagctnttctgatctgtatacctcgctatgcggacttacccgcgcactaagccaaatctgtgtgctaaaaaaaacttgaatttcaaagttaggttaagcccatggtgccgctaagcgaccatcttcgataaaccaaacgtcactttgagaaagcaaaatggcttatgtaagtgtaatggcagttacactcatacttggtggaaactgctgaactgcctgcacactntctctcgcactcattt

SEQ ID NO: 250845 - DNA, 366 bp, Glycine max
ccccctcattaagaactaactcatttcttgctctactgcccttagatgaatacacctttgtttggatctctatttgggtcttaaccctctcatgcaacttctttacaaactctgacctagattccccttctttatgtataaaagaagtgtcaagcgggacgggaatgaagtctaccggtgttaagggattgaacccatacacaacctcataaggggattgcttggtgggtctatgaaccccctctgttgtatgcaaattctacacgatgaagatactcatcccaagacttatggttgccttttagaagagcccttaaaagggtggataaagacctattcactaccattggtttgccatcagtttat

SEQ ID NO: 250846 - DNA, 363 bp, Glycine max
agttctgagagatattgttgtgtgaagatttgcagagaagcgagttcgaagcggaagccgttctgagagcttgagatgagattgtgagtgattgtgagatcctagatgtgaaggagacatcctcaccacttgtgtttttgtagtctttcatcttgttcttctctttgttgaaaggaagtttctggactatggaaagctaaatcctctgttggatcttccctgtaggtacctgatggaaatgtatttctatctatgtaatgatgttttatgtgttctctgtttttcattccagtgtgcatttaccttgatcacgtatatgcatgctgttgttgggtcattcaatagtgggaactggtctgattc

SEQ ID NO: 250847 - DNA, 504 bp, Glycine max
tactcaagctgatgtcttaaagagatgatcctatatatttcactacagcttggattcttataacaaaggtgtcaatctcttttatcccactattcacaatctagttctagatatgcacacaacaacgcatatgaatatgctatcctttcaaaactaagttatcccaacacaatagccttttctttaagagttgaattcctgtgtcatttgatgaaacattatcaactgtctagctcagaacatgatttaacccccattcattcaaacacgactcaacaaattttgccatggcctctcccgtatggcttcttacatggcaaaaatacaaattcttttcgtgcaacttataatttttatctatgaagtgagctgtcaaacacatgtatcttgcattttgatgtgatgtgcaagcatcaatagcaagactaactctttgacaatgtattgaaagaataaacttcaactttccttcattgattccatagaattacaatttatgggata

SEQ ID NO: 250848 - DNA, 269 bp, Glycine max
ctcaccactatgatatccgtcgatgatcacattactgcttgcactaagctctctgtactatattgacgccgcattccatgccctgcgaactccttggaggtacctcgcgttggggtcactgaaaccccgtgcgatgaaaggcgtgaagctttactctaatggcgctcctctaatggagtaaccacactgccttatggcgagaacgggctattaataaatcaaccccttgttcccataagggaaccattggacatcttcgcatgaagaag

SEQ ID NO: 250849 - DNA, 291 bp, Glycine max
caccacttgtaacatttctgatctaacttcacttttgcaggtggagttaaatatctaatgaagtaagaactaacaatatttgaggcgcctacttctcttcatagggaagtgggttgatgcaatccctccctatgaaaggtaccatttatctagatccatgaacatgatgcttcaagataaatgggctttaactgtttgaagatgccatatggttttcatgaacctacaggtagatttctgtacccatgggccaaggttggggtatccttgccttcatatgaatgcatgttc

SEQ ID NO: 250850 - DNA, 418 bp, Glycine max
atgtgctacacgtaagtagacaatttattgtacaacggatctcgtactgactcattcttcaacattttcccataacattgatcagatttctgatcataactgggaaactgactgttgaaagggaaatcatgatggataaaccatgtaaacatgtggcaacggttcgcacaaaagatccaccatatcatctccactatcaaccaatagaactcgttctgggaggaaagcgtttataaacacatatgctaatgtcaatatcctattcccttacccactatgtgtaatccataccacatatttacatgctggtgactcacttacatgaccagtactcaaatcttcaccgtttattataagactcagttaaggtcccattctttgtgatagctcatatttttcaatcagaaatgacgttgat

SEQ ID NO: 250851 - DNA, 421 bp, Glycine max
tactaagcttctttctctatagctgtcatccatatactgatggacgaacttttgttgtgtataggtctctatccacccttctataggctcttttgaatagcaaccataaatcttgggatgagtatcttcctcatgtagaatttgcctacaatatgggggttcataaaaccactaagcaatccccttttgaaggtgtctatgggttcaatcctctaacacccttataccttattccactcccacttaacacttcttttatacataaagaaggggaatctatgtcatagtttgttaagaagtagcatgagagggttatgaaccaattatataaccatacaaatgtgtatgcaactaatggcaatagatgaagatatgagcctagtcttgtggaagcaatgcaatccaatgttattttgatgat

SEQ ID NO: 250852 - DNA, 259 bp, Glycine max
aaacctccatgcgtcctcttacaaattctaacaagatccccttatttttataaaaaactgccaaatggagggaagaggctatcggtgttagggaatggcccatatacaactcaaaggggactgcttggtggtttataacacccctgtggtagcaattcacttgagaagattccatcccagaattatggttgccttcatataaaccttatagggtgataaaaaccattcctaccttgttgaccataattgtggtgacaag

SEQ ID NO: 250853 - DNA, 392 bp, Glycine max
  unsure (1)..(392): unsure at all n locations
tgaatcatctaccccatttctgacagccagtgggtgagtcctgtccatgtggctcctaaaaagatacgcctcacagtgatcaagaatgaanaggatgagcttatccccactagattgcagaacagttggcgagactgcattgattatatgaggctgaattaggtaaccacataagatcattttcccttgcctttcattgatcaaatgcttgcacgcctggcagggaaagcccattactgctttcttgatgagtgttctggttatttacaaattcatattgctcttgaggatctataaaagaccacatttacctgtccctttggcaactttgtctatatgatgatgcaccttatcctatgcaatgcccctgataccttccagcggtgtatgct

SEQ ID NO: 250854 - DNA, 366 bp, Glycine max
  unsure (1)..(366): unsure at all n locations
tctaatgcatagtgaaaatctaattctagttntggattatataactggattagcttctctagaaataaagaatgaaccactattaaaagatcgtgtctgtcttcttttgatctgatatttttctctcattcaagtattgttcatgtttttcataaagattcaagttttataattgtgaaagaaaggatgttaatgaaggaccatgtttaaggaaggattgattaagtatcgattacatttgattcatatttgtgtttgtgatacaattcatacaatacttttttttgtaactctatttttaaaggtaaattgtgttttaaaaaccaattcacccgttttgatttattgaattccatcatctttttt

SEQ ID NO: 250855 - DNA, 372 bp, Glycine max
tactcaacttcttaatgctggaagggagatgttgcacaaataatcacgagatgacttttgtcaatgagaatgctccctgcgaccaggttgggaacaatactatatgggatgaaccgtagcagctgaatgcctctaattccacaggaatgaggagtttccctggtgattcaactacatcagaagttcacaggaaagaatcatctcatctcacagaacggcagaatcttatgacatttcagcctctaatcatgggattgatgatatggagcttcaagaaattaaatgttcatggaaatattttacttggatcatgccctatggatgcgtgaaaagcaaacttgacaaatccttgggctctcagaatggctatct

SEQ ID NO: 250856 - DNA, 397 bp, Glycine max
aatgatcatagtcattggcggatatattgacttctataactgctactaagcttgcaatggaagacattgtatatatattgatgaaatttgcattcactaacacaaatgtgtttaatttgtatgctcaaatctattatctcatgtgttcaacattgaaatatgaaatgtctattttacatcttttatatggcattatgtaaccttgtctggcacatcacacatttttctttgatttctcttggccatagattagacctgttttatataggtctactttgctgtagttaaaatccaaattatagttgcgtatgccatcaatgaactgtaaaactgcaattgaaatattgaacacatgtattttgcaaagcagtgatagcttaaataatggagtgataac

SEQ ID NO: 250857 - DNA, 320 bp, Glycine max
  unsure (1)..(320): unsure at all n locations
cacatgcgcacattgtatgccttcaacttgtcagcgaaactaaagatacagaagtatcatttggtaaatcacataattggctttcacattaacgtgtggcggattctgtgaagcctctcagatgattcgatggaagggaaaacgagctgattggggttagggttagggttgacagaaaccgataggtcgacggcaacgacgatggtggtggtgattgatgggcagtttggtttgctgctggagaaagaaaggagccaaaaccaataccaaatcggcgtcgtgcanggagcgatttaagatgacgagagtattgttgcaac

SEQ ID NO: 250858 - DNA, 138 bp, Glycine max
atacaataaatattttataaaagaggatctgtctctgcatcacacaaaacctgctcgcaaacaagctcaagagaagtttttttcacccgaaaataacacaacgggctcgaggatgttcagaacgcgacatatacgtga

SEQ ID NO: 250859 - DNA, 286 bp, Glycine max
tgttactcgttccgcaaagcttatattcatgtcctgctgaatgggcatataacctaaaccatacttcccacgatatccttgatattcatcaagctaggaactccaccgttgttttttcctaaaatcatcccgggtttaataccgttccccaacataattggggccatcattaccggtgaatcggacagacaacgttgcccatagagggagtcccagctgaaatgctgaccctcaaagactggaaagcagtttcttacgattcttatgcaggtttcacataaagcat

SEQ ID NO: 250860 - DNA, 186 bp, Glycine max
atattaattgcctaagcactgaagagctactcactaatcactgctatagcagatatataagatattacataatatggtatctaggcattgtataacaattcattcaaaaacatcacatctctaacaggcgatgcactgagagaacccctcatcatttgcccaaaacgtaacactgggtgaataaat

SEQ ID NO: 250861 - DNA, 359 bp, Glycine max
tatcgttatcgattacataattccttttgagacaatgtactaattttcaggagtacctactctaatctattaccaggtgatataactgatgacctcctcttaatgaattcagaagtgatcaagaacactctaatcaggtacattgagaatctaattgattacattgctcttgaaagttctcacattttttggaagaacactttaaaattacttctttgatataatcgattgcattgtataaatagccaccttgattcctcacttattacaacttcttaatgagctagaattacgagctattttttgtgagataaagaagaggaaaataaagagttgaaatatagggtgactcataaatt

SEQ ID NO: 250862 - DNA, 218 bp, Glycine max
tacgacaataaaaccagctgggggttctggccggagctttctgctttttcgggcataaaacagcccacggttaaagagtaccttttgacgtgggcttttgcggtgaattggccaggttataataatactggactatgtggacccatgtttggtgaaaatgcatttttgaaaagacttgattatttgggcggtctactgcttctgccctcaataactgg

SEQ ID NO: 250863 - DNA, 348 bp, Glycine max
tcttattatatacctaaagcagagtcttctcttctacgaactcttatcacaatcacatacaaacatagataaccggttctctctctttctctctctatcactcacttgttccatgtacatctgataacacctttcctgattctctttcgtggatgttgctatttcgaatgatgggtatgccctgccgctgttcccacacctgccacatcactgaaatcatcatcaccagcttcttccggcacaagtcttatatcaacaatttccgtcaattattccaaaaccaacctatgatcctttttcaaatgtgcccttatagatcgaacttggtcggagtaaacatgagcggta

SEQ ID NO: 250864 - DNA, 400 bp, Glycine max
  unsure (1)..(400): unsure at all n locations
acttcactgcttgaagtaatgcacgatctgcttgcagatgatatcacgttgncctaaagctgctatcaagccaagaagatattgtgtccgatgggtatggagtatcataagattcatgcttgccctaatgaatacatattgtataggcatgaattccacaaaatatccaaatgcctatgggtggggcatcacggtacatagtgaaagatgaagaagactgtagctctgattaaaactcaaagatgggccctccagtgaaagtgttgtggatcttccctcattccagtgttaagcatctttttgttaatggagaccacacaaatgacctacctggcatgaaaatgggagaaactttgatggaatggtctggcatccgactgattgctcgcaatggaaaata

SEQ ID NO: 250865 - DNA, 351 bp, Glycine max
tctttcagaatactagaatgtctgatataaattcattcgatcttgtgtggaataaatgcaactacatacctgtacactttggatttatcaaataattaaataatgggacagcttctcgactgttgggatgatctaaattcattataatatcttgatctaagcaataataaattgtcagggaagattccacaatccatgggtactcttgtttatttgcaagcttttggtttacaaaacaatatgttaattggagaactaccattcatgttgaagaattgcactcatttagatatattagacgtgagtcaaaatctgtcgtctggccaataccctcattgataggagaaagtc

SEQ ID NO: 250866 - DNA, 290 bp, Glycine max
ccgttgcacacagtgaatggcagtgcgtttatctgtcccgcacgataaattgacatcaatctccggacatgaagtattagttttaaaacatctattctcccatacctagcagcaaccatttaaagaagttcggtgctcaagaacaatgtgtgtggacccaatctggcgaacataccagatgccaacttcacttattagagaaacatccctaactaaagctagcttaaaatcttcaaaatcatcggtagaagcaagctcgaataagcaggaaaaagaatctgcagcatgaa

SEQ ID NO: 250867 - DNA, 440 bp, Glycine max
taacaatctcccgctttgcatatttgtctaaacatacttagacacttcctgagcaggtacgagctgttatgcaagtgggatcaacgactgtcattatcagagtaatcaagcacagcggaattggtaatggcgacaacaaaattctgcaagttgcaagtcggttccaagatgtcaagacatctcacatgacatcaactttctgcttttgctccacctgtctccatgctcttactgcagcatcttctatcagctactaaacttttccatgatgtcaagacatctcatgtgacaatagatttcactcgtctccatgctcttactggcacatcttctatcaactactaggagcctacttgagtcatcatcagcagcagcattttacccctcataatcatgtacatacaaattcccctcaaaatatggttcatgcatacattgga

SEQ ID NO: 250868 - DNA, 411 bp, Glycine max
tcttagtctcagatgatgcagctgagtttgtagctacctcatgcactcctctaatgactatggcatcatttctggcgctaaactgctgagagatggaagccatcttctcaattaaatttctggcttcagcaagagtcatgtctccaagggctccaccactggcagcatctatcatacttctctccatattactgagtccttcataaaaatattggagaagaagtgttctataatctgatggtgggggcaactggcacatatttctaaatctctccatactcatacggctctctcactgattgctaaacctgaatatctcctgaggtgggcttggacaggaaaattcttaaataccttaagcatcactcggtgactgacatgatcaccatcttcactcttatatagaaccta

SEQ ID NO: 250869 - DNA, 414 bp, Glycine max
cttgcatttgtttttttttcctatgcacattgtagttattgtatctacttgcccttcttatccacttgcttgactactaaagctctggtggctgtttcatccccacataagatcttaattcaaacgttgtatattgttttcgtacttgtactctgtactaggtatgaacttcctgctaaattgctcatatgcttatttgtcatatatatgagccaatctgatcatatttactctgatttcagttggtgtcatttgactcttgtggatgcttttttagtgtagacccttattgacatggacaaaattaactaaatggttgatcattaattgaacatattgagtggcagaatcagttattgagttgtagaatggaaattcattttgttattttcataggagtattcttatgttatt

SEQ ID NO: 250870 - DNA, 386 bp, Glycine max
ccttgcaccccatttgagctgaaagtatgattgtttgattgaaccttgagcctataccctttatctccttctaccttgacttatgttgtaggagagcatcattcataaaaggaaattttggttcaaagcaaatttgcccaaatttgggggaattatggggtgaaagcttgtaatggtaagaaaagagcatcacacacagtcatctaataagcagtaagtatttaaaaaaaataaaaaataatctgaaagtataaaataaaagtgtgtgtgctactatgtaaaaaaagaaaagctaagtgcggaaagcaagtgattagctggataaaagaaaaaggtgatctatggatgaatgtgttagtcgtgaatacaactaacttttgtgtata

SEQ ID NO: 250871 - DNA, 441 bp, Glycine max
  unsure (1)..(441): unsure at all n locations
cacatcgttcgcgtgtatgatatccactccacaatgtttgcagttaatgagaccttcaatcctattacacaacgtggcggacaaaagtgggcagttaacttgaatggtcattattgtcaatgcagaatgtatnttgcgcttcactatccatgttaacacattattgcagcttgtggttacgtgagcatgaactattaccaaaatatagatgttgtttacacaaatgagcacattttaaaagcttacttcgcacaatggtggcctcttggaaatgaagcggctattccttcttctaatgacgcatggacacttatccctggcccaactacaattcgtgcgaaatgtcggccaaaatcaacaaggantaagaatgagatggattgggtcgaatcatctaaacaccgacaaaaatgttatatatgtggagcataatggcataac

SEQ ID NO: 250872 - DNA, 372 bp, Glycine max
atatccactgctcaaatctatcttttacatactaatgtctacatctcggcttcttttaatggatcttgcaatagatgctcactttgaaacataacccttgacctgtttgatttttctgatcctcatatcagtgagattattattcacaaagtatatcgaattactatactattgtgtgtatatgtgacatcaaacagtacccactcaaaattaagatttgaaactacttacatgtatcaaacataatattgtaaaggatgatgagctacgtatcaacctatatctgaactttacagctcggagtaaaattaagatatatctaaatcctaattatctggctgcctgataaaggtggcaacttacaattaaagg

SEQ ID NO: 250873 - DNA, 349 bp, Glycine max
atatatttgagggactcatggtcactatgaatgatctattccttgggataaaggtagaggtgccatgtattcatagcccgtacttatgcatacaactccttatcataagttgaatagttaaggggatgaccaccttactgttcactaatataagcaattggatggccttcttgcatcaacacagtccccatatcccaacattataagcatgacactcaatttcaaaatattgttgaaagtttggcaacgcaagtatgggggcattaattagctcttgcttaagaacattgaaagcttcttcttgggtttctccccatttgataccaacaattttcttgagcacttcatt

SEQ ID NO: 250874 - DNA, 431 bp, Glycine max
ttagcgacactttaatctcagctgtccaaatgcaaacaataataattgtcaactcggttattctaataattcaagacgctcgaaattgaatatagaagctctcaacaaattcagatgacaataactctctactggaaagttcgactgaatcttgtaatatatcgagacactcaaaattgaatacagatactctaagcaaattcaaatgacaataacttttgactcggatgttcgattgagtcattttataatttgagacgctcaaaattgaatgtcagagctcttaccaaattcaaatgacaatatctttttacttggaagtccgattgagtcccgtaatatactatacgctcaatatgataacaaaagctctgaggatatgcaacgaatggaactttgactcatatgtgcgacggatcattaataattca

SEQ ID NO: 250875 - DNA, 495 bp, Glycine max
tagtgacatccatgatttgatcttaagtgaagatgttctcattatagattcacgagaatcttctagtcatgttctcaattcagcattgaattatataggcagaggatagactacccaaaatggtctgaatggtcgatgtagatcatattcaagagggaaaggtcagacaaaatcttgaagtgacattatctattggaatgttgacaagagaggtcactttaccaattattgcaaggtaccattgatgaacatgactcacataaataataagcgcgatgattatgaatccgtaaatgcagcaacttatgaatttgatgatgcattaatttgcagcatggatagtcctattgattcatgggttatggactcatgtgcgtcattccacaccactacttctaaagatttattgtctaactatatttctagaatggttgggaacgtttaccttgcagatggaaaatctcttaacattgttggaagatgtgatattgacat

SEQ ID NO: 250876 - DNA, 388 bp, Glycine max
acgaatcaaaacataataattctatggaaagattccataagttacatatcgaacttaagactatcaagaatcaatttgtgacacaaccaatccaaatcccttgttttttcaagtgctaattgcatactccttttctgtcaacaagttaagcactcgtttgtactgtgatcaatcaagttggatttaaatggggtagggctctattgatacgtcattacctacaattcgaattgcctaaacacctttgatatgagggtttgtgtgtgtgtgaattcattacggaatctcatcgtaagtaaattatatcaacataggaaaatgtgacatgattcttcataaaataatgatctcatcaattggtcaaaactatgttgaacaatatctttga

SEQ ID NO: 250877 - DNA, 317 bp, Glycine max
ctctgtttatttctcctatagtggagtatgaatataggttggatactatagatacaaaaactgcattctcttatgaatgtgaattattactgtgtgtatccattaatccggttaattttgtgctaacatttttccaacgattaatggtaaatatgaattgcaataccaaagtgaatgcaattctgcaaagtattgctatcctgttaatggtaaatatgaattccaattgccttatattgtgtctttgaaagaaatggtttgttgagatgttaatcaaacggtgacaatatagactggaattcccaatagtggagata

SEQ ID NO: 250878 - DNA, 451 bp, Glycine max
ctatatatactcaagctttgaatgatgggtagacagattatgttattctgctatcttccttgcaatcctgtacatggtagactaagagagacctaagaggatgaataattcactatcatagattgatagctcgtgtaatggaggacatatctaggccatcaaaagtgagctcccatatatcaattacatttacaatgacattatccaagggtgctgcttcaattctcatttcaagaaatgagagatcaagcgagacaaattctgagaggtgagagattttagaaggaataacaccactaaattcagagggagatagatttagatgagtgagagccacatgatcaccataaccgttaggcattggagaatttgaaaaaatcattgacgccacgtttgagttttaatatgaatgctttgaaaaagtggggttggatgaaatcacttgaagaac

SEQ ID NO: 250879 - DNA, 270 bp, Glycine max
atgcttataaaatattattaacttatttcaagttgtctgatatttataacgacaatctaatcgtattcggtcttgtaatatagaaatgatttatatgaaaacatgtatttatgataaacattaagtgtttaattaaactatttatctaagcacataaacatcacatttaaaaattaattaacctgtgaaatcaaccgattaccagactagtctttcatttttgtcgcgttctaataatcttcaactaggagagcggttattaagcctttt

SEQ ID NO: 250880 - DNA, 433 bp, Glycine max
agcttataagaacaaaattgcctcaatcattttcttttatgcatgtgaattacgaagcatcaacaataatcaagccaaggctattgtgccagcaatcaatgtggcaaaacacaccaaatgattatgatgatggatggctcacattctcataaaggtaaactcatcactctcaaattgagctttcacaactatcatgacatgtagaggagaataaaggatttcaagtcacaaaatgtcaagaacttttattttcaaaacaattacccatttcttgaacatatcctataattcaaagaaaaacatgcaaagtcgtacatgcacacaaaattgacccaaaatattaaactaaaaatccgatgaaactaataacattaacaaattaacacaactaacaaattttcaacaccgacaaaactatcgaaaacaaaaaaca

SEQ ID NO: 250881 - DNA, 427 bp, Glycine max
  unsure (1)..(427): unsure at all n locations
agctntccaaaacctggttagtagtgcacgctctctcactctctctctccaacacatacagaaactactattcttcttcttcttcgctcacgttgttgtagttttaagttgtaacctttgttcttcttccaatatcgctgtttatttggttaagcactttgccctaatagcacagcttgtacacaacgcttccttaaataacaaacaataagaataagtagtgcttgcataacttaaatggtttctttatattaattaattaaagatgatctttttattggttttatggagcaaaaaaatgtaatagataaaaaataaatcctcacaataattattaactattattattaataattattggacaaaatttagatatagttttttcttacactaaaaaaattctgaaaccatttgtgagagagactaa

SEQ ID NO: 250882 - DNA, 381 bp, Glycine max
cttaagcgactgcggcatgcaagctcgtgacttacttaacataagacgaccctttttgttattaaagtcaacccaaaatatcagataagatagcgcacatcttcggcgaatactaaaactttcaaatgccatctcataaaccatcacttgagcttctagacgtgcataataaaacataataatcgctaaacgtgttaaaacattgcaccggcgagccagatggcaacataaataaaccatacatgcctaaataaataacgggcgaaaacaaacaagtgaacctccctgggcactaaatataaactcaacaagttcactgcgcataaagagtagcacaatgtaacgggcctcggtgaaataagtgagtaacatacactgccc

SEQ ID NO: 250883 - DNA, 400 bp, Glycine max
  unsure (1)..(400): unsure at all n locations
agctntaacctcatcgtctgtcacaggctttatattttggatctcaatccaatcctcgggttcgaactctcagccacttatgatagccgccgatgatcccattactgcttcccctaagctctctgtcctttcttcatgccgcatctcatgccttgcgaactccttggagtaccctcgcgttgtggacactgaaaccccgtgcgatgaaaggcgtgatgctttcgtctgatggcactcctctcatggggtagccaagctgtcttatggcgaggacgggattataattaatacaatcccttgttccatcaagggaacatttggacatccttcgcatgaagatagaatccctgatcttccttccttctagcgagggaacaaattaacagacgcccctccatgc

SEQ ID NO: 250884 - DNA, 129 bp, Glycine max
agacatattggagcgttctgtttgaaagctgaagcattcaacttcctaatagattcattttgaactttggcatgttaacaaaaagttggtcctgttcgtgtctcgataaacatatgggaaaatggagaa

SEQ ID NO: 250885 - DNA, 428 bp, Glycine max
gtcatcaagtgcgtatcagagcacagagcttttattatgttctccttaaacctccattaatgttttgctttaccttctcttccatagtagtgtcttcattattctccatgtatctcctcacatgtttctgctaaatgttgttaacatgattctttagattttccacatattaaacttgctatagaagctagatttgattttctatggttcaaatttcttgtcttggtcttaaccatgaattgtgtgagttatgttctttgagtttgcttgttatttttgggataaacctatccataaattctacaaaaaattaagtagaagaaacctaaaatctaagtgactgtcacctattgagtttgcataaagcatgttagcatgaactgcacaaaaattctatgtggccgaattattccttgtccttggcaacc

SEQ ID NO: 250886 - DNA, 391 bp, Glycine max
agcttctcaggatgtgagctcacattttatatttgtgtgtgtaactaacctctatctcctaaaggacactctctcaaagaagctcctcaaggaagttttctcaagaaagcttctcaaggaagctacctaatctataaatagaaccatgtgtaacacctgttgtaactctgatgaatgacacgctcgtgagacacaactcaaagtccaaccttcctccctttatctttcttcaataacgcgctccccctctctctttctctacctctctctttacctccattgaagcatcctctacaagcctcttatccaaggctcatcttgtgggagaagctacttcttccatggcttattccctactggatggagcctcctctcaccatcttcttttttt

SEQ ID NO: 250887 - DNA, 243 bp, Glycine max
ctcagctttacaattctaaacctccataactcatgtgcgactatatagtggagagcgctcccacctagctcgtggttcgcgaggaagtactgtatgggatatttttaccctcctacacatccttttcaccaacattctgaaagaacactttgttgtattatatacaggacacgtagttgtcggaagctctgagaaatcaagattgaccaccgccgatttctagacactatccacgtgttgtat

SEQ ID NO: 250888 - DNA, 455 bp, Glycine max
  unsure (1)..(455): unsure at all n locations
atccttaagtcacctgaggcatgcaatgcttgangattatggcgtacccatcttatgttgttctatgtggcaggtgggcaatggtgcacaacaagatttccacatccacaatgcgcgcataaacccaccatcccctgtagcccaccttcaactgagctcacgtactcccacgtagcccatatcctcgttactctgaacaccgggtccccatcaatccctccaagcttgcccacatcaaacgaatacaacattcaacagcacaaactatcacagccaagataacagagcaaaggcagaaaactctgccaaaacaccaaccaaaatcacagcttttctcacttaaagaccccagtaacaattccttcgttccaattcgttaaccgctggatcgactccaaatttttactggaggtctctagtacataagcctacattttgaccggtgggatctacta

SEQ ID NO: 250889 - DNA, 333 bp, Glycine max
atacttgcaacaccactaaacactaacacatataaatcatacggacatataagctactccttacacaccaagcctattaaacaccactagcaccgccagaaagcaacttataagtcatagcttaattaccgagaattctttacacccataaatgcgcaggtatgtaattttcggagaccttcgaggattgttcgaaccgaaaaacggtattacaggcttctacgccaaccgtctttcttgttttatttcaccttgcacaaagaaagagccatagcactaaatacgcctatcatcagcggaattaaccattgggtagataaattcttggcatga

SEQ ID NO: 250890 - DNA, 338 bp, Glycine max
  unsure (1)..(338): unsure at all n locations
aaatgaataacgaacgatgaatctttgcagaacggccgataattttcgccgtattactcacggaaaacgttacgggagcacctcggattggatattcttcccggaaataatcctcctcagcatatntccaaagagagagaagtgccacaggggctgaaaccttatcttcttcacttcttccactatttatagcacaataggggagaagcttgccgtcagctcgcccacgcgagcaagggtgcttcctccataagcaacagcctcctggaggaatcctctggagggcccaagtgggcctgattgctatttgcacaccctgctttactaaatgcaccccc

SEQ ID NO: 250891 - DNA, 398 bp, Glycine max
gtttgcgagcgtggatcatatatcctatctccgattgcctatgggagagttctgtcaggtagtcccgaagaataccggccttacagtgatctattatgagaacgaagagttgatttctacccgggccaaacagatggagagtcttgcttgactacaggaggctgaaccaggttacctaaaaggaccatactcccctgccattcattggtcacatgcttgaatgccgggcatgtaaatctcactattgtttccttgatggtttttttggtatatgcgaataactatcgctcctaatgatccggaagagaccacattcacctaacccttcggcacttttggtaataggatgatgcctttcggcctgtgcaatgcccctgtaccttccaccgggcatgata

SEQ ID NO: 250892 - DNA, 418 bp, Glycine max
  unsure (1)..(418): unsure at all n locations
agcttcacggatattgataatnttgagtctgttgtttttttatacaatggttcattcaccttcaccaataaattgtaaaatctttgagtatcttcctttggaggctcttccttattatttgagtttggaggatcaaatgcctgaggttgcctaagagcatcacacaccatgtcttgcattaacataaattgttcatgttgggccacatattctacactagttgaagcatccatgtaactgtttccctccttagaatcaacatacaacatgtcttcaccatgacaaatccaataattaggcttgaacccatttttgtaaaggtgaatcttcataactctatcctccaaaatcctagtacaatcgcatttaacactaggacatctaatcccccgtcattgtcataacaatcttcgtgact

SEQ ID NO: 250893 - DNA, 412 bp, Glycine max
  unsure (1)..(412): unsure at all n locations
catgcaagcttatgctganatattacatacacttttttctttttacataatcaaccacagtagaacatttatgacctctccagcaacagatacaaccctggatggagaaatcaccctaatctctgatggtctagccctcaccaacaacaacagcagcctgctccttccttccaaaatgttgctagcccaagcagaccatacatttcttcaccaatccaacaacaacaatagccccagaaacagccaacagttgaggcccctccacaaccttccctcgaagaacttgtgaggtaaatgactatgcagaacatgcagtttcaacaagagaccacagcttgaataatcagatgggacaattggctacacaattgaatcaacaacagtcccataattctgacaagctgccttccca

SEQ ID NO: 250894 - DNA, 433 bp, Glycine max
  unsure (1)..(433): unsure at all n locations
agcttcctttcancaaagagaaaagaaagattatttatttctaaaatacaagcagtggggatgtctcctccacctctaggacctcacaatcactcacaaaatcatctcaagctctcaggacggcttcctcttcaagctttggtctctgtggatctttacaaaacaaaatctcttaaactctctgaaactaggacctttctctctctagaactctctagacatgcagaagcttcaagaataggccacactccctcaaaaatctgatttcaagcttaaataggtggctttgttcgtgctcgtgcgcttaacacaattctgaaccgcttaacccgcattaatgaatttcggcttagggcggcttttctcgctcaacggatggactgaaacggcgcgcttaatgggatggcccttcattcaacgaacatgcacaact

SEQ ID NO: 250895 - DNA, 432 bp, Glycine max
agcttggcatcattgatgattgaatattattatgaattatggtaccgttttctgatattttctgttacattcatagcctgaacatattgaccatcgatttattaatctatatctatcttctatatatatatagggaataccaagctttggtgtacacatttgttatcccactttacccttattactacctttataaatatcttctttactcctgtaactgcactcttcaaacaaccgatagcaaccgtcacatcttgcaaaccacccattattatttaacttctattttttttttcttttttaattttttaaagatgacataaaggcacggagtgcatgttttgtcccagtgctaataaaatacattcacataacagtctatgaatgtctttaaattcactgatattttctcattagcagttacaatttgca

SEQ ID NO: 250896 - DNA, 256 bp, Glycine max
  unsure (1)..(256): unsure at all n locations
ggacccaagcaccgagcagcgcnggaagacacaacaagcttttttattgatacaaaccccaagatagcgccggccccgcaaaagaaactcactgcctaaggaaaaacgggcaataaagaaagggccgatacaagacccagcaataccaaaccaggaagcgaataatactccaccgctggtgcccaagaaaagccaagataaggccaccgaaaagccgtagctgacgaaataggaggcataacaacctccacatgtt

SEQ ID NO: 250897 - DNA, 387 bp, Glycine max
aactatgaataataagcgttgatgttgggttcagctctacttaatctctagattgctaactccaaaggtactctcagtgtaatatcagcaggaattacaaccgagaggtatttctattgaatctgatccctctagaattacgccttatcattattactatcttggaatcgatgagttattcttgatagagaagactggggatcacaacatataaatggcaatagtaaccctcacacaaggataaagtttactgtttggagttacatgttgagaattggtatattttaatgtgacatatatagcacattattaatttcactcctctaaaattacgatggtaaaataactaatcctagtcgttgatgataaaatcaactactgatattt

SEQ ID NO: 250898 - DNA, 413 bp, Glycine max
gagctcgagatgatgaagtgttgaagggtgtatctttctgtttttattgttgaccacagagaggtacctggagatatgtcgcgggggtcaagagaccttgtggacgtcaggtggggtgctattgcccaaaaccaatcttgaccaatcccgacccaacccgggcatattcggtcagtgagaacctgtgatgtacctaagcatgcgagctcctggcagtcaacagataaaaggaaaacaagaccacaaagcaaggaggcttgtggcggctggccagctgtgaattttgtgtaatatgtgagatatggcctctgggaatcgattaccacgggtgggtaatcgattacaaggcttaaaaatgaagacaggaggctaaaatggtctctggtaatcgattaccaagggattgaatcgat

SEQ ID NO: 250899 - DNA, 319 bp, Glycine max
tgctcttacaattaagtgatgtacgtcggacatcagaacatcggggcaacctatcatcaagcgatgtgagctctgttcctccatatgatgcaccacaaattcgtagtgtttgtggacgatatgattctaagtccaaaaccaaagaagagcatctaatcaacttacggaagttgtgtgagaggttgcgatagtaccagctaaggttgatcccagcctagtgcactttccatgtcaaatctggaaaactgtagtgtttcatcgtatgcccaaaagggatagacgttgatcccgaaaaaggtaatagcattcttcgaaatgc

SEQ ID NO: 250900 - DNA, 412 bp, Glycine max
agcttataatatatcgatacgctcgattttattttggaaactctcgggaaattcaaatagtcataacttttcacacggatgcccgattcgggcgcataatatgtcgagaggctcgaaattgaacaacgcaagctcttgagaaattagactggtataacctttcacccgggagttcttgttaaagtcacatgggtataactctctcacactgatgcccaatctaggctcttaatatatcgatacgctcgaacattaacatcggaaactctctataaatcccaatggtcataacgtttcacacggatgttcgacttaggcgcttaatatgtcgagaggctcgaaattgaaaacggaagctctcgagaaagttcaatggtcataacttctcacactgatgtccgattcgggctca

SEQ ID NO: 250901 - DNA, 243 bp, Glycine max
tattatgcgccggaatcagactttcgttctattattttgggcatatgaatttctcgagagcgttcgctgctcaatttcgagcgtctcgatatagttctgggcggtaaatggactttcgctcgacgggtatgaccatatgagattttcgagggctttcgtgtgttaatatcaggcgttttcgataaatatatgcgcctgaatcaaacttccggttcgaaaagtatgaccatatgaatttgtcga

SEQ ID NO: 250902 - DNA, 378 bp, Glycine max
tgaattgaattattgaggagaaggtatcagttacactggcattttcctattaaaattactacaaaagtaaatccacaggcccgcacttcattttagttatatataaaaaacaaaaacaaaaaacttaaatcagcttctaatctgtatagttttatgattaaaaaaattagaataaattacacggatactcgttgaggtttattgatattacacttgatatatctccaacatgatatcttctatttcttgacattattttgagttcttaaggggatcggtgtcacgtttttatacctaagcggatcagtgtaacgatttacacataaaagagaaattaatataacaaaagtccaaaaataactgagttttgttttaaga

SEQ ID NO: 250903 - DNA, 425 bp, Glycine max
agcttgaagggacacccacattttctagttctattgtctcttatgataaactctcttttcctacacttatattcgccactcctttcacaaccaattaacacaaacgtactccttcctctactacctgtgtttgtgtccgaccttaaaatcaccgccacaaattccgtttcatgtgccacggattgagccccccgcaaaacatcctcttggcactcaaacacctacaaaatccacataatttaagttttctaccagtattcattttattaaatatgtgacaaacattaacattataacctgagaagtcttgagcgcatccgaacaatcaacatgtggttcatttgccccacatgactctgcataatcataattcatatacgctcgttcagacattatttcatacatccactcatcttcatccatct

SEQ ID NO: 250904 - DNA, 430 bp, Glycine max
  unsure (1)..(430): unsure at all n locations
gcttagactgagttcagcctaccatcctcagactgatggtcaaactgaacggaccatttagtcattggaggaccttttaagagcatgtgtcttagagcagaatggaagctgggagagttttcttccattgatagagttcacttataataacaattttcactctaccattggcatgattccctatgaagctntgtatggtagaagatgtcggacacccctatgttggttagagcccggagaaggcctcaccttatgaccagaagtggtacagcaaaccactgagaaagttaagttaattcaggaaaggatgagaactgctcagagtaggcagaaaagttatcatgataagaggaggaaagatttggaattcgaggttggtgatcatgtattcttgagggtcaatccgtggactgtggttggtcgagcattg

SEQ ID NO: 250905 - DNA, 443 bp, Glycine max
atagtctattataatctattatatgggccttgttctatggtaatcgattacagggagtagtattcgattaccagattctaaaatatgggatttcaagtgaacaatcacgaaaatcaattatttgtcacccgcaaaactacacatttattataaataatcataatagacaatcgtgacgaacattataaacaatcaaaatagacaatcatcataaataatcatgaacaataattagcaaacacaagcacttcactcatcataaaattaatcaatcatgaaagataactatcaaacacaatcatttttcttaatcaaaggaaacaatcatcatatacaagcataatctacagccatttaatgccaattattataaacaatcaaaatcggtacgaatctatattatttatgtctatgaagccttaatctcttctaatatcatagaa

SEQ ID NO: 250906 - DNA, 422 bp, Glycine max
  unsure (1)..(422): unsure at all n locations
gctacatgttaaggtttattgaatcnacacttattttttttgatacacaatcgcagataattgagggaaacacttttttattttacatgctccctttaactttgctgtgtgaacctatatattataattcacacttgagattcaccctatgcttcattttggactttttgaaagtagaaaaacaaccaagcttttatctgttgagttttttacaagcattacctagttactattcataatggacgtttttcaaagtaattggatattgtcaacatgtgccaataaattgatctccttcctgttttcttttccctcctacgataaatcttttagttcaatgtatatttctgtgtttagattttagtcttattctacaaaaaatggaggatgtgtaaagactttctgctgtgtcatagctagtc

SEQ ID NO: 250907 - DNA, 454 bp, Glycine max
atggcatgctaatcgaccatttgtataatgttcccaccttatattctcagagatctctcaattatcgagttcaaatattatctgtgttaatactcaatgaaccatcatttacatttactaataacgctctcgatagtatgatggaaaaaagagtttataaatcattcttgaaaacagttgaaatctaatattgagtgatacttaatatgaaacattgatcaccaaagagagacgatttgactgatcagaagatattgatgctgaagagatcactacgtgggattacaatttcgctgttattccgccagcataaaaagatcttgggagtgatagataagtctgacaaaaattaaatgtgtataatatactcctctggaaggtgtacatctaaacgtatttcctttgatcattaaaggcagtcatacgggtttatctttatggaacattaattacg

SEQ ID NO: 250908 - DNA, 381 bp, Glycine max
ggacctcaagcgaccgagcagcaactacaccaaaatggagacaacattatttgtagatgggtcacacactgtcatggcaaaaaggctcatataccctaatacaccttatgttgaaccccgctttattcacgtaatgaacaaatggccatgctaatctatttaaaaccatccggattggcagatcaacatcatgcaaaacagctctccgtaacccttatacacagtgacgaagacctctaatatatcccctatcactgcagtatacaaatacaaaaaaaaaactcaattatataaagaataaataactattttggttcatgactgttaaaacgataatattttagaccttttgaaaaaacagaaaaaattattcagtcttcc

SEQ ID NO: 250909 - DNA, 249 bp, Glycine max
ttaaaggatgttccacatttatttccatgacacacattcaacaatattgatttgtacagtttatgcaaaactggtcaccctgcacccctgtggacactcaagcgtcaaattttaatggcatgtgacactatggccaagaatcattttcccatttaagtctacctagaggttccaaatatcgtatttatcactcatgcattatttgagtcattcgggtgctcggataatttctcaccattcacctttcgg

SEQ ID NO: 250910 - DNA, 422 bp, Glycine max
  unsure (1)..(422): unsure at all n locations
gcccgagtcattcatccctatgatatgttgttgaagtattggcgatcagaattgccattccttggattatagggttgaaccaagctcatgctttgacaaaaaggttcatcaagtcaagttgaaatatggaagtaaccgtcttgcaaaattggggcaaaagatgaattgagtcacatcactgcttcgcctactgccaaacatatttaggattgttgatgtccttgttacttccagtttcaccttgacaaagatgtcatggaccatgttgaaaatctaaattgattcaaccctatatcctgcgtaaaaattcgcaatacttcgactgtacatcattcgcatgcatccatgcttntcattggttgcatggctcattgcattctttccttgaacaataaaataaaataacatgaacttatcaaaaa

SEQ ID NO: 250911 - DNA, 408 bp, Glycine max
agcttatttacatcatatataaatcaaaggcttttagtttttgtgaataaaattccgatgctgaaaatgatagactactttaataaccaaagcctccatctagggcccaacatgtctgtgcagatcttcgttcacattataccattttgctcggcaatttgatcacatgaaaacaacaataatatttagtcatatgccgcaggaaaaatcttctatgttggtgtaagttgtaacatttaatagacaataaaataacttttttccgctgcgctaatcacgcttccgaatccatctaattaacataatagtcttaattgaactgtcttccaaatcgtttgaaaggatattcaccttcttatccaattattaggccccaggcaatttccttaacctctatatatggtcctc

SEQ ID NO: 250912 - DNA, 424 bp, Glycine max
ttttacggaaggatagcaatagcttgatactttgatgcaggcgaaatggaagggtgtaaaacgaacaagtagcgcagtaaatttaaagaaaactacataggggcaaaatcgtcattacatatgcattaaatattattttatttctagttattattataaaatgaaatttatttttacttgacgttgctataaaattataattatctttttatcatatattttgtaatacaaattaaatgccatcatattaaatattttatatttttctataaaatatacaaattaattaatttttatgatttaaattatactaaattggcacacaaattattatttacatttacatgcgcgtaaaaaaggaattacaaatattagtcataattatgttcactaatcatttatctataataatatcactccattt

SEQ ID NO: 250913 - DNA, 405 bp, Glycine max
  unsure (1)..(405): unsure at all n locations
ggatcttaagcaccgcggctgcagcttaactaaggttcttatngttttttgttggagcacttggactctgccttgtgtacttctacttgctgatgcgagacaatcacacatgcacgatggcgtcattgtgtctatgacctactgattatcgacttatcgntattcagtaaaacaacaaaatatatactttttgttcttataaaatattcacaatttagttttaccctttacaacacgttttgtctgaatttaacttcttaagacccaaatactgaatttgtgacctatgtgtctaactctcttgactcgatgctgacatacatagtaaaatttccatcatcgctattaacctggacattccggtttatggggcctctacgtgatntctatatgatactctcgtta

SEQ ID NO: 250914 - DNA, 422 bp, Glycine max
  unsure (1)..(422): unsure at all n locations
agctatanggtgtgagctagttataaaatactatccacatttataaaatataagctaacattcctaaatgtttataaattaatatatagttatcaacaatccccaaaattgtagttatcatatatcttgtgcagtatttattttaactcataacaacagagtatctatagatcacccttaaaagtcagtatttgtcacattatcctatatgtgtaacatatagattatataggttaatgagtaaatggaaaattacccatataaattatgaatatgaattttcagttttaagtttagttcaatgtttcatttacaagatattttcctaatctatgcatatttatcatgtgtatctttggcgtataattctgtgccttttggtcgaaaatcttatgacccatgttgtgatccttcagtttacg

SEQ ID NO: 250915 - DNA, 396 bp, Glycine max
agctttatttgatcaagattcaagaatcttttatgtttttctattttgctaaataataggtttagcacgtacgctggactccttatttctctttcttttgagtctgaacaagaagcaatgatttttttgttgtaaatatcgcagatattttagggtgtgcaaaaatatcttcgcattttgatattttttttgatatagttattcaattcttacgcttttgtatgtctccctataagcttgtattgaggatatactcatatattaaaatcctttctatgacaactgtctttattttattctttatattttgggctaaataataagtttagaacctaaatgtagcctttctgtaggtaaggctgattacacttacccttcccttacccacttggcacc

SEQ ID NO: 250916 - DNA, 269 bp, Glycine max
cccatgtgctgttctccgcaccaaaaacgagggcagaacggggcgcaagattattttctaaggacaggggccggcgataacaaacccaaaccgcacaggcaaggcgtcaaaccggggaccgtacacgaacagaactcagatcaccaagtggaatggaccagcaccgggcctcacaagaaggacgagcggcaatcccggaataaccacatacagatacggtaaagggcagcacagggccccccggaaactaaacgctcgtggatgccccc

SEQ ID NO: 250917 - DNA, 405 bp, Glycine max
  unsure (1)..(405): unsure at all n locations
tgcgcatatttcctacgaacgttcacttgctcaagatatatctataactaagaaaaatgcgcccatatactaccaaagtagctgcattacccagattatgtacacgtacttccaaaggcttagcattacatgcacacgcactctgggttaatatacatacatgcatactcaaagcatttggggtaccaataaatgcacatgcgctcatcttggtatttctaatacctattcatatacaaaacttaatgatgaatcttgactacctacgcaataaggtgctacatttcatgctttttatntcaagttatttgctcctaaaaccacatgcaaattcaagcttatttcctttgctgctaaaatggtatcaaaaataaggatataattctttgcaataagcttcttaca

SEQ ID NO: 250918 - DNA, 408 bp, Glycine max
agcttgagacttaattggcttgttcttcccataagcagtagtcagcaatgcactctcacccatctccattacaagcctttcttcttcctgaacacacatggtcattaattcattgatagaccatttatctttatgtgtgttgtaggaaatcttaaatggcccatattcatgcggaagggtgttcaaaatgaaatgcactagaaaggactcagacatatcaacctctagtttcttaagttgagctgaaatatctcgcattttcatgatgtactcacgcacacctttcacactggtgagccgaatagaagaaaacttcatgatcaaggtgcttgctaaagtcttatctgaagtgatgaactgatcatcaatggccttaagcaagtctcggaccttttcatgctggtcaac

SEQ ID NO: 250919 - DNA, 398 bp, Glycine max
cactgaatggatccatggacgccccataagacaactgtatgccgggtagatatccatcactctgaatgtagcttggcacgtatgaagccctatctgtactgggagacgatctctccccttacctctcggcagctaccgtgcgaatgcacagaccaccatggaacttggtcttagatgggaagcgttaaattgaaatttctccaacatgcttattgggcatcacgcttaggcttgagccattgtcgatgagtactttggccataacaggtttcatgcatttgactgacatatgtaaagccctgttatgtccttcttgaggggatttactcttcagcgaacgtgaagtaatttctagctgggatgttattgacattccctcaagccttctatggagatgt

SEQ ID NO: 250920 - DNA, 433 bp, Glycine max
aactgttagaactcatgaaattcttattatacttttatatacctcacaggcagatgtattaaaatcggttcatactagccaattaggccagtcataccataaccctacatatggtcaattcgcaacgtgtttgatcggagatgtattaaggatagagtgcgtcacatggctttcatgatcaagctctttcctgtgtgacggctgcataatttatttacctattcaagttgaaccttgtctattgaggttttcaaatgttaaatgtggtgatgtatcaccaagcccaagaaatttatctcgttgttctgtttatagttattggcacaagatattatatattggcccaaacttcataagctaattatcatttatgtataatagatgggacatacttaaatagaatgtatgataaatcatcttttcatactaaact

SEQ ID NO: 250921 - DNA, 396 bp, Glycine max
  unsure (1)..(396): unsure at all n locations
agcttgtagcaaattaaaagacaaaagttntttactacgatggttgattgagtcccgcaatatatccagccgctagaaattgaatgttgaagctttgagcaaattcaaacgacaatatttttttactcggatgtctgattgagtcccgtaatacatcgagacgctcgaaattgaatgttgaacctctgagccaattcaaacgacaacatgttttgactcggatgtctgattgagtcccgcaatatatcgagacgctcggaattgaatgttgaagctttgagcaaattcaaacgacaataactttttactcggatgtctgattgagtcccgtaatatatcgtgacgctccaaattgaatgttgaagctctgagccaattcaaacgaccataactttt

SEQ ID NO: 250922 - DNA, 449 bp, Glycine max
  unsure (1)..(449): unsure at all n locations
ttaagtcacctgcggcatgcaagctnngtgtgaaggtcttttccataataggattgctcttatctctctctcaaaaccctcttcatgtcttgccaattattaatcaacggccatctcatcctctcaacatcactcctcacttgattccaccgcactaaggcatatccctcaaactccatggaggccaatttgatctttttctcttcattgtagntgtagcaagcaaagactttctcaaccttcatctcccactcaagatacacttccgaatcacaagtccctttaaaagtagggatcttcaccttcactccctcaatcccttcctctctttgtccacctccatatcttctatgatttcttctctccctatacctctcattcctccatcctccctcatcctcttcatacggatcatcttctccatgagaagaattagatggtcttacatc

SEQ ID NO: 250923 - DNA, 157 bp, Glycine max
cctagaaaataactgtaaaacctagaaactaccctaaagttagaacctttgcttccttgctcagcatttcctccgttctctgcacacaaaacgcaggcaactcatacctctctcaggtcgttacgcttctcccttgattctatgcacatcatgcctt

SEQ ID NO: 250924 - DNA, 430 bp, Glycine max
agcttgaagaggatgctttaatggaggatattatatagagaatggggaagcactaaattaaaggaataaaagagggagagaagtggaactttgaagtgtgtctcataagactttcatttatcaaagatacaacaagtgttacacatgcttctgtttataaactaggtagcttccttaagaagctttcttgaaaaaacttccttgagaagctagagcttagctacacgcacccctctaataactaagctcacctccttgagaagcttccttgagaagattcctaaagaagctagagcttagctacacacgcccctataataactaaactcacctccttgagaagcttccttgagaaaattcctaaagaagctagagcttagctacacacacctctctagtagctaagctcacctccttgagatgagaagct

SEQ ID NO: 250925 - DNA, 395 bp, Glycine max
  unsure (1)..(395): unsure at all n locations
agaaactaacttgngggttgaaaacttacgattgtcacgtgctcatgcttcttttgttagccgaggctatacgagacatcttgcctaacaaagtcaggttcacgataactcgcctgtcattttcttcatgctttctatcaaagtgattgatccacgtatgattgatgagatggaaaatgaggccgcatatatactgtgccagttggagatgtatttccccgtgcttctttgacattatgattcacttgattgtgcatctggtcagagacatcatatgctgtggtcctgtttatctacagaggatgaccccgttgatcgatacatgataaacctacaatggtatactaagaatctatatctgccggaatcatctattgttgagaggtacattgcat

SEQ ID NO: 250926 - DNA, 422 bp, Glycine max
  unsure (1)..(422): unsure at all n locations
agctatatcttcaaatgtactttgccacttatatttagctgctcaaatcgtttcgatatggttttcatctccccaattatggtcacctcaacctcacataatccttgatctgaaaaactgagcctacgccaaaaaatatggattgtctctagtggtatggagccaacaacatatttagacaactcacatgcacatggaagaccatgggtagtcctcatgacacatccacagcgtgaagggtttttgcctgtataagctacatactcacactcagcagcaatttcatttaaagtgtaccttgataccatgccaagtagttttttgtacaaggtaactttaaacacatgtccaacgacgtatgtacttgtctcanaagatgtacaagtagattttttgtacaaatagttctttatgtggaatca

SEQ ID NO: 250927 - DNA, 172 bp, Glycine max
ctaaatatgctccattttttggaattatataccattttggtggtcatctgaacctcatttttaagctattatatgaacctaaaagccttgtcttaaggcgaagcctaaaataacaatgactagaaaaaatgtatatttaagcaaaatttattcctagataaatctaggtaaa

SEQ ID NO: 250928 - DNA, 408 bp, Glycine max
  unsure (1)..(408): unsure at all n locations
gcttataaaattacttgaaaatcaatttctgatcatacttaaaaatgattccttagcacaagcactacgtaattntttatcatactgctaattctatttgaagcatttctttctatgtgagacgatgccgcaagcagagctggaaatgaggtaagactttctagagatagccttcctaactaaatcttttgatgggatcttctttagctgaacctgagttcgattaaagttggcctgcacctaagaataaccatttttgacctctcccattgttcgagctacttcgtaacctctccttcaaggatagaagctagaagcagatagcagccatatggataggtattcaatcgcttgctttaaaaggtatgagatngcttgtagaagactaaggtcgacaaatatggaaag

SEQ ID NO: 250929 - DNA, 365 bp, Glycine max
ttatgacgaagcaagattgattcaactgacgttctgttgatttcaaaggcgatgaccaatggctctatagtcaagaacactctgtgatcacaaagatgatgatcctcagaatcaaagaatgtctccacattgaatcaagaacacttcaaggtttaagaggaaacttgatttcaagaatcaatgtttaagattcaagcttccaagaattaagatcatgattcaagactcaagattcaagaatcaagagaagacttaatcgagataagcattaaaaaggttctgtttcataaactgagtagcacatgaatgtttctcatacacttttacacaagagtgtttactctgtggcaatctactaccagtaa

SEQ ID NO: 250930 - DNA, 125 bp, Glycine max
cacttaaatactcagctttgggggaatttactgcttccaactgcattttcaacgatctgcttctttattttcagattgtgattggctcttacagcacctattgtcaatgatatgtttttaatgcc

SEQ ID NO: 250931 - DNA, 359 bp, Glycine max
gccttattttgctgtctttatgcgcttaaatcaactcatcttgtgggtatattatcgtcgtgatactaatcatactatatttcgcaaaagtaacttggtgtccattcaggaaactaaataaaggacatgcctcggaagaacttcactgagtttttattttctctttgaagtcatagacccttataagtcagatggttggacattcaaaaaattgctataatctttcactttgcttcacaactgtcggaggatgtttggtatgcaataatgcgtaccattgcccctcgagagatctactccatgccctcgtgttggtagccttgatttgtcttactgaaacattacgcagaaatgctttt

SEQ ID NO: 250932 - DNA, 456 bp, Glycine max
ttaagtcacctgcggcatcgcaagcttttacatagtccgcctttgcttgaccttctttatgcttaaaaacagaaacattatgcataggcaaacgatcaagaggagttagtgggttaaaaccacaaacaacttcaaaaggagaacagttagcggtgctatgaacaactctattgtaagcaaactcaacatggggtaaacaagcttcccaagtttttaagttcttccttaaaactgtcctaagcaaaagtcccaatgtcctattaacaacttccgtttgcccatcggtttgtgggtgacaagtggttgaaaataacaatttaatgcccaacttgccccacaaagtcctccaaaaatggcttatgaacttagagtccctatcactaacaatgctccttagcaaaccatggagtctcacaatctccttgaaaaacaaatcaaccacatgggaagcatcat

SEQ ID NO: 250933 - DNA, 430 bp, Glycine max
  unsure (1)..(430): unsure at all n locations
aaagtntgcaataaacaagagagcgtggataacttttatatttccattattgtttctacactcccattattattctaacgctcacaatccggtatgggtttaaaaccggtcgagtcatcgggttttcacaaacccgtcgggctatttcgggtcgcatgcatgaatggtccaaatgacgaaacagtctgaatatagtaccgagtttcgattggaccggcgcgaaccggattttacagattgtgcacccaagtgtttatttatacatttggaccaaaattatattaatattaggtcatgcgaaaaaattccaaaataaaatttattccttttaatgattaattttataacctcgatatggctttaaaaaaactacataaaatatattattttccataatacaaaatcctattaataaagggattctattttt

SEQ ID NO: 250934 - DNA, 404 bp, Glycine max
  unsure (1)..(404): unsure at all n locations
agcttctccctttntctgcttctagagctcttttccctaaataggcactatggctactctggaattttgtgccctggccattctgtacaagtgtgtagaagctaacatagaaggtgtaccctaattctacacaagacaggctttaaataggctctgaattcaaaacgttgcgcttagcgccaccctcacgcttagcgtgagtaaggggaattgggcttagcgccagtctcgcgcttagcctggctaaaggcacctgctgcgcttagtgcactaatctcgcgcttaaggcgcgactttgatactgatgctctgccagattctcctttgcgctaagcacgttgaagctgcgcttagcggtggtgtcataccctaatttcatccgggaaccatccgttgttgggatg

SEQ ID NO: 250935 - DNA, 430 bp, Glycine max
accgcagcagcaactgaccaacaaaaaaaacatccctatgaaggttatggagctgcgccactccatatgattataactaataccttactcaacaaggacgtaattgctgagatcgatcaaactccagaagggatgtttagtttcaacattggatagcaccaattgcgtgaccaccttcgaatcacaatattgcagaataataaaacgaaatcccttgtcccacccaaatagcaaagctgccaagatgccccacaacttgggaattaaggcattatcacttactatattctcggcaaaacacgaaaaccaatccccaaaagagtgacttatgaacgcatacaggtttcttttttctttctctacataatgagtcaagcaaccgttcataggcaaatgccgacaaaaccaaagtaacatggaaacataaaac

SEQ ID NO: 250936 - DNA, 406 bp, Glycine max
  unsure (1)..(406): unsure at all n locations
agcttgttaacaagcttgaaagactgcaattctatacctgtcaagggtatctctcgacactggacaatacttgtccatgcttaagggcttgactgactctccatcctcctacttgtcaaggttactacccccgacacgggacaatctcctttgacactagacaacctttttcgcttgcaagccggctcaaagctttggatgcttatgtattgtccaaggtccacaaaatacacatgtcatgctacgtgacactccaagacacacgtcaaccctctatgtcagtcttggcataggagcacagacgtttaacccgtagtagttggctccccaacagacaggttatctctaacctcttaattattcgaatatatcggcatcttcatatntcttggcagggattcaaagc

SEQ ID NO: 250937 - DNA, 415 bp, Glycine max
  unsure (1)..(415): unsure at all n locations
cttaagtcacctgagctgcagctttgggggcgaaggacggctttctttatcacnagcgcccccagactgagcaagcgcccaaaggggcacgcttatgcgagctttccttcataatttggctcttaattcctcttgctcacacacctagaggggttttcttgagcgaagcatgttaatggctcctcaaaatttctttgtcttggcttgcttaaacccacaacaagtcgcggcgcttaagccagcatatcaccacttttgatttctgactaaatacctacaaaaaaaaaattcacaaaaacatcaagaaatcctgactaataagtatcctaaaaatgatatataatcgcctcacataatgtgtagattttaatcatatttggcgattaccaacactccaaacctagaaccttacttg

SEQ ID NO: 250938 - DNA, 418 bp, Glycine max
agctattcaatcaatctgtggcaagctacattatttcaactgcccccatcaataatcaaagattatattttccccatgaccacgcacctagtatgaaaaatgttctccctttgagtttcatctctatccttacacacactccctcattaacctcctaaccatcaaaaggtcaccttctgggggttgtacatcacattcaccttcactctcactagaagaactagaagagctagaagaagatgcactagtgatatccctattacccaacacaaccatagtccttttgttaggacattgggaggcaatatgaccctttcccaaacacttaaaacatttaataaaactcgcctttgaacaagtgggagtagggttagaattatttttaccaaaggtagcaccttttcatgaaatttgaatg

SEQ ID NO: 250939 - DNA, 284 bp, Glycine max
cggaccttaagcacctgagctgcagcattcactacaaactattttttcttttaaagatacgacccctctcgatgtaccacttgatcattgagaacaaagctaagattcttcatgtactctaagaattttcgctcgtaaacaaaattagattaactccaaagctccttgtaatttgtaaaaaaaaaaaccccttctcaccttgatatcgtatggaagaaaacattatattttgcattgatcacaacaagtccataccatattcttaacatgataggacatcatca

SEQ ID NO: 250940 - DNA, 431 bp, Glycine max
  unsure (1)..(431): unsure at all n locations
agcttctcaggatgaatntgaaaacctggttcgtaatgtctacgtaaaatcgcgaattatggatcagtatgctgactggaaaggcgtacgttatcgtctgggcggcagcactaaaaaaggtatcgattgttctggtttcgtacagcgtacattccgtgagcaatttggcttagaacttccgcgttcgacttacgaacagcaggaaatgggtaaatctgtttcccgcagtaatttgcgtacgggtgatttagttctgttccgtgccggttcaacgggacgccatgtcggtatttatatcggcaacaatcagtttgtccatgcttccaccagcagtggtgttattatttccagcatgaatgaaccgtactggaagaagcgttacaacgaagcacgccgggttctcagccgcagctaataaaccgtttggatgc

SEQ ID NO: 250941 - DNA, 360 bp, Glycine max
gacttataaactagtcttactataacacttcttaattaaaaaggatgtagaaactagtcttactacaacgtttcttaattaaaaaatgatgttaaaactatgcttgttgactttggtgacgtatttctaaccaggtttctacatctggcaataatatagcaccgatttaaaaaataaaaaaacaaagtctactacaaccgttgtttatggaccgttgctgaaatttttaagattcaacatcattataattaaaaacggtcaagcaccgttgttgaatcgcgattctgaccgttttctagtagtgcaatgagcttcaggtatattggatacaccaacgtacttatctgtttgaatgccttg

SEQ ID NO: 250942 - DNA, 419 bp, Glycine max
ctgagctgcaactggcggaaaataaagatgtttttatctgagcggaaactaaaatataattttccctatctattccacaacggacatacgaacgagggaaattatttatgcgagatacactataaaacaccccccacaacatggaatgaacagtgaagaaaattatcctttccattcatttgttcggtttaacttcttaaaaaaattataacaaaattgtttaacccacacggaaaaggtctatacctctgttattcctttcggcttttattttgggtacccatagtcttcttcgttgaacatacctctatgggtagggagttgaataattttctggtgtactttccctacctctctatcttattgccagtcaaataagaatgctcacgtgctcatacatttggctcccaccatgacac

SEQ ID NO: 250943 - DNA, 435 bp, Glycine max
  unsure (1)..(435): unsure at all n locations
ttaagtcaccgcggctgcaagctgtctgattttcctattcttattattcntgtacaatatactcgcccttcatttaactgtctttgggcttggcggccgcgctcaacaaagtactttcgacacctactatacgttgatttcaccaatgctggtatgggaatgttgcgacaatcctttaaaaccttactgatacattctgagaggttggttgtcatgtggccatatcgacgtccttctttatcataagccatcgtccattttttctttgaaatgcgatcaatccatgttgctatggctggactcagttgacgaaatttttctaaattttgataaaaaaaaatgtgcgtttaaggagtgtaggctgcataaaattagttatgaataacaattttaagtatatatgaaagctaaattaacctgaccactccatatgaa

SEQ ID NO: 250944 - DNA, 99 bp, Glycine max
gatggaggggctcacccgttgttgcaaaatcaagaggtataattcttcgttacgttgttacatagtcactgaacatttgatgattctagggtatttatt

SEQ ID NO: 250945 - DNA, 213 bp, Glycine max
  unsure (1)..(213): unsure at all n locations
caaatgtgcggcaccaatgaantctatgtggacactcctagcaccatattctaacaaaccccctgaatgggaaatgagtgatcttgttttaatttgctttcatttgcgtaccctcaactattactattattaccacggcaattctgaaaatcgagtgctgtttctagcaaaaacttgcaaccgggaaaatgtggagcgagcggctatcaaatt

SEQ ID NO: 250946 - DNA, 204 bp, Glycine max
ccaccgctgaatccttggaactataaaccaacaatgcccgaaaggaagaacactggcctacaaagttttgaggggctttatagggcagcaatagtaagcctaagcctccaaaaggtgaaaggaatcatcactggtcaaaagcatgatcttgaaggacgagtttaaggcttaccctacgccgagaagaaatttgtcccaaccgtc

SEQ ID NO: 250947 - DNA, 293 bp, Glycine max
tatccattgtatagattcaaactccacctttcccattgaaagtcaatgctcaaacacagttgacgcttgcaaactactatcctctaacacttatggcttacgcactgactgctaaatctgcacataacatttatgtggaactgtgatccacgcgcaatgattatatatcatctatagcgaatctgcctaacagcatgtataagcaagtactaaagggaatgatgatttgtgacattctgaacctcttgtctagatatggactaggacactgcaacgaacaatgctgacagcca

SEQ ID NO: 250948 - DNA, 280 bp, Glycine max
tccatctttattgaaacaacacactcgacagacagcccatagaagtaatccatgaaaaaacaaatatcgtatccacatctaaaactaccaaaaaaggcactggactattcgatccaaaccagaacttctgaaaataacgaaattcaatgcctctacccaagaacaaaattctgaaaataatgaaattaaattcgggcatccaaacatacaattgtgaaaatgaaagaacttcacatcaagcatacgaaattcgtagaagcctccaactacaagtttaaat

SEQ ID NO: 250949 - DNA, 422 bp, Glycine max
agcttgttatcgtgagacatcatgggcattttattttttcatatgtgggtaggaaaaattcaccaaattgatagagaaaaacctaaaatcatacatcataggcagataaggcaggctaggtcccaacattatcacattcttgagtttatttcttttatcttttatttttatcttttattttttatcttatcttttcttatctttatcttaatcctttatttttcttatcttttacttttattttcttattctctttatcttctatctttatgaacttttaattgaaatcttttattttcatcttttaatctttatcttatctactatattttcttatctttattgtaaattctctatctattgcttttaaattgggtttgtattaatctaagtacaaacaaaatctctatggattcgacact

SEQ ID NO: 250950 - DNA, 269 bp, Glycine max
gcatgcatatagcaaaagtacctcacataatatatgtaagtatgcttaggcagcaagaataccttgcatacgcatgtatatagcacaaatatttcacaaaaatatgcacatgtttaggtagcaaaatacctcatgcaaaaaataacaagaccaacaagagcaacaaatatatcttttagctgaaaagccaacatgcttttgagaagagataacttcccacttttctttgaaaaaaaaactcactgaacataaccacgttttgaaagaaa

SEQ ID NO: 250951 - DNA, 333 bp, Glycine max
tcaagggatttacccgtgaattcacggaggcaatgaaaaagagagggagcccattctccgaatagccaagaaaaggatgtttacactgaatggtttgatagagcttgaaaggagctttatggagaataaagaaaatggggagtctaattaacgactataagggagaaacgtactctgagtgatctataaactttattctaaagttcaacagtgttcaatgctctattataaactagagttccttgaaatcttctaagaaattccttaaaacttttggaaacttttgaaagtgagctatttcccccctttaaactagctccctcttaacgctta

SEQ ID NO: 250952 - DNA, 435 bp, Glycine max
agcttcatgcttttagctagcactagcaggaaaagataggtgtgtcctttaaagcataaaaccttcagaatgatatttatgcaaagcaagaatcaagttgtcaaggtcctcctgtacctccacctaaatacaagttcttttaggggaaagggagttataaaaggttctaaaactaatttacaggaagatactgcaatgttgttagagataataattaatttgctttgttttcatgcttagtaagctataatgaaaacatttacaactttgtaggacaaattcaacttcatggccattatattgtgggttgggggggggtagatttttcaacttacagatttgtccatcccagcaaggactaagggatcacattctatgacaccataattcttcaaaatcttttgcctacaaatatgtaacagttattcaaaaaat

SEQ ID NO: 250953 - DNA, 441 bp, Glycine max
  unsure (1)..(441): unsure at all n locations
ttaaaactgagctgcacttccaaatcaattattcacattttttttttattctatcacagccaagataacagggcaaaggcagaaaactctgtccaaagcaccaaccaaaatcacagcttttctcacttaaagaccccagtgacaattccttcgttccagtttgttaaccgttggatcgactcgaaaattttactggaagtctctagtacataagcctatattttgaccgttgggatctactagcaaacatccagaactcattctgcactactctttccacaaccagcaaatgcgtatgcattttctgcacaaagccaaaattctgctgttcctatttgacagcaaaattctgcataagtgcagattncgaaaaccacacttcccctcattcaatcttgcgccaattatatccttcaagtcccaaatcatgtattaatcatg

SEQ ID NO: 250954 - DNA, 427 bp, Glycine max
  unsure (1)..(427): unsure at all n locations
agctttgatagtntcatggattaatggattgtgtctttgtctaacgaccttgatgttgatttcactcgatggttaagcttcgatgcttgctttggacttttggaagaagattgagaaaaccgaagttggtcgaagatttctagaagctacaattttggccgatgaatctccgacatgtttagatatctttttcaaactttattttcatttcctttgtgcaaatgtattatcttctccaagttggaagtgttttcaacacctccaaagcttgcggggggatattagagatatatatagattagtctagttagttacaagttaatttagttagttacaagtttagttatataaggttccatgtattcatgtgaaaactgatctgcttattttgagcattatccaaagtaacattcagtttctcttttct

SEQ ID NO: 250955 - DNA, 375 bp, Glycine max
tactcctacagactgattagtacttgatgatattttttctctctctataagccaagactctaatgtgcacataataaagaacagggataatgtgaaattgctaattgaagttatatttaaaactatacaagtaattttatattcttttagaggagtgcgtttatattcttaaacttaaaaagtgtgctatttataggcacatgcgaataataatgattcttttttatttaatttttttagcaccagacaagttattctcaatattttgaatataatattaatcaagttggatgacgcgtgaaataaacagcatctcataaagttttcctctataatatataaatacttaatggtattatactgttttaaataaac

SEQ ID NO: 250956 - DNA, 432 bp, Glycine max
agcttgaccaatcccaacccaacccgggcatattctgtcagtgagaacctgtgatgtacctaagtaggcgagctcctggcagtcaacagataaaaggaacaaagaccacaaagcaaggaggcttgtgtggtggctggccacctatgaacttgattgatatgtgagatatggactctggtaatcgattaccaagggtgggtaatcgattaccaggcttaaaaatgaagacatgaggctaagatggtccctggtaatcgattaccaagggggtgtaatcgattaccaggcttataaacgaaggcagcaggttgtggaggcctctggtaatcgattaccagtctgtgtaatcgattacacagaggaatgggtcactagtaatcgattaccaggtatgtgtaatcgattacatagtgccctttttcaggctttcat

SEQ ID NO: 250957 - DNA, 371 bp, Glycine max
agcttgtctaaattgccatgtctgggttagttttacatacccacttctggctaaggtccttgtgatgatgtttgagacgtctatatgctcaaattgctgatggaaatctgttctagatgaagggtctaactatcccaagggtagaaagtgagaatgtgatgttatgactggaaaaagagagaaactttcaaagttggaaggcttactctgaattctgtggtgaatggatgcttaagtgactttattctacccttgaatgtcttttacaacctgtgacaaatgtttggctgatctatagagaaaaacagatgaccaaagtgtacaaataagccttgctacggcacatttgggtgttgaagaatcacatttta

SEQ ID NO: 250958 - DNA, 82 bp, Glycine max
tacctatctaaagggcaccctctcaaaactacactgtatggtatttcttcaatatgatattgggccacactgaccatacatg

SEQ ID NO: 250959 - DNA, 383 bp, Glycine max
  unsure (1)..(383): unsure at all n locations
agcttgnangattatggggcacccaacacatgtggtactaatttgcggncggacgacggngcacaacaagcttttcatatccacaaagtgcgcataaacccaccatcccctgttgcccacctccaactgagctcacgtactcccatgtagcccatatcctcgtttctctcaacaccgggtccccatcaatcctccaaagcttgcacaacattcaagcaaaacaacattcaaacagcacaagctatcacggccaagcaaaacagagcaaaggcagaatactctgccaaaaaaaaaccaaccaaatcacaacttttctcacttatagatcccagtaacaattttctcgttccggctcattaaccgttggatcgacttcgaaaatt

SEQ ID NO: 250960 - DNA, 381 bp, Glycine max
  unsure (1)..(381): unsure at all n locations
ggatcttaagcgactgagctgcagctngaatnacactaacggcgtttttttttttgtgactaccattaaaaaagcgtgacctatggcttacactcttatttgcaggaaactctctattagtgataaatatgggtgcggccaggttttgattatttaataaaaacaaaacttgcgtcataaatgatgccgctgtgaataccacatgcctaaatggatccgatcggttttattgcctgtaatcccaacactgtgcagacaagtggcagcttacacaaatttagatctacgaaaagaagtttgcagcgtgacctctttagcctgacattattgggaactggcattggcttgcaacattaattattggctaattacacaaaaccc

SEQ ID NO: 250961 - DNA, 362 bp, Glycine max
tgcaagacgcacatatatttggtaacaggttatagaattattatagaataaaacaaataaatcagagttaattccaattcgttgatttatacatgtgcttggattggatgttttaaaatctaaaccatctgatagaaccaggattatatagcccttgtatttgttttcccatcaatgatactctttctgtactgccttcatacactttagagtatcataatccatctgcatccttttgcattcttaccagatgtatgtgttatatggcgatcgtgaatgaaaaaactaattgctaagctatttccataaccaagatgctcccaaacgcaacctacgatgtaaacacattagtagaacattca

SEQ ID NO: 250962 - DNA, 402 bp, Glycine max
  unsure (1)..(402): unsure at all n locations
agctntgagnaaattttggcgcctgatatatattgtcttctttccatgtttaagntagatgtagcttgtgtttttctcacagataaaacatgtgtgacgtcctttgacactatatccactcaaatttccatatccaggaaagccattaatggtacaaaatatcatatcacgcaacctgaaggtctgctaaagattcctatcccacacatcaaccccatcttcccacaattttctgaaatcttcaatcaacagactgagatacacatcaatgtcattccttagctgtctaggacccgttatcatcatacaaagcttagtgtacttttgcttgatgcataaccaatgggagaggttgtaatcatcagcaaaataggccatgaaatatggttagtgcttaagtta

SEQ ID NO: 250963 - DNA, 291 bp, Glycine max
tataaaagcaggatccactagatcttcatctatatgactcgtgaagacaagtttagcatcaaccggtagaactactggattgctttcgcgcctgttgaacacttttaagagaatctttgcgtatttagattgatgcatcattgtaccatactcgagtacttcgtaactccttccttataagcaattgatgagaccacggtcactcatcttaattcattcatcctctgaccgtcgaacatgttaagggcattccccttgctgcacgaatggcgaaataccagcctataacac

SEQ ID NO: 250964 - DNA, 348 bp, Glycine max
aaattagaggttatctcttttatcttagtgagagtgatcctcctaaattcttgagtgattcaagaacacccttgctgtatcaaaggactttcacaaccctttgtgtgttgccctcgctggaaaaagagattctttccttcctatcatctccacccttgttctttaaaccacaattccagaaaatccacctctgcccaaaattatctcgtgaccataactcccattttacacactcaaattaagtgattcttgagcctaaattgaatttcaaaatgatacctttcacctcgttttggaatcacctcatatggagccctgtagctctccgtattgccattctatatttct

SEQ ID NO: 250965 - DNA, 434 bp, Glycine max
  unsure (1)..(434): unsure at all n locations
agctntcttgaganaaattccttgagaagcttctttgagattatattcttgagaagctagagcttagctacacacacccctctaatactaagctcacctccttgagaagcttccttgagaagcttcctagagaagctagagcttagctacacacacctctctaatagctaagctcacctccttgagatgataacgtagagcttagctacacaccccctataatagctaagctcacccctatgacaaaatacatgaaaatacaaaaaaagtccctactacaaagactactcaaaatgccctgaaatacatggctaaaaccctatactactagaatggccaaaatacaaggcccaaaagaagaagaaaacctattctaatatttacaaagaagagtggacccaaccttggcccatgggctcaaaaaatcaaccctt

SEQ ID NO: 250966 - DNA, 320 bp, Glycine max
acgtacgcttgcacaaacattctctaactcagaataatgcacccatatacaatcaatgcagctccgttaactagaatatttacatgtactttcaacgtgtatttgttacttacccacacacatctccttggctaaatctacatacatgcatacttaaagcattttggggcaccaaaaattgcacatgtgcacatcttgggatttcttatacctatacatacacaaaacctcatgatgaatattgactatctacacaatagagtgcctacattcatgctctttttaaggtttggcttcctaaagccgcatgccaattcaag

SEQ ID NO: 250967 - DNA, 406 bp, Glycine max
agcttgcatctacagtggtcaaagtattgacattcttatatttctattccttggattatggggtcgaaccaagcacatgctcttaaggaaaggttcatcaagtcaaggtcaagtatggaagtaaccaccttgcaaaagttggggcagaagatggatcgagttacatcgcttctttgtctactgccaatacatgattgagctaaataatttaaaaaattaaggacttgtgatgtccatgttttatttccaaacaatatgtgatgaaccatgttgttttactgaaaatctaaattgatttgaccctatgtcctgtgtaaaattcgcaatacttcaataatatatcattcatatacatgcatgcttatttttttatcttttacatttgggggcatctgctcattgcatc

SEQ ID NO: 250968 - DNA, 156 bp, Glycine max
aagaattaactgattgtttttattttccatcaagatcattttctctggatactaagttcttaaccattataaaccaagcctcttaagttgttgcaacatattcacatggtctagcttcaccttgctctagcgtattaaatgtgacattaaacaatt

SEQ ID NO: 250969 - DNA, 411 bp, Glycine max
  unsure (1)..(411): unsure at all n locations
ctgcagctggaagggctttttccgaccctttttttttcctgacagntattggcttcccattcatggccaactagctctacttatctggctctacatttccacgtagtcgattctttggcccaacattcacgctagcttttaccaaatcgaactacctttctaaatgtcgtccattcaaatattttaaactacgcttgaaccgcacttaattgcttatatgcgcaacttcttttaaaaaaattagctagcttaagtaaaatgaaaataatccttaatctgggaaaaaaagccctaatacgtgcatccaaaaccggtaaaaaacaatttaaagcagctggcccctgcttagaacctctcaaggtaaggaaataataaaaaggattactaacattataaatcgtcctttattac

SEQ ID NO: 250970 - DNA, 271 bp, Glycine max
ttgtgctttgctggttggacaccgtttcagttcacttgctctttcgctcatagcttcacatagaccaattatgatttatttctaaatccttgaagaattagtctccctcctacggagatgtttcttttttctttctttgaattcctcttgtcgaatttttccattcttcttttaaatgacagacaatttaatctcatgggcccaggtagatcgcattcattgcattctggggccaaagaagaatcgtctttttacttatttggagtgatat

SEQ ID NO: 250971 - DNA, 435 bp, Glycine max
  unsure (1)..(435): unsure at all n locations
cacctgagctgcactgagtatagggattgcgtgacatgcttttattataacattggttgataactattgtgtntcaatggcgccaacattgccaatccccaaatacatgcgtgagaatganggaatgtgatacaatataatcgggaaccgtgtgtgaggaatggttatctgaaattaaaagagactaaattataaaatgttatattaaataagcgttttaaaaaaaatcaatggcaactgtcaatctttcccaggggcaggatgataacgtatgaggacaaggcttgcccatcatcccttactcacagctaccacactttcttccaagggtacctagaacaagttaactttttgtcgctgtaacagggacgtgtacctcaacaagctaaaaagataaaaatcacatatcaaaaccaactttagcatcacccgatc

SEQ ID NO: 250972 - DNA, 355 bp, Glycine max
tttttaaaattttctaaattaacagatcctctttattacgtatgtgttcaagtgcatattagaattaacaccactaaatttcaacaagaaaaattatttggtggggttgaatcatatgatctatattaatctctacataatatgggataaagcgttattaattcatatccatttttaattcattttatttcaaatccttataattgtttattgagaaatttatctaatgtagcccaaagttatttagcctttacttcattcctcatttccatgagttaaaattaatagtatgccgtggtattaggagcagtactttggcacgattcataaagatattataagacacgtcttatat

SEQ ID NO: 250973 - DNA, 437 bp, Glycine max
  unsure (1)..(437): unsure at all n locations
ttgagccatatcanacgacaataactttttactcggatgtctgattgagccccgtacatatcgagacgctcgaaattgaatgttgaagctgtgagcctattcatacgacaataacttttactcggatgtctgattgaggcccgtaatatatcgagacgctcgaaantgaatgtggaagctctgagccaattcaaacgacaattactttttactcggatgtctgattgaggcccgtaatatatcgacacgctcgaaattgaatgttgaagctctgagccgatccatacgacaataacttnttactcggatgtctgattgaatcctggatatatctagacgctcgaaattgaaagtgaagctctgagcaattaaacgacaatacttttactcggatgttgatgagtccgtattatcgagacgctaaaatgatgttgagc

SEQ ID NO: 250974 - DNA, 187 bp, Glycine max
  unsure (1)..(187): unsure at all n locations
ttgcttggactgtgctttatagaanactcttgttctttttgttttctagagccctgtgttgggctaaatcgggcgttgaggggtcaaactctcattctgtggaatctttggtgtaaatctcttctgagcaagcttagattgatgttatggacttttgctaggtgagagtttgcctcccttgtacctt

SEQ ID NO: 250975 - DNA, 414 bp, Glycine max
  unsure (1)..(414): unsure at all n locations
agcttatntgaatactcaaagcgactcggttgttggtatatctattggcttaccattggagattcgcgaattccaagaggggaaatccctttatgtgcaacttgctttattaaatccttcagttcatcgatggtacatgttgaaagaatttgaaatttcttaggattttttcctgtgaacgcgcatccaacaaatttgttctgcggtggcatcttccattttccgttgtaatataagatcgcgtcatgataggcttgcaaaatcacagctgtttggtactcgaatgggcaccggagtcaaagtttggaagtaaaccccagtatcattgtgaataatcgatccatttggaaaaacgatacccaaccttgatttgacaatcggttgactgctagtttctcctataatgccctactt

SEQ ID NO: 250976 - DNA, 412 bp, Glycine max
  unsure (1)..(412): unsure at all n locations
agcttacatgtgaaacngnggacacaagttttttggttgtgtatagaggttgngcagatgaataccatctcttacctaacaaagaggcaggaaaaagttgcatcctaaagagtattttggagcactcaagagttaccacgaaagaccaaattatttaaaagccgagaaataagcccttgcctaccagtgtataagcaagataccaccagaaatgaactctcatatggacaatggcagtcttctttccctgttcctcgccaacgtttgcctagacattcttagccgggtaggaagaaatatattgaagcatatgacaaccccaaaaagccaaaagtgcctcaagtaaagagtcatatgggatgagaaaacatcgctgataaacagtatagcaaaaccaatcgccacagcaaca

SEQ ID NO: 250977 - DNA, 407 bp, Glycine max
  unsure (1)..(407): unsure at all n locations
agcttggtagagatataaaaactgttttagttatatgtttatctggccaagaattgcactatgcattgagttgcaatgtaatttgtctctatgtgagtagactctgtgctaggttcactctaagtacacttatcctaagggaggttagcacattaatctaaaagattaggatacgatttacccgttttagtaaaggcaanaattccaattttggcaaaactctcttttagcctttntaagntaaatttttaaaatcgaagcacaccacacttggtagtgaggtacacgttttccatggctgagcaaggttcattcatggatcaaaattgagtgattaacataagcctacaagtccatttaaacaccaaaactcactaaagttgctcattcttcctcttcatgagctc

SEQ ID NO: 250978 - DNA, 343 bp, Glycine max
cgaagccagactcctgcgcctctttatttgccgccataggaaacattctcatcacaaccatcaattctcattgggggggatacatcgctgcccaatatggctgaactgaacagtaagaactacatgttcattcggcattatttgaggctcagccttatcacaacaactgtgtatctgccagaacaaatatatctcatcatattgaatatttgtaagaagcacgcccacttatttacatattacatatcgggaccataactgagaaacatattcatgactcagagactgatttatgttatagcaaccataatcctatccttataagtgaggttcattggacgaa

SEQ ID NO: 250979 - DNA, 420 bp, Glycine max
gcttatatgctacaggcccaattctctccattatttcaaatgggccataaaatttcttagccagcttagagtgagcgccccttatccccgtgaccatggactgccgagagggatgcagtccaaccataacttgatcaccaacgttgaacgcaacatccttgcgtttggaatctgcaactaatttcatcttttcctgggctttgagaagtttcttgagaaaaatggtgaaggtctctgccctatgacacaggagttcatccaccgcgtcaattttagaggtgtcggcgagattctctggaaattaaaaggtttccttccaaaagtgattttgaaaggagtggtgccagccttcgtgttccaggatatgttatgcgaccattcaacccagggaaggaactttccccatgttgccagcttctt

SEQ ID NO: 250980 - DNA, 362 bp, Glycine max
  unsure (1)..(362): unsure at all n locations
actcagcttattgatattatcacggttataatagcacagatatgctttttgctnttcagagcctatagcagatacactaagctcccagcagagacagaggatatatcctcattatacatactaaaagccacacggcgatgaaaagttatgtcattacttcaatcaactcatcctgtcaatgctgaacacatcatattaaaatccaatgcttaggacacaattgacagaagtattcataacatgacacttgacagcgacataacaatcaagtgcaaaatccctcacctgtagagtaattaatctgagattgatcagatttgaaacttgtcaaactcatcatcagagctggcatcatcactact

SEQ ID NO: 250981 - DNA, 406 bp, Glycine max
tgagaagtcagattctgtagaacattctcaagtatattgagattgctgatccgggatcctctgggagtctagtgtcagtgcaatttatgccttctaatcttggagacaatgtagttgagggtgtcactacggagtcgggtgaatcacatgatattagtgatgggcatgaaaattctcaagtcgagacaaaagaggagagtaaagaagaagagagggtccaagcagaacaaagtgaaaagagaaattcttctgttcaacccgaggcatcaagtgatagtgagaacagagatgatactgacacttctattctacaatctgtgacttctgaggaaaccaataacactgatcaatcaaatattgaacacttgtccagtgttactccaccaaatgaatcttctaaggtggt

SEQ ID NO: 250982 - DNA, 244 bp, Glycine max
tcaacatctgcctataaacgctacctaatcataaatacctcatacataaatctcaaatgacacagaagtgatcgcaaatgattagaaaagaacgagcaacagaaatggggataatgcactatattataagctctgaaaataacaataatgctcattctgcgatagatctgcacacgacactcatactcaaatggcgcatacctcttttagcagcaacgaaagagacaaagccaggcaaatgcgc

SEQ ID NO: 250983 - DNA, 435 bp, Glycine max
  unsure (1)..(435): unsure at all n locations
agcttataaataatataatatacttgagatatctcctatgtcatanaagcgctagagcctctttatattttatcatatatcatcatactttatatgaaaatttgattaattgatcaaattaaacggctaataaaagaggttagataatatttgaagataaaaaattctgactttgggtaaatcttactattctaaataaaagaagttttacaatgataaatcaattcaggtataaaaatgaaaacataagcattttatgtataaattaacgaaatcagataagcataataattaacaattataatattaaatcaagctaaaataaataaacgactttctcttttacaaanaaacttactactttatcaatccactgttaagagactaattttttgaagatcacacgatattcaatagattatgctttcttaacac

SEQ ID NO: 250984 - DNA, 403 bp, Glycine max
atacttacttctgaataattggctcgccctattgttctgtcttcttcacactgaagtaactagcctgtagagagattttagttaagtttaatctattaccagttaaccgtaatccattacataattcagttgagaccatgactggcttttcatgaatttccactttaattgattaccaagtgatcataaccaattacttcattcttaaaggtgttcctataagtgatcaagaatagtctaatcgattacatcataaatctaatcgattacattgttcttgaatgttttccacaagttaggaagaacactttaatcgattgaaatgataatataatcaattacttcttcgaaataatcgattacattggatatctaatccattacaggcgattattattggttt

SEQ ID NO: 250985 - DNA, 437 bp, Glycine max
agctttttggagtagaaacatgggaccaactcattttatttcaaaaaggaagtcgtatctagtcaaggtctgagagaccatacaagtttcctaacgatttctaattatgtgggccattaagtctatcatatgctgacaatagccgagaagcccatgaatctcttcgggggtggagtaggtgtctgccatcgccttggccttggctaacaatcggggaagttcttgactcccgttcaaggtaagagcaaaccggtccatccacatggttgcctcttggtgtaaagagtcgatcacccttcctctagcctctttttccgcatatacttgagcatactcatccgcgattctatgctcgtgggccatggctaactcttctcggtacttggcgatgatagctagcatgttggtctccgtctcgcataaacgttgagacaagc

SEQ ID NO: 250986 - DNA, 409 bp, Glycine max
tgaacaacaagtaactaaatttgtttttttacaaaatgaagtaactaactaactaactaacttccactaatatatagagtgactactcagaaggaagggatgagccttgattaggtccatctattctacctaattaaactaattacacaaaacaaagcccaaactcatagcctaatgattcaagtgcaaaggttatgatttccaagctgaatttgaccctcaaaatggcataaatgccccaagcttatttgtgacaaaattgaattttttttcttatctttctagggactactcacatgcttcatttggagttttgtagtgttcttataggtcctgcacaaggcagataggtcaagtaagcacaaaaatccaaaaataagccacaagtatcaattaagctcaattattt

SEQ ID NO: 250987 - DNA, 413 bp, Glycine max
  unsure (1)..(413): unsure at all n locations
agcttgcttctacaaacctaaggatagtgacttattgcactgaaacatacaatgtcatgcaagactgcctaaggatcgctagaggcgtcactgtggatcgcaatgtttatgtgcggccacgaataaggcaatgcccggatcacgcatgaagacatttataaatttttaggaaaatttatagactatgtttatcatataattttatttggcaacatttttgcttaacaaatttatttgaattctttttatattactattgaccaacgtaaattatttaaccctaaagcataacactaaacactactctgcaaaacccatagttttttatgttctactanacttctggttcacgtcaccatttcacctcgacgcctttaccctaaaccctatattataaaacccttaccctttaa

SEQ ID NO: 250988 - DNA, 405 bp, Glycine max
  unsure (1)..(405): unsure at all n locations
tgcattntatacgtgtttgataagtccagcccgtataataaatagtatttttttttcaagcccataatcaaacttgcaaaagttgcaaataaataggttggtttgtgatccaaatagtaatttaaaaaaaatgaaaaatctatcaaatttgaagaaatttctattttttttccattcattttttaagctaaaacgtcttttcacctctttattttttttctcttattttcaaaacaaaatagtgagaaaaagtaaataaaaagaatcaaaataaatgaaaaaagagtaaggaaaaacataaacttaaatgtttgtaggctagcacaacaacccgtggattaagcttgctaagtccatgggttagacgggtcaagcctaaaattgcctatgactttgttatccacc

SEQ ID NO: 250989 - DNA, 377 bp, Glycine max
tttgtgattcgcgttgaatcgatcaactgtatgatgtgagtgaattgaaatgcgcaaatcatatgcctcgaatgagcatgcagtcattataagagaaagaacatggaattaggattatgactgacaacgttagctggttcgccaggttgattgagatggaatgcatcatccgtaacccggtgagagtgtgatctttaattgtgagagaacgactagcagtaagtaatggtttttgatgaatctatgagcatggaatgaatacatgagcttgaagaggatgaaggccatgttttgattgaagactaccacttacttaaaactttacctgtgcatgattgatttatccctcgccccattttgagctgagagatgattgg

SEQ ID NO: 250990 - DNA, 445 bp, Glycine max
agcttgaagtgagaaagtgtggaagagtcactcttcctacttttattcgttgaccacagagtggtacctggagatatgtcgcgggggtcaggagaccttgtggacgtcaggtggggtgctatttcccaaaaccaagcttgaccagtcccgacccaacccgggcatagtcagtcagtgagaacctgtgacgtacctaaacaggcgagctcctggcagtcaaccaataaaagaataaagaccacaaagcaaggaggcttgtgtggtggctggctagctatggatcttgagtgatatctggaatatggcctttggttatcgattaccaagggtatgtaatcgattacaaggcttataaatgaagacaggaagttaagatggcctctggtaatcgattaccaagggtgtgtaatcgattacaaggcttagaaatggatacaggaagttg

SEQ ID NO: 250991 - DNA, 398 bp, Glycine max
ttaaaatggccacggatagattgacagatggttttgtcaacaatatcaaattgaaattgatagctgatcgtgaaaaagatggttgtgtatacaatatcccaaatgttcctgaagttgttgcacttattgttggtgattttgacccaagctcaaaaagagatattattgttgaaactcaaaatggacaactacaaagaatccatgaattacactctagctatctggctctatagtaccctctactctttccttatggtaaagatggatatagaactaacatacttcaccactctaaatcatcaggcaaaaaaaggaagagaaatcgtctgacaacgagacagtggttcgcttataggcttcagtccaggccaaatgaagcacaaactttattgcattct

SEQ ID NO: 250992 - DNA, 424 bp, Glycine max
acaccataaaaaactcaagcttgtacatgccataatctgctagtaatggattgttctcttgatcaatgagtactttgtcagctgagatgttatggagaaccacaacgggctggggtgctttgtatgcatgtaaatatgccatacctgatcaagaaaacaaggtttaatatataaacctcaaatattaagcatatgaaagtactttgaattacattatatgaagggaattcaataaagggtagaataaatgggtaacctttagcaattcctttcacaatagaaactctagttgaccattcaaggacgtctccaccttctaccttaacattcaagaagcgtgaaaggtttccatttggaacaaaatcataaatcagaaagcattcacctcgttcttttgaacaacaaaatcctctcaacctcacta

SEQ ID NO: 250993 - DNA, 438 bp, Glycine max
  unsure (1)..(438): unsure at all n locations
agcttccaatagggacaaatttcaggctcatatattgcaagtccacccccgcaaagcctccaccctacaccctcacagatctagttgtcgatgtagaggcatccatcggaggaagaggtattggtgcacagtgtcagggttgagccaacagaggaggtggaagggccgacttgatgaggaggaagtcatcgtcggagtcctagatttggagggagagagaaagaggggaaggcgaaccacttgtcatcgaggttgtcatggaggtgagaggaggagggacaagggcaataaggcttcggagtataaacaaagaggacgaagggtagagaaagagaaggaagagaggctaggatcgttggattatagagagagagagagaaagagataggtgaagaccaagaanaagtatgatagtgcctaatttttagtggacacaca

SEQ ID NO: 250994 - DNA, 401 bp, Glycine max
tgagcctttaactttatgatatcatctctcttatattatggaagtgtgttgtctctaactactttttcaccttcaagcagcatcttttggattataatgattgacctgatcttagccctgaagatcgagatatgtggattgaagatctggtaccattcttgaactatttccattctacttaaccaccggtgtttgtaccccaaaagtaaaaaatccactagtttttcagtgtggtagattatctttaaatgtgaatggatagtggatttcctttttctaacacactttatttctattctcatcaatcatattggcttttttaggtgggagagaaaacttcaatatggcagacagatgaacttaggcgttcaaaacccactccagttgatgaagctagggca

SEQ ID NO: 250995 - DNA, 400 bp, Glycine max
  unsure (1)..(400): unsure at all n locations
tcttcaaaaggatgtagactctatgcttgatcttccttgnaaagaggcatttgaggaattgaggaggaggctcaccacctctctcatcatgcagccaccagattaggagctttgctttgagctcatgtgtgatgcctccaagagtggtgcagaaaaattggttgttgatcatttgagcaagattgaaggacttttggattcctttcctattagggataacttctgtaatgagcatttgatacaacttaattcatcacatgttacaccttggtttgctgacatcgcaaattccattgttccatctattgtcctacctcatgcatctaggtctcaaatagataaacttaagagtgatgccaaatattatgtgtgggatgatccttacttgtggaggtttggg

SEQ ID NO: 250996 - DNA, 403 bp, Glycine max
agcttcaccaacagttgaagtatacacaactgttattacttctcacatgatcaagacacaccttgtaaaatagcctttcattcctctcctgctaccctgcaaataacgaatggaaaacattaaaatccactcccaaaatttgcaaataaagctctccaacgacatgatttcttggtaaatataagattccaagttcaaaacacaaatcatgaaaaaatagtcaaatgcgcacacaagttcaaatttatggaaacataccaatctttacaaatttctatgaaaatgtcttggagtcattattcacagcttatcttatgcacttgcaattatgtgatactacattgtacgaatacttcagttccatactataagcataagggtgtggccaacaactaacggtgtg

SEQ ID NO: 250997 - DNA, 395 bp, Glycine max
cacttgtatatcttgaacgaacagtgtgaagttcttccttacatagttaagcatgaagctctaggcaaacagaatagttccaaaacgtcaaagaaatgggtgccgaaaaagcataacaagactttctgcgattgggtcaaagatacaatctttgccaaagagaatgctttagaaacattaagaaagctaccagatgggcataaaagaaatgttataacctagcaaggatacgacataaataggtattcattttacacaaaagcacaagatgacaaaagtacaatgcataacagcgaggtcaccctaagggctgaatctcaacactttgcaagtgtgaatgacgccaatccctggcagctttcatcccttactatgggggattgatgaaaactgga

SEQ ID NO: 250998 - DNA, 436 bp, Glycine max
agcttatccaaacagtgccttaacatatttttccatactgcatcaatttaactcgcattgcaatcttctaaaacctatacacagaaagacagtataaaacatagtgaaaatgtaacagacctgtgccaccagcaacatcaagatgcttcattccaggaaatggattcagcttcgaaactaacctgagcagaaaataatcacagatttaagcaaagtccaaagcaacagtaatatgattgaaactattatgaaaatgagaatgtaatgttgtaacctatccttccacaatctatgcaatccaacactcattaggtcattcatgagatcgtagcttgaagcaacactcgtgaagacatcaccaaccatgcgagccttcttatcttcgtttacttgtttgaaccctgaaattctgtcataatatcatctattcttaatt

SEQ ID NO: 250999 - DNA, 424 bp, Glycine max
gacctataaaactaagcttgttacaggcattgcgtctcaccagatccttggatatgaaagcctctcagcttctagatgcaatacctaaaccctttttgtctcttcatcttcgttttgagccagacatggttgcttacagccagtgcgagtatccagacctttctcctgcttccatgaaagccatagaagcagcacaagtggacagaaaaccatggactggagagttagcccgtgtttggagactacgtgggaaatgtccacttacgcctaatgagacagctttaatacttcaatctctttccatcccaccaaccacaaatatatacctggcagctggagatggtttgatggaaattgaaggtttgacagatacctacaccaacatagttaccaaatcaagtattctcagtagagaagacttcac

SEQ ID NO: 251000 - DNA, 443 bp, Glycine max
agcttgatcaattaagctaatgatgaaggaattctatactgtataagggtctcagagagagagaaagatgcgaacaagaagttgttgctgctgaacaaaggtaaagaagtgaattgttagggggaatttggtatttagatgttttttttttttcttcttttattactttcttctttctttccttacgatcttttcattcgtgagaaatgggtttggccttaggtgggtaggaaggaaacaaaaggaaagagaaagctgatgtaggtggctttggactttgaagaattactagtactacactacacctcaccacccccagaaccaaattcactttgcttcacagaagtggaataattctgagggattcttgttgtttaggttttttttggttaatattctatattgtactacgcggtgcttcttatcctagactttctttaact

SEQ ID NO: 251001 - DNA, 272 bp, Glycine max
tgcccaaaaacttggagggtttttccaaaagaataaagatgccttggcaccaaaggggggttaaaaatgattccctgccctttctaatgccatcctaccctccaagggtattggatagaagacttccataaaatttaagcttatatgcacgaaaaaaccctaaagttctcaaagcttttaggtagatttttgacccatgggcttagtatgacccccctatatttgatatattacaacagaatttcatatttttgggccctgtatttaaggct

SEQ ID NO: 251002 - DNA, 408 bp, Glycine max
agcttatgcacggaaaatgtaattatgaaattgttatgcccttaaaaacaccatttcctagttaaccatgcattaggtaccatgttcaattattttttaaagtgaaacgggtttatgatcccaacatggttggctcgtggggcctaacacatgaaactaagaatgtagtgtgaagtttcacgcttcccccttttttgattttgctttgcagaggaaaacgcccggatgagcaaacatgaaaacaaatggtatgcaattttgcagatcaaaaagtctgttgaacgcatatgcatgatgatgccatgactcatgcaaaatgcgaggctggaatatgataacggacaaatgcacgatatgtccattatgatgttatgaagagacgcttatgcgacgcatgatatgaatgca

SEQ ID NO: 251003 - DNA, 404 bp, Glycine max
tagaagccaagattacctcagaaaagttacaaaagtatggattgagggcttgttctccaccaaatccttgagatggatactgagaattttgcttcgatcaaaacgttctgctcagtgtggtggagtaggagtttctaggtgttttggatggagttttgagagggagaggtgtaaaatcctatttttcacattgaaaaacatatttataatctatagatcttgcttagtgagctcgtctcgctaagtgggagtccacttttgctgctaagtgtaattcctcttgcgctaagcgtgatagttcgcgctcaacgcaattacttctctggttggaaatgcacttagcgtgcttctcgtgctaagcgacaggtcaaaattttttattttactaatcctagtggtcaaac

SEQ ID NO: 251004 - DNA, 426 bp, Glycine max
  unsure (1)..(426): unsure at all n locations
agcttgatggatcaacgactcacgaacactatgagcaagattggaagaagaagaaaaactggacctgtttccctcaatgttgaacttgtgaaaatggaggaatgaatgcttcaattcttttctctcataatgaacaagaagataaggcataggtgtaactccctgaaatatcactaattataaatcgatattaattatatttatcgcgttatttgattatatgattgacttgaatgagttgaagtatggtgtaaattagtcatgtgtgatcttcttgatgtggatgttgagttatgtgaagtttttattgacctaagttgaaattatgagatttcaaatttcacctaaacctattccagtaaaaccgtgatcatggattcgttaaccgctggatcatcttcaaatttngactataggttcctaaca

SEQ ID NO: 251005 - DNA, 405 bp, Glycine max
tcttatccaaggctcatcttggtggtgaagctccttcttccatggcttattccctagtggatggcgcctcttctcacctcttctcctttgtcttccgctgcatctccatggtggaaaatcaccattaaaggacctcattgaatctcaaagatccagccttcatagaagccccacaagtaagcttccatcaagtggttatcagagcaaatgggcttcaagtaggtgctccttaaacctccataattttttttgctttaccttctcctccattattgtttcttcatttttctccatgtatctcctcacatgtcttgcgctaaatgttgttaacatgattctttagagtttccactgattaaactttctatagaatctagatttgattttctatggttcaaatttctt

SEQ ID NO: 251006 - DNA, 55 bp, Glycine max
  unsure (1)..(55): unsure at all n locations
ccccccccaacaccnatgtgctcgtgccacaaaccgaaccacgagcagcactgaa

SEQ ID NO: 251007 - DNA, 398 bp, Glycine max
  unsure (1)..(398): unsure at all n locations
ntatgcccactcccacaacccgggctttattgttctctgcgattacttctattatcttcatattctaatttatacataaagtaattgtaacttacgaaataatttatttcattttattctcttcaggtaaaaatgtttatggagaaatctatcacacatgacttatttaaatgcaaacctatttagaatgatttgtttaatcacgggcttaaacaaactattgtagacaatgttgtcagattggttcacacatgacatacctatgatgcaataatttaaattcataagagtaaggcgattcaaggacttgaaaggtctaaaataaatttaagaataaaaccttttatttactcataaaatagttgattaaaattattactgctttatttaaaagtaat

SEQ ID NO: 251008 - DNA, 433 bp, Glycine max
agcttcagcactgtaaataatcgatattgttatttttatagaaacacacaaaatagttcaacagtagtcctctccatatactcaaaaactaacagtagataaaaggacaaagcaaaatagagtaaaatgtatatcaaacttaccacgtagatcattatgtaaactgtgtcccactaatatgattccacttgataacaacttcttcatgtatttctatggaagtacaacacatcttcattatgcacttgaaaggatgatataggaaaacaaaggaaaccacaaaatacctgtatatcagccaaggagcaagtcactgcctctagatcttgagaagagacaccagcaatctctgttctgtagtctgcaatttctctgtctgggtttacaagtttatctagtttgacctgaaaacgtccgaaaattatctatctac

SEQ ID NO: 251009 - DNA, 412 bp, Glycine max
cacacaggaacataaaactcagcttgccgaatcttatggtaagcgatttttgtagccattatgaatatgtatttgtccatttcaaagaaaagagaagttgtcctgcaaggtatccatgaaagcctgctttctttgtggggtgggctttgggcactaacaggaattgctggcacatcccagcaaaatttttaaattccaataatacccctcccttataacttcttttgggattttgttcttcacgtgagcttttttttttacccttcacattcgttctcctgagaggtattccgagagagttgctcgtttgatgttgggtcctctatggtggaggcgcattgttaacgatggtttgtcggcaagtgatggctgtggcagggggagatttggccatcaacggcgtatgtaaggt

SEQ ID NO: 251010 - DNA, 361 bp, Glycine max
  unsure (1)..(361): unsure at all n locations
accttcggcctgtcgtgagttccttatctaatctgttacagacaaccaacatatactaacatntcaagaataaactcaaaccaatcctataacaaacaatatttaaaaacaaaatacggattatgacgcatcagtgaccaactttgtgggtgctctgctttccttactactcggttatatatagtaagatagctatacagcttgatggagatacatctaacacccccctttgtcaccaaatagatagtccgactagtgaccaactcaacaaatactcttatgatacacgaccaaataagaatcaaagggtcttctgctaatgatacgctacaaatgaaagtatcccatcaatcgtatgtat

SEQ ID NO: 251011 - DNA, 401 bp, Glycine max
taacattccaacgttgaccttcaacaagtttatgattccaccgttggtaacaactttgttgaactcgacgggatggaagcatcgggtcaggagttcatatgggtggttccagagaagaaaagggctaccgagaggaacacagagaagatgatgattatcacggagcggtgttggaattttcttttctttttgcacattttgcttttcttttctggtttttgtacatagtccattttttgtccacattctaaccatgtttagcaacaattcatgatctttttttaatatcttaaatatacccatgttcaccattgttgagttgttgagttttgtgatggataaaactctataaatagaattatctgctattagaactctttagataaaacacatcatttagt

SEQ ID NO: 251012 - DNA, 407 bp, Glycine max
atccttaagacaccgcggctgcaccttggacaaagagtactagatgttttcttgattgcaccgaaagttcacgctttatattacctctctctgataaaagcttgatccttctaatgcagggtcttccattagacaaaggatggcttattcttactcttttgtctcttcactcggacaatgtgttatctatttcttcccatgtgcttatacacaccttcttgtcctttggatagaagcaccttttcttgagattagacttatcaagatttgggcattcttactataagtgtctcggtttcttgcattcatagcttgtgatagagcttctatctttcgccttttttctctatgtgatgacttggatcctttccagtctgatccacttatttattccacaagaccttatc

SEQ ID NO: 251013 - DNA, 401 bp, Glycine max
tgtcaattccaacagaaagaaaagaaagacatttgtgaagaaagaagaataaaaaaggttggcctccatctaataaaacttggtgcttaattatatttagttctcaaatgggaagccattggatatgtactcataccaaataattagttcacaaattaactgagatttaattaagaataagataataattcacatgcagacattatatatataattaaaataaaaccagttcagttccattttcgatccttcagtcattatcttgttctacttcagatgcaggctcttcttcttcttcaaatccatcaatcccgtaagctgcatggccacttccaaaggctttgatgtgatccttaagggacctcttgtgcttgaaatcagatccacagatgcaataccaa

SEQ ID NO: 251014 - DNA, 302 bp, Glycine max
agctcgtaatctcaacggacactatatagtttatctattgactgactgaaagatcgataaatctctacttctctgcaacagggatcattcgggagcttattactttctgttttagatcgtaacacaatccttttgcgaacctactaccctatcgggtaactacggaagaggtctacaaatagaaaagagagagataacgaacgtcgctaccttgatgaaatagctttacaaaaggcgcacgcgtataacaatatattctctcgcagttaattaacacacgtagaaatgtatataatgaaaaa

SEQ ID NO: 251015 - DNA, 369 bp, Glycine max
ttgtgcccgagttttccatgacttccacgcacgggatgcatcaacgtggtcgtcgaccctatctctaaagacaaagcttcagtgtcgggtcccactaactaattctaacaacttaagtccgcggattctagtcttcctattcaaatgccacttcctgctttcacatcccaacttttttttttttgtccttttctaatttttccatttttttataagggtgattatgtctttagggattcttttttaaatgttcatttcttttagtgcatgttcccttgtttagttcgatttaccctttttatcgaagttttcgactcccgtgttaaataattcatatttatcactttgttttattctcaatctcattaa

SEQ ID NO: 251016 - DNA, 344 bp, Glycine max
  unsure (1)..(344): unsure at all n locations
agctngctctgtcctcctttgtattaatttatttttctaataagnaacccatatatacgccccatggctatgattattcacggactttcagcgtctaatggcaagtttaaaagcagaagatatatactccatgaaatgatgagatactaatatattgtgtgctactgcccgaatggtggagaatttaacgatgttaataattttcaactatgtaaactacatattgatgaaatgtgagaatcaaaataattaactgaattgtacacgggaatcatagatacgtgccctttcttaggacatggagatgatattcagcttaacccagactttttcactccttatta

SEQ ID NO: 251017 - DNA, 406 bp, Glycine max
tcaagagaaaaacaaaaataaatgcagttgccgtttataatccgtatctacggatatttatccttcacttctttatttattttttcattttttaaattacatacatacaaatttccatactatatttcaaaatttaaagaaacaatttcctgttaccaccttttcatgctcaaagaacattttccaatcaaataaaatgtagtctgagttggcctataacaacaacatttggcttagatttcagatgtttggtagacctataacattgttaatgctctcccatctttttatctttttcatcacactctattccactttactttagagacaagtttatgcatctaataaatgctttaaataaaactatttgacaggtaatatagttagattagaaaaatcaaatatt

SEQ ID NO: 251018 - DNA, 377 bp, Glycine max
agcttgctaacccatggaagctcctaatatctccctcactttttggggtgggccattcttgggtggccttgattatctcagggtccacttggaccctatttctaccaactacaaaccctaagtaaactatattatctacacaaaaagtacacttctctatatttgcatagagggtgtttttcctaagggctgaaagaacttgcctgagatgtcctaagtgatcatctaggctcctactgtacactaaaatatcatcaaaataaacaactacaaatctacctatgaaatcccttatgacatgatgcataagcctcataaaggtgcttggtgattagtgagcccaaaaggcatcactagccattcatacaaaccaaact

SEQ ID NO: 251019 - DNA, 405 bp, Glycine max
tctagcagatcagagtgaaatgtatcctaaccctgttagatatagaagacttgtgggaaaactcatttatctcaccatcatcagacctggtatttcctttgctgttggagtggtgagtcaatttatgcaaaatccccgtgttgatcattggaatgttgttatacgtattcttagatacattaagagagctccaggataaggattactttatgaagacaaaggtaatacacaagtatctgggtattgtgatgcagattgggctggttgtcctatggacaggagatccacatccggatattgtgtctccattggcaggaatgttatttcttggaaaagcaagaagcaatctgttgttgctcgacctattgcaaaggctgaatatagatctatggctgtggatacgtg

SEQ ID NO: 251020 - DNA, 393 bp, Glycine max
  unsure (1)..(393): unsure at all n locations
agctttnttttgcgacagaaagaacattttgttttatttccactatntcatgcctatcgctcgcaataagtctttctctctagggaaactaaaagaattgtgatttagggactccacacacaattattttcagtttacgaacattaaccactctactgattattaatgtctagaaaaagaattggaaatatttactctattaatcacttgacgactcaaccattctagatattttctgttcaagcattctaaatcatgattctaaaaaatatatcataataattatttcgcattttggcaccattctcaatatttgaaatttcctattattttaaggtcttaactggattactttacaacctatgacaaacatcccaggaattaccagaatat

SEQ ID NO: 251021 - DNA, 402 bp, Glycine max
tactaatacaaaaaggaaacaagaagaatgttttattttgaggaaaggatctctaagagaatgggttttctttctattatgcgccctagctctgtcccatctgaatctatctttttttggcacagctctcccccttttttatcttcaaaatgttgcatagtcatatttttcaacattgattgtgtgctaagctgacagcatgcacatgcaaagtctaattggcttaagtgaccatgtgttaagctgtcatatgtgcgcttagggtgcatgcacgtgacaactggcttttgagttaatttctcgtgctgagagggtgttgacatgctgctttggatcttcaaccatcttctaggcctcctgctgtgtccctttctacaaaacaaatattatcaaaacactgta

SEQ ID NO: 251022 - DNA, 437 bp, Glycine max
agcttgtaggccttggatcttcttcattaatggagtcctttgcttcttgaagttcaatggaagtagaatggagaaggaagaaagatgattggatacaccacttcaaggagaagatgagtcaagaagaagctcaccaccataggaagccatggataagagctcaaaggaaggagaagatgagtggagggagatggagagaaggagcacgaaattttgtgcctcaaatgaggtctgaactttgaaatgtaattctcaaatgatcaaagttgaaaaaaatgcacacacatgatctctatttatagcctaagtgtcacacaaaattggagagaaatttgaatttctattcaaatttcactagaatttgaaattgaatttgtgaagccaaaatttcactaatgcatgtgaaattacaagactaccccaaatacaataacttt

SEQ ID NO: 251023 - DNA, 402 bp, Glycine max
tgtactttcaatgttctttcatatctagagtttgacctttacatgaactgtgacagttttgtactttcgataatgttcattcatttatagagttgtctaccattttcaatgtgctccaaagaaagaaattattatatacctaagctaaggaccttctattggtgtcatgaacattttttttttaaatgaattaggagttttttttttggttacaatcaatcaccatttggataatgtctcctacaaacaatcaaacatgcgcagcttctctaaagtctcttctaataaattgctgcctgtaaataaatagtacttatgacacaagaaaacaacaaaaaatttgcatttcaaacctgcactagctaaaaagcaaacactttatcttcagtatgggcaatatct

SEQ ID NO: 251024 - DNA, 313 bp, Glycine max
cgctgcagcttctcctcttaccctataatagggggtgtatggtcacccctgattcgctcgggacctttgttgatgacatgcgacctttctttggtcctcttgaggagcttggcctccatcattaggcaatttgtgaaatatcacgacatgccgaaaaaccaaaaaaatattgatgcccaatctcgaatttttcgtgacacaccggaaatcaaatggaagcatcgttgcataactaagtgaggctccgttacattccgtaagtcaaaaaggggatgattatgttatccgcaaggttcctgtacattaccgaaag

SEQ ID NO: 251025 - DNA, 333 bp, Glycine max
  unsure (1)..(333): unsure at all n locations
tgccacccagctcgcccaggcgagctaggctgctttcttcataagcaccttctggagaacttcttggaaggcccaaatgggcctgcgtgctattttcacccccccccctttttactaaatacacctgttgcccttctttgcttattctttntccgtaacgttacgaaaacttatgaattaagtaacgatacgtgttttccttccgtaatgttacagaaccttacggattgcgcactaacacttccttttaatttctggcatgtcacggaacttcacagattgtgctacaaagctttcttttgactttccgcacacttcagaactttacaaatt

SEQ ID NO: 251026 - DNA, 418 bp, Glycine max
gctttgcctaaggtccttgatgcctttttattttcaatgtccgcaagccaataaaacttgaaatggctcatgtgtgtccatgaaatgacataattgggcaaaactatgggcatattttcacattttgttctgctcgcgggtttatatgtatcacgtgatcattcccaataaatgctagttcattaacgttgacaagccatcgcaacttgagagtgagttaaacaacatccttcttggcaacttgaagattcatgcgaacttgtcaagacaatgtacaagaatacttgtgatacaaatgcatataccatgagaagaggcgacacataatcaactatggagagtggagttggaaccaagaatggacacaactcattgtgctcagcaagcgtggacacaaccccgagtgtcgttgcctatg

SEQ ID NO: 251027 - DNA, 404 bp, Glycine max
tcagagatatttaaaccaactatgaaaattattctcgatttatgatttaatcacgcttaaagctcattggtatttccttttcaatagtatattatatgagaattgaacctagtttttttcttctattctataatattttaattatgaatgaaatttcaacatttgatcatacaatatatattcataatcaagacaccgaattaactaataggacgaacaacaaaaataatatctctcgaagacacaacgtattcccttctttttatattgtttgaacttcaagtaacaatgaaacctttctctcttctttttagaaggttttgaactttaagtaacaacagaacctttttctcttcctttttttttaaaaaaaaaaattagataggataatagagaattgtaaa

SEQ ID NO: 251028 - DNA, 417 bp, Glycine max
  unsure (1)..(417): unsure at all n locations
agcttgtctctacagaagaaagaaacatatattatagtatattcattgcagataattctttgcaatgatcaagaataattatgaaccaatcaatcttgaagcataaattgaaaattggtcccacatcaagtaacagtccaagtaacttacaggatcttcaagtgttgtaattgagacagaaaatcgggaacttcatcctttaagctattatttgataaatccctgcaaagcaaataattaagttgcccctttagatatatttaaatcttgacacatgtaccaaatgacatattgattgttgacacataatacaaagcanaaaaataaattaattaaaataagaggttttttctgcaggtctcatcattattgaatcacgagaaataaaataaaataaactcacaaattctccagcat

SEQ ID NO: 251029 - DNA, 399 bp, Glycine max
ttgaagaagtatatgttgttttttttttttttgctattagccaataaaaagtgcttaaaaactatccatgcaaacctcaaattttatggatgatctatagctctcaaagtgttattctttgcttagcaaagttaaatatttttattgcgttgtactgcttattctctttgtgagtgttgatttcattgtgaatatttcaaacctataatttgagaaagataggagtgacttagtgatcatagaatacttaggtgtttatcaatcttagggtgtgattgaaggtgtgcgacaaatgacctaaagaatacttgttgtgagccaggtgtgatagtggaagaatacttgttgtaatatgtttgattactagaatccttctaaggttgaagaaaaattggacag

SEQ ID NO: 251030 - DNA, 422 bp, Glycine max
  unsure (1)..(422): unsure at all n locations
agcttanaatgttaatcataacaacaatatatttcttgaagttntatatgaatttattaaacttgtatgtaactgacaaaaatatgcctagttcaccttgaaaatttaacaagagacatttaaacccaaataaattatgtatgataattttgaacataaaaatttatttggggttaaaaacttaaaaaaattggaaatctcatattgttaaggagtaaaatgatttatttaatattntaattgaaatatatagaattatgcaggtaattatataattaaaaaatttaaattctgatatagaatggacctagacgtgtgtttatagccaaagactcatttatttaacataaaagtcaaactaggatagttttaatattttacaattcacaatattaataaataatcaatgctaacaaaaataa

SEQ ID NO: 251031 - DNA, 402 bp, Glycine max
  unsure (1)..(402): unsure at all n locations
ngtacaagaaagtgtcattcatcggttctaatctctgtagatcttgaagctggtaattaggctgatcgcatgaaaatgctgtctgttgaaaagattgctcaggcaatcccccacatacacttgaactgctagaatgatctttatcatgcagagatggttcaagctcaatttgattattgaatctttcttcaaagaaatccatgataaaaagatttttaggtgaattaaaaccttcagttgcacttattccccagtttgaccaatagtctggtgaaggatgcctgtccaataaatcctgatctctgggaaccagataatcattaatgccgttcccatagtaccaatccatgatctagtatctgcacatcacataggatcaaagaaaatgaagattagcatgta

SEQ ID NO: 251032 - DNA, 420 bp, Glycine max
agctttgagccaaaatcctaactcactatattttcttgtcctacggtgagaatgtcaatccttaccctcgaaagcaaaaaagaagagaagggaaatttccaatctaagaatataaaagagaaggaaaatttccaatcaaagagaaagcaataaaaagaaaagaaggaaaatttccaatcaaagagaaagcataaagaaaagaaaggaaattcccaatcaaagaatgggagaaagtataacaaaaaaaataagaacaaggatagaaagctcctgatcaaggatcgaaagaaatcataataaatgtgcagaaaggtctttggaccggacaatatctgtacaatacagaattgtcaccgaatgaacaaaaagaaggaaaggaaaccacgacctatattggtcttctccctttgattaccaacc

SEQ ID NO: 251033 - DNA, 406 bp, Glycine max
tcacacgattgtcaaccgtgttagatttggtcttcttgaatgcactatttacgtggagtgacaaaagcttcattgaattgtttgtcgagttgaagaagatgcttcctgaagataatgcgttgtcaaaaaatcactttgaggaaaagaagatattatgtcctatgggtatgaagtaccagaaaatacatgcatgccttaatggttgcatattgtacaaaaaccagttttccgaaatgcacaaataccccacatgtggggtatcacgatacaaagtgaaggatgacgaatgtagtgatgatgcaaccacaaataatggtcttccaaaaaaggtgtgtaggtatcttcaattaattataacgtttaagcgattgtttgctaatgaacatgatacaaaaaaccttacatg

SEQ ID NO: 251034 - DNA, 367 bp, Glycine max
agctttaaaatttgaattaaaacgttcataatctgctggtaatcgattaccatatatgtgtaatcgattacacagtgtaaattctgatttcaaattttaatagctgttgtaaatcagttttggccactattaatcgattaccacagagtaaatttcttggaaaagactttttaacttaaatttcttggccaaactctttgctacttcaattggaattcccctcctatttaatataccctttctaagactagagacttgtcttgatcatccatcttgaatatctttaatttctctgtcttgaataaagctctgagacgcatgtgaacctttggcatatcaaaacattagcgttgatcctttgtttaca

SEQ ID NO: 251035 - DNA, 342 bp, Glycine max
aaagttgaccaatgacaatgcttaaccaccatataggcaaaagcaacaaagcctaaccatcaatagcagaagctacacatgatgcttaaccactcatgacagaagcaaaccaataacaagtgtttaaccaccatttaggcagaattgcagaagcaacaaagcttaaacatcaagactagaagctaaacatggtacataaccactcaagacaaaagcaaaacaaaatatttgaatgcttaaccaccataaaggcagaagcaacacaccaatgtttaaccatccatggcagaagcttgacatcaatgcttaaccaccgcggacaaaagcagaacatgaacagga

SEQ ID NO: 251036 - DNA, 465 bp, Glycine max
  unsure (1)..(465): unsure at all n locations
agcttgagatgaggaagngctgaatggtgaatcttcctgctcttattgctgaccacagagtggtacctcgagatatgtcgcgggggtcaggacctttgggacgtcaggtggggtgctattgcccaaaaccaagcttgaccaatcccgacccaccccgtgcatagtcggtcagtgagaacctgtgatgtacctaaacaggcgagctcctggcagtcaacagataaaaggaacaaagaccacaaagcgaggaggcttgtggtggctggccagttgtgaattttgggtgatatgtggattatggcctctgctaatcgattaccaagggtgggtaatcgattacaaggcttaaaagtgaagacaggaggctaagatggtctctggtaatcgattaccacggggtgtaatcgattaccagggttgaaaatgaggtcaggaagccatgatggcttctggtaatcgattacc

SEQ ID NO: 251037 - DNA, 364 bp, Glycine max
cttatattctaggaaatgaagatttatcctggtcaccctatggacttccctaagaacaatagcatcattactttcactgaattggtgggaagttggaagcgcctctttccaatcaaaatcctagcctcagcaggggtcgtatcaccaagagctccactactggcagcagtaatcatactcctcttcatgtgtctaaggccctccgaaaaaaaattgaagaaagagttgctcataaatcttgaggtgaggacagcttgcacaccatctcctaagaattttccactactcatacaagctttctccactaaaatggttgatggcccaaaagtgtcttttgatggccgtggtcctacatgcagggaag

SEQ ID NO: 251038 - DNA, 406 bp, Glycine max
  unsure (1)..(406): unsure at all n locations
ntaaaatttgaattaaaacgttcagaaactgttggtattctattaccatatgtgcataatcgattacacagggcaaattttgaattcaaattttaatagctgtttgtaaatcagttttggccactggtaatcgattacatcctctggtaatcgattaccagagagtaaatttcttgtaaaagactttttaacttaaaattcttggccaaaccttttgctacttcaattggaattcccttcctatttaatataccctttctaagactctatagactgtcttgatcatccatcttgaatatctttaattgctttgtcttgaataaagctttgagacgcatgtgatcttttggcatcatcaaaacatcagcttgatcctttgtctacaatctccccctttttgatgatg

SEQ ID NO: 251039 - DNA, 459 bp, Glycine max
agctaggtctttgtgctcattcctctgatctttgtttccctatagactactatattagctctctctgtcatcattcatctcttgcatgcacccagcaataagtggtatgggcaatattggtgtctccaaggactgaaatttatttgtaatttggctcgctcttggaattacaaattccgggcttctagtttttttgctacagaaaaatgaatggtacagaggaaaagcctatgactgtgagtgaggaacatgatgcaggttcttgcagaagaacattttctcttcccgttcaaaaggtaacagtttctgttattcgttctgcatcttctttagctataatctattgcggacatatggtctggttttgtttcacggactactcacttttgtaaactctagattcttgaatatgtcttttttcgcttcttactttcaacttcttattcttctaataatcca

SEQ ID NO: 251040 - DNA, 413 bp, Glycine max
cctaaaaactcagctttgtgcctcgatcaagagattgcttgttttcgaacgcgctcttgcttcctggctcgtatgcttggattattcatgaaaacaacaaatcccatcgttctttgtcagtttgattgcactattttgccccaattgttattgtggctttttcagattcctaatttgagagggctatgttacgcttgattcggaattgacggattttcatactcgatcgttagataatgatcttgatgctatgatttttcgagtctttggaacgaatctcaaatccggagtgcgttcagattctagtgtatagcgataaagaatacagggaaacaattgattatatacaaagtaaactaattagatgagttaatatgttatacattttacatctatttctagaatattcattt

SEQ ID NO: 251041 - DNA, 466 bp, Glycine max
  unsure (1)..(466): unsure at all n locations
agctnggatttccatttagaaggtaatctactctttcctaagatggagccaaacccaatcacttaataactaaacagttaagcatgcttggcttggagcaattatgggatgagtgaccttttgggaagttttctagaaagtgtgtgaatgaagacaaaacacgttgaaaagtctcatattagtttatgaggataatgaatgatcttgagagcagtcgagcggtgtcagagctgtttgtcaatgtttgaccaacgaggagttaagtgaagtgctatcatgtgaaatgtcatagtgtgttagtgttagttttcttatacgactaacttttgtatagaaaatctttccaaaatgtatataaatctcccaatttatggttatttttggtaggattgaaatatttctagttagttttcatatgtgctcagtagaagccttccttantgaattaatgtaatttcacctaaat

SEQ ID NO: 251042 - DNA, 401 bp, Glycine max
tacatggatcaccatttaaggaaattgattacttgtagaatttatccacggaatattaaaaaaaaaatagaatggagggcaatacttaaatatgaccgtcattgtctatgtatgagatagctaggttactcatagagaattagtggaatacacagtacacaaaatagtcaactgcttaagctcctccgatttttgtatgagcaggaagtcacaatatcaggctatcttaaccctccctcattgacttgggtttatgggttctctgtagcattttattcatgactatttcaaaggggttaccactacagaacttgcagagattatacagggcagccttcttgcattattgattctttatttctcatcattattattttctgtattggaggatgtcttaccct

SEQ ID NO: 251043 - DNA, 451 bp, Glycine max
  unsure (1)..(451): unsure at all n locations
agcttcctgtggatgatgctctcctacaacctaagacaagttagcaagagataacactgtataggcttaaggtttaatcaatcaataattcattcagctcaaattgggtgcaagggataaatcattcaagcacgtgatcaactttttggctaagtggcttgtagaagcaaagcttcaaagagtattttgatgatgccaaagattattaaagatccattcaaataagattaaagaatcaataagattcaagtgaagaatcaagagaagactcaagatatgcaagaacctcaagaaaagcatcaagataagtataaaaagaatgtttcgaagaanaaattgaatagcacaatntgtccaaaagaattnttcaaagaanaatcttttaccaaaatttttactctctggtaataattactataaggcagtaattgattaccagaagcccaaaaca

SEQ ID NO: 251044 - DNA, 400 bp, Glycine max
  unsure (1)..(400): unsure at all n locations
ntgatgatatggtcttcaccgacgaaaggatctaagtgggtctaaaaagaggcaaatctgatcatcatgctttgataaatgccaaaaaaaactagggcaaatgaagaaggtgagaatgagggagaagcctatgctgtgactgccattcctatatggccaagtttcccaccaacctgacaatgtcattactcagccagtaacaacccatctccttacccaccacacagttatccacaaaggccatccctaaatcacactacaaaacccacctaccacacgaccaatgctaaaacaccacttttagcatgaaccgaagcaccaaccaagaaatgaattttgcagtgagaaagcctgtagaattcaccccaatttcagtgtcctaggctgacttgctcccata

SEQ ID NO: 251045 - DNA, 467 bp, Glycine max
  unsure (1)..(467): unsure at all n locations
agctntacataaaagatcttttatttccatattttttttcatcaagtgcaatatgaaaacaagttcaaatgaagttaaggctaagtatgttgcctctgcatcacccctttgagaataatttgctcctccttcaaaaatattattgagaacagtgcaagttgctaaatacattcttaacaaactaaatattgagtgaaaataagaaccacatcgagtatctccatctctttgaaaggtaccaatttgatttcctccattctttgtttcaatttcattattggaaatcatattttgaattttcataatttaggcatcttgaagctcatcatgtcttttagaagaactcgcaacaatatttataataaatgtcaagtttgtaaagaagtgatgaatatacttaacttctccagatgatgtaactaaagccgattgcaatctatgagcctatgcatgaacatactaagcat

SEQ ID NO: 251046 - DNA, 394 bp, Glycine max
tcaaccctgatggttgtgaggagtatgtttgtcttgtccttggttgaaggacttgccaaccagtgtgggggtaggtcacttgacatgctgagtttctcctttgatggttatgaggagtaagtatgagctatatctgattgaaggtcttatcactcaatttggtgacgggttggtttgacctccaaagcttctcctctgatagttatgaggaggaagtattgcttccacctgattgaagatcttgccaaatagtctagtgtaattcatgttgttaaacttggacctttggcgatggtcatcatagttgttgcgagtgagcaaaccaaggggatgccttgggctttgtaggagtacaaaccgaaggtagaccttggattttgcaagaatgtgtacc

SEQ ID NO: 251047 - DNA, 460 bp, Glycine max
  unsure (1)..(460): unsure at all n locations
agcttctatataagctgaaccatnttatcatttatcacaggttgagttttattcagaaaaattagagtttatctcttttatcttagtgagaatgattctcctaagtttttgagtgattcaagaacaccctggctatatcaaaggactttcacaacctttgtgtgttgccctcgccagaaagagtgattctttccttcctttcatcttcaaccttgttctttcaaaccacaattccagaaaatccacttctacccagaattatctcgtggccataactcccattttacacgctcaaattaaatgattcttgagcctaaattgaatttcaaaatgatatctttcaccttattntggaatcacctcatttggagtcctgtcgcttgangtatagtcatttctatatttctgtccaatcaccacttaacctacgttttatcatctcattcttccattttatcca

SEQ ID NO: 251048 - DNA, 404 bp, Glycine max
tgcatacaagattctccttgcctgacacttcataatcttcatgttgggtcatatagatgtcttcctctaaatccctatgcaagaatgcagttttaacatctaactgctccaagtgaagattctctgcagctactatgctcagaataactctgatggtagtcatctttacaactggagagaagatctctgtgaaatcaattccttatttctgctgaaaccctttcaccacaagtctcgccttgtatcttcttctaccgtcagattcttcctttagcctatagacccacctattctgtaacgccttctttccttctggcaatttagttaaagaccatgtcttattcttctgaagggatgtcatctcatctttcatcgctagctcccactcaatagtgtcattcccc

SEQ ID NO: 251049 - DNA, 445 bp, Glycine max
  unsure (1)..(445): unsure at all n locations
agcttacatcaacaaatagaagaacacaaaatctgtcttctatgaggactnttcacaaacactntgtgaatcaagaacaaccaaggcttaaccatccatggcagaagctaaaacaatacttaaccaccttggacaaatgtaaacaaatgaacaatgcttaaccaccacacatggcagaagctaaaatcatcaaaaaaagcctaaaaggctcaaaacaataagccaaaacaggccaaatatccatgaaacaatgaaaagattaatcaccaaacagttggtgtgcagctttttaaaataatacaagaattcaaacagtagccaataccttcaaaatcttcaaaagcatttaatcaaaaactttgtaggcaaaaactgggcagtgctagacatggagagaaccttgagatctaccaaactcaaggtcatcaaattcaacatcaagcct

SEQ ID NO: 251050 - DNA, 398 bp, Glycine max
tgtcagtttattcccaaaaacctgcctagactttttatattgctttcaattgaatgacaatagtctctaaatcaattcattggcgtatcagttcactcacttgaattacaacatgatagatacttaactgataaataatatatatgtgatatgagtaattaattaaaactatatatatataggacaaagatatattattgattaaatttttaaaaaacaaaatattgttagtgattatttttttaaatgaatatatgtaacataattagaattgacagtaaactgtatggtaaaaaacacagttataatattaagaaaaaaatttaatcaaatctcctatattaaatataactatgcttattataataaaatattaaaataacacaattgtatttgga

SEQ ID NO: 251051 - DNA, 400 bp, Glycine max
  unsure (1)..(400): unsure at all n locations
agcttgctcgctaatcttattgagcanaatttaattgtgatatgtgctcactcgctaagcgcgtggctatcatgcttagcgcatgagtagaatttcctatggcacgttaagcgagtcacttgcactaagcgctcacgctgactttcacgtttattttctgcttcttaatttgaataaactcctgtgtaaccttgagctttgattcttttgtatcgcacatggcttcccgcaagagaaaagccatagcttcaatgtctcacgccgggtatgatacatcaagatttatatcacaggaggcctgtgaccattacttagataatgtgcttgccaggaacattctttccaaaagagatgtcaagttgtatatcaatgagtttgatgatgtcagaagagaattgat

SEQ ID NO: 251052 - DNA, 401 bp, Glycine max
attcttgaggccctaccagggtagatgggaggtcttcgttttcggcgtcgttaaaccagatggccccttgtacataaagcacgaagacctctccgaaatcgcatacggtggtcaatgtctcagcatatcagtgttacagttgtggataatgtaagatctttatataaaagactcttaattacctaagctatggctttcaattcataaatatttaacttttacttaacataaacaggcatctcactgaaacatgtatgcgagcggggaattctgatatctatggattccttgagccataggccattcagaggtctgggcaatcacaaattgaatctgaaagttacataaagagttggaagcacagttcacaatgcgatgtgtatcttggagcctacctaaat

SEQ ID NO: 251053 - DNA, 459 bp, Glycine max
agctttgagccaaaatcctgactcactatatatcttgacccaaggtgagaatgtcaatccttaccctcggaagcaaaaataagaaggaaaggaaatttccaatcaaaggaagataaaagaggagaggaaatttccaatcaacgagaaagaactgaagaggcaaggacattcccaatcaaagagtgggagaaagagaaaaaagagaaagacaagtcccatccaaagaatgggagaaaaagaaaaaagaatagatcgaatagtcccaaccaaagaatgggagaaagtaaaaaaggaaggaaagaaagttcctgatcaaagaaacagaagacatgtgcaggaaggtcttttgaccagacaatatctgaacaatacagaattgtcaccacatgaacaaaaggaaggaaaggaaaccatgacctaaagtggtcttctccctttgataccacaccaaatcctgtg

SEQ ID NO: 251054 - DNA, 404 bp, Glycine max
  unsure (1)..(404): unsure at all n locations
ntgatggtgtcgagaagaaatcacatgtttgtcatcatcaaaagggggagaatgtgaatgtatgtatacatgatttagatgatgtcaaagaagaatctaacaaggttgcttcaaatgataagcatttgcttcaagaataattcaagattgcttcaacaaataatgccttgtttcaagattcactaaagaccaagccttgccttaaaacaaagtgctttcaagacatgcaaggctctggtaatcgattaccaagaagtgtaatcgattaccagaagacagggttgagaaatagctgttgaaaaaggttttgaatttgaattttcaacatgtaatcgattaccatatgtctgtaatcgattaccagcaacgaaactttggaaattcaaattcaaaagtcataaccc

SEQ ID NO: 251055 - DNA, 285 bp, Glycine max
  unsure (1)..(285): unsure at all n locations
cagcagcacgcccaccaatacaagagactcaccttacatcacagccagcacacggagggcgcgcacatggcgggaccgcacaaaaccgggcggcgacaccacacaatgatgccacaaaggaggcgagaaataaaggacaccaccacaggccaggactcaatggacgcggacantcaggtcaccacccaagcgccacactttaacccacaaacaacggcaacgaagggctcagcgccggaaaccaatccaacaaagggcaaggaggaccatccaacaggcctcaaa

SEQ ID NO: 251056 - DNA, 214 bp, Glycine max
ttctccattataaataaacaagagatgcggccatctaagacacccaacactacacaggtaaacattgttatataacaaaataatccctgaatttaactgaaacaccaaacatgtgtcagcaacacagcaaaaatatagacgcttctaaatagtcgatatgccgaaaatatacacaacctaatgatttacaagaccatatgaagagatataaaac

SEQ ID NO: 251057 - DNA, 453 bp, Glycine max
  unsure (1)..(453): unsure at all n locations
agctntgagggtgcgcagcccaccatctttttatagtggagtaccgataatgtgtctaccatcacgattatcgtctccctttccattattgggggtaccacctgngccgccagatccctccaccttttgggcgtgttctttgaaagatccgtccccctttttgcacatgttctgtagttgcatcctatccgaaaccatatcaaaattgtactgatactgcctaacacaggcaaccattaggtccttccaagaatggactcgggaaggttccaagttagtgtaccaggtaacagctaccccagtaagactttcttggaaggaatgtatcagcaattcctcatcttttgcgtattcccccatcttctgacaatacatctttagatggttcttgagacaagtagtcccctttgtacttgtcaaagtccagccaccttgaacttgggaacgaccatg

SEQ ID NO: 251058 - DNA, 402 bp, Glycine max
tcaagaaaaagatggcctcagcaaattccttattttcagaagggaattctatcaatagacctccaatctttaatggagagggttaccactactggaaaacccgaatgcaaatttttatcgaggcaatagatctaaatatctgggaagccatagaaatagggccttatatacccaccacagtagaaagagtttcaatagatggtagttcatcaagtgaaagcataaccatagaaaaacctagagatagatggtctgaagaggatagaaaacgagtacaatacaacctaaaagccaaaaacataataacatctgccctaggaatggatgaatatttcagagtttcaaattgcaagagtgctaaggaaatgtgggacactcttcgattaacacatgaaggaacta

SEQ ID NO: 251059 - DNA, 474 bp, Glycine max
  unsure (1)..(474): unsure at all n locations
agcttcagaccaaagcaacacataatctatgttccttaacccctcaatttaatggattntcaaggtttgagaagtgaacttgataatggggtaaatttggagcaaactctcacctcacaccagtctataacatcaatttaaacttgttcaaactggatttacacctaaaattccaccgaaccaaaatttgactcctcaacacccaattttaccctagaatggctctttgttcaatttggtcatttgtttttctctctagcacagcccaaactttctcataagtcttaaatgacatttcaagctaggattaactcactttaacctccaaataccactaaatccagatttggccttccaactctcaaaaactcactctgtttccactcataacaccatattctcactgtctaaccctaggttaactctacctttcatctctaacagtttnccataagcaatttcagcacataaaca

SEQ ID NO: 251060 - DNA, 403 bp, Glycine max
tcgtcaaactatacaggataatgccacggcgatcttcttcaatacagctaaggaagcataaccggtgctgcagcccgcgataaacttgggttgagatattaacacgacgatgttcgggcggaggtataatactcaagcttacccttatggcttgcctacggacgatttgagccaagcccctaccttcgaggggcaactccctacttatgccgactatcccctgcaagaagacgataaagaagatgcccatctaggccctctgctgcccctcaaggatccggccccccatgaatttacccaaccaaacatagtccgccatgtcccgtatccacccgcacccattaaggaatgcattcccttcgtaaaagataatggaaagattgatttacttgataagaggctg

SEQ ID NO: 251061 - DNA, 439 bp, Glycine max
  unsure (1)..(439): unsure at all n locations
agcttatacttgaaaataaaatgctatatctctaaagaacaagagactagttcaattcctcatctccctctccaaacaaaaaaaaaaacgatcagaatgcaaaattgtaattcctctaggatttaaattaaaattaaaatttccaatcattatggttccatcgttttcaaaaaaaaaaaaaaaaatcaactccatgccgcactccccccaaaaaaagcaccaatcagaaaggtgtccttatcatccagatgttgatgatacccctaacgacaaagaaaaaagtaaaatgcctaattccacattggaaaatatcatgtatatcatgtcattctactacctttgatggataccttgcggatgattcatgagatcaagaaatgttaattatttcatgaggaaaacttatagaanaaactaatacacagcttctcaagtaaac

SEQ ID NO: 251062 - DNA, 396 bp, Glycine max
  unsure (1)..(396): unsure at all n locations
taatcctcacgtcattggttctctcatatgctcaagtgtntatggtaattcttcaaataaacaaccaacacaagtcccaacttttgcatttcatctcattccatacgatcacaaacacacaaaatgaatctgaaggactttcttggcttttaatgaggttgggctacaaacaattcatggtttttttaggatgcaaaacttaggttctagaagagcattcatcctaagatcaccttcctctttaattcccaacttttattgatatgccacaagcacaatgaagttacaacacaattaacagtacataaagcttcacttattcttgaaattctcctctttttttttattttagcagtttatgattactgctgctagttattattactttggctctct

SEQ ID NO: 251063 - DNA, 471 bp, Glycine max
agcttaagaaaaatctagtctttgtggatgttatggattcaaaaggtttttcttgtaaagttaaaggtggagttatgaacatcaaaaggaaagggaagtttgtggtaatgcaaaggactaagcaaggaaatttgtacatcattcaaaggttcactagataggctatgtcttaactctttcccaagtagggagccatgcatccaatggctcatccaatgataattcttagtggcatcaacatctaggccacatgagtgaaaaaggaatgaaaattctaataagcagtagaaattcaaatttccctccaattttgtgtgacagtaaggctataaatagaggccttgtgtgtgtattttttcaactttgatcatttgagaaattacacttcaaatttcaaacctcatttgaggcataaatttcgtgcccctcctctccctctccctccattcatcttctcctaccttcaagctc

SEQ ID NO: 251064 - DNA, 411 bp, Glycine max
aaactcaagcttgaatacacatgatacacacatctgctatatcttattatgaacaacttaagccaagaaagtctcgtgcaataacttgtcaggaatatcactttgaaaacccctgctcgctatctcttcattttcttgcgatgaatatgagagctcaagtcaccttttacagacttaatgaacagatctattatgagattagcgcttgacttgatatgatcgctatctcacacctgaaggcactgccatgtgtagttttcttgtggagagagatagcaacatgtgctccttcctctgcgacactaacgacttggaagaatatcctcccacaatacttctattctcttctattttatgtgctttcctactcgaaaatcaaatgttaatcatttacaacatgagagataaaat

SEQ ID NO: 251065 - DNA, 433 bp, Glycine max
  unsure (1)..(433): unsure at all n locations
agcttctgttatgaatttcaagcgtctcgatacactacgcgacacaatcggacatccgagtaaaaagttaatgtcatttcattnttctcagagcttctattctgaatttcaagcgtctcgatacactacgcgacacaatcggacatccgagtaaaaagttattgttatttgattttgctcagagcttctgttcggaatttcgagtatctcgatatactacgggacacaatcggacatccgagtaaaaagttattgtcgtttgattttgctcagagcttcaattccgaatttcgagcgcctccatatattacgggattcattctgacatccgagtaaaaagttattgtcattcgatttagctcagagcttctgttctgaatttcgagcgtctcgatacactacgtgatacattcggacatccgagtaaaaagtt

SEQ ID NO: 251066 - DNA, 407 bp, Glycine max
ttgagcaaaatcaaacgataataactttttactcgtatgtccgattgtgtcccgtagtatatcgagacgctcgaaattcagaacagaagctcttagaaaaatcaatcgacaataactttttactcggttgtccgattgtgtcccgtagtatatcgagatgcttgaaattcataatagaggctctgagcgaaatcaaacgataataactttttacacggatgtccgattgtgtcccgtagtatatcgagatgcttgaaattcagaatagaagctctgagcaaaatcatacgataataactttttactcggatgtccgattgtgtcccgcagtatatctagacgctcgaaatacagaacagaagctctgagcaaaatcaaacgacaataactttttactgggatgtccg

SEQ ID NO: 251067 - DNA, 468 bp, Glycine max
  unsure (1)..(468): unsure at all n locations
agctcgtaggaatatggggtacccatcacatgtggtactaggtggcggtcgggcgatggtgcacaacaagttttccacatccacaaagcgcacataaacccaccatcccctgttgcccacctccaactgagctcacgtactcccacgtagcccatatcctcgtttctctcaacaccgggtccccatcaatcctcccaaacttctccaacatccaagtaaaacaacattcaaacagcacaaattatcacagccaagagaaacagagcaaaggcaggaaactctgccaaaacaccaaccaaaatcacagcttttctcacttaaaaaccccagtaacaatttcttctttccaattcgttaaccgttggatcgactccacaaatttactggaagtctctagtacataagcctacactttgaccgttgggatctactagcanacacccagaactcattctgcactgctctttc

SEQ ID NO: 251068 - DNA, 308 bp, Glycine max
tgaacatgttttgtcctttacatgcccaactcgcttttgtgacaccctctatccctcacatatatatactaataataaaaggaataaaaaatcaaaattaattaaaaaaatttaaaacacatttaaatacaagctcttcaaaagggtaaaagactcacattcacttttctaacatcataataaaaatgtccaaataaataataaatcatctcggcttaaaacaaggttgtccaagactttatacaattaatatagaaactattggacaagtgacctcagatatcttaagaagcggggggggggggggg

SEQ ID NO: 251069 - DNA, 477 bp, Glycine max
  unsure (1)..(477): unsure at all n locations
agctntacagacctgtaattctcacacttgttgatgttaccacacctgacacaggacaatatttgtcaacacatgagggctcgacaaactcgtcaccctttacttgtcaaggatactaccctagacaccaaacaatatccctcgacacatgataatccctttcgacactggacaatctcttttgcctgcaagccgactcagagcttggagggcttatgtattgtccagggtccaaaaaatacatgtggcaccttacatggcacttcgagatacgtgtcaacccttcacatcaaccttggaactggagtacagacactcaacccttagcagtcaggctctctaactaacaagttatctctaacctattaatattcgaatctccttatctcttgccagataattatcnatctacaagccacacatatctacaaggtacatttatctactagcaattatccttaatctacatgttatata

SEQ ID NO: 251070 - DNA, 406 bp, Glycine max
tcatccgcagatccctcatttaagactaggcctattttaaacagcattattgtaacaacataattaaaaccaaaacttaatccacagatccctcatttaagactaagttttgatcctgcttcaatcaagttctaaggcaacaatacattttccaatgctaaagtcacctaactatgcacacaaatgggtgatcagaccaaaagcatacacacatcaagcattgaatgaagcattgaacacagaaaacacaatcaattagatattatgtatttacatcagttgttcattagaaatccccaactagggtgtttagccaaccattaaaatgaaaccctaacaataaatgagattaaaagcagagaatgatagtttcttacacaagaagggggattcctcctcttcctct

SEQ ID NO: 251071 - DNA, 419 bp, Glycine max
  unsure (1)..(419): unsure at all n locations
agcttccattntcaatttcgagcatctcgatatattatggtacccaattggacatccgaggaaaatgttattgctgtttgaccttcgtaggagcttctattttaaatttcgagcgcctcgatatattacaggagtcaatcggacatccaagtaaaaagttattgtccgttgaatttgatacgagcttccgtttgaaaatcggagcatctcgatctattacggtactcaatcagacatacgattaaaatgttattgttgttcgaatttgcccagagcttctatatntaatttcaagcgtctcgatacattacgagatgcaatcggacattcaagttaaaagttatggtccgttgacattgatacgagccttccgtttcaatttggagcatctcgatatattacgggactcatcggacatc

SEQ ID NO: 251072 - DNA, 406 bp, Glycine max
cttactctctggtaatcgatgaccagaggatgtattcttttaccagtggccaaatacgttttataacagctataaaaaatagaattcgaaattctaaaagctgtaatcgattacacaattgtggtaatcgattaccagcagttagtaaacgttctaattcaaattttaaaagctgtaatcgattacacaattgctgtactcgattaccatacaggaatttcagaaaaataatttcaagagtcacaacttttcaaaggctttactcatgaccaccaatggtctatatatatgtgacttaaacacgaaattgctcagagattttcagaacaacaaagtgtttatcctctcaaaaagcaatttcattttatcctcttaaagaattccttggccaattcaattgcaattc

SEQ ID NO: 251073 - DNA, 464 bp, Glycine max
  unsure (1)..(464): unsure at all n locations
agcttgcanaatggaagcaaagatatctctctatctatggcagaataaccctcattaattttgttttaacagccttacccatttacttgctgtcttttttcagaatccctaaaaaagtggttcacaagatagtctctattcagagaaactttctttggagaggtggcaatgaggcagcaaagatcccttgggtcaagtggcactactaaaaaaaaagctttctacatcgcccaattaacatcggttatagctaaaaccgatgttagcgaaagcgtagtggcattttgtaaataagtagacttagttaacatcggtttttccaaaaccgatgttagtatgccgttgttaacatcggttctgtaaaaaccgatgttatcgagtcgatgttaacatccgctttattataaccgatgttacctagttgatgttaacatcgcgtattttaacacaccgatgttgtatca

SEQ ID NO: 251074 - DNA, 402 bp, Glycine max
ttgactaccgctcttccttcccgtgatgcttctctttatatctgcctgagtgggcttatagcctaacccatacttcccacgatttcctttggcatttatcaggctagttatgccgccgttgtctttgcctaaacccattccgggttcataaccgttccccaacataactcgggccatcattactgctgcatcggacaggcaagcttgcccagagaaggaatccacggaggaaatgcttaccacctcgaaagactggaaagcggtttctaatgactcctctgcggcctccacataaggcatagaggatgggcagctcaccaagatgtcttcctcgcctgatacaatgaccagatgcccttccactacgaatttcaacttttggtggagtgtagagggaacaac

SEQ ID NO: 251075 - DNA, 478 bp, Glycine max
agctttgatgcaacatttggagaggttaatgtaataacgagatgatgcgctccatgagaggttggatcaaatggagaataaagatcataatgaagaagaaaggaggagaagagggaatgagggtgttcctagacaaaaccgaattgatggtattaaactcaacattcctccctttaaaggaaagaatgatctggaggcctacttggagtgggagatgaaaatagagcatgttttctcatgcaacaactatgaggaggaccaaaaggtgaagcttgccgccacggagttttccgactatgctcttgtgtggtggaacaagctacaaaaggagagagcaataaatgaagagccaatggttgatacatggacggagatgaaaagatcatgaggaagtggtatgtgccggctagttactcaagggacttgaaattcaagatccaaaaactaacccaaggcaacaaggcggttgaggagtatt

SEQ ID NO: 251076 - DNA, 403 bp, Glycine max
ggcatgatttacatctccctctttctcaagcttattcttcttgatatcatcaaaattttcatgatttacattctccccctttttgatgatgacgacaaccacctgtaggttaggagcaacaacaaagaaaatatctatttgcatatagtttactcccccttggttttacaatgattacttatatgagacaattgaagatttcatatttttcatatataaaaagttgtctcataaaacaatagataatttttcttactattttatcttttatctttctctccccctttgtcaacattaaaaacaaatcatgaatagagaagagaaagatgttaccacttgttgcaatgtatgagaatcaagtgataccaaaaggcattaaaacaatcattcaatattaatcaag

SEQ ID NO: 251077 - DNA, 403 bp, Glycine max
  unsure (1)..(403): unsure at all n locations
agctttaccatataaatgttctatggaatttctttgatantacaactgcaaaattatgccttatnactattttttaatagaaagaatatcattttcttaatcagaaaacaattgttagaagaaacaattctatctaagcgctcaaactaatgataatcattaacacaatttgagcaaattacacccatcactcctatatatattttgggcttattacactcaccatcatctttgttggattcttacacaagccttcctaattttagtaactttgttacacaagcatatcctacgctgtaatcgtattacttccgttaagcccaaatcgtcatgtgcaatgaaaaagttggacacaattgtccccgtcttcttcacaattgcaaatctggagaaaacctaatat

SEQ ID NO: 251078 - DNA, 402 bp, Glycine max
ttgaaaatcattgagaccatcatttccaacattttatctcttcaaatatataatacttgccaacactaaactcgttacaggataaataaataaccatacactctccctctccatcaacttctctcttcattcccctttatcattcttcctcctctctctctctctctctctctctctctctttggagtgaaagtactattgaaggcgtcatggatatatcagaaaagcttctacaatatagataccacataaccatagcaatagtagtttcattatcattttctttgctgttatatgctgccccccactttctggccattctggcctatttttggcctttgtttgcctccactactgtgttcttagtagcaataatagcctttggaggcgtttcaaaactct

SEQ ID NO: 251079 - DNA, 425 bp, Glycine max
  unsure (1)..(425): unsure at all n locations
ctgcaagctatngattatttgcttttatctgtttaattgttgtttctatatcggctaatatgaaatcggtttcggtccttaatggtacaaattttaaagactataaagagaacatgctgattattattggctgcatggatctataccttgcattaaggatttagaaaccccattcttctacggatttaaaaggaaactctatgagaagtgggatcactcaaatcgcatgagtcttatgatcattaagcgtggtattcctgaggtctttaggggtattatttcagatgatataactagtgccaaataactccttgctgaaattgaaaagcactttgcaaaaacaagtaatcttcttcagaacttaatttccatgaagtatcaaggtaaaggaaatgtcagggaatacattatgggaatgtcaaata

SEQ ID NO: 251080 - DNA, 403 bp, Glycine max
ttttcttcctctcacattctcactaaaattcattttctctaaccttttttttttaatttctgatctaattttgatttcccctaatttcatttggcaaagagatcatagatttgtgcttggatcgcattcgaaaactcacacacaactgcactagtctccagactcacttccttaaggtttgatggcactatctatgtagatattactgagttccacaccaaccttgtgccataccccagggtccacttcatcatttctttgtatacttcagttatctctaccaccaaggcctaccatgagcagttgtcgattttagagatcacgaatgccatgttcgagcccccgagcatgatggccaagtgtgaccccagacacggcaagtacatgggttgctacttgatgt

SEQ ID NO: 251081 - DNA, 387 bp, Glycine max
  unsure (1)..(387): unsure at all n locations
agcttgaagaaggctgagcaaacggttagcataatgcagcacgagaactgcatataanaggaagaaagcgctcctcgtgatggcgcgttggacttgcaaacgcaacccgcaggctccaatggcgtttccttcctgcttcctgcagctgcagcagtctgctgcagcactgtgcaccctgtcaccttctgcaaagctaaaacgccagtttgactggcgtctttagtctcccatgcacaacgcgccagtgcaccttgcacgtcccactccatgtaagcaaaaggccaagccgctgctgctacttgcgcgtccctctccacatggcagctcctacgcggaagcgccatggtggggcgccatgcatggcattcacgtaccaaaagagcacct

SEQ ID NO: 251082 - DNA, 398 bp, Glycine max
tgcttctacaatattctaccatttgcagttttattggatgatcacttagttgttggacacgaactcaatgaccttgaagagggaaagctaaggcgactttgccttgtttatgtatatgttgacaacaacttaaataatgatttatataagtgaccatcaacttatgtaagtcgcgaggaacctaatgaaaaaaaaaaggaaaaagcataattattttccctcctcaaagtcactaaatctatttcctttgaaataattccttacgatgtcaatgacttattgatagccaaaaatcaacttaattggaatacactatctaacatattgccttccataaagaacataaagggatgctgacaagtttccattcaaattagccattgatgacaatgccaatg

SEQ ID NO: 251083 - DNA, 468 bp, Glycine max
  unsure (1)..(468): unsure at all n locations
agctngtgcctcttcacgtctganatatgattgtagaatatagatccaaagacccttaggtgctttgctgatggcttcttcccattccaagcttcaattggagtcttatcttttacagacttagttggacatctgttgagtatgtaaacagcagtgtagactgcttcagcccagaatgtgttaggtagtcccttttccttgagcatcgatctagccatttccataactatgcgattctttctctcggataatccattttgttgagaagaatatgcgactgtaagttatcgctcaatgccttcatcctcacaaaatctttcaaacttgcgagaggtgtactctttgtcgcgatcacttcttagtacttttatccatnttccactttgattntcagcaagggccttgaaatttttgaatactccaaagactttngattnttcttttagaanatatacccatgtcattata

SEQ ID NO: 251084 - DNA, 361 bp, Glycine max
  unsure (1)..(361): unsure at all n locations
tgntaataattgtctttgcctcatatatatattgaggaaactttgctttttcaaatgcgtcatttaacaaatccaatatcatagtcattgccttatcgcttaatccacacaaaacttttatatgatataatttgattataaattctagttttgcgtaccttgcttccttcatacaatgtttggctcccgtcctttagaagctcataaaagccattatgatcttcttttggttcatcatttactatttcatcttcatttaaaggctgtgatgcacctacattaaggtcatgttgcctatatcggtcaaatgcgtcattgatcatcatttccattgggttttgaggttcaacaccaatatctt

SEQ ID NO: 251085 - DNA, 482 bp, Glycine max
  unsure (1)..(482): unsure at all n locations
agcttacaaatctgttntaagtccaagcccatatatatatttaaatctagataagataagataagacaaaatctagatgaaataatatctagatgaaataaaatctagataagataagataagatctagatgaaataatatctagatgagataaaatctagatatgataagataaaatctagatgaaataatatctagatgagataagatttggtagaataaaatagtctgttatcttcaagtccaagcccaattttggattcaagcccaattgcttataattctgctaaaattaaattaaaaacacaaaattaatccaataggcccaaatgataaaactgcataattaatttgacaattaaggctaattagtaattaaaatggtgacacaaagagttaagaaataagagaaaatgatgacacatcacgtgcctactgtgctaagcgaagttcatctttgtggatgaacattcatcttcctg

SEQ ID NO: 251086 - DNA, 403 bp, Glycine max
ttgacaccaacaagtgtatcaacccaatcacatccttgtttaatcatgtcttgaacatctcgtggttgaacttcaatgctgcttcccagtaccaatcaatggcaccacgtgtggcaccccaatataccaaagagggtacttcaaccccaacgcagattccaaggtgagtgtgaatctcaagtgcgaatttcacgtacaaacttatgggaatgcttaggccccatgaccatggttcattcatgaatgcacttgagagggaggaagagccttcattgatgaaagcaaggatgcaaatggagaggaagtgaaagattttgtcaaagtcaagccctccttgcaaattagccatgttgttgaatattgatgatgagacaatgaatgaagaagctatgtgctacaaatt

SEQ ID NO: 251087 - DNA, 431 bp, Glycine max
  unsure (1)..(431): unsure at all n locations
tgcttgcttgtacctgcagaaactactggcattattggatttaacgactctcaacgagaaggagcctcgaagctgattttcctttattttcttattcttttacattccagtttttcaacttcatatattagataataacaggtttcaataaatctacttacgcacctcaattgtgtcactaaatcacagcgacattttgcaaggatatgcaagagtgccaatgagctgggtttcacgtgaactttgttggaccaatttaactaactggacacaaacttgaacagatcanaattgagacttatcaatttccgcctttggaacaacaaatacatacatacatacaaacatgatattntattaggccgttatcacacaagggtgctgtgcattttcattggtgtggtctccaacaggagaagaaacaataatcg

SEQ ID NO: 251088 - DNA, 166 bp, Glycine max
aaacccagctccttgggcatgccgagaaaaaactttggtattcgtctcaaaaaatgctaatccgagataacaagggcacgccaatccccccggtttttagacgaacttatgtgatccatttatgcgcacacggatagcgcataatatcctaccattaaagccaaca

SEQ ID NO: 251089 - DNA, 397 bp, Glycine max
ttagcaactgtttcttattgtctagtcaaaacttctaatgctctgaatctctcctcgtctaaagcaactaactcatctgacatcattttccaataatggtcgatcggaatgtccattagactttgtactctggctgattgcaaatgtatttcaaccggaagtacaacatcctgcccataaatgatgcgaaacgggcttttataacttgattccttacgagaaattctacatgcccatagaacttgatctaacgttttattccaattgcttggcttcacgcgcaatgtgtgttataatcaacttaattacaatattattggctgcttcaacctgaccatttgcttgcgcgtaatatggcgctgatgttaataatctaaagccacttatatgagcaaat

SEQ ID NO: 251090 - DNA, 342 bp, Glycine max
aaaaaccaacacccactcgagaccccccaaaaaaaaaccacccacttgcgacgtacacaggcgcacacaagaaccactataactcctccaccgaactggcgcagccaacacccatgaaacactcaccaaagaagaaagacaaagagacagaaactggacaaccctgagaggacactcatcaccaacatccgccacagcaagactgggaatcacacccctaacaacacctacaaggccagaaacacactgacccacaaacacaagactactctttctctcacaccccgaagtgccaacaacagtagcaacatcgtgaaccgcaatacgaggcaacaccaaccc

SEQ ID NO: 251091 - DNA, 408 bp, Glycine max
caagctttagtggtatatgactaattatggtttattgtacttgacttattagggtttagggttatttgaaaagatagggttgcttgactaattgggtttaggggtatttgacaaataagggtttatggttacttgacgaattcagatttaggggtatttgactaatgagggtttatgtgtagttgagttaattagggtttagtgttacttggccaattatcgtttaggggtatttgacaaattagggttacttgactaattagggtttatgagtatttgaaaattaaggtttacggttacttgacaatttggggtttaggtgtatgtgactaattaagatttataggtacttgactaattaaggtttactggtacttgactaattatggtgtacggctatttgacaaa

SEQ ID NO: 251092 - DNA, 425 bp, Glycine max
  unsure (1)..(425): unsure at all n locations
acgaaatcngatacgaaaggagcccaaacattacctattgctgacttacgcaattgtacttcatagatcactcacgattcatttgtgactaaccggatcacaatcgtgaatgtgataacgacagggcattagtgctgcaaacacgcttatttcgtgacgctagaataccccgcgttggttgctcgcgcttggttcgcatgtatgttcgaaagacacgggagtatgcggttctagaaagtgcaaagactcaagatgatctgcaagcaagggcgagcactggcaaactgaatgaacggacgcgggattgctgacaaatgatagcactgacaataccgtgcttgcatgcaaaagcagcgagatgcttttgcaatataagttaagatgactttgttgagcctgcctacaagttggaaaacatttataaa

SEQ ID NO: 251093 - DNA, 444 bp, Glycine max
ccgggatccttaagtcacctgcggcatgcaagcttctgcataattagggagttctatagtgtatttgtccaagttccagagagtttgagacaatctgttgtgtgaagatccgcaaagaccacagctggaagaggaagctgtcctgagagcttgagatgagtttgtgagtgattgtgaggtcctataggtggaggagactgatgcaatcctaccccgcaagggcattggatagaagactccaagtagattgggccaaagatgcaagagaaggccctagggttcttatgggccttagggtagatttcgggcccatgggctaagtacgagcccacttatctttgtacatattagattaaggtttcattaattttgggtcttgtatttagggctccataatgtaggtagggtaccctacaaatataggaatttttagctcttgtattt

SEQ ID NO: 251094 - DNA, 402 bp, Glycine max
  unsure (1)..(402): unsure at all n locations
gctatagaagnttctgtggactgccagtcttattttaccagcaataccttcacctacaatactgaatagtaacggacctatgggatccccttgcctcacacaccttgaaaggagaaattccttacaagggctgccattaatcaaaattgatataaatgctgcatggaggcaagctgatatccagaccacatatcacttgtctcaatctatttgctaacaacttaactatcaccttgtacatacatcctatcaaggagattggcctgtagtcatcaaatgactgggagtgtttggatttgggaattggagctatcaaataaccattactgcctctacggaagctgccatgcacatggaattcatctacaaatcttctgaagtcagcttgcatctttacccaaa

SEQ ID NO: 251095 - DNA, 426 bp, Glycine max
agcttgagatgaggaagtgttgaagggtgaatcttcctgcttttattgttgaccacagagtggtacctggagatatgtcgcgggggtcaggagaccttggggacgtcaggtggggtgctattgcccaaaaccaagcttgaccaatcccgacccaacccgggcatagtcggtcagtgagaacctgtgatgtacctaaacagacgagctcctggcagtcaacaaataaaaggaacaaagaccacaaagcaaggaggcttgtggtggctggccagctgtgaattttgtgtgatatgtggagtatggcctctggtaatcgattaccaagggtgggtaatcgattacaaggcttaaaaatgaagacaggaggctaagatggtctctggtaatcgattaccacggggtgtaatcgattaccaggctttgaaa

SEQ ID NO: 251096 - DNA, 406 bp, Glycine max
gacgctattcgatatattctatgtacccgcagcggtccacattgtgatgaccgcattaatattctcggagcgttcactgtttataccccctcgtgacgagcttaaacgcgcctacttaagacatttgtcggttaacttatgaacaaaataaatttccaccgaacgtcggagttatattatccattaacttcggataaaataaattccgaccgttcggtcgggccgtagccacgtcggaaatcataaaaaaggtgctaacgtagtataataatcagcgagacatcttttagtataataaagcggaaaatcaatcggacgttgtctctttgggatttctcattcttaaccgaatggagtaataactaaagcgaaactaaggctaaaatcaactcgcctagtctagctc

SEQ ID NO: 251097 - DNA, 422 bp, Glycine max
  unsure (1)..(422): unsure at all n locations
agcttatcaccaanacccatttacgacctcttcttctgagaataacacgttaaaacaatacaataagatgtgtgcacaactcaaactgagtaatatattagtaaaatgtaatgcagagatgtgcacaactcaaattgatcaaggacctcaatttaaggtatagtgaggagaatatgatggtggtggtggatgtagctttacttttggatccttacaatcgtaatccacttggaagagtttcctatacaaattagcatttatgtgtccttaatactgaaagctcaactatgtgagaaggacttctgcaattnttaccagaaggataggatataaaaaggagttattgtgtgtgtactctaaagagaaatctctggcaaaagaatttaacactcactcagtagaaataaacgtaattcatttgt

SEQ ID NO: 251098 - DNA, 401 bp, Glycine max
tacaactagtttgtttagaataatataataattttgattatatatataatcaaattgtagctgttacaataaaattatttaataagtagttattaaataacatagtaataattaaagtagtttatttggtattgcctaaacgttaagacatcaaaattcaactttcaatgttcctattttcggaacctacacctatggattatttatttatttatttatttatttattatgttattgatatggagtattgattaattttgttgctaattaattttgattgaaaaatttaactgattattttaatgtgtttttttttctttcacttatgtttttttatactcaaaatttaaattaaattttttattaaagataattaaatatatacgcctactggtcacatg

SEQ ID NO: 251099 - DNA, 435 bp, Glycine max
  unsure (1)..(435): unsure at all n locations
agcttctgactcataatttctctcttttccttaattgctttcacacctaattaatgtgtgttgatcttatacaatacataagagataatgtatttatcttttaaatacataacatttattgtaaactaataaagaatatgagtaaaaaaaataattaatgcaaaagacaacaaaaaaaatcttataaaaaaataaataaaactaataaaagagtcttatatttaaggattgaaaaaaatattaaatttattaatttttataataattattttaaaaatcataacaaaatgatttgtattttgttaacattacacaattattntatattatcagatagttaaacactatttttatcaccaataagtcatatttcacattctttaacccttttgattcttgaagaattagacgtgatgatcaataattgaaatatgt

SEQ ID NO: 251100 - DNA, 396 bp, Glycine max
tcacttaaaattcttgcattgcatatgtatgctcttggtggcttcgatggtgacaaaaaggttccaagtattgaagtgtttgatcctcgtcttggggcatggacaatgggggaaccaatgaatcattgtagggggtattctgctgctgtagttgtcaaggaatccatttatatgattggaggagttaaagttggcgagaacattgtagatacagtcagtaaatctattaatactaatattttgcctttgaagaaacatttaggactagcctcataaatacttcataactaatctaagtatatacattacaggttgagaattataaggaaggtcacggatggcaggaaacttgcactacagctgctgttaaaaggtgcttcttgtcagctattgcct

SEQ ID NO: 251101 - DNA, 452 bp, Glycine max
  unsure (1)..(452): unsure at all n locations
agctntggtactaatgtcaagttaaagagggatatatgagaacaagagaaagtgtgtctatgagtgagtgtatatgatgataatacatgcactgtatttataaaaaaatattcaataacacaatttattcgatgggatcttggtcgttcaacttgcattgctccaatcagtgttatataggtcattgattttgtcgttgggatcttgaccattctttttgaagtgcatgtgatgagccattaaacattataaatatagtctacaatgaggtagtctaatacatcaactcaatcaaaaaccttactgctaccctaaaccatataccatgacttcatcatcgatcactgngattgtgtattacaatggcatcatcacaacaactaaacatggttcaacgttngtatacagttcaccaaagatcgtttaactagacaacaaaatgtcacttgatg

SEQ ID NO: 251102 - DNA, 399 bp, Glycine max
tgagctcgttactactgcccatagagcccctctgaacttgttcctactccattcttcctttttaggactttatgtttcctactctaacacttcaaccgtggtcaggttgacatctttcacctcatcatactctttcctgaccctagtgattgtcgtctttagcttcactttcaccactcttgtgttttttagctctactttcaaaacttgcacttcttcattttcctcaagaatttcagccttttttccacttagactttttaactttgggagccaagttatcccttgcattctagacttcaaccacttgtgatagccgccgatgtcaccattgctacttcctttaagctccttatctttccttcccactctattccacgctttacgaattttctgaag

SEQ ID NO: 251103 - DNA, 471 bp, Glycine max
  unsure (1)..(471): unsure at all n locations
agcttccagcatggtggtttgtgatcctttgttaacaaatntcaagccacgctctcaaagtggaatcagaaaattttgtctatgggtggtagggttaccttgataaaagctgtcctgagtgcactccctatatatcttctatctttcttcaagattccccaaagaatagtggataagttggtgtcccttcaaaggcagtttctgtgggggggaactcaacaccataacagaatttcttgggtcaagtgggctgacatctgcaatccgaagattgatgggggattgggaatcaaagacctgtccaaattcaatgcagccttaaggggaagatggatctgggaattagcttctaatcacaaccagctttgggccagacttcttacctccaaatatggaggcttgtcagatttgcagagtagtagagttaaagggtggcattcttcgtggtggaaggatctcagaaagctttat

SEQ ID NO: 251104 - DNA, 290 bp, Glycine max
  unsure (1)..(290): unsure at all n locations
tgttgtgtagaactgagtatcttatgtactattaaagatcctagagtttacacatctgattctggtaaaatgtataaagtagtaaccacctgatattggactatataaactaatatatcatactgtgaggagcccagaattangatggggaagaaaagaataattttatgggattgtgagaataaaaccaaacattggaaagaaaacctttctttaaaggtgtcccttttcaaaggactttccctttcaaaaaaggtaatactctatttacaaaatgataaagatctccc

SEQ ID NO: 251105 - DNA, 414 bp, Glycine max
  unsure (1)..(414): unsure at all n locations
agcttctcaaggaagtnttctcaagacagcttcttttgttgttacctagtctataaatagaagcatgtgtaacacttgttgtaactttgatgaatgagagtctagtgagacacacttcaaagttcaacttctctccctcttttcttccttcaatttcatgcttccccctctctctttctctctctctttcttttcctccattgaagcaccctctccaagcttcttatccaagacactctcttggtggagaaactccttcttccatggcttattccctagtggatggcgcctcctctcacctcttctcctttgtcttccgctgcatctccatggtggaaaatcaccattgaaggatctcattgaagctcanagatctagccttcattgaagctccacaagcaagctttcatcaat

SEQ ID NO: 251106 - DNA, 333 bp, Glycine max
agcttcattgcctaacaagccaacttacaacaacgagccccaagagactcagcataaggatgcacaggtcaaagttgagtatgtgaaaagattggttgaccaagtgaaggtgctaattgcaaagaagaatgaaagttatactaagcaagccaacaagaaaaggaaggaagtggtacttgaacctggtgatgatcctggacatttgagggcaaatgttttccaagaaggagggaatgatgatcttgaaattggccaaatacaagctaattgcctaactggagaagggcgaccgcccatgtggagaaggataacaccctccactggagaaggatg

SEQ ID NO: 251107 - DNA, 392 bp, Glycine max
gggagatggaccatttcagtgcttgacctaatcaatgacaatgcttacaaagttgagctgcccggtgagtataatgttagttccaccttcaatgtctctgatttacctctttttgatgcagatggagaatccgatttgaggacaaatccttctcaagagggagagaatgatgaggacatgaccaagagcaagggcaaggatccacttgaaggacttggaggacctatgacaagggctagagcaaggaaagccaaggaagctcttcaacaagtgttgtccatactatttgaatacaagcccaagtttcaaggagaaaagtccaaggttgtgagttgtatcatggcccaaatggaggaggactaaatgacaccactttgtctcaatttttagag

SEQ ID NO: 251108 - DNA, 435 bp, Glycine max
  unsure (1)..(435): unsure at all n locations
agctngccaggaagaactgataatgagatatatttctattggggactcacttcaagaaaaagactaaaaccccctctgatgctgctgagaaggcgagaatccgttcctcgaggaggcaacaatttcaacagcaacagcagcagttgaagcaacagcaggttcagcagcatcaacaacaacaacaacaattccaattcaacttggacatgaaagggatcataaacttgcttgaggaaaataaccatagagtgccttctatatctcaagaggcacaagaaatggccagcatgtaccctaacacttcataacagcaggactacttctactctatgttcaatgtcaatgacaataatgtctctgcacctgagtgcttaaacgaagaaaattttgggtatggactgtggaacttggacgatgttctttgcaatttcaatg

SEQ ID NO: 251109 - DNA, 397 bp, Glycine max
tgtgcaaccattgccagaaacatctgcctcttttctcttaagtactcaactgctagctcatgaggtgggagattgttatttatgacaggaatttccaagaaattcaccatccaagagtgaatgtgaggaaaggcttcaactgtgatgaacttgactccaatcacatctcccatggccaccaaagtatgtgcaacccatgccaaagctaaatctgccaatccaattgtgttgccacccatcaatttcttttcaccaagcccattttccttttctatcactctcaaagtttccaaagtctctttcattgccctctcctgtagttctccaatcaaaccgaaaaaatttccacatgtctgttgtctgcgaaaaataagttatggaaacaatacatggattt

SEQ ID NO: 251110 - DNA, 449 bp, Glycine max
  unsure (1)..(449): unsure at all n locations
agctngagtgtccacatgggtgcatgcatgatctattttgcataagtttctaaatcatcgatgttatatgcatgtcatggaaataatgtggggcattccctttttatccctgaaccactggccaaagcaagtaccctgacatacgtcatgtcctgccttctgtaaagcctctttgggccaaaacctcaatccttcgaccctaagcctcgacccgggtaggaatttttacccttatcctanaaaaaagaataagaggatctaaaaaaaatgagaggaagaaaaagcttcatttactgttaagttaataatgtgcctcacaagaaaaagaanaagaaaaagaaaaactcccgatcaaagatcgaaagaaagcaaaagaaaaatatacagaaaggtcgttggaccaaaaaatgtctgcatgatgtacggaatngtcacaagcaaaaaaaagc

SEQ ID NO: 251111 - DNA, 401 bp, Glycine max
tcttttatttattgctatttatcttttgctttaaagaagtttattttgaattatcttttgagtaattcatgttaagggtgcattgtttatccaaaaagagagagtgaaagtttaattggggaatagtctttgtatcttaattcaacccccccccccccttcttaagataactgaggccccatttgtccaacatcctattcttgataactcacttctcgataaaaagccaaactttctggaatgataaaatgaggtcacatgaacgtcttgaaaacacagtcaatcaaatgctttttttttctttttctttttgaacccttttttttattttgaaacttatttgttttgaactttactcgttgttttaaggcacccccaccaacgtgcaagacgagtaattt

SEQ ID NO: 251112 - DNA, 478 bp, Glycine max
  unsure (1)..(478): unsure at all n locations
agctngagaacatgtgacacccatatggtatatatcttttctaacaagcactattttggagtacgttacccactttcactttcaaataaaaataatgctacgtacaaaagcaaaaacaacggtttatttttcacaataatctatgttaagcgatgtatctgacacctctcttactttaattatttgttgtagaagtgttactgcattatgcacacagcagcgagttttattgagaatcagaatgcaagaatcacacagcaattgagactcgtatcaagtaagatcaaagagaccttaaattgcattgactgtgtttgaacaaaatccaaacaaacacactcttagcgatacgcattcatggatcagataaacattcacccacttgaagataaggctgaactcaatctccttcttcataggccatgagacaatgcgtcaagaatcngngaatcactatccccattcacgttacattaat

SEQ ID NO: 251113 - DNA, 393 bp, Glycine max
  unsure (1)..(393): unsure at all n locations
taacaaatcaagntcttcaacttatntcaatattctttcatagttgcacttgtcgagtaagtgcttaatgagttatttacccaaatacacccctgtaccactatagaaaggggatccccttggtttttttctagaatcttgacattctgagcttttaattactaaaatcagggagaattttttattccaatacattttgtttacactaagaccctcacttcaagctatgctacttactattgttaacaatgtaatttattttccattgtttctctaccaatttcaacttcgaatgcaaacactagttattaattatgaatgtatgaaagttttatggtctgttcaccgcccattgttatataaataaataagtaaataactatctcagtgata

SEQ ID NO: 251114 - DNA, 436 bp, Glycine max
agcttgaggaatcttaaggaaccactaaagatgtcactattgttgttggaatacacacgtgagcccgcttagaggtaaagaatgagtttattgcaattggggttagagtgaacatgtgtaaggatccttagagaatcaaattgggattaattttcgggtgttttatgcgttttaattttgcttgtgcaactataactatgaatttctcttgtttgacaggtcaattgatgtcctgatgtgaatcaaatggtttaattgagtgtttggctttgaatgttagaaacctagaaattcaaaaattcttgattcttgcatgttttctcaaaattgattgaggggttttgttccccttgatgtgatcacatgttttgtgctattcatttttgaatttgggtgttttttgaggtcggaattatgcctcatttgcttcaagaaa

SEQ ID NO: 251115 - DNA, 458 bp, Glycine max
  unsure (1)..(458): unsure at all n locations
tatnttcggtaaacttcgatctagatgggaaggctttggtattactaatagttttttcccatggtttagttaagattaaaaatgaagttaccgaanaattttcaaagtgaacaatcacaaaatcaagctttttcatgagagcccccaggtggagaaagaatttgtggccaacctctctttggtcttgccaccaattttatattatgatgtgccgtgaatggcacttgaggagtttccttccccttttcttttatatgttgttcctttttttgcatttcattacatgctcacattgaggacaatgtgcatttcaagtgtggagggaggggttagaaaaatctattntntttgtttctggattctattttaattntgncttctattttaaattttgnngttgatctattttctgttagctgggatttatttctgctaattttctatatctggatctatat

SEQ ID NO: 251116 - DNA, 423 bp, Glycine max
  unsure (1)..(423): unsure at all n locations
agctngacaacacagnaattatatataattagttattaaaataattagactagataacacatttgaattagcctaatgaaagagatctggatagtttgtatgaaattataatagattctaactttagtaataccatcataaaaaaattacaacaaattgaattttcattagggttcatatcaacttgaatattattctgccaacatttctaataatttagacatcaaaatatccctgacaagatgaagaaattattagttgatttaaaaccaccagatcattcataattcttaactaataaacatgtgacatgtaaataatttaattatttaaattgatcaaagaagatttaaatttcataagatttattaaattcttattaaacaagatccattaaattaaggaataacaccattaattttt

SEQ ID NO: 251117 - DNA, 461 bp, Glycine max
  unsure (1)..(461): unsure at all n locations
atactcaagcctgacaagggctacatggctcttattgtgaggagcttacattcagtactttgatcatgtgcgtgatcaantactggctggggaccagattccagcnacggaggccctcatcactagacttctccgcgagcctcagtgattgaaagaagagaatcctactgaaggagaggagacgtcaggcatcgttgcgtcacgagggagaagaagcggccgccacactagaggatgtcgcagtggaaggggcggacgtcctcattgcacctatcgcaagaggataggtcacacccaagagaccggctattcattacatggggttcttgacaaggacgcacaagtttctaaatcacagaaagcagagtccagactctctgatgaggagtatcaggagtatttgaagctcaaatgcgagaagccatcaataagcacaacccgtgtcggaccatgttgtcaca

SEQ ID NO: 251118 - DNA, 436 bp, Glycine max
agcttcatagacgaattaaaaccttacaattattatataaaagctaaaattattgattagactatatgtcgagaattaagttgttatcgattcatatatggtacctaaggcaatgatgcaaggtaggacatccataagaacaaactttgttcaaaatatttattatatatctaaaattcaaacttaaaaatcactaattaaactaaaataattatatatctaaaatacacttaaccgtagaatttaaagccggctccagttgtagcatttgcttagccgtagaaactatttttaaccaaacaatagctagccactaaaaaggaaccaacattttaaactaacaattgcgctgtacttggtttttaaggtttgatgccatctcaagaattaacacttggatcggagttctcatcaatggacaaaaggaaaaacagat

SEQ ID NO: 251119 - DNA, 477 bp, Glycine max
  unsure (1)..(477): unsure at all n locations
cgcttctatagccaanagtacatattcgattgaagaatatagtttattcttatcacatctaaacagcggtttggtgcttcatattgctgaaattgataagacagacaaaggttgcagttctcaatgggaaatgaatcaatcagccataagacaacaatataggacaactatcttattttaattaatttatttcatcacattgtctatatttacacttctagcgtctattcaagcataagacagtaaattggccataataagcatggcactaatatctaaaaaataaaacattgtaaatttgacagtaaaattgtcataagacagtaacatgcccataatatgaaaggcactaatatttaaaacataaaacattgaaactttgacagtaaaattgtcactttttactatgagatgttgataacagtgtgaaacatacagcaatgatgacttcatatttattgtattcattaagctggt

SEQ ID NO: 251120 - DNA, 432 bp, Glycine max
agcttgtagctgaagttcttgagaggtgctgttattggttaggcaatagcaaaagacatattcccctgctttcatttactggaagttcaaaggtacttcatctctctcttattttgattaaacattgtaatctttatttttatgtgtttacaacgtacattacattttcatgatagtatttttatgttacgacctctactagttagctaacaagcgtaatttattataattttttgtaattcattttttttgttgattccattggtttttattctaaatacctattcttattttataacatatatggtagtagctataacataaaaattggtattgaatattaggttatgcttcttcccccaccaattatccttttgagttagaataattattatagcttttcttcttaatttatattataattttgtgggg

SEQ ID NO: 251121 - DNA, 471 bp, Glycine max
  unsure (1)..(471): unsure at all n locations
ctcaagcttaccattaatggctcacctagtgtaggaaatagtttctctcttgtgtcgtctattggctgcatctgacttcccaacaaccttctcaccattaacatatcaccctgcatagcttcctcttcaagctcttcttccacttctttttcttcttcttcatcgatttcagattcactagtgatgtctccatttgccttcacggtcatggtccttctagtttgacattcagaagcaatatctcctctgcctaagcatttgaagcattttatgtttctggtcccagtgttggacgaggcattntatgtttcaaataacttttttcatctcagtccatgtatctatctctcgcccttcctcttataaaaaaagtttgcagtaaaataaataaagggtttaagacctcaccacactctacttacatgtttctctctttgatggtagtacactcatgtttgatgctctcaaaat

SEQ ID NO: 251122 - DNA, 436 bp, Glycine max
agcttctaaatggatctcatctagctcatttatttgcagcttcctttcctctccaacctgatcaatagagaagttgcaggtctttacagcccagtaggctttatgctctatttctacaagaagatgacatgccttgccaaagacaacccaataaggagacattcctatgggtgctttgtaggcagtcctatgcgcccaaagagcatcatccagcctggtgctccaatcctttatgttcgaatgcacaatcttctccaggatcctttttatctccctgtttgaaatctcaacctgcccattagtttgggggtggtaaggtgtggaaattctgtgcacgaccccatacttttttagctaggcatacatggatctgttacaaaaatgggtgccttgatcactaacgatggctctagggactccaaacctgtaaaacaga

SEQ ID NO: 251123 - DNA, 411 bp, Glycine max
tgagatgaagaagtgttgaaaggtgaaacttcctgcttttattgttgaccacagagtggtacctggagatatgtcgcgggggtcatgagaccttgtggacgtcatgtggtgtgctattgcccaaaaccaagcttgaccaatcccgacccaacccgggcatagtcggtcagtgagaacctgtgatgtacctaaacaggcgagctcctggcagtcaacagataaaaggaaaacaagaccacaaagcaaggaggcttgtggtggctggccagctgtcgaatttgtgtaatatgtggatggtggcctctggtaatcgattaccaaaggtgggtaatcgattacaaggcttacaattgaaggcaggaggctaagatggtctctggtaatcgattaccaaagggtgtaatcgattac

SEQ ID NO: 251124 - DNA, 420 bp, Glycine max
  unsure (1)..(420): unsure at all n locations
agctttaaccaagaggggatggccattttttgtcttgaaaggataaatgacaatgcatacaagaattgaatgcccggngaagccgatttgaggacaaatccttttgaaaagggagagagtaatgaggacagggcaaggaacctttattataaggacttggaggacctatggcaagggctagaataaagaaggccaaggaagctcttcaactagtcttaaccatgctatttgaatttaggcccacgttacaagtggagaaacttcggattgtaattgcaccatgttccaagaagagtagagggtgccacttttgttgagtggttttattagcattgttagttgaaataaaggcccaaacttgtgttaaagtgactatcaattctctttggatttgcaccacctatgggctgtgtttaattt

SEQ ID NO: 251125 - DNA, 464 bp, Glycine max
tgtagtcttcgcacgactgaagacaaagtagtctaatattcatatgaatctccttgctttgatgaactgctggttgttccattgttgttgtattcattccagttctagttattgtcataatttcttggtgtcgagatataatttactcaaccccacggtaggcgccaaaatgttcctatcataaatagaccaaatgttatctcttccgccgaaaggttacttgctatggcgaatggtccttttactagtaacttgttcagatcttcagtgtctacgattgaaaaaggaggtgggggggtacctatcaaacacccttgtcgctcaagtataattccgtccaaaccccaatgatgttagggatatcttatgaaactggttttacctaggggcttttccttatatactgacctattgggcataaattctggcctgctgtttgataccttaatgagttataactatac

SEQ ID NO: 251126 - DNA, 435 bp, Glycine max
agcttgtgttaattataggtaaaagcagtattatttttaacattttactatgcttctgtatcttgatgaagcttatctctgaacaagcagggaccctaaactagtgagaaaaattggagaagcaactgctcttgaagttagagcaacaggaattcaatatgtgtttgcaccttgcatagcggtaactcataagattgtaatctatatctatataaaaattgtctagttgtcacatcagttagattgttctgtattttttattttttgaacaatttaccttttttctgtctctctttctctctctctcttttttttttttttctcttcttgacacttaaaaattcctgcattacactagaatccactcctagggattaattataccatatcttgttgaccacattatagtcttaccttataacacaatctttggta

SEQ ID NO: 251127 - DNA, 365 bp, Glycine max
  unsure (1)..(365): unsure at all n locations
aactcaagctgtaataaaccatatctctagnngatgngggactagacttcattcttgatactgcaantaaagagtccctaaagtggtcgcaactaagacaggctacggttgactgtaattaaagtggctttcaacacaaatactatacttgtaaaaaaaatatcaataactagaactcaataatttctcaacatatcagccaaagaaagccattatgaaagtctgctaaacaccaaaaagaatgaaaacatttctgcctgtgaaagatcttgaaaaaaaacttcttgtaaatccaagaacttatctccaacaaaatacaccacagatatttccaagcataacattatatctattacattaaatac

SEQ ID NO: 251128 - DNA, 373 bp, Glycine max
agcatgacaaagacaataactcatatgttttgttttgtatacaagcaatgctctgaccacgatttatcattattaaaaaaattcacgcctatttaatggaacaaattgaaatcaaacttagacgcggaagttaaacatcactcaaagcacgggagcttaattttttattctaaaaccacacctagaaccactaaaataattggttaaaaaaatagttaattccataaaatgaccatatgttaaatgcctgcatcccataatttccatgccttaacgcatgcaacaagaactggcaagccaaaaaaataaaaactcatatgctcgcacaggcatgtcaatcaaatgcgctaactttgtggaatagaaaaacaaa

SEQ ID NO: 251129 - DNA, 434 bp, Glycine max
agcttcaggaacacgaaatagaactcatgatactaaatcaacatgaagaaaatgacaagaaaagaaaggaaaaatctgagaggaaaaccttcaatgataagaaagcaaagaaagcttacatcacttgggaagataacgatatggattcatttggagactcaaaaaatgaagtcgtgaatctaagtctcatggccagaaattatgaaagcgaagaagaggtaacatcttctaacaataacttatctatttcctttgataaacttcaagatgcttcattgatttacataaaagaatcagtcaaacttgcaaaactagtttcattttctaagataactatttcaaacttagaaaaagaagttttgaaatgaaatgaagaattagaaaatcttaaaaccaattgacacaaatcaatattctaccataaaagtaataca

SEQ ID NO: 251130 - DNA, 394 bp, Glycine max
  unsure (1)..(394): unsure at all n locations
atcacaagcttcgaaatagtaatagtattttcatccaagttgtcttccaaaggactagtgtttatccaagcaattctaattgaaaggtgttcgcttccggcaagtgcatcggatcgcacaagtagtataaaatggtaagaaccgagtatcgaactctcaagaaacttgtgttacttggtaaagctatttcagtgaataggtgtctagtgtgaaaagagatatgtttactatgaacaggtgtgtaacctaactattaaaaggaaaatctcgtgagtaatgatgtgtaaagacaaatagacgacacgttggtcttcctaataggtgcctgatgttaaaaggatattctctacttaacaatgcttatgcattctatggngtctcctgaaatgctaaa

SEQ ID NO: 251131 - DNA, 411 bp, Glycine max
agcttgcacactcaaaaggacatctcacttatatctttatgaaaaactatcatgtacatttgtccattacacaaaaataacaccatctaaacaaacttaactgagtagagactagttctctccttcttccataccaatatgtcctcctcactcagaatcaaattaatacttctaaagtcatgaccttttatctaagtaaattattatatttatttctcctaatgatatagagatttctccatttccatctccacaatcaatttccctccctccagtcacctaatcctgacaccctggcttttatggctactacaaggttgtataatctactatacttcctaaatgtgaaaataaagcacttccacccaaaggtcttgagaaaataaaaggattccctaaccccccaacccc

SEQ ID NO: 251132 - DNA, 418 bp, Glycine max
tataagaacaaaatcgcctcaatcatctccaaatattcatgtgtattaagaagcatcacacagaatcaagcccaggctattgtgcaagcaatcaatggggcacacacccaatgattatgatgatggatggctcaaattctcacaaaggtaaactcattacttttcaactgagctttcataactatcatgacatgtagaagagaatcaaagattcaagtcacaaaatggtaagaacttttattttcaaacaattacccatttcttgacatatcctataattctaagaaaacatgcaagtcgtacatgcacacccaattgacctaaattttatactaaaatccgacaaactatcaaattacaaattacacacttacaatttacaaacccacaaactacaaaccaaaaacatttccccccc

SEQ ID NO: 251133 - DNA, 439 bp, Glycine max
  unsure (1)..(439): unsure at all n locations
agcttgcttgtggggcttctatggaggcnggatctttgagcttcaatggggtcctttaatggtgattttccaccatggagatgcagcggaagacaaaggaaaataggtgagaggaggcgccatccattaaggaataagccatggaagaaggagcttcaccaccaagatgagccttggataagaagcttggagaggatgcttcaatggaggaaaagaaagagggagagaaagagagaggggggagcacgaaattgaaggaataaaagaggtatagaagtggaactttgaagtatgtctcacaagactctcattcatcaaagttacaacaagtgttacacatgcttctatttatagactaggtagcttccttgagaagctttcttgagaaaacttccttgagaagcttctttgagaaaacttccttgagaagctagagctt

SEQ ID NO: 251134 - DNA, 472 bp, Glycine max
  unsure (1)..(472): unsure at all n locations
ctcaagcttgactagggcgaatgattntagcctttagtttcactntagttattattctattctattaagaatgagaaatcccaaagagaaaacgtccgattgattctccgctctattttactaaaagatgtctttttgattattatattnatttttacctctttttgatttccaatgtggttacggcacgacagaacggtcggaattcattttaaccgaagttaacggataatacaattcaaacgttcggtggaaatttattttatttttaagttaagcgagaaatgacttaagtaaaatggcttaagcacgtctacagggggtataaaaagtaaacaaaacgagaataaaaatgcacgaaacacaatgtggaccactacgggtacatagaatgaatctgaaagcttgtgtcgaggtacttacccgttgaagatcgaagaacgatgaagaacgaatgaagaacgtctaagaa

SEQ ID NO: 251135 - DNA, 417 bp, Glycine max
agctattttgtttggccagatcctacatatctgttttatataaaccagagcgaacatcgtgggaaaagaaattcttcacattattaccatttcattttcttccatttgtcaggatgcgcatgtgcttcgtgtcaaagtacgaatcattcttagatagtcaattagctcagcagttccctttaatcagtgggtgtagcactacatattccagcgaggctaagtatgacaagagcatatatgtactaattaatgtaatagtacataaaattgttctgtcctcccgcagttgtttccatcgaaaatattaatgggccacttccttatgattatgcttttgatttgtactttcagatactctatgggagtgctactgagaagaatcaaagagaggcctctcttttaaataacaggtatcct

SEQ ID NO: 251136 - DNA, 435 bp, Glycine max
  unsure (1)..(435): unsure at all n locations
agctttcataggtgaaatcaggtgcagccattttctttagagtcctctcatgagggggagggtgtgccatgttctgagaatgtgcaaaatcagaatgctcagaatcagaatgctcaaaattataatgctcaagatcaggatgttcaaaatcaccaataacagaatgcacagattcaccagttatggaatgctcagaatgatcaaaaggtataaaatgatgcctaactaatctatgaaatgtcctatctatctcaggatcaaagggttgtaagtcagatggattgcctctagtcatacactacattcagcatgcacacaactagttgccttgtcatgtaaataaaggtgtaggtttgaactacagctaccctcagatgatatccaaatgacttgaaattntgtgagcaaccttataaaatgattagaagatagcac

SEQ ID NO: 251137 - DNA, 424 bp, Glycine max
  unsure (1)..(424): unsure at all n locations
catctccaccttagattatcatctccgattctctattggagaagctgctgctccccctgaatccccatctggagaagctgcctaatctttttattccttatctggagaagctgtagctctctttgattcccctatttntccatctgatagatgaggaggatgttaagactcatgatacccaggacctgtcacagggattttaaattcctgaggattttgctttttggatattttttatataattattatatcttagtacagcgtcttagttattttggttaatgattatatacacttctgttctttttcttctatggatagttagtatgcatgttttgaagcatatggagacagttaacttgacttggatgattatgcagtgtaacattcttatctttttgtgaaaattggtgttctgaattga

SEQ ID NO: 251138 - DNA, 358 bp, Glycine max
acagtccatcgcttggctacacttttattatatgttgcaaccacattcacagaggatcgactatcttacatttgtaagcggatatgctgttgcactcctataatcactgtcctctgtactgcgaacaactttccattatcttagcttttgcgattcaccatgattgtggctaccttctactaaggacggtgtaccgtgagcatggtccgaggcgtgtccaaaccctaacatgtcatttaattgcacgtccaccttaaagcctcccaatacctgattatcccctagccatcctacttactgagcattacccacacctttgaatcacacagatgcatgattctgaacaatttagtcttat

SEQ ID NO: 251139 - DNA, 377 bp, Glycine max
attatcacagcggcaatatatttgaacatcaaacctgtaatatactagttagaaaatcacgtattaggaccactggtgaatcgattacatcactctggtaactcgacttaccagagagtgaaatttcttgtaaaagaatttttaacttaaaatttttggacaaaccttttgctacttcaactggaattcccttcctatttaatataccctttctaagactttatagacagtcttgagcatccatcttgaatatctttaattgcctagccgagaataaagctctgagacacatgtgatctttgggcatcatcaaaacatgggcttgatcctttgtctacatgattcgcccgaacagaacctcggtgtgaaaagatatg

SEQ ID NO: 251140 - DNA, 433 bp, Glycine max
agcttatattatctttatatggactgtatttgttattattactcaacaactttttacttggactaaaaaattattctctctatttaacaccagtccatcacaaagagtaaacatacatttttatctaattaaaaaaatgattaaatatgtttttttatatctaaaagatatattatttttaagttaatacatacttttggtcaattattaattattaaatacctgaaaaaaatttattttaacataggacctgtattactcttactctgttattccgatgttccgtagctatttcttaatcataatcgttcatcctctttgcaacccagcttctaccctttcgttcctctttgcaatccagcttctaccctttctttgatacagcgacctcgttgaaaacctatattacatgaggctatgaagcacggatacc

SEQ ID NO: 251141 - DNA, 459 bp, Glycine max
  unsure (1)..(459): unsure at all n locations
acacnnatagaaactcaagcttctctactaatctccttaattgtngaatttagaatttcttgtctctacataagatgccttggcagcccccatcatcaagcttcttaacaatgtgccaccaccaaatttcttcttgaaattgttgtatacccaatatctcttggaatgtttgaaccaaacccggcctacaaccaacacataatttaaaaagtggaaaaatattagcagtgtcaaaaattattcaaagaaaacaatcatagtaaattagatactgaccttttgttgatctaatataaacactcaattatgaatgttcatatccccaatgtctttaagcaacaattttaagaaccacctccacagtttctttgtttcagactcaacaattgtctatggaagaggaaaatattgatcattagcatctctttccactgtagtcaataatattccttcatattt

SEQ ID NO: 251142 - DNA, 428 bp, Glycine max
agcttttaaataaattaagcccggttgctatattactagagttagaggaataccctgcaacttggccatttgtaagccatggcctccaatcatccacaatggagtagtttaaagatcttatccatgcttcagttcccaagaaaagaacattcaggccatgatcgccactgttagcattatacaaaatttatttgcgtgtgaaattcaaattttgcttgtactactccttccctactaatttttttatcagcaaatgttagtttttgttagcttttagatattgtatactgcttccctacttggtcggcaatatagtacaatatccttgtgcagcatatgaacataggcaaagaacatagacctgtatatcagtgaacgatagccttttctactaagattgacatgatactcaaagctgagtgggatat

SEQ ID NO: 251143 - DNA, 284 bp, Glycine max
cggaaatgattcgaacgaaacgcagtttttttttgaacccctgaggcgggcgagctctaacctcaacgttcttccaagtgagagagagatgagatccgtaaaatgagaagacttccgatccaaatgtatttgatgggaatgactctgttcaagaaatattttaaggtctaaaagtagttttctactacctctacaagcttacaaattgcctaactaggggacgcatacaactaaaccacatgtacatctagtaggaggccgcgaaacgccctcctttacactta

SEQ ID NO: 251144 - DNA, 427 bp, Glycine max
  unsure (1)..(427): unsure at all n locations
agctttacttcatttcttcaagtagtgcttgttttgcttccagaggaaaacacgttgcctaaaagttactatcaggccaagaaaatactatgtccgatgggtatggagtatcaaaagattcatgcttgcccgaatgattgcatactatacaggcatgaattcaaagaaatgtccaaatgccctaggtgtgggtcgtcacggtacaaagtataggatgatgaggactacagttcggatgaaaactcaaagaagggcccttcaatgaaggtgttgtggtatcttcccatcattccaaggtttaagcgtctttttgctaatggagacgacgcaaaagaccttacctggcatgcaaatgggagaaactctgatggaatggtntgtcatccggctgactgctcccagtggaagaagattgatctgttgtatc

SEQ ID NO: 251145 - DNA, 432 bp, Glycine max
tgcttaggagaaaataagacgccttattttcttatatatgggaattagcaaaacaggtgggggcaattggagttgaaaaccaggggaggatggtggagaaaatcatgataatggaggatagagacaggaaagacgcagaaaaaaaaaacattcaacagggggaaaaaacatccaacagtatcctgggaggcgcaaccgacatctaactcagcagggggaatcctatgcatgtggagtgaaaaaacattcaaattagaaatgaaagttatcggaaatgggttcatttggctgacaggtcagtggattaaggaggcactgcaggttcatattgtaaccatatactcaccatgtgacatgcagaataaaagaatcctatgggatgccatcaaacaattgaaaacagcaaatcaagggggactatggtgcattata

SEQ ID NO: 251146 - DNA, 420 bp, Glycine max
cctgcggcatgcaagcttctacttatgtggcagggctgtcttttcttcactttcttgggcccaacgcgagctctgaccactgttcttccttcccgcgatgcttcttttcatgtccgcctgagtgggcttatagcctaaaccatacttcccacgattcccttgggtttttatcagactagttatgccgccattgtctttgcctaaacccatcccgggttcataaccgttccccaacataactcgggccatcattatcgccgcctcggacagacaaggttgcccaaagagggagtccacggaggaaatgctgaccacctcaaaagactggaaagcggtttctaatgattcttctgcggcttccgcataaggcatggaggatggacagcttaccaagatattttcctcgcctgacacgatgac

SEQ ID NO: 251147 - DNA, 260 bp, Glycine max
aagagccagtgagcacctctaagacatgaaaaaccgcggcaccaaacacggtgaggaagaaggagatacccacgctgtgactgccattcctgcacagccaagtgtcccaccaccccaccaatatctatactcagccaataacgaaccttctccttacccaccacccagatatccacaaaggccatgcctatactaccacgaagctgtctaccgcacttccaatgacgaacaccaccttcagcacagaccaaaaacaccaa

SEQ ID NO: 251148 - DNA, 433 bp, Glycine max
agcttgcatttccatcaaaagatgatgtttaatgtgtttaaaattcatcttttcccttgaccatgattgcaggcataagatcatttttcacatctgaactatccacaatcaaagtgctttcttctgaataattttctggctgaatggaactggtaaactctgttggcatggttgtaagagacctaacactgttggatatacttgaagtatcagcagcagcaccacaaaaattgccaacaacagcatctaaaagatattccagatcaacatctttgggaaactccaaacctttaatatgatcatgctcttttttgttgattacaagagttgagttactgtatgtttcctcaacagagatacattttgacataaatttgcctgtctctccatatgaaactgatccaagtgctgtgcagaattcagactctgaggg

SEQ ID NO: 251149 - DNA, 389 bp, Glycine max
tgtcatcaagaagtatttagctcgatttcacgtctttatggtttattggaggctcggctgcagaatgcagataacaaagcccttcagctgtctggtgtgcaattatgagtctttggtgccatttgaagggttccctcgagccagaagagtggcgatgaaggtaattgataagggtcccattcgaaatatactcgtatattatcaaagggtgttcaagttccaagcaacagccaaggagtctcactaggcttctgtggtttacttggcagagaatttggacctcgttttgcatttgatcaatgcctttggtgctcccaagcttggcacgcttgatggcgaagacgagttcatcatcgaatgttcccttgaagacttcactcgaaccacca

SEQ ID NO: 251150 - DNA, 437 bp, Glycine max
  unsure (1)..(437): unsure at all n locations
agctntgatgcaacattnggagaggttaatgatacaacgagatgatgcgctccatgagaggttggatcaaatggagaatagagatcataatgaagaagaaaggaggagaagagggaatgatagtgttcctagacaaaaccgaattgatggtattaaactcaacattcctccatttaaaggaaagaatgatccggaggcctacgttgagtgggagatgaaaatagagcatgttttctcatgcaacaactatgaggaggaccagaaggtgaagcttgccgccacggagttttccgactatgctcttgtgtggtggaacaagctacaaaaggagagagcaagaaatgaagagccaatggttgatacatggacggagatgaaaaagatcatgaggaagcggtatgttccggctagttactcaagggacttgaaattcaagc

SEQ ID NO: 251151 - DNA, 397 bp, Glycine max
  unsure (1)..(397): unsure at all n locations
gtgtgaaaggtgaaacttcctgcttttattagtgaccacagagtggtacctggagatatgtcgcggtggtcaagagaccttgtggacgtcaggtggggtgctattgcccaaaaccaagcttgaccaatcccgacccaacccgggcatagtcggtcagtgagaacctgtgatgtacctaaacaggcgagctcctggcagtcaacaaataaaaggaacaaagaccacaaagcaaggaggcttgtggtggctggccagctgtgaacttttgatgatatgtgggttatggcctctggtaattgattaccaagggtaggtaatcgattacaaggcttanaattgaagacatgaggctaagatggtctctggtaatcgattaccacggcgtgtaatcgattac

SEQ ID NO: 251152 - DNA, 380 bp, Glycine max
  unsure (1)..(380): unsure at all n locations
gaagacatgcactaagcactaattagaaggaaaaattcgacgactacaaagatatgtatgcctggtgaaataattgagatgactagactttttggaggcaaataattgtatcactagtgtttacaacatttggcactagctaattgtataatttatactaatctcaatggtaacgttatcgcgtgcactaccaaattagagattcactatcaaatcaaagaatttatatatatattcgntagtgaatgttacacaaacctaatgcgaatccttaaacaatagtccagttattttttttcataaatatacaaaacagagaagaatacgcttgatatttcgaaccctgtacaaaagagttcgtcttttacaccaccaaaggc

SEQ ID NO: 251153 - DNA, 437 bp, Glycine max
caagctttaaaatgtcttcaatagactacctattttacgttaaaatttatattatatgattttgtatattttctaaaaatgttgaagttttttttaaaaaaacttaaattgacttaatcaaattttaatttaaatttaaaaattctgaaaaatttcttgaataaatatcataaacttattttatacagcttttatattttagtatccacctctatttaattttaaaattttatcttaattttaaatgataacttattgatatgttttaatgaaatatattcttcttatacaattaaattgtattaaaaatatatttagattaattaataacaatttattaaatatatatgtgacaaaatacataacataatataattataattatttatttgtggttagtaatcacacatccaaaatacatagtaagatatgcatgt

SEQ ID NO: 251154 - DNA, 468 bp, Glycine max
  unsure (1)..(468): unsure at all n locations
gctcagattagctgagataaaatgcccctggtgatctctaatgatatcttttactccatatctagcatgatccgagaagatggcagcatccatgttgcatttcaagtgaccctcaataggcttctgccaagaacaaatctgcatattatcgtgtaaaagttgagaccgagaggaagaatcttgcttaacttatctgcatagtttatttgttatagtgctgaaattaaacatctagaggtttatttgttacacattctaaaattgaactttcaaagatatacaaaataggttttagcatataaaatctgaacagcaggttttatgaatnttatatttggaatatgtaacaaatagactttctgaaattaattnttggaatatacaaacagaattccgaatatttaattacagaatgtgcaaataacaattttgtgtgtatatctttataaaacaccggatttgaagtga

SEQ ID NO: 251155 - DNA, 338 bp, Glycine max
ttctaattataggggaccatgtatgtataatgtgtcgacagcatttgatcagcccggaaaaatactcgggggctgtgcacacttcaacgatggcctatgatttggctaggagtcgcagtaggtcttgacttcaatgcaaggtcaaagagaacctatccatccaaatagtcacttcttgatgcaaggcatcaatcaccctacctctagcttcgttttcggcgtacacttgtgcgaaagcctctactagcttctgctcatggggcacatactatgttaccatttcattggcttacctatgatagctagaatgctttgcttcgcggcttccaagagttgag

SEQ ID NO: 251156 - DNA, 435 bp, Glycine max
  unsure (1)..(435): unsure at all n locations
atatacaaaagttagtcgtattcaccgactaacaaagagttttattactgagtggtacaattagaatctaagatccctatacttcaggaacaagacttagttagtgcgtaaaaactgttttcggtggtcaatctagatttacgtggatcgatttactcatttataaatatttgaattataacaacagagaggaccttcaactcaaatccaaatcaatttatcttaattttcagtattatcttttctcaatttactatatttttgttgtttctagcttttcgactttcttttaccatattttcctttttccatttctgagttaatttatgttttgtactttacctacaccaagtgttntctggagaacttgggaatcattgttggaagcagattcgctttcaatgtcaatgttgacattatttggaacatgtggac

SEQ ID NO: 251157 - DNA, 426 bp, Glycine max
  unsure (1)..(426): unsure at all n locations
agctatgccttcaaaattgaggggctgtttaccggtcatctaaatactacagctatttgcaccttttaatctctttaggcttcaccttcaaaatcaaggggctatgtacctttcagttgtctaaataccaagtcatttacactttaatctcttcaaacttccccttcaagactgatgggctgtgtaccttccagttgtctaaataccaattctttacactttaatctcttcagactttgccttcatgactgaggggctatataccctccggttgtctaaataccaagtcatttgcaccttttcgtctctataggctntgcctttgaaactgagggattgtgtatccttcgattatataaatactgagtcatttacaccttctagtctctccaagctttgccttcgagattgaggggttatgtacct

SEQ ID NO: 251158 - DNA, 498 bp, Glycine max
  unsure (1)..(498): unsure at all n locations
gacacananaaaactcaagctntgtacgtagtgcttaaaggctacacattgctcaacagtattgtttcgagacgccgccatgataagcgcatatggcgttaggattgtaccatcaacgaaatggaggttgatagacttttctcgggctcaccacagtcattaggttgctaagcaagaatggtagcaagtcgacatacgacattggtattggggtgaactctgtgggttttctttctgggaaattcctccttgggttggtgtttgtattgcggttgggatttacactcggtttgagctgtgcagggaatggattttgtgggtgatgctggggagagccttgtggttgatcgggcatgctcgatcggatatgtgtcgggcaggggggagatctgatatcggtcaaataatcgtattggtgtggtggatattggtacatggcgttatgaagggttngttgagaaattggccatgtgggtgttgtggtactacatgggcatc

SEQ ID NO: 251159 - DNA, 433 bp, Glycine max
agcttgcttgtggagcttctatggatgctggatctttgagcttcaatggggtcctttaatggtgattttccaccatggagatgcagcggaagacaaaggaaaggaggtgagaggaggcgccatccattaaggaataagccatggaagaaggagtttcaccaccaagatgagccttggataagaagcttggagaggatgcttcaatggaggaaaagaaagagggagagaaagagagaggggggagcacgaaattgaaggaataaaagagggagagaagtggaactttgaagtatgtctcataagactctcattcatcaaagttacaacaagtgttacacatgcttctatttatagactaggtagcttccttgagaagatttcttgagaaaacttccttgagaagcttctttgagaaaacttccttgagaagcta

SEQ ID NO: 251160 - DNA, 427 bp, Glycine max
aactcagcttgactgctttcattctagttagctggaaacatttcttgaattattctacttggtggacggacccacctatatatatgaacatgtttagatcgacaagtgtagctgaaaaaaaatcctataaccccaaactactcaagatgattgacagactttaataaaataagactgacattttgtcaacataaatacaaaggaaataagtgcttgtatttttgttgggggggggctacattagagtttatgaaaacccatggcaagaatttggaactgttcaacttgcaattggtttcctgaatcagttaccaatatgtagtgtctgcttaatctgcatggaaacccccaacacctctttactttgtcttgcactacacattttgttattacctcactgatgactgtgcatgtcatacattgacat

SEQ ID NO: 251161 - DNA, 446 bp, Glycine max
gaccttaagcaccgcggctgcaacttaaaacgaatgtattccttatttctttttgatggaagatgcaattctaactctgtggacatggcttaaaaccatggacaaggattttgcaattcacttcaatcaatggtcttctaacctcaaggaagcgtttaggaattatgtgggaggaaagataatgaatttatgtaataattccacgagtttgcagtttggttatgtactatcaatcacctgcacaatgtggaatcatttgtatccttagtacatctggtacttctaatatataatatatctatttttgctgagcaaaaaaaaaaaaaatggataatattcagtcatattcagcacacaaacaattatactctgcagtgaaggattataaggaaaaagaaactgtcttccccattgttctttctcaatagtgaaatatgcttatttgt

SEQ ID NO: 251162 - DNA, 433 bp, Glycine max
agctttaaaacagctttaacgcagttgcttgtgattttatttcttcaatttctttaaaaagttacatctatatgtaatcaccatccgttatagaaacaatgatgcataacatagaaattaataagtgaacctcaccatatttttttattgtttcttacaaggtctagaggttagaaattcgcccgtgagtatggcttaattagcaacatatgttgttgaaaaaaatatggtaatagcaaacaattgggtaatagcaaaaaatgaggtgccaatgacattacccttctgggttgataagcgtcttttctcttaaagatccaactactgacactattttaactttgtaatttgctttgtgcattcccattattacatcttatgcactcccacctattacacctctaactgcattatagaaattgacacaagatta

SEQ ID NO: 251163 - DNA, 410 bp, Glycine max
agcttttggtactgttatttgaggattacattcttctttcgaaggttctttatctcttgggtgatcttctgttttaatgcatccatctccctttgcagggcaatgatcaacacatgattgttaggcatgtgatgttggaggtccaccatggttgcgggtctcccattttttagggtccctatggtaggcattccaattatgatggatgcctatcaccgcgatggtctttctgggttggctgtgggggtcttatcaccatttgtggccattgacggtggttgaaggagaagttttccctcaccccatagtgggcgccaaatgttcttaccagatttgtcagaactttctcacagtgatggtcttccatgaggctctgcacaaacaatggtggggtgtacatgcaataacac

SEQ ID NO: 251164 - DNA, 429 bp, Glycine max
agcttgaggacatccgtgacttgttcttattttaagatgttcgcacgatatattaaggagaatcttctagtcatgtttccaattcaacattaaatactgagagcagaggaaggactacccataagggtcagaatggtcgagccaaatcaaagtcaagagggaaaggtcagacaaaattttgaagtgacattatctgctggaattgtgacaagagaggtcactttaccaatcagtgcagggcgcctaagaagaacaagactcacaaaaacaagaagcgagatgatgatgaatccgcaaatacagcaactgatgaatatgatgatgcattaacttgcagcttcgatagtcctgttgattcatggattatggactcaggtgcgttgttccacaccactctctctatagaattattgtctaactatatttcta

SEQ ID NO: 251165 - DNA, 350 bp, Glycine max
gtggttatactatagagagagagatatatctttagtgtatctatggcccggcgagaggagagagaaagagcgattttgttcttcgaaacattctcgcagagtgtctcccacttgctctctcgatcaccaatcataattggccctagttcaggggccttcttaatctgaacccatgaaagggcaaacgataattactcctcacctatataatacacatacatctgcgttgccttgctttgtcaatattatttctaattgactataacgcccaaataaacactaaagcctagaaaaaataaaatgttgaatctgtgcatataagacatatatgtgcgtgagcatagtaatcc

SEQ ID NO: 251166 - DNA, 202 bp, Glycine max
acttcctgctcttattggtgaccacagagtggtacctggagatatgtcgcgggggtcaggagaccttggggacgtcaggtggggtgctattgcccaaaaccaagcttgaccaatcccgatccaacccgggcatagtcggtcatggaaaaccttgatgtccttacaagccaacttctttgtgttacccgtttaagggaaacca

SEQ ID NO: 251167 - DNA, 213 bp, Glycine max
atcatcctactaggacgactgataaaactggcgcaaatgactatggcgatatagagggagaaacccctgctgtgactgccattcctatacagctcaagttcccaccaacccaacattgtcattactcagtcaataacaaaccttcttcttacccaccacccatttatccacaaaggtcatccctaaattaattacagagtctgtctacctcac

SEQ ID NO: 251168 - DNA, 440 bp, Glycine max
agcttgcttgtggggcttctatggaggatggatctttgagcttcaatgatgtcctttaatggtgattttcaaccatggagatgcagcagaagacaaaggagaagaggtgagaggaggcgccatccactagggaataagccatggaagaaggagcttcaccaccaagatgagccttggataagaagcttggaaggatgcttcaatgaaggaaaagaaagagggagagaaagagagaggggggagcacgaaattgaaggaataaaagagggagagaagtggaactttgaagtatgtctcacaagactctcattcatcaaagttacaacaagtgttacacatgcttctatttatagactaggtagcttccttgagaacctttcttgagaaaacttccttgagaagcttctttgagaaaacttccttgagaagctagagcttag

SEQ ID NO: 251169 - DNA, 473 bp, Glycine max
  unsure (1)..(473): unsure at all n locations
tcctttacaatgaagagaagaagaaaatgaaggatngaagatatcttgttgttgggatgtctcatccacctctaaaaccacacaatcactcacagactcatctcatgctctcgggatggctttctcttcaagctcagttctctgccagtcttcgcacagcaaaagctctcaaaactctctggaacttggacctttctctctctagaaatctctaaaaatgcagaagctcaaagaaaagcccaaactccctctccatttctgatttcaggcttaaataggtagccttgttggtgcttgcgtgcttagtgcaagtctggctcgcttagtgcgtgtcgcaacctacccttcggcgggagggcgacgcgttattcgcaggtgcgtgttccaagaaaggaatacgtgcggagtcgccaccaacgtttatttgaggaaaacgtcggaaaaatcggaaaagtcgtggtctacgaacttta

SEQ ID NO: 251170 - DNA, 434 bp, Glycine max
agcttgaggaaattcaaacgacaataacttttgactcggatgtccgattgtgtcccgtagtatctcgagacgctcgaaattcaaaacagaagctataagaaaaatctatggacgataactttttacacggatgtcccattgagtcccataatatatcgagacgctcgtaattgaaaacagaagcgctgagcaaattcaaacgacaattacttttgactcagatgtcttattgtgtcccgtagtatatcgagacgctcgaaattgaaaacagaaactctgagcaatttcaaacgacaataactttttactcgcatgtccgattgagtcgcgtaatatatcgagacgctcgtaaatgaaaagagaagctttgacgaaattcaaacgacaataacttttgactcggatgtccgattgtgtcccgtagtatctcgaga

SEQ ID NO: 251171 - DNA, 430 bp, Glycine max
  unsure (1)..(430): unsure at all n locations
cctgtaaaaagttatcgtccatagatttttctaatagcttctgttttgaatttcgagcgtctcgagatactacgggacacaatcggacatccgagtcaaaagttattgttgtttgatttttctcagagcttcagttttcaatttcaaacgtctcgacatattatgggactcaatcggacatccgtgtcatagatttttctaatagcttctgtcttgaatttcgagcgtctcgagatactacgggacacaatcggacatccgagtcaaaagttattgtcgtttgaatttgctcagcgcttctgttttcaattacgagcgtctcgatatattatggtactcaatgagacatccgctgtacaagttatcgtccatagatttttctaatagcttctatgttgaanttggaccgtctaaagatactacgggacac

SEQ ID NO: 251172 - DNA, 429 bp, Glycine max
agcttcctcggggccattcctgcgaaggcttattattgtaaagttagttttagcgggacattactcttaaagcaaaaatggcatataacctcctcccataaatacaaacatcaatgtaaatttagagcaagcttatgcgcctgtttccttacaaacgttctcttgcacaagacatttaaccgaaaaacatgcgcccatttacaatcaaagcagcttcgttacctagattatttacacgtacctccaaggtgtatttgttacttacatcacacacatctccttggctaaactcacatacatgcattctcaagcattttggggcaccaaaaattgcacatgtgcacatcttggcatttctaatacctacatacgcaaacttcatgatgaatcttgactatctacacaataaggtgctacatttcatgctct

SEQ ID NO: 251173 - DNA, 433 bp, Glycine max
  unsure (1)..(433): unsure at all n locations
agctttaaggatggaaggcttctcaattattctcttgcaaggatattagggccattcagacaaatgttttaagaatcaaaccagtcatcaaattgatcgagatgttggattaatgaattaccgatataattatatcagtggatcagtattcaaatctgtttgacttgatatatattagcaaattttttaaaatataatataattatcataatttaatcaagttgatactctaaatttagaaactaatatcaacatatgagatttacactacaagaaaaatgacctatgcctatagacacttttgcctacatgtttaatctagtgtaggtaaaacctaggaaaaacttttacctacaaatatttatcgtacgtaaaatcaaagacttgtacctataattntttggtgtaggaaaaactcaatataatacaaatg

SEQ ID NO: 251174 - DNA, 323 bp, Glycine max
catatgctcagccacacaccttcctttcttacccaggagaattggctaccttcagcttcaatcccaactatcccacaggtattgacgacatcaagaaacttctctgccgtacacgtccagaaatagccaccgctatcctccgaaggaaggacaactgtactaaaatccccacacattaaccacgggaaggagatgatagcctcaagctgcttaaggcgggaccaacagtgctcccaagatgaggactcccatacacggaggagtagcaccactacaaacgccctctacaaacttcaaaactaataacttgggggttgagatca

SEQ ID NO: 251175 - DNA, 436 bp, Glycine max
agcttgcttctacactctatagatcatatctttcttcttttttataatcatgaagttcattcagcttcttcaaatccttttaaagatctttcagtttctttgccaaatcctgaaagttcttgagaagagtatctctttccctagcacttgtctcaatctcaagacacaacttggactctttttctttaagagttatacaagcttcacatgtctaagtggactcattcaatgaaacatatacttgatcctgaaggattttcttagttttaaatgatcttttgatagattcttgaaatcttttcataggttttgtaagcgtttgagagaatagataagttattgtcgcaacctacccttcagcgggacggcgacacgtgactcgctggtgcgtgtcccaagaaaggaatacgcgcggagtcaccaccaacgtttattt

SEQ ID NO: 251176 - DNA, 369 bp, Glycine max
  unsure (1)..(369): unsure at all n locations
gcccgaatgctctattcaatggagttgacaagaatatcttcatacttatctacacatgtacagtggccaaagatgcttgggagatcctaaaaaccactcatgaaggaacctccaaagtgaagatgtccatattgcaactattggccacaaaattcgaaaatctgaagatgaaagaggaagaatgtattcatgactttcacatgaacattcttgaaattgccaatgcttgcacttgctttngagagaggatgacagatgaacagctggtgagaaagatcctcagatccttgcctaagagaattgacatganagccactgcaataaaggaggcccaagacatttgcaacatgagagtagatgaactcattg

SEQ ID NO: 251177 - DNA, 244 bp, Glycine max
gatccttaagtgaccgcggctgcagctgctggagaggctgcttaatggtttttttttgcggtgcaggatgtacaggggggatcttaaaccgcttgaagatcaaggcagagacgctgaccttcgtgttggggcgagcaccatcctcattgatgaaccctcgggacgagtgacctatgcctccattattagactaggacactatctttgcaaggatgcttgagagaacttccttgaaaaggctata

SEQ ID NO: 251178 - DNA, 260 bp, Glycine max
ccgaggagcccaacaaccgggcagcacgcacgaaaagaggcgcctcggaaaagacgagaacccagcatgcaggaggcaccggcccaccggagggagacgagccacactaacaaagcgggaggacagaaaatcaacagccacgacggcgaacgaggactccgggaacaccgcagaggcctcaggagcgccatccgaccagccccccatcaaagagcaggagaacggcgaggagacacaccatccccccacggagacgcccc

SEQ ID NO: 251179 - DNA, 426 bp, Glycine max
agcttctcaaagaagccacgaggaatcttcttgaggaagcctcctagtgaagcttcttgaggaagctacatgagctgcctcggtaaaaatgctggccagccttcgttaaccattggatctgctcgatattcggtctgcagcttcacaagacacttgtccacgatttgaccgttgggatcttcgagaatatgtttggagtgtgcacaaagcttccattcccgagatcatttcttatttaagcatttcagcctttgctttcgtgtagcttaggaaaaacgccatttcttctcctttctttcttccaaagtcatttccaacatcccaagcactttctccatcacccacagccaccattagccaccacaaactgccattgttccccgttgagacccacaccgagaggaacccttcaaccgaaacggaatc

SEQ ID NO: 251180 - DNA, 444 bp, Glycine max
  unsure (1)..(444): unsure at all n locations
ggcctgtccgatgcagcagtaatgatggctcttgttatgatgtgaaacggttacgaacccggaatgggtttgggcaaagacaacggcggcataactagcctgataaatgccaaaagaaatcgtgggaggtatggtttaagctataaacccactcacgcggatatgaagagaagcatcgcgggaaggaaaagcagtggccaaagctcgcagttgagacaagaaagtaaaggaagcccgccctgccacataagtagaagctttataagcgcgggtctgggagacgaaggtcaagtggtcgcgatatacgaagatgatgttccgagtacattggaattggtacgaccatgccctcctgatttccagctgggaaaatggcgagtggaggagcgccccgacatttacgcaacgagcataatgtaaacctttacagtntaaaagctctat

SEQ ID NO: 251181 - DNA, 427 bp, Glycine max
  unsure (1)..(427): unsure at all n locations
agctntatcaaaattaggcaaacaaagcttatgtccattggttagcttatctttcaataaattaaaagttttctcatgcacattagtccatttgaacactacattctttttgacaagttcatttaaaggtgcaacaagtgaactgaagttcttcacaaatcttctataaaaacttgttaaaccatgagaacttcttacctcattagcattcttaggcacatgccattccctaattgcttttcccttttcttcatccatacttattccttttgagctaatgacaaaaccctagaacacaacaaatccatggcaaaaagagcaatttttatgattgacatacaatttattttctctcaaaacattaaaaaacaacatgtaaatgatcaacattttcctctaatggtttgctatagatctaaatatcatc

SEQ ID NO: 251182 - DNA, 281 bp, Glycine max
  unsure (1)..(281): unsure at all n locations
acctatgaaactcagcttgtctgcaaaatactaacaaccatttaatgttcacgtcttaacgacctcttgtttatggtacaggccatcaaagctaaatcatacatacttatgctttacaactacgtcgtcgattcctttgatggggatacgtagacaaaagccccgctttgtcacttcggagaggttaaggtcaacgccttagctttctcaccaagtaaaatggatcattntaaggtccaacgccttanatgaccaccctctcaagtaaaagaatcacttga

SEQ ID NO: 251183 - DNA, 307 bp, Glycine max
  unsure (1)..(307): unsure at all n locations
agcttgtatacttgatgtggatntatttgtttttatataagngacgccgcatacaaagatgtttgaagtgaaaatgtgaaatgatcgatatatgaaactccgccttatatgtaagattatagatgaatctgagatggaaatttgtaaatcactacataggtgatatgctcccccctataagatgacgtgttttatgaagtaagattatggcccgatttctttaaacttaaaagattaatttttaaaatagcgcgttttaagaaagtggcttttatgaaacagatcgactctatttatttctttaaaa

SEQ ID NO: 251184 - DNA, 314 bp, Glycine max
tctgcagctactatgctcagaataactctgatggcacccatctttacaactggagagaagacctctgtgaaatcaattccttatttctgctgaaaccctttaccacaaacccgccttgtatcttctttaccgtcgattctcctttacctattaccccctatctgaacgcctctttctttggaattagtaaaaccatgtatattttctgaaggagcatctactttatcgtagctccctcatatggattccctgcgacctattgaacatctgctctcacattgtaaaacaatatgcctcaaggaaacctatctggg

SEQ ID NO: 251185 - DNA, 247 bp, Glycine max
cggggggcgtttcttcctgccatgaccaggacaacactgctctcgcctctcatacatggaagcatcttggagaaggcaacaagtgtcctctataaacccacaatgctgtgcacagaaagccttgcccatgaaatatggtggaaatgatttttggccaccatggtagctagtgtagtgtgacaattatgcaacaattacttgaagttggctagtaaaatgtgacaaagatgtgttgggctggtatcta

SEQ ID NO: 251186 - DNA, 434 bp, Glycine max
agcttgtgataaagaatactataccactttttgtcttcattctcgagatcaacagaacaaacaggggattatttattgacgagaacaccaatggatgccttgttgtgtgaaatctataaccaaccttgtggattaaaatggaagagaaaccaaatgattccgagcctgtttgtattcgcgttgaaacaaatgcaaggctttgtgcctctagcttctgtgttttttgtctcgtaacatgtgaaatgttcgttgaacgtggttgaaacgcgtaaacaaacataacctccaaagtttgtagttaatttgttccttgttaacattgatttgtaaggaaatgtgcttcatttttgtaggttgtctacacttttagggcttatggctcataacaatcacaacaagctaatcccctcctcaccagtaatgaaaatgatcag

SEQ ID NO: 251187 - DNA, 233 bp, Glycine max
caaaaccacttcatagggcaaatggggctgggtttttttttctggcagtcactagcttatatcctaaccctgatcaagattaccttgaggttcgtactacttaggaaggaaacttgaagaacttggagcagtatgaaggtacagctgctatatgatgcaatgtgctagattgagaatagagtatatatggggtaggcacgggacgtagatgctgttgagatattggcaacttg

SEQ ID NO: 251188 - DNA, 433 bp, Glycine max
  unsure (1)..(433): unsure at all n locations
agctntctcctccacacccctcctctatattttttatattaatgcgtccctctatatataatagtctcattcaggtaaaacaagagatcgtttccatttatttggcacaaccagctaattataattttccaacaattggtgtttaacgaatgcaccttcatatgaggcaagatgcttttgtcagcagtttttgctatccgaataaatgatgtacaggtctgcagccttgcatgccgtgcattatgcattgacatatcctatcaagaaacatatagttataaacttgccacaaaatttctcaatggttgaaactaacatgaaaaggagttgttgcgggaaccttgattacaaggggaatagatgttaaagttcaaataatttattgataacactgccaactgcatctgggaaatacttcaaaaaggggcccata

SEQ ID NO: 251189 - DNA, 378 bp, Glycine max
  unsure (1)..(378): unsure at all n locations
ttcttctcatcaatgaatggcatcttgtgtttaccctgaaagaattncaacaggaaccttaatcccccttcattataaagtgttaataaaacattaaaacacacacacaaaccacaatacaaaaactatattacctgccatgcaaatcgttntccattcatatcaatctcaaaatctgtcaaaaagtgatacaagtaattctagaaactctataagatatagcaaaatatgtcaataacagacaagtgatctcaccagcagggtagaattgaagaataggtgatgaaggatcaatcatcaaatccctatattttcaagaagtgcattgaactgtacaagaactaaccagcatagacaggatgatgataaatagatctg

SEQ ID NO: 251190 - DNA, 418 bp, Glycine max
agcttatgttctcaatttcaagcatcttgatatattacaggacacaatcggacatccgagtaaaaagttatagtcatttgaatttgctcagagcttctattttcaatttcgagcgtcacgatatattacaagactcaatcagacatccgagtaaaacgttattgctgtttgaattatctcaaagcttatgttctcaatttcaagcgtcttgatatattacaggactcaaccggacattcgacttaaaagttaatgtcgttagaatttgctacgagcttccgttttcaattacgagcgtctagatatattacgggactcaatcagacatccgtgtaaaaagttattgtcgttagaatttgctcagagctttcggcttcaattacgagcgtttagatatattacgggtttcatttggaca

SEQ ID NO: 251191 - DNA, 356 bp, Glycine max
  unsure (1)..(356): unsure at all n locations
tctggtggacatcttgacttgctttccaatctgacattcactttatattctgccttcttctattttcagaatgggaatgcctctaacagcacctttgtcaatgattttcttcatgcctcttaagtgcagatgtccaaatctttgatgccatattttgacttcatcttcttgggagactagacatgtggaggagtaactggtttcttgaggtgtccataagtaacagntagcctttgatctgctggccttcattatgaacttactcttctcatttgtcaccaagcattctgactttgtgaagtttacattgagtccttcatcacacaactgactgatgctgaacaagttcgcagtca

SEQ ID NO: 251192 - DNA, 424 bp, Glycine max
  unsure (1)..(424): unsure at all n locations
agctttgaaatctagaacctattctttatacatgttccatcttgcctatatatgcaggccgcaattatgcagaaaaggatatttatctcatcacttagtggcaccaagctaagaagtgagaaaagaataagacttaatttaaaaataaggattagtcacatgttctatagggcaaccttatcattccctcactaacataggaccaaccttacctaccaggcaccactaagccttataaacttagaattatgcagaaaaatggtatctagtgccttgattcagaaccatatatacgttgattacaaaaagaagcaccaaggccctggggctttggcttacactnactaatatctaaccatgccatactcatcctaaatgacaccatatgtggcctataggtctatcttgttaagacctaccatta

SEQ ID NO: 251193 - DNA, 210 bp, Glycine max
gacataacggacagaaacaaccaactaaatcataaaaaaaaaaaaaaaaaaaaaaaaaaaaaatacaaaaacgggagcaaaccattcaccaataaggaccgaaaaccaaacggttagcggacaacaggggcacagccaatgaaaagggaaaaaaacaaaaggagagcaaacaaacagggccggggaggcaggccccgaaaagcacccaag

SEQ ID NO: 251194 - DNA, 144 bp, Glycine max
aaaggaaaaaatccttaaaaaattgcattcaaaacgggcgcagaaaaccgcgggcccacaaaaaaaggcgggttatacaaccccggaacctggaaaaagacccataaatcaaaagccacgcggattaccacacggggtttaaaa

SEQ ID NO: 251195 - DNA, 328 bp, Glycine max
tacgaaccaaaccccacctttgatcctgcctctcttcaaccccacatcaaccttcatgcataggctggagaccccgcctccgatactattcgcttgtatggactgatcaatagtgctcgagtcaccatactggctgacagtggaagcactcacaactttgatcaacctcgtgtcgcaaaatttctcagcttacccatggaggatacgacaacccttagagtgatggtgggcaatggctcaatgctgtagtgccagcaactatgtcccaatacaagggtgcttattcacggacataccttcaccgtaacgctgcgtgtgctttccttga

SEQ ID NO: 251196 - DNA, 367 bp, Glycine max
  unsure (1)..(367): unsure at all n locations
cacactcaaccagggcccatgatgaacaattaacacggctctgactataaaaacggggggaagaaggaaaaaacagctncttatcacagcatcggtactttagcggcctactaaaccactgaaaagagactaccagggtacatgcatactcaaatagggacaaaaaattacaccatacaaatctactctcgcgaaccatatgagaatgagcaattaccacctctaaaatgctactaaaccaactatttcactccaaaaatcatgctaagggcttcccattccaccccggggaagaagagtatgtaaccagctggaactagcttcaacccacaaaatatatatttacatatctacgtccaatatgcac

SEQ ID NO: 251197 - DNA, 428 bp, Glycine max
agcttaattaaagaaaactatctttatacttctaattaaaataattatctttaaggatctaatcagaatatttatctatagtacacttaattaaaataattatctttagaaatcatattaaaatatctatctatagtgtgcctaattaaatgattatctttagagatcatattagaatatatatctatagtgtgcctaattaaagcaattatctttaggagtctataaataagaagctagagtatgtacttcacggattcaaaattcattatacattggagctttggagagagggaattgtactaacaacaattgaagtcctaaattgtaaaggttttgatctcttttactttcaatgcatgattgtatgtatttagcttttctataatcatcggtggctaaaacccttaagtctcggattgtgatgt

SEQ ID NO: 251198 - DNA, 313 bp, Glycine max
cttatcactatgccgcgtcacactgatccctcatcttacatcatgtcaaccgaatagctattaccccacatgtaaggaaactacttccttatcacattataattatagtattaaaaaaatgtagccaaatatatcatcttagttttttcatgtaacattaaatatactttttacttatgtctcttagaatcttaatagtagatagcagggttatatataaattaataatgatctaacatagttctggacagtgttactctatttcccgtccaaatctatcacagaacttatatatatcctcttaatctatata

SEQ ID NO: 251199 - DNA, 428 bp, Glycine max
  unsure (1)..(428): unsure at all n locations
agctttgtggttgatttagggatggtctttgtggatgaatgggtggtgggtaatgagattggatgatattggctgagtaatgacattgttgagttagtgggaaatttggccatgtaggaatgacagtcacaacatgggttccttcctccttctcattctctccattttccccaggcttcccattcatcaaacaggatgatcaaatttgcctcttttcaaacccactttgatcctttcgctagtgaaaactaaatcggcaaagcttgaaggtgtgtaactcaccattttctcatagtagaacaccggtaacgngtctactatcattgttatcatctccctttccatcattgggggcaccacttgggctgccagattcctccaccttagggagtattctttgaaagattcgtgcccctttntacccatga

SEQ ID NO: 251200 - DNA, 420 bp, Glycine max
  unsure (1)..(420): unsure at all n locations
nntgcaattgtcatctgaagtgtgagagctctgggcagataattctgctaaagctggaagtggggctaaagtagaagatgcagggatgccaactattggtgcaaaggaagagggaacattagatgctctgagcttggtcttccttgcctctggaaaattaactggttggtcattcatattccaatagttccttatgatataagctaagtcaatgaccagccttaggttttcataggaggtaagagcatcagatccaactcccctcgatctacacaaggctgtgattaaagctgggaagcctaagcgagaagagttagactgagccatcatagtcatttgtccagagatcaaactaccaatgttcatgtccatccttgtgataaagcatagaccacctagctctatctgtgtcaatctgag

SEQ ID NO: 251201 - DNA, 391 bp, Glycine max
agcttctaggatgaattgaaaacctggtcgtttgtcgacgaaaatcgcgaattatggatcagtatgctgactggaaaggcgacgttatcgtctgggcggcagcactaaaaaggtatcgattgttctggtttcgacagcgacattccgtgagcaatttgcttagaacttccgcgttcgacttacgaacagcggaaatgggtaaatctgtttcccgcagtaatttggtacgggtgattagtctgtccgtgccggtaacgggaccctgtcggtattatatcggaacaatagtttgccatgcttcaccagcagggtgtattatttcagcatgaatgaccgactgaagaacgtacacgaacacgccggtttcaccgactaaaaccgttgatgcatc

SEQ ID NO: 251202 - DNA, 338 bp, Glycine max
  unsure (1)..(338): unsure at all n locations
gctatatcaagacattctggataatttagtatttctttatttgcatggcttgatcgaacaattatgaattatgttatatgactatgtggttcttatatttgatctattcatgtttcttgcttcatgattggtttatattcttcaatgtatgtcttgtgaatgattaatagtatatgattgtcatatacttgttacgcactngggctttntgttgatgccaaagggggagagaaataggaattaaatcacgaactcacataagtaattaacttaattccaagtgaagcataaattaaaaaacaaagggcgagaatggaacaataagtgagtgatcgact

SEQ ID NO: 251203 - DNA, 357 bp, Glycine max
ctgaacactcccacaagaaaaatattttatcctatggtggggcagggatcatatatgattgctgactataccacccaaggggggctgtgatataccgtgtccaactgattgctgtcggggcaggatatgttgaacacgtggactgctgtattgtgtgacgcttgcaaaccacatacattaacgctcatatgaaataggacgatccgtgattgatggaaaaccaaaaggacaatgatgtgtcattatggtcgagtgaccgctatagactattgaccgtactcatcgtagcgagataggaaaatgccccgccttgagtgaacctttccaaccaatacacttattcatgtgtcgcataac

SEQ ID NO: 251204 - DNA, 348 bp, Glycine max
  unsure (1)..(348): unsure at all n locations
gcccgtttcancatgacatggaactacgccattattnngcnatagttcttgcccttncncaacaagaagaacaacatgcgtaccatgttccataccttctttgccaccaccatcagtagtgcttattttctttgagaatcagaatctgtctgcaacgggagagggggttaggacctatttaaaggagtctatgcaagcgccacacggttctattagtatccgtactgccctcatacacaattataacatacttgatcttataatgattttcaaacatatatttaagctaatttttaataggatgaaaacgtttacacattcatatataatttcgcgtagatagcacgt

SEQ ID NO: 251205 - DNA, 434 bp, Glycine max
agcttcatgcaaataagtgaaagacactttcttctcttcatataccaatttggaattgcgggcttcgcttgatcgtgacaactcacatgtacattcacactcgatcgtatgggatgggatgaaaaggtctttgatccctgagaagacaagattaaaccaaaatctgtcttgctatacctaggtgttctcatgaatgatactattataaatatgatctttagaatatttttttatttgacatttgataaaaatgttactaaaatcttttaatgacatttgaaaaacattacaaaattataaataaatattattaatatgtctttacagcattaattaaatgatacgtataattcatgttacaaacatttagcaatatttttagggataaaatgtcacagaaacatcttattagtgatgattattcatagacaaca

SEQ ID NO: 251206 - DNA, 446 bp, Glycine max
gatcttaagcaccgcggctgcagcttcctgagtctcttacatattatatctccctcttcggggggaagaaaaccatcatcctccacttcactagaggaactatgagaacttttagatgactcactatccacctctctattctccaacaaaatcatagtccttttgttaggacattgggatgcaatatgaccctttcccaaacacttaaagcatttaatggaactagttttattgggagggggttgagtaggagaagtacgattacctcttgaagacttcctttcaagatgttgtgaagaagaaccctccttctttgaagtgcctttatccttccaagatgaataagtatatgaaatcttattgtaggtttgtttcctcttcagttgttactccactttcacaaccctatgtataagttcatccatgggtgtgtagctttgaagctc

SEQ ID NO: 251207 - DNA, 404 bp, Glycine max
caaaatctcagcttcattgtgaaaggatgtgctaagaatctgtgagtatactcacagtacactgaacaatgaagctgttggctgcttaaactttcatggctggatatgaagggtgagggtcaccacaatacaatgttgaactatgagtgacagaagtctcacaagccatctattatattaatacaccaagatgtattcctacatacatattcacaaacaagtctgaagctctcccccaaataccatgatgaggtgttcacgacataataaaacttcataactggttaagactaatttggggagacatgctttaacattaaactgtactgtagacaactcaagcccccttgaagatataataacatattttttaccaagctagatatatcactttttattattct

SEQ ID NO: 251208 - DNA, 452 bp, Glycine max
  unsure (1)..(452): unsure at all n locations
ccgggatcttaagcaccgcggctgcagcttatcattccaaaagaaatattcttttttcactggngggaaagggaacgaagtantaagtaaccaaaaccaaacaagtggggctcttatatactgtatacagttatatacatacatgagattttatgttaagcacgtggactaatatatagtgtgacgctaacaatagacataattaattgctcatatgatataggacgatccttgattcatgtaaaaccaaaaggacaatgatgtgtcattatggttgtgtggccgctagagattaatgattgaactaattgaagcaagttatgaaatatacccgccttgagttctacctttttaaccttttcacttaattaattaatcgcacagcttggaaagaatgaatgaagggattaaattgtgactgagaaccacgaactagaatgaaattactaaat

SEQ ID NO: 251209 - DNA, 441 bp, Glycine max
  unsure (1)..(441): unsure at all n locations
aactcagcttcgcctcagatcctcttgtggactagactcagcttttatatcttacgaaagtttagactaatntagcctaagctttatcctcagatccctcttgttggactagacttagaccaaacaacattattgtaacagcatacttaanaccaaaacttaatctgcagatccctcttgtaagactaagtttcaattctgcttcattcaagttctaaggcaacaatacattttccaatgctaaaatcacctaactaggcacacaaatggctgatcagaccaagagcatacaaaatttaagcactgaaagaagcattgaacacaagaaacacaatcaattagatatggaaataattacatcagttgttcagtagaaatccccaacaagggtgtttagccagccattacagaagaaaccctaacaataataagcttacaaaa

SEQ ID NO: 251210 - DNA, 415 bp, Glycine max
  unsure (1)..(415): unsure at all n locations
agcttggaggggttgatggggacctctttcttatatgaacgaggataagggctacgtaggagtgtgtgagctcanttgaaaggcgggcaactggggatggtgtgtttatgtttgacttatggaagtgggagagttgatttgctccatctcccgatcgccacctagtaccacatatgacgggtaccccataatccactaagcttgatgtgagaaagcgtggaagagtcagtcttcctacttttgtttgttgaccacagagtggtacctggagatatgtcgcgggggtcaagagaccttggggacgtcaggtggggtgctattgcccaaaaccaagcttggctaatcccgacccaacccgggcatagtcagttagtgagaacatgtgacgtacctaaacaggcgagctcctggcagt

SEQ ID NO: 251211 - DNA, 312 bp, Glycine max
  unsure (1)..(312): unsure at all n locations
aactcagctagctgatgaacccagnttggccgcaggactgtattttcttaacttgtccccgcaccatgaagacgagcgcttatgagcagccatcacttatcgaattatatcgtatgaaacgggctagctagcctaggccactttgagacaaatcacctaaatgctaaggtaatgagtaagcgctaaacactctcgcttatgcatgacaaaaatgccttccgctatgcttgcgctatcgaaagactgttttcaaaaaaaaaaattctaagtattctcagccctttctcaagaaattgaaccctatatctatcc

SEQ ID NO: 251212 - DNA, 387 bp, Glycine max
cgggacctcgggttttgtttcgtgggactcgcggcttgcaagcttctctcgagctcgtcgatgacacaaccagcaagctgccaaacttttcttgagctcgtcgcgtatgggggtgggactcgcgggttcaaactgaaccaggcaaccaccgcaccgcatcggctggcctggcatcgtctgaatagctccaactcatcgggaatgaagaatagggacaaacacaaaacgaaagaagcaaaatccctaaactagagtggagcagtgggcacaaaacgacgtcatatcacagaaaaaaatttccaactgaactcatgtgactcgggccagactcgggagtttacacaaggctatagggagtccaccgagtctgctcttagcctgcacaat

SEQ ID NO: 251213 - DNA, 426 bp, Glycine max
  unsure (1)..(426): unsure at all n locations
tgcaacacacataaagncaggtctaggagctgtatatacatcttactaccaatcatactgctatgaacaaaagcatctgctttatcaataccatcgctcatngataactnttcattcacaacaattggagtggcaacaggcttgcatagctccatgcacaacttcaatatcaccaaagcatatttcttctgcgaaatgaacatcccgtcattaaattgagaaatctccattctaagaaaatacttaatttcacccaagtcaatcatttcaaatgctttttccatgtcctatatttcacctaagtcagtcatttttccacttcttcacgtacaaagagagcttattatcacttcttctaaagccctgctttacaagataactgtcaatcctgctatatcaagctcttggagcctgtttaagccataa

SEQ ID NO: 251214 - DNA, 359 bp, Glycine max
aagcatttgatgaccctatgactccaagcgaaaacttcggctctacctactcaaattcgtcacctttcagatccacttcgccaacactccctattcattctgcagtccccactcttctctctgtctttgaggcaaacaacggtatttttaaaaccctttgtaaaaaaaaaaaaaaaaactggacttgacatatacaacatgtataaaaaggtagcagccagactcgggagtaacctccttagactcaagctaagcttcattcttcccaataaatttctcgccattccaaaccctttgttgttggctccagaagaaatggcacacaaccggtatccattcataaagcgggtggccagaaa

SEQ ID NO: 251215 - DNA, 431 bp, Glycine max
attacaatagccactgcgtatgttgtccttttcggaaaaatcatgacctgatgcatggttgatgccgcaaatactatgcttaacataaacttatgtgcaaactctctagctaagaagggtgtgtctcaatatgttaatttcatttcttgaaactctctacacagagtgtgagattgacgcttgcagtcattattgttggtaacttttctgggttgttgcagttcctctaaatggcatagctaatactactattttctagtaagaactgctaattcatgcttattatggaaaacaattaaacagtactactatgaatctatgatgtagtgaagaccttaagaactaagtcgcggctcttgaagtagttgaatgtcataaattcagttaaaacgatatatgagatgttatctattgcttaattagcacatgga

SEQ ID NO: 251216 - DNA, 431 bp, Glycine max
  unsure (1)..(431): unsure at all n locations
agctnactngcagagattcctttatggtaaatattcttaccagcngggatgaaccattgggatagtaccgcgactatagcaaacaatgagaaccgttattacaatgggcagaaacgacagataccgtcgaagcacaacactgttaaagaattactctcaataggagctgttaaagtggatcacgtatgcactgatgataagttaccagatcctttgacgaaaggattagctagaaagaaagtccataacactgctaaaagaatgggactattgcccttactgcgaggatcattcatgatggtaacccgacctatatgactggagatcccaagaactaggttcaatgggtaataacaagctatgaagtgatatgagatgaacatgctgttataagcgaaagcagcatgattcctgaagtaacaagaggatga

SEQ ID NO: 251217 - DNA, 433 bp, Glycine max
  unsure (1)..(433): unsure at all n locations
atgctctatttatatcaaccacatatgattcttctctagctatcatgtcttggctagtagatacatgattctcatagactcttataacaagagaagtctactgttctatgtaatttggaagtaattaagggtcaatactccctatgtttaatacgagagaaggcatattaaacaccggttcaatggacaatcttttcccttttgactttatattatctcctacagataaatctacgggagtaataattttttcatgaaggaggaaccccatgtggtaatctttcatactatagtcaaattgtggggtaaaatttgaactattaccagaagtattagccatgaggcctttgctagattcacgacaagtgactaatgattctgtctcattaatcttnggaagttatttctaatgtgtctttgaagctgatttctt

SEQ ID NO: 251218 - DNA, 344 bp, Glycine max
  unsure (1)..(344): unsure at all n locations
agcttaggaacccaagcttttaatttcaatgcatggtagcatgacttatgcctaggaatctaaattttggttttgaatgtggaaaggcatgaatattacgacatgcttgaaagggtttttactaaaatttggctgccccatgaggaatactttgcacctaggtagcatggaagatactcttcaatggtattatatatgtgtgaatataggtagcatggaanacacctttcaatggtatgtatatatgtgaatataggtagcatcaaaaatacctttcaatggtatgtatatatgtgtgaatataggtagcatggaaaaaatctttcaatggtatgtatatatgt

SEQ ID NO: 251219 - DNA, 396 bp, Glycine max
  unsure (1)..(396): unsure at all n locations
tgttacanatattgtanaccccacataaacaaaaataaagatggttctactcgtgtggttgtgccgaaaaacctcggctgcagccaacgaaggctcgtagtggtgacaggtattgttcacccatgaataaagcacgccctgaggcaaaaggatgtggttccaatgtaacgctcgctagagatgcatcacgtatcatgtgcgtgaacttctctcgccagaaaagggacctatgtggggttgctacgacagtgtgttagttggctatacacgtggacgacgggacattcttaaaaggtcactgatgcaaaccgacaagagggtggtgcactagttgccaaataggcccaacagtgaccacacacaaaaatgtgtttgtgcgacggacattggtggaca

SEQ ID NO: 251220 - DNA, 425 bp, Glycine max
agcttcttttggaccttgaacaggcaactatttcctctttcaaaaccatgctatgtgctcgcgactggtccctttcttcctttcgcaacttgagttcactattgctaccccatagagctccgcgaaatttgttccggccatactcttccttgcgagccctcttggtctcttgttcaagggctcttgcggtaattgcattctcttcccgtaacccggcacactccttccgaacgtgtgtagcggccaacttgaacttctccttggcaagttttgcctttcctaactcgcttttgagagcttggacttcttcgtcctcttccggtgcttcaaaactctctttgctgacgactcttaacttggcgagccaatctagacctcgtatatgaactttcagccattcgtggtacccaccaatgatgccatta

SEQ ID NO: 251221 - DNA, 395 bp, Glycine max
  unsure (1)..(395): unsure at all n locations
aactaagctccatcacaaaagaanatacagacaggtccttggacccgatattattcgaacagtatagaattgtcacccctaaataaggagagaaaggaaacctcaacccgaagtggtcctctccctttgattgacaaccaaaatcctgtgcgctagcgactgtctcgccccgcactaaacaaaaacagacaaggaaaaggcccaaacactcgaagccaaattcctcaccaaaacaccattcccgaanaagtcctattgatccgtgaacacgcacgtaatctttgatttgataggaaatgattcgcaaaactaagtcataacatatccatggttcggaattaagataaaacacttacctgtgtgagatcgatacactttgagtgatgtgcttctat

SEQ ID NO: 251222 - DNA, 435 bp, Glycine max
agcttattctatttataatcttcatcttttattgtttgttgtccttcaatggattaattcgtcacttaaagtttttcgtcaaatgaattctaactatttaggcaattaatgcttacattaaatgcatgttcgttcttcatgcagagagttcatgttgatagattaacgtgacaaacacttcagcagaaaagtcacttcttttatcagagttgatctgcatagtgaaacgtcttttgataaaggtcaacacttttagattatggacttcatttattattcataggattttgacttgatagataaaagaatttcaaacgcaaagtattgaataaaggtcttaaatgcaacacttaaatgctatgtcaaatcatgtatgtgagagacatcatctgaaacttcaaacgatgagatacagatcatgatctggtaacacac

SEQ ID NO: 251223 - DNA, 453 bp, Glycine max
  unsure (1)..(453): unsure at all n locations
cagcctatatctataactgaaacaaataaagctatccatganttataagangntaacccagcggagtgatgaagattataaaaaaccaagtcaagaattcactgcctgttcaatactgtggacagctgagataaaaaaaaaaaaacctgtggacagctgacaatatacattctcctaatagccaacttgggaacataaataatttggaattcataacacagatcgtaaccatgttcaaatacactgattaccgtaactaaacatcaaaacatagatataccacaagataacaacgaaagcaaatagatttgtcttactacagaaagcacaaaataagtactgctgaaagggttattcttgccttacccttcatatgttcatcaagaatattgtccagttacagaactcgaacctatacgaaggaagtcctgaaatatcatctattgggcacat

SEQ ID NO: 251224 - DNA, 433 bp, Glycine max
agcttcacattccaacctactaatctctttttattcttctcaaggatttagttgaaatcactatttcaaactctactagacaacatcaaaaatcccagatatttcccaatttggtgggtatgttggaactgagctatagtcacaaacttgtctaccttgatattagaaatatttttagaagtcataattttgggtttgtgaacattaacttcaatctataagccaagcaaaaagcatcaaggacttccttgacaagttttatttaggaagatttggccttagtgaacaacaagcaatcatctacatagaaaagatgagaaatactaggaccatggtgaaaaattttaatgggcaaccaacttttctcctgcactttcattgaataagcaatgacagcttttccatgcaaagaacaaacaaataaggaaacacg

SEQ ID NO: 251225 - DNA, 397 bp, Glycine max
  unsure (1)..(397): unsure at all n locations
gaaatctctgtnaaagtcaacagaatgcttgatcaaaatcatggatatctagtcatttaaaggatacagcatagagtcatagacctcatgaaaaatgaaaggcgaagaagcaaactaccttagattcattaattatgatctttaatgtttaatttgtaagtaaagctttagtttccaaactatgaatattaaaaanttcctggccacttgctcctatagatcacaaaagcagtgctcccagtgattgtagtggcgcttgtaaatcacatgaaggaaaaaaaatacacgattggattaaaatatgtttctcacattactcacaaaaacagattatacagaattgaactaaaaaatacagattatacaaatgcttctaccactgctccccctccccact

SEQ ID NO: 251226 - DNA, 433 bp, Glycine max
  unsure (1)..(433): unsure at all n locations
agcttggnggctagttcatggcatttattctcttatactttaaaagattgcccttaagctacttgcgcaaccttgttcatcttcttgttgtgaaaggaattggagtacatattcatttatccattctttaaagagaaacaagatggcaccacatagagctgaagatttagtatttgttcatagcaacctacgacttctctcaaggaatactccgcaatatcatcaagaggaaactaaaatgtgggatgtagctggagatgattttgggtcacttatgattgtggtattcttgaaattgctagtttgtctttagatgaaccagagttagagggtgtctttttcaatgatgattgctagattgtggaattcttgaagacttgaagttgctaatttatcatcttgctctataatattcttttgtaaaaaaacaaag

SEQ ID NO: 251227 - DNA, 453 bp, Glycine max
  unsure (1)..(453): unsure at all n locations
ggcatgatntacatctccctctntctcaagcaaattcttcttgttatcatcaaaatcttcatgatttacattctccccctttntgatgatgacaaccacctgtaggttaggagcaacaacaaagaaaatatctatttgcatatagtttactcccccttggttttacaatgattgcttatatgagacaattgaagatttcatatttttcatatataaaaagttgtctcataaaacaatagataatttttcttactattctatcttttatctttctctccccctttgtcaacatcaaaaacaaatcatgaatagagaggagaaagatgttaccacttgttgcaatgtatgagaatcaagtgatatcataaggcattaaaacaatcattcaatattaatcaagcaaaaacaagtacaataacacatcaatcanacacaatcaaacacaatcaatca

SEQ ID NO: 251228 - DNA, 369 bp, Glycine max
agcttgttgtatgacctgatgacgtcttgtgttctctcgcacaactctgaggtctaacaagctttgcatagctcttgactccatatggaatcgatcttgaaataataacaattataattaataactatttttctagtgataatttacgggaaaaaaatcaacaaaatttaattcgctttactgggcaaaagtagtctccactgtggatatagttttcctatgactgcccaagctatggctattgtgggatgagtagtaaacgtacatgactacatagggcctgtcactccgccaatggaatgacatagtgtggaaacattgcaaaaccaggacacatagttagaggcgcaagcccaaagaccctgagat

SEQ ID NO: 251229 - DNA, 406 bp, Glycine max
  unsure (1)..(406): unsure at all n locations
tactcctctaaagaatcatgtaacatttatattcatcgtttactcaatcaaacaataattattaataacaacaattgacaaacgaaagcgacttacaatcttgtcagcaatttcctttgctacctcaggcgtcatttgaccacgtttcttggtgcgggtcatcttccatttcacgtgtcgtctgatggaaggtggaggatcaatgatggtgtcagtgctttcggattgagctgcttcctacaattgtatctttttcttctcctccatcaacttagtttctagatattcataaccctcacgagacaacacgcgaggggcagtgttntctttctaaatgggctgtgccttctttcgcacatcctttaanaattacacattatctaagcttattatgtttgaaattata

SEQ ID NO: 251230 - DNA, 434 bp, Glycine max
agcttagagaggaagcttcaatggttgattatattgacaaagagagagagagagagaacctggcatgggaatgaaggaaagatagggagagaagttgaactttgaagtgtgtctcacaagactctcattcatcaaagttatgacaagtgttacacatgtttctatttatagcctaggtcactaactaaatgaaagcttccttgagaaactagagcttagctatacaaacccctctaatagctaaggtcacctccttgagaagtttccttgagaaacttccttgagaaactagagcttagatacacacgctcctctaatagttaagctcacctccttgagatgagaagctagaacttagctacacacacccctctaatagttaagctcaccccatgccaaaatacatgaaaatacaaaaaaattcctactacaaa

SEQ ID NO: 251231 - DNA, 430 bp, Glycine max
agcttctggtgggacatcttgacttgctttccaatctgacattcaccacagattctgccttcttctattttcagattgggaatgcctctcacagcacctttgtcaatgattttcttcatgcctcttaagtgcagatgttcgaacctttgatgccataatttgacttcatcttctttggaggatagacatgtggaggagtagctggtttcttggggtgtccataggtaacaattgtcctttgatctgctgcccttcattagaacttcactcttctcatttgtcaccaagcattctgacttagtgaagtttacattgaatccttcatcacacagctgactgatgctgatcaagtttgcagtcagtcccttcaccagcagtactttgttcagactaggaagtccatcatgaactagctttcccattccaatga

SEQ ID NO: 251232 - DNA, 349 bp, Glycine max
  unsure (1)..(349): unsure at all n locations
ctntggagtagaaacatgggaccaactcattttatttcacatttgaagtcgtatctagtcaaggtctgagagaccatacaagtttcctaacgatttctaattatgtgggccattaagtctatcatatgctgacaatagccgagaagcccatgaatctcttctggggcggagtaggtgtctgccatcgccttggccttggctaacaatcggggaagttcttgactcccgttcaaggtaagagcaaaccgatccatccacatggttgcctcttggtgtaagagtcgatcacccttcctctagcctctttttccgcgtatacttgggcatattcgtccgcaatcctatgctc

SEQ ID NO: 251233 - DNA, 425 bp, Glycine max
  unsure (1)..(425): unsure at all n locations
agcttgcccaagaacttgggttttttctctatacaaggagccgatgggttccaaaaccgccgagccagatggaaaaccaaacaattggagagagattatggtgtcctcaaagccaattatgatgctcttaagcttaactttggcaccctcaatcaggacaacgaagccttacgaaagcaggtagaataataatacaacatagtataatatttagaagaattgattttgagtctaattaattttaaattaaaaagtataggtgaattttgagtaagaaaacaaacttcatgctgaattttcctatntaatttttttctgggtcgtgcctttcaatctataaactatgctcgatggatttaacctcatgcttgaaatgatcagtagttttctaattaagagccttcttctcttaatctaatttcttt

SEQ ID NO: 251234 - DNA, 474 bp, Glycine max
  unsure (1)..(474): unsure at all n locations
acacataaaactaagcttgaagaatttanattctttaggaaggcactgttatgttattcccttgcaaagaactgcattatatgtgttacatacatcaccaaagaacaaaggtgaaaagtatgaacaaatgaactcataagaatgggagtatgacttataatcacaaaattcaccaaaagagcatcaagtgatttttgaaaaataccaaagtatacatatttctatacacactacagataatatatgcatgtttccatattcactttctgaaattaacaattagatagtacgaaccctaatgaatgattgaatagtctaccacaattcatcagatacatagaagatagtatattcaacaatcctgagtaagcatataaaaataacacagtgataactgctaaataatagactttaataatagagtataaagcaaactatctctaaaatactattagagttattgcgctaaatata

SEQ ID NO: 251235 - DNA, 365 bp, Glycine max
agcttggatttgcaaagatattttgttgcataattcacaattttagctaaagtagaatttttagcttaagctaattttcgatgaaatgggatcggcatgaatttagcttaagctaaattcttggataagataaatttatgcataatgttttacttacccttaatacttttttagagtttccaaaccaattcctagtattgtacatataaattattttatgggttttcatgtgtttggtgtcatgtgatgttaatcgtagtgctaagaataagttgaaaaatgaaagtaatatgttaataagttaatcaagtaaaattaaagcttggacgcaacctctttagtaggtaggtaggatcatctaatat

SEQ ID NO: 251236 - DNA, 457 bp, Glycine max
  unsure (1)..(457): unsure at all n locations
ngaattcatcattcatcctctaagttctttttgctcaagtgatcaagaaggcttgctcaagcgaggcatgccaattactactccaattggttctatcttggctcgcttaagcgcacaacaagccgtacttaagaaagcaaaactctntgtaattttgactcgatttcttgcaaaaactccataaaaacatcaagagattctaaaaactagcaacctaaagattgtaggtgttaattcttaatattgaattaaaacaaggttcactataccaaagaagttagataattaccttanatcatatgtgaaattaaattaaatttggttcagacttcgcanagtgtctttagtcttcattctgatattgaacaatagatattctcaaggacaagtctcaactttcttttgtttgtatcttanaagggttgtaacatacatctnttaatgagccctctatgtg

SEQ ID NO: 251237 - DNA, 431 bp, Glycine max
  unsure (1)..(431): unsure at all n locations
gcttaagaggttgtgatgcaatccacttctttgggcattggatagaaaactccaagtagattgggccagagatgtaagagaaggccctagggttcttatgagccttagggtagatttcggacccatgggctaagtacgagcccacttatctttgtaaatattagattaaggtttcattatttttgggccttgtatttagggctccataatgtaggtagggtaccctagaaatataggatttttcagcccttgtattttagggcacctagactagtttttgtattaggggtagttttgtaatttcacatgcactaagtggatatttgatgtgtgtggttggaaataaatttaattgaattggtagaagcccaatccaattaaattntagagggggaggtgagcattngcttactacaccccattgccatatc

SEQ ID NO: 251238 - DNA, 430 bp, Glycine max
caagcttgaagggcttgggtgggaagtgataatgagactcaacttgggtaacaaccttgtgctacaacaattgtagcaagacccattatccacaatgggagaacaatttttgtttaaaaccttgcatcttgtatgaaagatgttctgtctttaggtttgggttaggtcacaagattgactcccaaggagccttctcaccattagaagatcaccttcttcatagaggtaaaccttttcaatgtgctcatcacccttggcttcaccctcacttccacttgaggaaggagaagaagtagcctcctcttggctactatagatgtcttgatccctcatgatcatggttttctttgtggagcattgagaagaaatgtggtctttcccaatacatttaaagcacttgatgttactagttctatcttatgaactagtc

SEQ ID NO: 251239 - DNA, 349 bp, Glycine max
  unsure (1)..(349): unsure at all n locations
ctaagcttctgataccatcttgaaataatctctgaatcctttcccattatctcaatcgctctctaatctataatcaactatgtggtcatgatcatcatgtgaaagtttggtccttttactctgacatatacatgagtgaaaatttcaactagatgaccaactatataatcaaagaaagggacataagaatatgtagagagataaacctacagaacacacatttgttgcactattggagctggagagcttttttcatgaaacagaattntgtgcagaagtgaaatgaattgagagggtgttctcgaagtattaagagataaaaaaggtaacacgtttagaagaccacatg

SEQ ID NO: 251240 - DNA, 423 bp, Glycine max
  unsure (1)..(423): unsure at all n locations
agctntgggctcaatagccccaatcacatctatttcccacatagagaatggccaaggcgctgccaagacattcaaaggaaagggcggagcattaacattgtcggcgaatgcttggcacttgtggcactttctcacatggatacaacaatcgttttccatggtgagacagtattaccctgccctcagaatcttccgggccatggcatgtctgttggcatgtgttccaaaggacccctcgtgaacttccactaacatctgctcagcctccctggcatccacacattggagcaaaaccatattgtggttcctcttgtacaggatatttccactcaggaaaaaaccgactgctaaccttcacaacgttctcttgtcgttgtcggaagcctcctgtgggactccttgtcttcatgatcgcttaatgtt

SEQ ID NO: 251241 - DNA, 345 bp, Glycine max
  unsure (1)..(345): unsure at all n locations
tatagaaagcacttttaatgntccctaaatgaacggcacgtaataattacactcaagcactgtataaaaacctttatggattaagatgatgttaccttctgcataataaatgaatggttctttactggaaaggtggttatacatcgatctatttgatcatctttacatctttacatctacataantatcacaaacacaatatgagtatattaaatggttcttactatacgataataaagaatacttcatttatcctatgaaagttttatatatctttaacgcggtcatgaaaaatatctatgcactaaacttacaattattaaaaattacattcttgtataaaac

SEQ ID NO: 251242 - DNA, 424 bp, Glycine max
  unsure (1)..(424): unsure at all n locations
agcttctccccaatttctatttattggggagaagtgaagtgaaaaagggttcagccccttaggcacttctctctctttcgaatttgcttggaaaaaatgtttccgtgaagaaaatccaagccgaggcgcttccgaaacgtttccgtaacgtttccgagaggaatttcgcgaaggtttcgaccgttcttcgacgttcttcattcgatcttcattgttcttcgatcttcaacgggtgagtacctcggaccaagcttttcgattcattctatgtacccaaggtgggccacattgtgtttcgtgcatttttattctcgatacatttactttctatacccccttttgacgtgcttaagccattntattcaagtcatttctcactctaactcaaaataagataaatctccaccgatcgtttgaattgtat

SEQ ID NO: 251243 - DNA, 294 bp, Glycine max
ttcacaatatccaaacaattcaatcccatttgttatgaatctatcttaaacagtgaaaaacagagtggaggcgaagatctttgcacaagattcattcaaactccatagagttgtttcctaccctcatacctcagcaaaatcctctttgtttcgattcgttaaccattggattaccttgaaaatttaacaaggggttcctaatacagaaatctaaattttgaccgttgcgatctgctagaaaatgtctagaacacgagatatactacctttcctgtgacagcaaaaactagaact

SEQ ID NO: 251244 - DNA, 429 bp, Glycine max
  unsure (1)..(429): unsure at all n locations
agcttgtgcttgaaaatatgtgttttattattttngagtttagaatgctgaactgggatcatccatttctattttctagtttagttattaattcatgtggctgcggtaaaattggtttaccttacagtttacattgttggttaaaaaaagacaatgacatttatattatgggttatttaaggcttatttaaagttaagcatagggtttggttatctactgaaataatgctctactgaaataatgctctgttgctagtgacaatattgtgaagcttgtgctttgaaaattatgtgtatggaatatttttgagtttagaatgctgaactgggatcatccatttctattttctagtttaggtattaattcatgaggctgtggtaaaactggtttaccttacagtttacattggtggttaaaaaacgacaatg

SEQ ID NO: 251245 - DNA, 487 bp, Glycine max
  unsure (1)..(487): unsure at all n locations
ggagaaagtccttctgattntgtttatacatttctgacttgttttgttgagatgaaaagcacagattggacctcttgttagttgttatcaatgaatagcttaaacacttgtgcttgagtgaaacagtagccgtgagattgtggtttgagctactttccttgatatttgtcttatgattaacttcatataactgtatagttcacattttgttctcctatttgtctagctgcatgttctgtgaaaacaagtgataggtacacatttcttcatctttctcatcatgcaatcaataaattttgatgcatacacctttgtacataaacactgcatgttttaccacttgaggacaagtgagttgttctcttttgcttgaggacaagcaaaactgtataattggtgaagttgttagtcggtgaanatgactaacctttgtgtatannacttgtgtatattgatcaaacttctccaattataagtgtttataata

SEQ ID NO: 251246 - DNA, 398 bp, Glycine max
agcttatgaacacatcgtcggtttcttgaggtatgaatgaaaaagatgatgctgacgccatttggattttggaaggttatgagaaggatgagaggatttatagaaggggtaaactcttgatgtgggcttgcaaatatgatcttgttctctctatatgtagggttgtgcagtgacattgtcctaatatatagcattgggaaatgacgaaaacagaaaaaaaataataatttaaagtcgttagttagtctccgcaaagtttaagtatcaaaatcttaaatattaaaaaattaaagaactaaaaatataacttatcttaatttaaatattcacttttttatgaaaaatctaattaaaggatggactttattggaacttaacgcagggaggacactatctag

SEQ ID NO: 251247 - DNA, 432 bp, Glycine max
  unsure (1)..(432): unsure at all n locations
acctatgaaactcagctgggtggtagtaagtattgcattgtgcgaaactaatttgggcctgtggatatatctgtaccaagattaggtggtctgaacggcaggggatctctattggcaaaatattgataattagttataaattttgacaattgctatattcagttctcctcgttattttattcactttctttgtgaatttgtttttttttccaaagatatcccctgtagaaaaaatacacgctctcttttgaacatacttacgtcattaccctcctgagacaaatatacttcccagtcgagaagcgctacactctgcatgacccanacacaaaaaacaccatttagaanaaaaaaatcacctcataaaagaaagaaactcatagatggaactttctttatctagcagtagtaagnacactacccattaccacc

SEQ ID NO: 251248 - DNA, 432 bp, Glycine max
  unsure (1)..(432): unsure at all n locations
agctntggtctctgcagatcttcacacatcataatctctcaaactctctggaacttggacctttcactctctagaattctctagacatgtagaagtttcaagaaaaggccaaactctcttccaaaatctgatttcaggcttaaataggtggttttgttcgtgctcgtgcacttagcgcaattctgaaccgcttagcgcgcattattaaatttcggcttagcatggcttttctcgctcagcgaatggaatgaagcggtgcacttagcgggatggcccttcactcagcgaacaaggggatggctcantcgaggagtgttgcgcttagcaaatggctcactaagccagtagattggcttagcgagagggtgaaaatcagcacttcacaaactcgcctaattaacctaaaattgagagaaaattattattaaacac

SEQ ID NO: 251249 - DNA, 370 bp, Glycine max
  unsure (1)..(370): unsure at all n locations
cgagtcatcaaaatttcttttttcatccaaaatgtgaactcgcttagcgatacattgagagtccataaaaatggggctttaagcccttactaacaaccactttcaagcctaagaatcctatgcaaaacacatcatagcgacctatattacatgcgaaattaaactcctaacaacatactatctaacaactaagcaatcaacaacaatcatcaacacaaaaacacaattacagagaccacaacatggcttctatcctaaggttcanaaatagaaattaaaaaggtaaagtcagatgtacttacttggattacagaggttgttgagtacaaatatgggcgacagaagtagagaatgcaagatgaatatagtg

SEQ ID NO: 251250 - DNA, 421 bp, Glycine max
  unsure (1)..(421): unsure at all n locations
agcttcttatccaaggctcatcttggtgttgaatttccttcttctatggcttattccctaggggatggcgcctcctctcacctcttctcctttgtcttccgttgcatctgcatggtggaaaatcaccattaaaggacctcattgaagctcaaagatccagcctccatagaagccccacaagcaagcttccatcaagtggtaatcaaagcacaagagcttcaagtaggtgctccttaaacctccattaattttttgctttaccttctcttccattggtttttgttcttcatttttctccatgtatctcctcacatgtcttgttctacatgttgataacatgattctttaaagtttgcaccgattaaacttgctatagaagttagattngattctctatggttcaaatttcttgttcttgttc

SEQ ID NO: 251251 - DNA, 418 bp, Glycine max
  unsure (1)..(418): unsure at all n locations
gcttgtgttgctgcccacagagcccctcggaactagatctgtttgttctcttctctacgagccctcttggtatcttgttccaaggcctaggcaccagctatattcggatctcttaggtaggcattctcctttcggataataagagctgctgatgagaacctctctttgactgtaagggcttgctcgagttctgccctaagggcctgcacctcttcgacttcctccagtgcctcaacttcctcccttntatcggttcaaaaaacacaggagccaatccaaaccttgcatgtgggctttcaaccaccttcggtagccaccgataagcccattgctactgcccctgagttctttatccttcttttgcaccacctcccatgcctagcggaccttctgaagcgtctacccggtggtcttaatg

SEQ ID NO: 251252 - DNA, 430 bp, Glycine max
  unsure (1)..(430): unsure at all n locations
agcttttgtctaatcaaatcaaagagttttttttctagatgtgtttaaattataaagagagaaggtttggagatatctcaactagctcttgacccaaattcaacagagatacatcatagtattacaattagagctagaaccaagaaatttaataggtgatttattgttcacctatccataagcacttgctaaaaaaacttatcgtacttaccaatgatgttttaattgaagcacaagagtttatgaaagcataggcaatacaaggtgttcaaatttaagtgatgtactaccatgcaccgggtaattgttactttctttgatcctattagagttgtgtaatatttcatgatgtttgtgccagatattgtcgatgcattttatcgtccctccatctaccatcaagatgacaggatancgtttaatttcttat

SEQ ID NO: 251253 - DNA, 255 bp, Glycine max
tcttaactcaacacttaactcctgtgagaagagggcttttttttttaccaaggctaaaagtggggagaacggctagggggttgccaacatgcaccacaaccgctgcgcgaaataagactacagacttgcatacataagactaaccaacagagtgggggtgcctgactgagatagaagctgacatcagggtacatcagtaaagaaaagtaagttgataacagcgacatacactaaagcgactggttgataacaggg

SEQ ID NO: 251254 - DNA, 377 bp, Glycine max
  unsure (1)..(377): unsure at all n locations
agcttcatattntcacatagcaatcatcacggacgaccctgaacccccacattctcaaaccttacccccagaaatccaagccttactcacacacttctccaaccttttccagagcccatcaggactaccccctaaccgtgtcaccgaccaccatatccatcttcttccccacaccagtcctgtaaatgtgcgcccctacagatatccccattaccagaagaaggagatagagcagcaggtcaatgatatgctacaaaagggacttatcaggccaagcacaagccccttctcatcaccagttcttctcgttcgtagcaagatggttcggggcgatttgcgtaaatacagggttctaacgcggagacatccggaccgat

SEQ ID NO: 251255 - DNA, 481 bp, Glycine max
  unsure (1)..(481): unsure at all n locations
cttccgttatgtctgcaagcctcanaatagtggcctatctagctagactaaaactatgcgtcaaacagactaatagagttagaaaacaatataattaggattatcgttctttcaaaggggattatagcagacaaacattatgagtagaagaagatgagcaataatttgaaattcatgtcttaaaatctctccatgacgaattggaagcatagaaatctcttggtttttaaaaaccagattttcaatcccgcaaaagtcatggacgaagctctattccatacttggtcttggttaanaggaatagacaaagaatttcttattcattttaatcaatggtctagtagcttgcaggaggaaatgtcctaggggttattgttggtctctntcttcaactgctgcgtattntgttctaatgtagtggggttagtgcatacgtttgcattgtaatcatatgctggtttnctcagtacctctagtactg

SEQ ID NO: 251256 - DNA, 407 bp, Glycine max
agcttttattgttttggatttggtttaatagaaataaagtatgttataaattaaaagttatttcatattaaaaaatatgatgttgacgaacgccttactttacatgtaacgagtattatcttaatatgacttatcgttttgaaaggtcttcgataatatttttttttcaatgggaaaaattattcattattttcaaaagagatgttggacaattcattttaaattaattccttcacttcataatttcacaaataaattaagagaaattataataataactaggggtgttacaatcactactaaaaaaatagttttctacatcgcctaattaacatcggttatagctaaaatcgatgttaacgaaagcgcggtggcatttttgtaaataagtagacttagttaacatc

SEQ ID NO: 251257 - DNA, 448 bp, Glycine max
  unsure (1)..(448): unsure at all n locations
tgaagtgaganagtgtggaagagtcagtctttctacttttattctttgaccacagagtggtacctggagatatatcgtcggggtcaggagaccttgtggacgtcaagtggggtgctattgcccaaaaccaagcttgaccaatcccgacccaacccgggcatagtcagtcagtgagaacctgtgatgtacctaaataggcgagctcctggcagtcaatcgataaaagaacaaagaccacacagcaaggaggcttgtgtggtggctggccagctatgaatcttgagttgatattggaatatggcctctggtaatcgattatcaagggtgggcaattgattacaaggcttaaaaatgaagacaggaagttaagatggtctctggtaatcgattaccaagggtgtgtaatcgattaccacgcctaanaatgggatcacgaagttgagatgac

SEQ ID NO: 251258 - DNA, 364 bp, Glycine max
  unsure (1)..(364): unsure at all n locations
agcttgcttgagaagcttatatggaagatgtatcttgttcttcaatgaggtccttcaatggtgaatttcaaccatggagatgcagcataagataaaggaggagaggtgagacgagacaccatccattatggaataagccatggaaggaggagcttcaccaccaagagagtgccttggataataagcttatagagaaaacttccttggtatgaaaaaatgagagagagaaaggggggagggcactaaatttaatgagaaaaacaaggagagaagttgaactttgacgtgtctcacaagtttcacatctctcanagttatgacaagtgtacacatgctttatttatagccgatgtactaactaaat

SEQ ID NO: 251259 - DNA, 198 bp, Glycine max
atctggagcctgttttcatggctctagtgaccggcacctacctaaggatgattgcctcatgctttgaattcacgacgttgcgcttagcgccaccctcacgcttagcgggagttagtggatttgagcctagcgcaagatgcgcgctgaacctggctgatgacaactgttgtgcttaatgcactgatcttcaacctaatg

SEQ ID NO: 251260 - DNA, 442 bp, Glycine max
gacttaatcactgagctgcaactgcttttctgcatttaggaaaattaatgggattggatgctacatgcctgtaacttttgcacctccttcaaatagtgtggactcctcatggcaactacgacctcacacttatctgggttagcttcaatacctctataagcgatcttgaaacctaatattttccctctcccttactccaaaagtgcatttctctgggttgagtcgcatgatgtgcttcctcagctatgcacaaatagctaaatcttttggataatcatctgggtcttatgatttgactaccatatcatcaatatatacttcaatattctctctcaacaagttgttgataactttgtccattaaccattgacaggctgctccatcattcttcaattcaaatggcatgaccttgtaatataacattacatcttactgatgaatg

SEQ ID NO: 251261 - DNA, 466 bp, Glycine max
agcttaataaagtccttagtgatccatatcgtgtgtgtgtgtgtgattgcattgaattagatgatgtgcaaagttggggattataacttcagtcgacttacatgaaatacatataactgaaacacttgtgtgcttgaaagaaacactatccttgtgaggagtgaagcatagttgatctttctttgatacctatcgtacttgctaacctactttaatctctgagtgcattctttgcatgattccatcatgaaaaccatggcaagtgtgaacttgagggttggaagctgaaattgtttgaaaagtatgcaattatcttagttagtgtgattggttacatcatgaacattgccatggatataacataatgtagtatagttcacttttgcttaggacaaacaaagctgtatatttggggagtctataattgtatgctcaagaatttgaaatttaatcacaacaatatcta

SEQ ID NO: 251262 - DNA, 441 bp, Glycine max
  unsure (1)..(441): unsure at all n locations
gccattanaagagcatgagcatgtgaatggcagcatgactaataatgtttgtcagactgacagattgattgtgaaagaatgcattgaccgcatcccggtgagagtgtgatccttaaattctgagagaaacaactatcattgagtaccgatttttgcctgaatgtctgaagtatagactgaacgcttgaaattgaggatgatgcaagccatgctcgattgtgatagccaacttaccataaagttgaccatgtgcttgaatgaattatcccttgtacccaattngagctgaatgaattattgaattattgaaccctgagcctatacagcgttattctcttgctaccttgacttangttgtaggagagcattatctacaggaagcgtggtcatagcaatttgcccaaattggcggagtattatcaaagtaatgagtccatattg

SEQ ID NO: 251263 - DNA, 367 bp, Glycine max
  unsure (1)..(367): unsure at all n locations
gtcccgaaagtttagttagttttctaaatatgntctcttatagcaactaattaattaatactcttattataagaaataatcttaaacccagaaaactaatgttgaagtaaaatatttgatcgtagaaaatataactaaatatatttatggggatagtgaaattaacacatgtatatgcatgaacctatatgagctaaaggcataatctctggtacaggcaagtgcttgtctattatttaattaagcataaagatattttttggaggtcacttgaactaatgggtcattaattaaattacatgatccaatctctaatcattacatagtttgaattttgatagagaagacattcatgtgttcaactagc

SEQ ID NO: 251264 - DNA, 316 bp, Glycine max
aaaatccacaatatttacaatcaccctcatcagaatgcgtcaaatgttcaacatgcacagaatgaccaggatgcacactatgcgctaactcatcctatgaaagagttctatctattatcacggacaaaaaggctgtaaactacaatggactgccacttgacatgcactatactgcaacacataatgtggttcttaacaagcacctaacaagggggcaaaactacaaactggctcatatgagaaaaaatgagcttgaattctgtgatgaacacccttcatatatgaaagatatacaaatatttcatatcaaattcca

SEQ ID NO: 251265 - DNA, 324 bp, Glycine max
  unsure (1)..(324): unsure at all n locations
taagtcacctgcggcatgcaagcttgatatgaagaagtgttgaaaggtgaatacttcttgctttattgttgaccacagagtggtacctggagatatgtcgcggagtcacgagaccttggggacgtcaggtggggtgctattgcccanaaccaagctagaccaatcccgacccaacccgggcatagtcggtcagtgagaacctgtgatgtacctaagcaagcgagctcctggcggtcnacagataaaaggaacacagaccacacaagcaggaggcttgtggtggctagccagctgtgaaacttgattgatatgtgagatatgggc

SEQ ID NO: 251266 - DNA, 307 bp, Glycine max
tgaactataaaactcagctctacaagtccttcacaatatcattttcagagattctaacgaaccacccatatatctaccaaacccataccccgaaattatgaagaaagagtccacccaccctgaaatttgaagcacactcgtgctcaccacttacgattccaaaatgctctctttacgaatggggctaaaggggattaaaggtgaaagcttgaggagtttactggaaatggggaggaaaagggcacggaggaaaagaaacttgtgaaaaaaggagggtgttgaaaaaaaaaaccttttggtataaaaa

SEQ ID NO: 251267 - DNA, 382 bp, Glycine max
agcttgtaatggtaagaaaagagcaacacactctttcatctaataagcagcaagtatttaaaaaaaaattgtgagtataaagtaaaagtgtgtgtgctgctatttaagaaaaagaaaagctaagtgcggaaaggcaagtaatagagctggaataaaaagaaaaaggttgatctatggatgaatgctttcttagaacctaagcttttgcatcctataaaaaccatgaattgattgcagcccatcctcgttacaagcctagtaaagtccttcagattcagtttgtgtgttcttgactgtatggcatgagatgaattgcaaagattgagacttgtgttagttgttgattgttgaataagcctaaacacttatgaatgagtgaaat

SEQ ID NO: 251268 - DNA, 465 bp, Glycine max
cattctccccctttcttatgccatatcttaatactccttgacatcatcaaaatctgcgtgtatttcatctcttgtagatgcaattggctttgatgctctgatgatgatcatgataatgtgttgcaattgatgcacatgggcttttcaataataaaattcatgactatacttcatgataccatgcacagctctcaaatgatcactagaatattaggacgggaattcctaattgaattagcacacgtttggccaattgatttataataaatagtgtttttcagagagtttactctctggtaatccattaccagaggatgtaatctattaccacaggcccaatacatctttatacagctatacaaatttgatttcaaatttaatagctgtaatcattatcaatattgggatcgattacacagttagaaacgcttaatcacatttataacctgtatcatacacaatact

SEQ ID NO: 251269 - DNA, 338 bp, Glycine max
tattcatctggaccaatcacttattatccaatgaatgactattctacagctgaaaaatgaacgacggcattgaataaacagatgaaatcccattataagaatcagacttgggatttagttgagctacttgaaagcagatgactactgcggtggaagtgaatcttcaagatgacatttggatcctccaccgaagaatcatctattgcaaactacgaggtagacaacgatataatagaacgatgggtggactactacaaatattctatccattgtctgaacatctccatacgggtatgttgcccctgatacactctggacatatcattaagcaactctat

SEQ ID NO: 251270 - DNA, 329 bp, Glycine max
  unsure (1)..(329): unsure at all n locations
tggtggcaaaagatacaaactcgtgaagagttggttgaagcttctactaccctcatatggattgcttcagctcttcatgttgntgttaactttggatagtatccatatggagggttaatcctgaatagaccaactattatcaggagattcatgcttgagaaagggtctcttgaatatgatgcattggctaacaaccctgggaaagagtttntgaagcctattactggcaagaaagagaccctcattgaccttacaattatagaaattntatcaaggcacgcatctgatgagttctaccctgggcagagagatggtggtgagtactggac

SEQ ID NO: 251271 - DNA, 424 bp, Glycine max
  unsure (1)..(424): unsure at all n locations
ntgttgtgtcccctaccctcaactggcatctctntattattataattcaagtaattgctcgcagggattttgctgattattcccccaaacttctccactaagatgtcctatgctacctgttcctcatttagaattttcatcaacaacttcctatgaggctcacaatgcatgagcagccccaataaagagatcctgactagcattttattcaattgttcaatcactttgaattcactctgctgattttcaggaattttgttgcttcctcagcacatatttccttcttgctagaattctcctctttctttataggcttttcgataggattctcgatgttcattaccgggtccattatctccctttcatcacattctccttcgctttttctgtgtctttcgaccctgctactatctcgagaagagta

SEQ ID NO: 251272 - DNA, 394 bp, Glycine max
  unsure (1)..(394): unsure at all n locations
tatgatgaaattgcacaaattaagggatcttctgccttatctttaccattatggccaattaagacaatcacgattttctttaattatcttatgaccattcttctctaaatgttttaattacaatttatttatatttatttcttttcctttaacgtgctccatcacatcactataaatatcggcccttggcatcacatttagatacaccaaaacgaagaacatcttcatcttctcttctttctctgagttctccctttattgatttccttgctacgtcttggtccatgttcatacatgaaagatctgttaaatcttattngaattgcgcactacgcatataggtcataaagcacagtgtgtctaacccacatctcgggtctagctcttatatcat

SEQ ID NO: 251273 - DNA, 292 bp, Glycine max
atatatggctgaacacaagcctctcttcattggaccataagattcatgggataatatcttcatttggatgagaatgaaaccccatggatcaatgcatataccacaagggcattgggagtaaaatatgtcttctcgttttatatgcacacgatattttacttgcagccaacgatcaaagtatgctacatgaggtgaaacaaattgactctaaaaaatttgacatgaacgatataggtgatgcatattatggtaatgacattaagattcatagagataaaccttgaggtatttt

SEQ ID NO: 251274 - DNA, 304 bp, Glycine max
aagtgtagaaaggtgaaacttcctgcttttatttgttgaccacagagtggtacctggagatatgtcgcggaggtcaagagaccttggggacgtcaggtggggtgctattgcccaaaaccaagcttgaccaatcccgacccaacccgggcatagtcagtcagtgagaacctgtgatgtacctaaacaggcaagctcctggcagtcaacagataaaaggaacatggaccacacagcaaggaagctggtggtggctggccagctatgaacttgattgatatatgagatatggcctctggtaatcgat
